United States Patent Application Publication US 2005/0228172 A9 - sequence listing, part 78

SEQ ID NO: 346285 - DNA, 277 bp, Homo sapiens
attaaaatagatatttacgaatgtcttcagggtgagtcacagctcttgtttcccagccctccctttctcaagtcttccattcctccattgcaagttttccagcacagatattttccgaagctggattcctgtattggggaagttgttctgcactttaatcaccgacttgtacctacacaaggggagaggttgtaactcgggaagctaatgtaaagagaagctgtaccattcaacmtatgtatatgaaagttgtcatttttactttacatgcatttat

SEQ ID NO: 346286 - DNA, 368 bp, Homo sapiens
ggtcagaaaacaaaagggtgaaattgggtatgacctccctcagtcttacactgatgggatctgtatttttcattcttaattccttatactcagtgtgttgtgaagtcctagggccaagggaakaattttgcatcaagaaacatagtcctggtttcgttcaatgagaacctgagactgttctataatcatgttgggcttttcatgttatgagatagagaattcctattttgaactggcattttacagtgccgaaaggatgttggagtgtttgtatacaatgggagcaaagaagattacatctagaacatgggcaatttactggagctccttaattcactagtgtccaaagataatggttagtgggaaac

SEQ ID NO: 346287 - DNA, 368 bp, Homo sapiens
ggtcagaaaacaaaagggtgaaattgggtatgacctccctcagtcttacactgatgggatctgtatttttcattcttaattccttatactcagtgtgttgtgaagtcctagggccaagggaataattttgcatcaagaaacatagtcctggtttcgttcaatgagaacctgagactgttctataatcatgttgggcttttcatgttaygagatagagaattcctattttgaactggcattttacagtgccgaaaggatgttggagtgtttgtatacaatgggagcaaagaagattacatctagaacatgggcaatttactggagctccttaattcactagtgtccaaagataatggttagtgggaaac

SEQ ID NO: 346288 - DNA, 368 bp, Homo sapiens
ggtcagaaaacaaaagggtgaaattgggtatgacctccctcagtcttacactgatgggatctgtatttttcattcttaattccttatactcagtgtgttgtgaagtcctagggccaagggaataattttgcatcaagaaacatagtcctggtttcgttcaatgagaacctgagactgttctataatcatgttgggcttttcatgttatgagatagagaattcctattttgaactggcattttacagtgccgaaaggatgttggagtgtttgtatacaatgggagcaaagaagattacatctagaacatgggcaayttactggagctccttaattcactagtgtccaaagataatggttagtgggaaac

SEQ ID NO: 346289 - DNA, 314 bp, Homo sapiens
agtcctggtttcgttcaatgagaacctgagactgttctataatcatgttgggcttttcatgttatgagatagagaattcctattttgaactggcattttacagtgccgaaaggatgttggagtgtttgtatacaatgggagcaaagaagattacatctagaacatgggcaatttactggrgctccttaattcactagtgtccaaagataatggttagtgggaaactgtagctgtaaaggatttgcagtctattggaatgaaaattttggtcatactactagtttaaaatttctgatagggaaaggtgttggtag

SEQ ID NO: 346290 - DNA, 610 bp, Homo sapiens
taatcatgttgggcttttcatgttatgagatagagaattcctattttgaactggcattttacagtgccgaaaggatgttggagtgtttgtatacaatgggagcaaagaagattacatctagaacatgggcaatttactggagctccttaattcactagtgtccaaagataatggttagtgggaaactgtagctgtaaaggatttgcagtctattggaatgaaaattttggtcatactactagtttaaaatttctgatagggaaaggtgttggtagaaggtaaagggagcattgataggtgatttgaaaaaatgaaaaagaggagctgactatcaacatagaacatagaccaacagcagaggcagaacctatatcagmtattgtttacttgtgctgattaatgccttccttccctttatcatgctgtctgatctgaagagtactggtggaactaacattacaacctaggttccaggtaggggtatgactgagttgataccagcccaccaccatacagtggcaggtgccctttgtaagtaaggaggatagtaaatgttatcctccttactctaccattgcactgctaagtaggcttttattttgctgtattt

SEQ ID NO: 346291 - DNA, 610 bp, Homo sapiens
taatcatgttgggcttttcatgttatgagatagagaattcctattttgaactggcattttacagtgccgaaaggatgttggagtgtttgtatacaatgggagcaaagaagattacatctagaacatgggcaatttactggagctccttaattcactagtgtccaaagataatggttagtgggaaactgtagctgtaaaggatttgcagtctattggaatgaaaattttggtcatactactagtttaaaatttctgatagggaaaggtgttggtagaaggtaaagggagcattgataggtgatttgaaaaaatgaaaaagaggagctgactatcaacatagaacatagaccaacagcagaggcagaacctatatcagatattgtttacttgtgctgattaatgccttccttccctttatcatgctgtctgatctgaagagtactggtggaactaacattacaacctaggttccaggtagkggtatgactgagttgataccagcccaccaccatacagtggcaggtgccctttgtaagtaaggaggatagtaaatgttatcctccttactctaccattgcactgctaagtaggcttttattttgctgtattt

SEQ ID NO: 346292 - DNA, 610 bp, Homo sapiens
taatcatgttgggcttttcatgttatgagatagagaattcctattttgaactggcattttacagtgccgaaaggatgttggagtgtttgtatacaatgggagcaaagaagattacatctagaacatgggcaatttactggagctccttaattcactagtgtccaaagataatggttagtgggaaactgtagctgtaaaggatttgcagtctattggaatgaaaattttggtcatactactagtttaaaatttctgatagggaaaggtgttggtagaaggtaaagggagcattgataggtgatttgaaaaaatgaaaaagaggagctgactatcaacatagaacatagaccaacagcagaggcagaacctatatcagatattgtttacttgtgctgattaatgccttccttccctttatcatgctgtctgatctgaagagtactggtggaactaacattacaacctaggttccaggtaggggtatgactgagttgataccagcccaccaccatacagtggcaggtgycctttgtaagtaaggaggatagtaaatgttatcctccttactctaccattgcactgctaagtaggcttttattttgctgtattt

SEQ ID NO: 346293 - DNA, 510 bp, Homo sapiens
ctaactttttctagtttcactaaggatatatttggttctttttttctccattttccttgttgcttttttatgtgttctggaataayatgaggaaaaatgctgacttttacagcctgtgtatacaactacctctacagaaaattttaagatatatattagttctttatattcacacaataactttgcaaatagtcctagtgtacaaagcttattccgatatcttgctgtgtttttaaacaaacatatatacatatatgctgtgatagctgatgttgagtgtcaacctgattggattgaaggatgcaaagtattgttcctgggcatgtctgtgagggtgttgccaaaggagattaacatttaagtcagtggattgggagaggcagaccctccttctatctgggtgggcaccatctaatcagctgtcagcacagctagaataaagcaggcagaagaagatggaagaacagacttgctgagtcttctggctttcatctttctcctgtgctggaa

SEQ ID NO: 346294 - DNA, 510 bp, Homo sapiens
ctaactttttctagtttcactaaggatatatttggttctttttttctccattttccttgttgcttttttatgtgttctggaataacatgaggaaaaatgctgacttttacagcctgtgtatacaactacctctacagaaaattttaagatatatattagytctttatattcacacaataactttgcaaatagtcctagtgtacaaagcttattccgatatcttgctgtgtttttaaacaaacatatatacatatatgctgtgatagctgatgttgagtgtcaacctgattggattgaaggatgcaaagtattgttcctgggcatgtctgtgagggtgttgccaaaggagattaacatttaagtcagtggattgggagaggcagaccctccttctatctgggtgggcaccatctaatcagctgtcagcacagctagaataaagcaggcagaagaagatggaagaacagacttgctgagtcttctggctttcatctttctcctgtgctggaa

SEQ ID NO: 346295 - DNA, 510 bp, Homo sapiens
ctaactttttctagtttcactaaggatatatttggttctttttttctccattttccttgttgcttttttatgtgttctggaataacatgaggaaaaatgctgacttttacagcctgtgtatacaactacctctacagaaaattttaagatatatattagttstttatattcacacaataactttgcaaatagtcctagtgtacaaagcttattccgatatcttgctgtgtttttaaacaaacatatatacatatatgctgtgatagctgatgttgagtgtcaacctgattggattgaaggatgcaaagtattgttcctgggcatgtctgtgagggtgttgccaaaggagattaacatttaagtcagtggattgggagaggcagaccctccttctatctgggtgggcaccatctaatcagctgtcagcacagctagaataaagcaggcagaagaagatggaagaacagacttgctgagtcttctggctttcatctttctcctgtgctggaa

SEQ ID NO: 346296 - DNA, 510 bp, Homo sapiens
ctaactttttctagtttcactaaggatatatttggttctttttttctccattttccttgttgcttttttatgtgttctggaataacatgaggaaaaatgctgacttttacagcctgtgtatacaactacctctacagaaaattttaagatatatattagttctttatattcacacaataactttgcaaatagtcctagtgtacaaagcttattccgatatcttgctgtgtttttaaacaaacatatatacatatatgctgtgatagytgatgttgagtgtcaacctgattggattgaaggatgcaaagtattgttcctgggcatgtctgtgagggtgttgccaaaggagattaacatttaagtcagtggattgggagaggcagaccctccttctatctgggtgggcaccatctaatcagctgtcagcacagctagaataaagcaggcagaagaagatggaagaacagacttgctgagtcttctggctttcatctttctcctgtgctggaa

SEQ ID NO: 346297 - DNA, 551 bp, Homo sapiens
caaatatcatcacactagggattagatttaaacatacaaattttgggggrctacaaacattcaatctatatcacttaaggtagagtgaagaaacagggaggacaagaagcatttattttgtgtcattattaaacttctgcattaagctatcttgagcctatactattgttcaaaatctctttattatacaagccattttgaattttgattgtttgcaaccaaaattaacctaataagttaaaatgtactataatgttacatcataatttgtctgtactagtagtatttgctagagtgtttaggggaatacttgcttgttaactttttagtaaatataacactccatgttcaaatacatttgggaaatgctgagcatttcacacttttagagactcaaaacaggcagcacatttttaaaaaataaaaataaaaccaaatagcattgcatttggagaatggtacaaaaaaagagaatttgataaaccagagttatcagaactcagtggatactatgtgttagacattattataagccattaaacattttacaa

SEQ ID NO: 346298 - DNA, 551 bp, Homo sapiens
caaatatcatcacactagggattagatttaaacatacaaattttgggggamtacaaacattcaatctatatcacttaaggtagagtgaagaaacagggaggacaagaagcatttattttgtgtcattattaaacttctgcattaagctatcttgagcctatactattgttcaaaatctctttattatacaagccattttgaattttgattgtttgcaaccaaaattaacctaataagttaaaatgtactataatgttacatcataatttgtctgtactagtagtatttgctagagtgtttaggggaatacttgcttgttaactttttagtaaatataacactccatgttcaaatacatttgggaaatgctgagcatttcacacttttagagactcaaaacaggcagcacatttttaaaaaataaaaataaaaccaaatagcattgcatttggagaatggtacaaaaaaagagaatttgataaaccagagttatcagaactcagtggatactatgtgttagacattattataagccattaaacattttacaa

SEQ ID NO: 346299 - DNA, 551 bp, Homo sapiens
caaatatcatcacactagggattagatttaaacatacaaattttgggggactacaaacattcaatctatatcacttaaggtagagtgaagaaacagggaggacaagaagcatttattttgtgtcattattaaacttctgcattaarctatcttgagcctatactattgttcaaaatctctttattatacaagccattttgaattttgattgtttgcaaccaaaattaacctaataagttaaaatgtactataatgttacatcataatttgtctgtactagtagtatttgctagagtgtttaggggaatacttgcttgttaactttttagtaaatataacactccatgttcaaatacatttgggaaatgctgagcatttcacacttttagagactcaaaacaggcagcacatttttaaaaaataaaaataaaaccaaatagcattgcatttggagaatggtacaaaaaaagagaatttgataaaccagagttatcagaactcagtggatactatgtgttagacattattataagccattaaacattttacaa

SEQ ID NO: 346300 - DNA, 532 bp, Homo sapiens
ttaccagaacttatatttgcatatgtgtagaaactcaaggtttacaaagcatatccacggtctttattgtatttgatgctccacaaaatgttgcaagkgactcagacaaagtcttgtttgtactatgttacaggtgagaatgctgacatgtagaggggcaagtacttacctgatcacgttgtcttagtatgatgaagcctcacttaaacccatgatctcatgtcttcccttaaactgatgcactgaaatacagtcaggtaaaataaagagttaggggcacattttaaaatacatttaaggtgcatcaaagatttaaaccaatcacttgtaacatctctatttgtcaaactcattggtgatcattagcatttagagagacccaggaaaatcgcaagattctaaataattttcaaaccatagtagaggatactttgtttactgttatttatgtattaaatatcttttaatatactatagctttataagaacagataatccatttttggaatttgtgttttaattggccaaagag

SEQ ID NO: 346301 - DNA, 532 bp, Homo sapiens
ttaccagaacttatatttgcatatgtgtagaaactcaaggtttacaaagcatatccacggtctttattgtatttgatgctccacaaaatgttgcaagggactcagacaaagtcttgtttgtactatgttacaggtgagaatgctgacatgtagaggggcaagtacttacctgatcacgttgtcttagtatgatgaagcctcacttaaacccatgatctcatgtcttcccttaaactgatgcactgaaatacagtcaggtaaaataaagagttaggggcacattttaaaatacatttaaggtgcakcaaagatttaaaccaatcacttgtaacatctctatttgtcaaactcattggtgatcattagcatttagagagacccaggaaaatcgcaagattctaaataattttcaaaccatagtagaggatactttgtttactgttatttatgtattaaatatcttttaatatactatagctttataagaacagataatccatttttggaatttgtgttttaattggccaaagag

SEQ ID NO: 346302 - DNA, 532 bp, Homo sapiens
ttaccagaacttatatttgcatatgtgtagaaactcaaggtttacaaagcatatccacggtctttattgtatttgatgctccacaaaatgttgcaagggactcagacaaagtcttgtttgtactatgttacaggtgagaatgctgacatgtagaggggcaagtacttacctgatcacgttgtcttagtatgatgaagcctcacttaaacccatgatctcatgtcttcccttaaactgatgcactgaaatacagtcaggtaaaataaagagttaggggcacattttaaaatacatttaaggtgcatcaaagatttaaaccaatcacttgtaacatctctatttgtcaaactcattggtgatcattagcatttagagagacccaggamaatcgcaagattctaaataattttcaaaccatagtagaggatactttgtttactgttatttatgtattaaatatcttttaatatactatagctttataagaacagataatccatttttggaatttgtgttttaattggccaaagag

SEQ ID NO: 346303 - DNA, 613 bp, Homo sapiens
ctggttcacggactcatggtattctgccctactcctgctgcttggctatccaccagttaccaaaagctgaagytgatgcaaccacgtgaaatttctacaagaccctcccctctttgggctcccatcacattatcactactgccagatgtcatcagcgtgagagaatcagtggtggtccacaggagcatcttgttgtccctccctaaatgataccagcaccactttcctcccaaaatcaatgctcccaaccacaataccccccttgacttcacttgtgttcccagcaagccatcaaaactagcaccaaggctctctctaggaggctataaatatgtatgttttccttttttctgtctttaaatggtgagttaacacaaacagacctacgtacaccagaccccaaggtatcaatctggatcccttcacaggatccttttccattcacagaaccaagaaaaaaaagcaaactctgaagcccagcccttccctcctctattccggagcaggcagctgatgggacgcaaatggggctgctgagcttcagggtggaaatggaagccagtgccttgtgctccttgtgatgtgaaaagtgttgcagctgcgcagagaaaca

SEQ ID NO: 346304 - DNA, 613 bp, Homo sapiens
ctggttcacggactcatggtattctgccctactcctgctgcttggctatccaccagttaccaaaagctgaagctgatgcaaccacgtgaaatttctacaagaccctcccctctttgggctcccatcacattrtcactactgccagatgtcatcagcgtgagagaatcagtggtggtccacaggagcatcttgttgtccctccctaaatgataccagcaccactttcctcccaaaatcaatgctcccaaccacaataccccccttgacttcacttgtgttcccagcaagccatcaaaactagcaccaaggctctctctaggaggctataaatatgtatgttttccttttttctgtctttaaatggtgagttaacacaaacagacctacgtacaccagaccccaaggtatcaatctggatcccttcacaggatccttttccattcacagaaccaagaaaaaaaagcaaactctgaagcccagcccttccctcctctattccggagcaggcagctgatgggacgcaaatggggctgctgagcttcagggtggaaatggaagccagtgccttgtgctccttgtgatgtgaaaagtgttgcagctgcgcagagaaaca

SEQ ID NO: 346305 - DNA, 613 bp, Homo sapiens
ctggttcacggactcatggtattctgccctactcctgctgcttggctatccaccagttaccaaaagctgaagctgatgcaaccacgtgaaatttctacaagaccctcccctctttgggctcccatcacattatcactactgccagatgtcatcagcgtgagagaatcagtggtggtccacaggagcatcttgttgtccctccctaaatgataccagcaccactttcctcccaaaatcaatgctcccaaccacaataccccccttgacttcacttgtgttcccagcaagccatcaaaactagcaccaaggctctctctaggaggctataaatatgtatgttttccttttttctgtctttaaatggtgagttaacacaaacagacctacgtacaccagaccccaaggtatcaatctggatcccttcacaggatcctttkccattcacagaaccaagaaaaaaaagcaaactctgaagcccagcccttccctcctctattccggagcaggcagctgatgggacgcaaatggggctgctgagcttcagggtggaaatggaagccagtgccttgtgctccttgtgatgtgaaaagtgttgcagctgcgcagagaaaca

SEQ ID NO: 346306 - DNA, 511 bp, Homo sapiens
cttggggctctttcattgactcaggaaatatttctgcttcccacccaggacttctgttgtctcttcctcccttctcctgccctgctctcaggactcttagatgtagcccaggtttgcttccacacagttgacattggcggtgcacggtcttctcccctctacgccctcagatctccacgcctgtgcctatgacacgtgccaccwgcacctgtgttgccaagcctggctcctcatccgtggccactcctgcccccacaacctgccagtcctgcctcctttttgcctgcctcctgcctatctttacttcactgatttctttggctggaaaatatttctacaacttcccctcccacactcacctggggctatgacattgttgtgggcactggttgggcctcgcccctgccacctaacaagtacatcctacaggcccaggagggcattatctgtggttttgaatttctagtgtctcgaactgtactggcccagagaggacctcaaatatggaaaa

SEQ ID NO: 346307 - DNA, 511 bp, Homo sapiens
cttggggctctttcattgactcaggaaatatttctgcttcccacccaggacttctgttgtctcttcctcccttctcctgccctgctctcaggactcttagatgtagcccaggtttgcttccacacagttgacattggcggtgcacggtcttctcccctctacgccctcagatctccacgcctgtgcctatgacacgtgccaccagcacctgtgttgccaagcctggctcctcatccgtggccactcctgcccccacaacctgccagtyctgcctcctttttgcctgcctcctgcctatctttacttcactgatttctttggctggaaaatatttctacaacttcccctcccacactcacctggggctatgacattgttgtgggcactggttgggcctcgcccctgccacctaacaagtacatcctacaggcccaggagggcattatctgtggttttgaatttctagtgtctcgaactgtactggcccagagaggacctcaaatatggaaaa

SEQ ID NO: 346308 - DNA, 511 bp, Homo sapiens
cttggggctctttcattgactcaggaaatatttctgcttcccacccaggacttctgttgtctcttcctcccttctcctgccctgctctcaggactcttagatgtagcccaggtttgcttccacacagttgacattggcggtgcacggtcttctcccctctacgccctcagatctccacgcctgtgcctatgacacgtgccaccagcacctgtgttgccaagcctggctcctcatccgtggccactcctgcccccacaacctgccagtcctgcctcctttttgcctgcctcctgcctatctttacttcactgatttctttggctggaaaatatttctacaacttcccctcccacactcacctggggctatgacattgttgtgsgcactggttgggcctcgcccctgccacctaacaagtacatcctacaggcccaggagggcattatctgtggttttgaatttctagtgtctcgaactgtactggcccagagaggacctcaaatatggaaaa

SEQ ID NO: 346309 - DNA, 557 bp, Homo sapiens
ctcctgggccgcacataaaatacactaatgctaacaacagctgatggggttaaaaaaaaaaagttttgtgcataattttcatgctacccaccaccacagataggtggaaaagtccttgtaggcaaagggttggacaccggctgatctagtgtcttgtcgtccgttttggctttctccctgattccagaatgcaggtagagatgtagagacatgctctcaggacagctgttgagataaaaaaattcgttgtcatttattcccaagcacagctgtttctcatkgcattgaaaaagtctccattcaaactgctgtcacatataaaatctatttatgtaagtctgtatttttctgttgtcttggcctttgtaggcagtagtgtgttttaaccgagcaaactgtccttccaaataatgaagccgaagtcagcctacctacttgccatttttcttccccttccatttttgtaacctcagaataattgtaagaatgaattaagatttgtgtttaaggccaggcacagtgtctcaggcctgcaatctcagcactttgggaggcgg

SEQ ID NO: 346310 - DNA, 533 bp, Homo sapiens
gtaattaaactctaaattattattacccctagtatactggggaatgagtgtgtgttccaaatgaaaaaaacttgggatgtctaatgagatgctgttttctgtcgcagaaaatctatgtaaaatgttttttctcacgtgtacactgttgatatttgagacagcacatgttaacacttcaagaagtaaaataaatgtgttgattatatccacagttttcatatttattaactatatattttgtttttaatgtaatgcctattgaaaaacctgtaaatagttgtttcttaaaattgataaatactgcctaagatttttctgtatattttcatatttcaattttcctgtgaggttagaatgaacacttttagctaagacatttgggcctccaaatcctaaacctttcagaatgttagtttattatttggtttttacctaaattattttctgcttattcaagatccttaggtctatccagttacrtttttatttttttatttttatttttttatttggaaacaaagtctcactctgtt

SEQ ID NO: 346311 - DNA, 401 bp, Homo sapiens
tggagggccaacttttcatatgcgagctctgcaaggttgactgtgggacctgagtatgtgcagacttcggtatatgcagggctcctgaatgcaataccccactaatactgagggatgactgtatatgtctctatctatctactctatcacatatatatatatatatatayacacacacacacacacacaaatatgtgtatatatatatgtatgtgtgtgtgtgtgtatatatatatatatatatatatatatatatatatatatatatatatacttcctatattactttgctagggttgttataacaattactgcagactgggtgagttaaacaacagaaatttattttctcacggttctggaggctagaagtgtgagctcaaggcatcagatgtgttaat

SEQ ID NO: 346312 - DNA, 401 bp, Homo sapiens
tggagggccaacttttcatatgcgagctctgcaaggttgactgtgggacctgagtatgtgcagacttcggtatatgcagggctcctgaatgcaataccccactaatactgagggatgactgtatatgtctctatctatctactctatcacatatatatatatatatatatacacacacacacacacacaaatatgtgtatatatatatgtatgtgtgtgtgtgtgtatawatatatatatatatatatatatatatatatatatatatatatacttcctatattactttgctagggttgttataacaattactgcagactgggtgagttaaacaacagaaatttattttctcacggttctggaggctagaagtgtgagctcaaggcatcagatgtgttaat

SEQ ID NO: 346313 - DNA, 659 bp, Homo sapiens
tattaagctggtataaaagatttttgaaaaattaagtcagtgattaaaaatcaagactacagtaatctctcaatttmttttctcaaacatgaaatgctgacccagaaaaaaggtaagtaaaaattggtggtctatattatcaaactgtcaaatgaggtatatttatacctcaatatcttggatgatatcagggggaggtagggaggttaaaaaaaaatagtacttccagtcatgaaagaaaataaagtataatctagaattccttaaaatccttgattagtctgaattaaacagccatattccagaatattaaatatagaatatgaagaaaaactgtcatctccagtcaatgaagtattttaacttttgagttaatactttttcaaattaatttttttctcttcaaaatgcatcacactacttaactcacttcaaggactggcacagccatcaaccaatgtcatgggggaaaaagccttgtcattttaaggtattaaacagacaatgaaatctgccacaattttggtatttcttctccataagaacataataaattaatggagttttttcttttgcttttttctaagcaacaaagttttatgatatcatgaatgaaaaggtccttaattaccttttggtctacatgtcaaggacttctc

SEQ ID NO: 346314 - DNA, 659 bp, Homo sapiens
tattaagctggtataaaagatttttgaaaaattaagtcagtgattaaaaatcaagactacagtaatctctcaatttcttttctcaaacatgaaatgctgacccagaaaaaaggtaagtaaaaattggtggtctatattaycaaactgtcaaatgaggtatatttatacctcaatatcttggatgatatcagggggaggtagggaggttaaaaaaaaatagtacttccagtcatgaaagaaaataaagtataatctagaattccttaaaatccttgattagtctgaattaaacagccatattccagaatattaaatatagaatatgaagaaaaactgtcatctccagtcaatgaagtattttaacttttgagttaatactttttcaaattaatttttttctcttcaaaatgcatcacactacttaactcacttcaaggactggcacagccatcaaccaatgtcatgggggaaaaagccttgtcattttaaggtattaaacagacaatgaaatctgccacaattttggtatttcttctccataagaacataataaattaatggagttttttcttttgcttttttctaagcaacaaagttttatgatatcatgaatgaaaaggtccttaattaccttttggtctacatgtcaaggacttctc

SEQ ID NO: 346315 - DNA, 659 bp, Homo sapiens
tattaagctggtataaaagatttttgaaaaattaagtcagtgattaaaaatcaagactacagtaatctctcaatttcttttctcaaacatgaaatgctgacccagaaaaaaggtaagtaaaaattggtggtctatattatcaaactgtcaaatgaggtatatttatacctcaatatcttggatgatatcagggggaggtagggaggttaaaaaawaatagtacttccagtcatgaaagaaaataaagtataatctagaattccttaaaatccttgattagtctgaattaaacagccatattccagaatattaaatatagaatatgaagaaaaactgtcatctccagtcaatgaagtattttaacttttgagttaatactttttcaaattaatttttttctcttcaaaatgcatcacactacttaactcacttcaaggactggcacagccatcaaccaatgtcatgggggaaaaagccttgtcattttaaggtattaaacagacaatgaaatctgccacaattttggtatttcttctccataagaacataataaattaatggagttttttcttttgcttttttctaagcaacaaagttttatgatatcatgaatgaaaaggtccttaattaccttttggtctacatgtcaaggacttctc

SEQ ID NO: 346316 - DNA, 659 bp, Homo sapiens
tattaagctggtataaaagatttttgaaaaattaagtcagtgattaaaaatcaagactacagtaatctctcaatttcttttctcaaacatgaaatgctgacccagaaaaaaggtaagtaaaaattggtggtctatattatcaaactgtcaaatgaggtatatttatacctcaatatcttggatgatatcagggggaggtagggaggttaaaaaaaaatagtwcttccagtcatgaaagaaaataaagtataatctagaattccttaaaatccttgattagtctgaattaaacagccatattccagaatattaaatatagaatatgaagaaaaactgtcatctccagtcaatgaagtattttaacttttgagttaatactttttcaaattaatttttttctcttcaaaatgcatcacactacttaactcacttcaaggactggcacagccatcaaccaatgtcatgggggaaaaagccttgtcattttaaggtattaaacagacaatgaaatctgccacaattttggtatttcttctccataagaacataataaattaatggagttttttcttttgcttttttctaagcaacaaagttttatgatatcatgaatgaaaaggtccttaattaccttttggtctacatgtcaaggacttctc

SEQ ID NO: 346317 - DNA, 574 bp, Homo sapiens
tatattgatttttaaatgcaagcatattatttctttacattaaaatttttagatttaaaaagtgtttctggaagctcaatctagaaaagaaagatttaattctttacacccagtagggmaaaacaaatcagacagaaatgatatatgaatgtaaatgcaattttatttaccactttgatgctccaaatggcactgccaggaagctgcctgggtttaaaaatttcccgacctcctgaaatgtctggggaccaggaaggtgggctcactgtattatgggtactccaagcctcctaggatatggcagttgagaaaatagatgtgtaaaactcagcaacataaaaggtcaaagccagcaactaaggaattttagaacagcaaaaacaaatgcaaacatatggaaatttaggacaaattgcttcaaggaaggcaaaataagctaatcactaacagtgatttaaacatttaagtataacaaataacttaaatgattgctgctacagagacatcactacaatgaaacattaaaaattaaggtttatatgacatcaacattgactcatgaactgcaattact

SEQ ID NO: 346318 - DNA, 603 bp, Homo sapiens
tatttctttacattaaaatttttagatttaaaaagtgtttctggaagctcaatctagaaaagaaagatttaattctttacacccagtagggcaaaacaaatcagacagaaatgatatatgaaygtaaatgcaattttatttaccactttgatgctccaaatggcactgccaggaagctgcctgggtttaaaaatttcccgacctcctgaaatgtctggggaccaggaaggtgggctcactgtattatgggtactccaagcctcctaggatatggcagttgagaaaatagatgtgtaaaactcagcaacataaaaggtcaaagccagcaactaaggaattttagaacagcaaaaacaaatgcaaacatatggaaatttaggacaaattgcttcaaggaaggcaaaataagctaatcactaacagtgatttaaacatttaagtataacaaataacttaaatgattgctgctacagagacatcactacaatgaaacattaaaaattaaggtttatatgacatcaacattgactcatgaactgcaattactgcaccaaaaagtaaataaaagtcaatcacactttaagaattaacactagaagaaag

SEQ ID NO: 346319 - DNA, 453 bp, Homo sapiens
gacagaaatgatatatgaatgtaaatgyaattttatttaccactttgatgctccaaatggcactgccaggaagctgcctgggtttaaaaatttcccgacctcctgaaatgtctggggaccaggaaggtgggctcactgtattatgggtactccaagcctcctaggatatggcagttgagaaaatagatgtgtaaaactcagcaacataaaaggtcaaagccagcaactaaggaattttagaacagcaaaaacaaatgcaaacatatggaaatttaggacaaattgcttcaaggaaggcaaaataagctaatcactaacagtgatttaaacatttaagtataacaaataacttaaatgattgctgctacagagacatcactacaatgaaacattaaaaattaaggtttatatgacatcaacattgactcatgaactgcaattactgcaccaaaa

SEQ ID NO: 346320 - DNA, 603 bp, Homo sapiens
tatttctttacattaaaatttttagatttaaaaagtgtttctggaagctcaatctagaaaagaaagatttaattctttacacccagtagggcaaaacaaatcagacagaaatgatatatgaatgtaaatgcaattttatttaccaytttgatgctccaaatggcactgccaggaagctgcctgggtttaaaaatttcccgacctcctgaaatgtctggggaccaggaaggtgggctcactgtattatgggtactccaagcctcctaggatatggcagttgagaaaatagatgtgtaaaactcagcaacataaaaggtcaaagccagcaactaaggaattttagaacagcaaaaacaaatgcaaacatatggaaatttaggacaaattgcttcaaggaaggcaaaataagctaatcactaacagtgatttaaacatttaagtataacaaataacttaaatgattgctgctacagagacatcactacaatgaaacattaaaaattaaggtttatatgacatcaacattgactcatgaactgcaattactgcaccaaaaagtaaataaaagtcaatcacactttaagaattaacactagaagaaag

SEQ ID NO: 346321 - DNA, 603 bp, Homo sapiens
tatttctttacattaaaatttttagatttaaaaagtgtttctggaagctcaatctagaaaagaaagatttaattctttacacccagtagggcaaaacaaatcagacagaaatgatatatgaatgtaaatgcaattttatttaccactttgatgctccaaatggcactgccaggaagctgcctgggtttaaaaatttcccgacctcctgaaatgtctggggaccaggaaggtgggctcactgtattatgggtactccaagcctcctaggatatggcagttgagaaaatagatgtgtaaaactcagcaacataaaaggtcaaagccagcaactaaggaattttagaacagcaaaaacaaatgcaaacatatggaaatttaggacaaattgcttcaaggaaggcaaaataagctaatcactaacagtgayttaaacatttaagtataacaaataacttaaatgattgctgctacagagacatcactacaatgaaacattaaaaattaaggtttatatgacatcaacattgactcatgaactgcaattactgcaccaaaaagtaaataaaagtcaatcacactttaagaattaacactagaagaaag

SEQ ID NO: 346322 - DNA, 645 bp, Homo sapiens
acacccagtagggcaaaacaaatcagacagaaatgatatatgaatgtaaatgcaattttatttaccactttgatgctccaaatggcactgccaggaagctgcctgggtttaaaaatttcccgacctcctgaaatgtctggggaccaggaaggtgggctcactgtattatgggtactccaagcctcctaggatatggcagttgagaaaatagatgtgtaaaactcagcaacataaaaggtcaaagccagcaactaaggaattttagaacagcaaaaacaaatgcaaacatatggaaatttaggacaaattgcttcaaggaaggcaaaataagctaatcactaacagtgatttaaacatttaagtataacaaataacttaaatgwttgctgctacagagacatcactacaatgaaacattaaaaattaaggtttatatgacatcaacattgactcatgaactgcaattactgcaccaaaaagtaaataaaagtcaatcacactttaagaattaacactagaagaaagtattggggggttatttttcttctaacaactatcactctacttaaaaggagaaatggataaccataaggaattctatattctatagctataaacaaccaaaaccagtaggccaaagaatgc

SEQ ID NO: 346323 - DNA, 453 bp, Homo sapiens
gacagaaatgatatatgaatgtaaatgcaattttatttaccactttgatgctccaaatggcactgccaggaagctgcctgggtttaaaaatttcccgacctcctgaaatgtctggggaccaggaaggtgggctcactgtattatgggtactccaagcctcctaggatatggcagttgagaaaatagatgtgtaaaactcagcaacataaaaggtcaaagccagcaactaaggaattttagaacagcaaaaacaaatgcaaacatatggaaatttaggacaaattgcttcaaggaaggcaaaataagctaatcactaacagtgatttaaacatttaagtataacaaataacttaaatgattgctgctacagagacatcaytacaatgaaacattaaaaattaaggtttatatgacatcaacattgactcatgaactgcaattactgcaccaaaa

SEQ ID NO: 346324 - DNA, 576 bp, Homo sapiens
cattaaaatttttagatttaaaaagtgtttctggaagctcaatctagaaaagaaagatttaattctttacacccagtagggcaaaacaaatcagacagaaatgatatatgaatgtaaatgcaattttatttaccactttgatgctccaaatggcactgccaggaagctgcctgggtttaaaaatttcccgacctcctgaaatgtctggggaccaggaaggtgggctcactgtattatgggtactccaagcctcctaggatatggcagttgagaaaatagatgtgtaaaactcagcaacataaaaggtcaaagccagcaactaaggaattttagaacagcaaaaacaaatgcaaacatatggaaatttaggacaaattgcttcaaggaaggcaaaataagctaatcactaacagtgatttaaacatttaagtataacaaataacttaaatgattgctgctacagagacatcactacaatgaaacattaaamattaaggtttatatgacatcaacattgactcatgaactgcaattactgcaccaaaaagtaaataaaagtcaatcacactttaagaa

SEQ ID NO: 346325 - DNA, 453 bp, Homo sapiens
gacagaaatgatatatgaatgtaaatgcaattttatttaccactttgatgctccaaatggcactgccaggaagctgcctgggtttaaaaatttcccgacctcctgaaatgtctggggaccaggaaggtgggctcactgtattatgggtactccaagcctcctaggatatggcagttgagaaaatagatgtgtaaaactcagcaacataaaaggtcaaagccagcaactaaggaattttagaacagcaaaaacaaatgcaaacatatggaaatttaggacaaattgcttcaaggaaggcaaaataagctaatcactaacagtgatttaaacatttaagtataacaaataacttaaatgattgctgctacagagacatcactacaatgaaacattaaaaattarggtttatatgacatcaacattgactcatgaactgcaattactgcaccaaaa

SEQ ID NO: 346326 - DNA, 603 bp, Homo sapiens
tatttctttacattaaaatttttagatttaaaaagtgtttctggaagctcaatctagaaaagaaagatttaattctttacacccagtagggcaaaacaaatcagacagaaatgatatatgaatgtaaatgcaattttatttaccactttgatgctccaaatggcactgccaggaagctgcctgggtttaaaaatttcccgacctcctgaaatgtctggggaccaggaaggtgggctcactgtattatgggtactccaagcctcctaggatatggcagttgagaaaatagatgtgtaaaactcagcaacataaaaggtcaaagccagcaactaaggaattttagaacagcaaaaacaaatgcaaacatatggaaatttaggacaaattgcttcaaggaaggcaaaataagctaatcactaacagtgatttaaacatttaagtataacaaataacttaaatgattgctgctacagagacatcactacaatgaaacattaaaaattaaggtttatatgacatcaacattgactcatgaactgcaattactgcaccaaaaagtaaataaaagtmaatcacactttaagaattaacactagaagaaag

SEQ ID NO: 346327 - DNA, 551 bp, Homo sapiens
tagctaatccctaatcaatgttatttctgtaaaccactgggagttcctgacaagcaactttctaccagccaactccctgtctccctttttggtctttacaaacctgcttgtaacaaaggccaaacagaacccatatccaagattgcttggctctgagccttctgggcaactatcctcacactggctcaaacaaactctttaaatcatatkttgtgcttaagccccttccttctaggtcgatgtttttggccctgggagcaggattcagagcaacttatctctgaccatctgaccgtcctctcaaaggcctccagggtggctacatagtaggtagaatttgattggtgagatcagtttgcagtccgggaagagacagtctctggtgtgtgtctttgaagaagtgctttttcttcagagagagagagagagagagggcaggttggtttttgtgcctcacagggtgtgtctcacacaatagagtcatacatattcagcaggtttggggaaacgccacttctgaggggtattgagctcatgtgcaacgggtaaac

SEQ ID NO: 346328 - DNA, 551 bp, Homo sapiens
tagctaatccctaatcaatgttatttctgtaaaccactgggagttcctgacaagcaactttctaccagccaactccctgtctccctttttggtctttacaaacctgcttgtaacaaaggccaaacagaacccatatccaagattgcttggctctgagccttctgggcaactatcctcacactggctcaaacaaactctttaaatcatattttgtgcttaagccccttccttctaggtcgatgtttttggccctgggagcaggattcagagcaacttatctctgaccatctgaccgtcctctcaaaggcctccagggtggctacatagtaggtagaatttkattggtgagatcagtttgcagtccgggaagagacagtctctggtgtgtgtctttgaagaagtgctttttcttcagagagagagagagagagagggcaggttggtttttgtgcctcacagggtgtgtctcacacaatagagtcatacatattcagcaggtttggggaaacgccacttctgaggggtattgagctcatgtgcaacgggtaaac

SEQ ID NO: 346329 - DNA, 551 bp, Homo sapiens
tagctaatccctaatcaatgttatttctgtaaaccactgggagttcctgacaagcaactttctaccagccaactccctgtctccctttttggtctttacaaacctgcttgtaacaaaggccaaacagaacccatatccaagattgcttggctctgagccttctgggcaactatcctcacactggctcaaacaaactctttaaatcatattttgtgcttaagccccttccttctaggtcgatgtttttggccctgggagcaggattcagagcaacttatctctgaccatctgaccgtcctctcaaaggcctccagggtggctacatagtaggtagaatttgattggtgagatcagtttgcagtccgggaagagacagtctctggtgtgtgtctttgaagaagtgctttttcttcagagagagagagagagagagggcaggttggtttttgtgcctcacagggtgtgtmtcacacaatagagtcatacatattcagcaggtttggggaaacgccacttctgaggggtattgagctcatgtgcaacgggtaaac

SEQ ID NO: 346330 - DNA, 551 bp, Homo sapiens
tagctaatccctaatcaatgttatttctgtaaaccactgggagttcctgacaagcaactttctaccagccaactccctgtctccctttttggtctttacaaacctgcttgtaacaaaggccaaacagaacccatatccaagattgcttggctctgagccttctgggcaactatcctcacactggctcaaacaaactctttaaatcatattttgtgcttaagccccttccttctaggtcgatgtttttggccctgggagcaggattcagagcaacttatctctgaccatctgaccgtcctctcaaaggcctccagggtggctacatagtaggtagaatttgattggtgagatcagtttgcagtccgggaagagacagtctctggtgtgtgtctttgaagaagtgctttttcttcagagagagagagagagagagggcaggttggtttttgtgcctcacagggtgtgtctcacacaatagagtcatacatattcagcaggtttggggaaacgccayttctgaggggtattgagctcatgtgcaacgggtaaac

SEQ ID NO: 346331 - DNA, 553 bp, Homo sapiens
taatattccactgtaggaatataccacattttgcttatgcagtcacctattgaaggacatcttggttgcttccaagttgtggcagtcttcatttctttctttctttcttyctttctttctttctttctttcttcttctttttttttttttttttgagacagagtcttgctctgtcacccaggctggagtgaagtggcacaatctcagctcattgcaacctccgcctcccaggttcaagtgattctcttcctcagcctctggagtagctgggattacaggtgtgcaccaccacgcctggttagtcttcaggaatatttacaggactgtatagaattaggagccatcaaaggggatccctgaattctttctgtttttcttacaaataccagttttaaggtcaagatttactaccccatgcaacagtgtagccgcattttaaattttaaatttttgactgtttgtttaaaggtctcaggcaacctaaaaggctagatagaagtctctcatcctctaatgaaggatggattgtaaaatggaatactgctaagactct

SEQ ID NO: 346332 - DNA, 553 bp, Homo sapiens
taatattccactgtaggaatataccacattttgcttatgcagtcacctattgaaggacatcttggttgcttccaagttgtggcagtcttcatttctttctttctttcttcctttctttctttctttctttcttcttctttttttttttttttttgagacagagtcttgctctgtcacccaggctggagtgaagtggcacaatctcagctcattgcaacctccgcctcccaggttcaagtgattctcttcctcagcctctggagtagctgggattacaggtgtgcaccaccacgcctggttagtcttcaggaatatttacaggactgtatagaattaggagccatcaaaggggatccctgaattctttctgtttttcttacaaataccagttttaaggtcaagatttactaccccatgcmacagtgtagccgcattttaaattttaaatttttgactgtttgtttaaaggtctcaggcaacctaaaaggctagatagaagtctctcatcctctaatgaaggatggattgtaaaatggaatactgctaagactct

SEQ ID NO: 346333 - DNA, 553 bp, Homo sapiens
taatattccactgtaggaatataccacattttgcttatgcagtcacctattgaaggacatcttggttgcttccaagttgtggcagtcttcatttctttctttctttcttcctttctttctttctttctttcttcttctttttttttttttttttgagacagagtcttgctctgtcacccaggctggagtgaagtggcacaatctcagctcattgcaacctccgcctcccaggttcaagtgattctcttcctcagcctctggagtagctgggattacaggtgtgcaccaccacgcctggttagtcttcaggaatatttacaggactgtatagaattaggagccatcaaaggggatccctgaattctttctgtttttcttacaaataccagttttaaggtcaagatttactaccccatgcaacagtgtagccgcattttaaattttaaatttttgactgtttgtttaaaggtctcaggcaacctaaaaggctagatagaagtctctcatcctctaaygaaggatggattgtaaaatggaatactgctaagactct

SEQ ID NO: 346334 - DNA, 258 bp, Homo sapiens
tcctgcagtcccagctacttgggaggctgaggcagcagaatcgcttgaaccctgaaggcgaaggttgcagtgagctgagttgscgcgactgcatccagccttggcaacactgtgagactctgtctcttaaaaaaaataaaaaaataaaaataaaaaaaatttaaaagttcgtgattaacacctctgttagcctctgatctttataataattatcacacacacacaaaccaaacaccacacatagaggaaacagtaaaa

SEQ ID NO: 346335 - DNA, 258 bp, Homo sapiens
tcctgcagtcccagctacttgggaggctgaggcagcagaatcgcttgaaccctgaaggcgaaggttgcagtgagctgagttgccgygactgcatccagccttggcaacactgtgagactctgtctcttaaaaaaaataaaaaaataaaaataaaaaaaatttaaaagttcgtgattaacacctctgttagcctctgatctttataataattatcacacacacacaaaccaaacaccacacatagaggaaacagtaaaa

SEQ ID NO: 346336 - DNA, 258 bp, Homo sapiens
tcctgcagtcccagctacttgggaggctgaggcagcagaatcgcttgaaccctgaaggcgaaggttgcagtgagctgagttgccgcgactgcatccagccttggcaacactgygagactctgtctcttaaaaaaaataaaaaaataaaaataaaaaaaatttaaaagttcgtgattaacacctctgttagcctctgatctttataataattatcacacacacacaaaccaaacaccacacatagaggaaacagtaaaa

SEQ ID NO: 346337 - DNA, 258 bp, Homo sapiens
tcctgcagtcccagctacttgggaggctgaggcagcagaatcgcttgaaccctgaaggcgaaggttgcagtgagctgagttgccgcgactgcatccagccttggcaacactgtgagactctgtctcttaaaaaaamtaaaaaaataaaaataaaaaaaatttaaaagttcgtgattaacacctctgttagcctctgatctttataataattatcacacacacacaaaccaaacaccacacatagaggaaacagtaaaa

SEQ ID NO: 346338 - DNA, 587 bp, Homo sapiens
gcctcggcctcccaaagtgctgggattatagrtgtgagccaacgtgcccagccaactatgtaatattttaattgtgtagtgataaccctcatcaaaagaagtattcattatggtcagtgtactctgcttatttaccactgaagcttaacacaaaattgttgaaataaacatgcatattgaagtacttagctagctattgaggcaatacaggtttctagatttactcatttttttcactgtacacacatgtcgtgtgtgtcatgataaacccatgtgtgtgcatatattgattaaatattatatttctttttacttttattattattattgagaaaagatctcactctgtcgcccaggctggagtgcagcggcacaatctcggctgcctgcagccttgtcctcccaaagccctagaccctgtaacataatggaatatgtatgtttctaatttgtgcaatatggaagcaggaatactacatagaactgtcatcttttcctattgcatttattttggtgtggaaaaatataataattggcttcagtcagtaagtctatttcattcaagaatatttaaatataatccaaac

SEQ ID NO: 346339 - DNA, 395 bp, Homo sapiens
tgataacttgaaataagaatgggagaaaaggtcaatatgaattcttaaaatgttgaaggctgggaataagaagtaatatatcacagaatctgatagaaaaatttttatttattttatgggagaaaatgggagactaacagayaataggaataggaaagaatagaaatagcaaaaagaagtgtatctgcaattattaatataatacaagaggacattgtgtagagatatttaaagaaagattgatgaaatttagatttatggagaaatatcctattaaagacattatttataatcaactgttcatcattattatataattctgacattttttaggttataaatgtaaggcagaaagatctaatataaaatgtataaatgggacaacatataatttt

SEQ ID NO: 346340 - DNA, 395 bp, Homo sapiens
tgataacttgaaataagaatgggagaaaaggtcaatatgaattcttaaaatgttgaaggctgggaataagaagtaatatatcacagaatctgatagaaaaatttttatttattttatgggagaaaatgggagactaacagataataggaataggaaagaatagaaatagcaaaaagaagtgtatctgcaattattaatataatacaagaggacattgtgtagagatatttaaagaaagattgatgaaatttagatttatggagaaatatcctawtaaagacattatttataatcaactgttcatcattattatataattctgacattttttaggttataaatgtaaggcagaaagatctaatataaaatgtataaatgggacaacatataatttt

SEQ ID NO: 346341 - DNA, 389 bp, Homo sapiens
gaagtgtatctgcaattattaatataatacaagaggacattgtgtagagatatttaaagaaagattgatgaaatttagatttatggagaaatatcctattaaagacattatttataatcaactgttcatcattattatataattctgacattttttaggttataaatgtaaggcagaaagatctaatataaaatgtataaatgggacaacatataattttgcttaggaagttgaataaataaagtagtgayttacgatttgcattaatataaaaaaatttaaaaaatggtttacattttgtttgaaatggatcataaacaggaaaagagtaatttagtacattgagtaatttagtacattggtcaccaaagaaatacaaattgaaagta

SEQ ID NO: 346342 - DNA, 538 bp, Homo sapiens
ttcaatttttatgaccacctgggatatgggagagtgtgagacaaaacctagtgcctgcccaktacagcagtcttacaggagaaaactgctgaaagccagagatacgaaggactataatttcagtgaaaggataaactagataaaaacctgttcctcagggggagacaaccaggaaattttcctgcctcaaactcggtgctatttagaggaaaaatgagaaggccatcttcacatgaatttgtggtttaaattttcactgtaagtataagttaaaaaaaacccacacatgaaactgataatttattttatagttatcccatgttggtattaccaccaaacacaagacgaaggcaaagtgtctttggagaaacccacattcagcccatgtctcaaagaatggccacaggtaaaatttcatccaaaatgagaaaaaagtaagactcttacaaaactcatgaggaaataaacatcatgagcagaaacagaattatgcccataaagattttagatattaggacgattatataactataaaagc

SEQ ID NO: 346343 - DNA, 538 bp, Homo sapiens
ttcaatttttatgaccacctgggatatgggagagtgtgagacaaaacctagtgcctgcccagtayagcagtcttacaggagaaaactgctgaaagccagagatacgaaggactataatttcagtgaaaggataaactagataaaaacctgttcctcagggggagacaaccaggaaattttcctgcctcaaactcggtgctatttagaggaaaaatgagaaggccatcttcacatgaatttgtggtttaaattttcactgtaagtataagttaaaaaaaacccacacatgaaactgataatttattttatagttatcccatgttggtattaccaccaaacacaagacgaaggcaaagtgtctttggagaaacccacattcagcccatgtctcaaagaatggccacaggtaaaatttcatccaaaatgagaaaaaagtaagactcttacaaaactcatgaggaaataaacatcatgagcagaaacagaattatgcccataaagattttagatattaggacgattatataactataaaagc

SEQ ID NO: 346344 - DNA, 538 bp, Homo sapiens
ttcaatttttatgaccacctgggatatgggagagtgtgagacaaaacctagtgcctgcccagtacagcagtcttacaggagaaaactgctgaaagccagagatacgaaggactataatttcagtgaaaggataaactagataaaaacctgttcctcagsgggagacaaccaggaaattttcctgcctcaaactcggtgctatttagaggaaaaatgagaaggccatcttcacatgaatttgtggtttaaattttcactgtaagtataagttaaaaaaaacccacacatgaaactgataatttattttatagttatcccatgttggtattaccaccaaacacaagacgaaggcaaagtgtctttggagaaacccacattcagcccatgtctcaaagaatggccacaggtaaaatttcatccaaaatgagaaaaaagtaagactcttacaaaactcatgaggaaataaacatcatgagcagaaacagaattatgcccataaagattttagatattaggacgattatataactataaaagc

SEQ ID NO: 346345 - DNA, 538 bp, Homo sapiens
ttcaatttttatgaccacctgggatatgggagagtgtgagacaaaacctagtgcctgcccagtacagcagtcttacaggagaaaactgctgaaagccagagatacgaaggactataatttcagtgaaaggataaactagataaaaacctgttcctcagggggagacaaccaggaaattttcctgcctcaaactcggtgcyatttagaggaaaaatgagaaggccatcttcacatgaatttgtggtttaaattttcactgtaagtataagttaaaaaaaacccacacatgaaactgataatttattttatagttatcccatgttggtattaccaccaaacacaagacgaaggcaaagtgtctttggagaaacccacattcagcccatgtctcaaagaatggccacaggtaaaatttcatccaaaatgagaaaaaagtaagactcttacaaaactcatgaggaaataaacatcatgagcagaaacagaattatgcccataaagattttagatattaggacgattatataactataaaagc

SEQ ID NO: 346346 - DNA, 588 bp, Homo sapiens
ggactataatttcagtgaaaggataaactagataaaaacctgttcctcagggggagacaaccaggaaattttcctgcctcaaactcggtgctatttagaggaaaaatgagaaggccatcttcacatgaatttgtggtttaaattttcactgtaagtataagttaaaaaaaacccacacatgaaactgataatttattttatagttatcccatgttggtattaccaccaaacacaagacgaaggcaaagtgtctttggagaaacccacattcagcccatgtctcaaagaatggccacaggtaaaatttcatccaaaatgagaaaaaagtaagactcttacaaaactcatgaggaaataaacatcatgagcagaaacagaattatgcccataaagatttyagatattaggacgattatataactataaaagctgtgtttaatatgtttaaaaaatcaatgaggtgtgccaggaatataaattgagacagtgtatgtatcttatattaagcagattgaaactgaatttaagagatcttttagaaataaaaaatataatgaaaattaaaaactaaatggacaggttaaacac

SEQ ID NO: 346347 - DNA, 553 bp, Homo sapiens
cacaatattggatagaaccaaaaagaaaataagtgagttggaagttagactaaacaaattatgctgaagacagtacagaggaggaaaggaaaatggatakgtgaaatagaggttgaaaaattagagtatctaatcatatctgcaaaagaaaaattgaattgggggaaggttatatttaaggttatatttaatatctgagggcttttcgtcattggaatttattaatgttcaaggaaacctggaaagttttctaacacattaaaggagctttaattataagttccaaattcttcttagaagaagagaaccagcaggcccagacatttttactggtgagttctatcaaatgttttcaagaaatggattatttccattttataaaaacaactccagaataaaaaaaggtccatttgttcgttcattttatgaggccagtacaaccttgataccaatgttatatgagaaatgtgtaagacaggaaaattacatgccaactttcctcatgaacctaacggcaaacattttaaattaaaagttagcaaattaagtttag

SEQ ID NO: 346348 - DNA, 553 bp, Homo sapiens
cacaatattggatagaaccaaaaagaaaataagtgagttggaagttagactaaacaaattatgctgaagacagtacagaggaggaaaggaaaatggatatgtgaaatagaggttgaaaaattagagtatctaatcatatctgcaaaagaaaaattgaattgggggaaggttatatttaaggttatatttaatatctgagggcttttcrtcattggaatttattaatgttcaaggaaacctggaaagttttctaacacattaaaggagctttaattataagttccaaattcttcttagaagaagagaaccagcaggcccagacatttttactggtgagttctatcaaatgttttcaagaaatggattatttccattttataaaaacaactccagaataaaaaaaggtccatttgttcgttcattttatgaggccagtacaaccttgataccaatgttatatgagaaatgtgtaagacaggaaaattacatgccaactttcctcatgaacctaacggcaaacattttaaattaaaagttagcaaattaagtttag

SEQ ID NO: 346349 - DNA, 486 bp, Homo sapiens
gaatttctatcttggtctagagacgactgttctcataaataggtagaatagatgtggtatttctggaatgagatttaacatctttacrtagcttgccctattaaaagtagacaaatgcttgtgagagaatatcatatacttttgaaagctaatgtcttaactaattcgctgtgagcaaagctcttgaagactgtgatgtaacagagattcctaggtatcagtgaagatacggagatgaaaaagggaagttgaaaaaagaagctgagagataagcatggaaatcattttccaaactcatttttccaatctgcattttcctgtattgagaagtgaaaatatgttttctagagataaagttctagaaatgaactctgacatagatattttaaaacccatttcagaaacaaaataatatgtgaacctagagtagttgtaatttatgtccttttgtctgtctttatcctgtagttaagtttcccttgggat

SEQ ID NO: 346350 - DNA, 486 bp, Homo sapiens
gaatttctatcttggtctagagacgactgttctcataaataggtagaatagatgtggtatttctggaatgagatttaacatctttacgtagcttgccctattaaaagtagacaaatgcttgtgagagaatatcatatacttttgaaagctaatgtcttaactaattcgctgtgagcaaagctcttgaagactgtgatgtaacagagattcctaggtatcagtgaagatacggagatgaaaaagggaagttgaaaaaagaagctgagagataagcatggaaatcattttccaamctcatttttccaatctgcattttcctgtattgagaagtgaaaatatgttttctagagataaagttctagaaatgaactctgacatagatattttaaaacccatttcagaaacaaaataatatgtgaacctagagtagttgtaatttatgtccttttgtctgtctttatcctgtagttaagtttcccttgggat

SEQ ID NO: 346351 - DNA, 527 bp, Homo sapiens
ttacctgagaaaagttttaaataacctaatactcaggtcacaccctagactttaggggtgagacaagcattaatattttttaacactcttagaattaagagccactaatattgtagcactgcaattcctataaagagaacagatgtgagtagatttgttacagtattgttgtattcatctgttttcatgctgctgataaagacatacctgagacccggcaatttacaaaagaaagaggtttaatggacttacagttccacatgggtggggaggcctcacaatcatggtggaggacaaagaggagcaagtcacatcttacatggatggcagcaggcaaagagacagcttgtgcagggaaactcccattttaaaaatgatcagatctcatgagacttactcactaacmcaagaacagcacaggaaagacccatcctcatgattcagttatctcccactgggcccctcccacaacatgtgggaattatgggagctacaagatgagattgggtgtggacacagccaaacca

SEQ ID NO: 346352 - DNA, 567 bp, Homo sapiens
ataataattaagatagaacaaatgtttggtcctgcttaagggctaggatagatgaggcacaatagaatcatgtggggagctgtaaaaatgcccaggccctactctgtgtcaattaaatcagaatccagaatctctgcttgagtgtgtctagagtattggtcaaaggaaacagtgattttgatgtgcagccagttaagagctgatatyctcaaggatcatgatgtgacacagctgtttcagaagggtaaatctccatactcccactttagaagaaaagaaaaggcaaaatgacaaaacaatcaagcaaaagggctggaagagctggtagataacagggtgtcaacttgaattaattcagctctttggtaaagattagctggagtaaagaaattccagttagtcaaatgggatgaatgtcctttcatggaaaccatatcatgctttttgaatgatctgagaaagactggaagcattagaggtgaagtatatccatttgctcaatgggaaaagattttgttttattttatttacataatgtgatatgcttggccatctgcagtagtgcct

SEQ ID NO: 346353 - DNA, 591 bp, Homo sapiens
aggccaagtggaaaaacttattcatataattgcttcattttgctgactgcaaaaggatttgttttggaagtgatttctgctctttaacctagtggattgatagatcacagaaaggtcttagaaatgacattacgtaattttgttcrtaacatgaaattagcttgaatcaaaaaatgtataccatttttttgtatctaccttctaagacatttgtcttgagaaattaatgattctacaacataaatagtcattgtgaaaggaaggaaaaagataacagagggctttcataataatcatggactcaagattatctaatttaaaaagacatatctcattttcctttatttaaacataaaacaaatgagagaaaacagaaatagctcataattttatttatctgataaaacatgctgacataaaaatataattcatgcacccagtaagaaaatcaaaaaattaaataaaggtaaaaatgaaatataaaattctctttcctctagtctcttacccccagacatctagaatctctccttaagataatcactgttgacaatttcttgagtatctttttaaaaatgaccttaatacaca

SEQ ID NO: 346354 - DNA, 549 bp, Homo sapiens
tgttgacaatttcttgagtatctttttaaaaatgaccttaatacacatcccccgtatagaatatagatcttaaacaagatagaaaataaaattttatcttttagtattacacaaaaggatgttcagaactaggctttgtattttttttttctagagatgaggtctcactgtgttgcccaggttggtctcaaactcctgggctcaagcaatcctcccgcctcagtctccaaaagtgttgggattataagcatgagatgaagtcttgcctggcctaggctttctatttttgtttaataatttaccttcaagatattcttaacttttaacaactgtattgtataaatatattttttattwaaacaataggctaccaataacattaataacatatcttggtttatgtattttacaagattctccatgtgataaattccaacctgagaagttgctatacaacatatgaatttaacattttttaattgctgcgatctaatatgatcctaaaacatggccttagtttatattcctatgagaatgtctaatacctac

SEQ ID NO: 346355 - DNA, 549 bp, Homo sapiens
tgttgacaatttcttgagtatctttttaaaaatgaccttaatacacatcccccgtatagaatatagatcttaaacaagatagaaaataaaattttatcttttagtattacacaaaaggatgttcagaactaggctttgtattttttttttctagagatgaggtctcactgtgttgcccaggttggtctcaaactcctgggctcaagcaatcctcccgcctcagtctccaaaagtgttgggattataagcatgagatgaagtcttgcctggcctaggctttctatttttgtttaataatttaccttcaagatattcttaacttttaacaactgtattgtataaatatattttttattaaaacaataggctaccaataacattaataacatatcttggtttatgtattttacaagattctccatgtgataaattccaacctgagaagttgctatasaacatatgaatttaacattttttaattgctgcgatctaatatgatcctaaaacatggccttagtttatattcctatgagaatgtctaatacctac

SEQ ID NO: 346356 - DNA, 563 bp, Homo sapiens
cttgcctggcctaggctttctatttttgtttaataatttaccttcaagatattcttaacttttaacaactgtattgtataaatatattttttattaaaacaataggctaccaataacattaataacatatcttggtttatgtattttacaagattctccatgtgataaattccaacctgagaagttgctatacaacatatgaatttaacattttttaattgctgcgatctaatatgatcctaaaacatggccytagtttatattcctatgagaatgtctaatacctacactcttgctaacattgactgctattgcattttaaagacgcattaatttgattggattgatgttgaacatcttctgttactcctggccattgcatttctttttctacctattaatctcccttgtataatattgcattatttgtcttttttgtctcatttatcgacaaagattaaagttattggcagtagtgaaaatggagaaaaaaatcaaaattcaaatactgtagagtacaatattttggagaataatttgattctatatattgaaatttaaat

SEQ ID NO: 346357 - DNA, 534 bp, Homo sapiens
aacatcttctgttactcctggccattgcatttctttttctacctattaatctcccttgtataatattgcattatttgtcttttttgtctcatttatcgacaaagattaaagttattggcagtagtgaaaatggagaaaaaaatcaaaattcaaatactgtagagtacaatattttggagaataatttgattctatatattgaaatttaaattgyctttaatctttgacccagttattctatttctagtaatttttctacccaaataataattcaggaagaaaacctttacagagattattcttataatgtttgtgatacaatatttacaggcaacataaattctcatccagagatcggagtaaatattatatagtatatctgtagaatgaaatgtaccttgctgtttaaatgaataaattagttattatcataaaataaatgtcatgtaaagacatttattttatggtgtataaaattagaaaaacaagttattaaaaataacatgattttttgtaaaatgcttttattttgtt

SEQ ID NO: 346358 - DNA, 534 bp, Homo sapiens
aacatcttctgttactcctggccattgcatttctttttctacctattaatctcccttgtataatattgcattatttgtcttttttgtctcatttatcgacaaagattaaagttattggcagtagtgaaaatggagaaaaaaatcaaaattcaaatactgtagagtacaatattttggagaataatttgattctatatattgaaatttaaattgcctttaatctttgacccagttattctatttctagtaatttttctacccaaataataattcaggaagraaacctttacagagattattcttataatgtttgtgatacaatatttacaggcaacataaattctcatccagagatcggagtaaatattatatagtatatctgtagaatgaaatgtaccttgctgtttaaatgaataaattagttattatcataaaataaatgtcatgtaaagacatttattttatggtgtataaaattagaaaaacaagttattaaaaataacatgattttttgtaaaatgcttttattttgtt

SEQ ID NO: 346359 - DNA, 530 bp, Homo sapiens
gaaaaaaatcaaaattcaaatactgtagagtacaatattttggagaataatttgattctatatattgaaatttaaattgcctttaatctttgacccagttattctatttctagtaatttttctacccaaataataattcaggaagaaaacctttacagagattattcttataatgtttgtgatacaatatttacrggcaacataaattctcatccagagatcggagtaaatattatatagtatatctgtagaatgaaatgtaccttgctgtttaaatgaataaattagttattatcataaaataaatgtcatgtaaagacatttattttatggtgtataaaattagaaaaacaagttattaaaaataacatgattttttgtaaaatgcttttattttgtttttaattgacataataattgcacatgtttatggggtacagtgtggtgctttagtgcatgtgtacattgtgtaatggtcaaatttaaaaattaaatgtattgatagaaaaagtgtttggatatttgtatcc

SEQ ID NO: 346360 - DNA, 588 bp, Homo sapiens
attcttataatgtttgtgatacaatatttacaggcaacataaattctcatccagagatcggagtaaatattatatagtatatctgtagaatgaaatgtaccttgctgtttaaatgaataaattagttattatcataaaataaatgtcatgtaaagacatttattttatggtgtataaaattagaaaaacaagttattaaaaataacatgattttttgtaaaatgcttttattttgtttttaattgacataataattgcacatgtttatggggtacagtgtggtgctttagtgcatgtgtacattgtgtaatggtcaaatttaaaaattaaatgtattgatagaaraagtgtttggatatttgtatcctaaatgctaacagtgatgatatctggaatgtggaactgctggtaatttttccctttttcttttagagatttttgtacttatttttaataataaacatatactaattttataataaaaataacaatgaagtcctttccattttgaaaaattaattccaatagaaaaatactgtactcgagccactttccagggttttcttattcttagtgctggtataaggt

SEQ ID NO: 346361 - DNA, 589 bp, Homo sapiens
ctggaatgtggaactgctggtaatttttccctttttcttttagagatttttgtacttatttttaataataaacatatactaattttataataaaaataacaatgaagtcctttccattttgaaaaattaattccaatagaaaaatactgtactcgagccactttccagggttttcttattcttagtgctggtataaggtaccagtgatattatattttcagatatgtttggcttttctgccttatggttgaagatgagcttaggaagtattgctgcctaattttcaggcttttgagccaatgcttggtgcacaaaaagcaccacatcaactttaaacagaatattctgcttctttagactgtatttcctactttttatagtatttattagcgccagaactctgtgactgtttcccaaagaacaagagagaargatcaaggaaagtgagaagcaatgaaactagatttaattaatactctggtttgtcagcagctttcatgaaagatttgtttgttgaagaagttgaacctattagcttaaacagggattaactctgccaactctgacagagcatggacaattaagagtt

SEQ ID NO: 346362 - DNA, 562 bp, Homo sapiens
tatgtttggcttttctgccttatggttgaagatgagcttaggaagtattgctgcctaattttcaggcttttgagccaatgcttggtgcacaaaaagcaccacatcaactttaaacagaatattctgcttctttagactgtatttcctactttttatagtatttattagcgccagaactctgtgactgtttcccaaagaacaagagagaaggatcaaggaaagtgagaagcaatgaaactagatttaattaatactctggyttgtcagcagctttcatgaaagatttgtttgttgaagaagttgaacctattagcttaaacagggattaactctgccaactctgacagagcatggacaattaagagtttattggaaattaattgaaaataatacagtgttgtgaggtgggatgaagatgatttcctttaaggaaattatgccaagtgttttgaatcagccaaggataaacaaatgcagactatcatttgatggaggtattataaactgataacatgattcgaagtataagaatggcaaattgtgaagaatgaataaaattaca

SEQ ID NO: 346363 - DNA, 525 bp, Homo sapiens
tttttttaaaaatccttttgaacttgcagttctacttttgggatttgaatttatggaaagtaaagtgccagtgagaaagaatattgttgccccttgaacaacatagggttaggggagctggcctcccacacagtgaaaaatccgcatacaacttttgattccccccaaactactaataacctattgttgaccagaagkcttactgataacatgcgttacatttaagacatattttgcatgctatgtgtattatatactgtattcttacaataaactaagctacagaaaagaaattataatcaagaaaattgtaaggaagagaaaatatatgacccattcattaagtggaagtggatcatcctaaaggtcttcatcattgttgtgttcatgttgagtaggcagaggaggaggaggaggagctggtctttgtgtcttagggtagcagaggtggaagagggtgaagggatggaaggggaagcaaaagaggcaagcacacttggtgaaactttacaaaaatacatcatt

SEQ ID NO: 346364 - DNA, 625 bp, Homo sapiens
aaaaatccgcatacaacttttgattccccccaaactactaataacctattgttgaccagaagtcttactgataacatgcgttacatttaagacatattttgcatgctatgtgtattatatactgtattcttacaataaactaagctacagaaaagaaattataatcaagaaaattgtaaggaagagaaaatatatgacccattcattaagtggaagtggatcatcctaaaggtcttcatcattgttgtsttcatgttgagtaggcagaggaggaggaggaggagctggtctttgtgtcttagggtagcagaggtggaagagggtgaagggatggaaggggaagcaaaagaggcaagcacacttggtgaaactttacaaaaatacatcattatttctgtctattttgctttttcatttctctaaaaacatttcagtgtagtacctatccgtcttccaccatttgctttagtttcagttcctgtatcatggaacggtctatgtcataaaagaagtcaaaagtagtcttgaataatcaaagttcttttgccagattgttgaatgccaatttgttttctggcactgctgttcctatgtcttcttcctcattatctggcactggttagga

SEQ ID NO: 346365 - DNA, 548 bp, Homo sapiens
tattatatactgtattcttacaataaactaagctacagaaaagaaattataatcaagaaaattgtaaggaagagaaaatatatgacccattcattaagtggaagtggatcatcctaaaggtcttcatcattgttgtgttcatgttgagtaggcagaggaggaggaggaggagctggtctttgtgtcttagggtagcagaggtggaagagggtgaagggatggaaggggaagcaaaagaggcaagcacacttggtgaaactttacaaaaatacatcattatttctgtctattttgctttttcatttctctaaaaacatttcagtgtagtacctatccgtcttccaccatttgctttagtttcagttcctgtatcatggaacggtctatgtcataaaagaagtcaaaagtagtcttgaataatcaaagytcttttgccagattgttgaatgccaatttgttttctggcactgctgttcctatgtcttcttcctcattatctggcactggttaggaagcactcatctccatgaagtcatcttttgttaatt

SEQ ID NO: 346366 - DNA, 567 bp, Homo sapiens
aagcaaggccgggcgcagcccctcacccctgtaattccagcagtttgggaggccaaggcaggtggatcgcccgaggtcaggagttcgagaccagcctgaccaatgtagtgaaaccccttctctactaaaaatacaaaaaaatagctgggcatggtggtacactcctgtactcccagctactcaggaggctgagacaggagaattgcttgaacccaggaggcagaggttgcagtgagccaagatcgygccactgcactccagactgggcaacagagcgaggccctgtcttaaaaaaaaaaaaaaagcaagcaaggaccccatggccagcaagatccaaaccaggaaaggggcagctcttcagagataggcatgtgcattagagagaaaaagtatccttaacatgacttcatatgataatcagctcattaaagctcatgcatacagactgcatatcatgcatgtacttaaaattatgggatggaagcagcattcaagcacacaagggccaaagtaactaagcaacccacctatcaatcaaaaggcaaagagtggctaaagattaggcat

SEQ ID NO: 346367 - DNA, 567 bp, Homo sapiens
aagcaaggccgggcgcagcccctcacccctgtaattccagcagtttgggaggccaaggcaggtggatcgcccgaggtcaggagttcgagaccagcctgaccaatgtagtgaaaccccttctctactaaaaatacaaaaaaatagctgggcatggtggtacactcctgtactcccagctactcaggaggctgagacaggagaattgcttgaacccaggaggcagaggttgcagtgagccaagatcgcgccactgcactccagactgggcaacagagcgagrccctgtcttaaaaaaaaaaaaaaagcaagcaaggaccccatggccagcaagatccaaaccaggaaaggggcagctcttcagagataggcatgtgcattagagagaaaaagtatccttaacatgacttcatatgataatcagctcattaaagctcatgcatacagactgcatatcatgcatgtacttaaaattatgggatggaagcagcattcaagcacacaagggccaaagtaactaagcaacccacctatcaatcaaaaggcaaagagtggctaaagattaggcat

SEQ ID NO: 346368 - DNA, 567 bp, Homo sapiens
aagcaaggccgggcgcagcccctcacccctgtaattccagcagtttgggaggccaaggcaggtggatcgcccgaggtcaggagttcgagaccagcctgaccaatgtagtgaaaccccttctctactaaaaatacaaaaaaatagctgggcatggtggtacactcctgtactcccagctactcaggaggctgagacaggagaattgcttgaacccaggaggcagaggttgcagtgagccaagatcgcgccactgcactccagactgggcaacagagcgaggccctgtcttaaaaaaaaaaaaaaagcaagyaaggaccccatggccagcaagatccaaaccaggaaaggggcagctcttcagagataggcatgtgcattagagagaaaaagtatccttaacatgacttcatatgataatcagctcattaaagctcatgcatacagactgcatatcatgcatgtacttaaaattatgggatggaagcagcattcaagcacacaagggccaaagtaactaagcaacccacctatcaatcaaaaggcaaagagtggctaaagattaggcat

SEQ ID NO: 346369 - DNA, 568 bp, Homo sapiens
ctttgcgccgccttcacccagtgagggagcctgtgccctccctgcccagtcgcttytggggccgctgcggagcttccgctgccatcttcggatcctgtgttccgcacgggggctccaccagggcagggatcgtggtgagggtggctcgtgggtccccctcgcggggagcagggtctggcactcaccagggcccaggactaggacttgtcgaatgaatccatccttttagcttttagtcctttgaagagccttgagaatggaaatcatgagagatttttccatggggaagttccttttacaaagcatttatttacgtggacttcttggcaccccgcggggtggcaacgggcagggcctccagtgccccttctgcgccgtggagccgcgggggctcagctgggcggtggtcgggtcctgaggccggagggcgggagcaggggaggggaaaagcaaaagcggggaaagaagccggggagcggtggaccagacgtccagacctccagaaaggctggcggggaggcacaggcgggatcttccggaggtgagaatttttttttattatagcaga

SEQ ID NO: 346370 - DNA, 568 bp, Homo sapiens
ctttgcgccgccttcacccagtgagggagcctgtgccctccctgcccagtcgcttctggggccgctgcggagcttccgctgccatcttcggatcctgtgttccgcacgggggctccaccagggcagggatcgtggtgagggtggctcgtgggtccccctcgcggggagcagggtctggcactcaccagggcscaggactaggacttgtcgaatgaatccatccttttagcttttagtcctttgaagagccttgagaatggaaatcatgagagatttttccatggggaagttccttttacaaagcatttatttacgtggacttcttggcaccccgcggggtggcaacgggcagggcctccagtgccccttctgcgccgtggagccgcgggggctcagctgggcggtggtcgggtcctgaggccggagggcgggagcaggggaggggaaaagcaaaagcggggaaagaagccggggagcggtggaccagacgtccagacctccagaaaggctggcggggaggcacaggcgggatcttccggaggtgagaatttttttttattatagcaga

SEQ ID NO: 346371 - DNA, 568 bp, Homo sapiens
ctttgcgccgccttcacccagtgagggagcctgtgccctccctgcccagtcgcttctggggccgctgcggagcttccgctgccatcttcggatcctgtgttccgcacgggggctccaccagggcagggatcgtggtgagggtggctcgtgggtccccctcgcggggagcagggtctggcactcaccagggcccaggactaggacttgtcgaatgaatccatccttttagcttttagtcctttgaagagccttgagaatggaaatcatgagagatttttccatggggaagttccttttacaaagcatttatttacgtggacttcttggcaccccgcggggyggcaacgggcagggcctccagtgccccttctgcgccgtggagccgcgggggctcagctgggcggtggtcgggtcctgaggccggagggcgggagcaggggaggggaaaagcaaaagcggggaaagaagccggggagcggtggaccagacgtccagacctccagaaaggctggcggggaggcacaggcgggatcttccggaggtgagaatttttttttattatagcaga

SEQ ID NO: 346372 - DNA, 568 bp, Homo sapiens
ctttgcgccgccttcacccagtgagggagcctgtgccctccctgcccagtcgcttctggggccgctgcggagcttccgctgccatcttcggatcctgtgttccgcacgggggctccaccagggcagggatcgtggtgagggtggctcgtgggtccccctcgcggggagcagggtctggcactcaccagggcccaggactaggacttgtcgaatgaatccatccttttagcttttagtcctttgaagagccttgagaatggaaatcatgagagatttttccatggggaagttccttttacaaagcatttatttacgtggacttcttggcaccccgcggggtggcaacgggcagggcctccagtgccccttctgcgccgtggagccgcgggggctcagctgggcggtggtcgggtcctgaggccggagggcgggagcaggggaggggaaaagcaaaagcggggaaagaagccggggagcggtggaccagacgtccagacctccwgaaaggctggcggggaggcacaggcgggatcttccggaggtgagaatttttttttattatagcaga

SEQ ID NO: 346373 - DNA, 579 bp, Homo sapiens
gcattatgccaactgaacgaagccgggcagaaaaggccacctattgtacgattctatttagatgaaaacaaaataggaaaatctatagagacagaaaacagatttgtggttgcttaggattgagtaggggatgggtgcataggacgttaacagctagggaaggcggggtttctttttgaagagatgaacatgctctataattcattgtgatggcggctccacttatctgtgcatatactaaaagccactgacttgtagacattaatgtgtgcactctacactatgtaaattatatctcaataaatcctttcaaaaatacacagaagagtaaggggttttggaatgttgcarctgggatgcagtttgaaatactgaataggcctcatcgagaatgtgaagtttcagtaaagacctgaggaagttgaatgagctgatcaatggatatatggagggctatctttccaagccaaaaaattaactagagtcttgatcgtaaggcagcagcatgttggtatgtccagaggacagtgaggtggccaggaccactggtaagatcaagggtgaagatataaaagaatt

SEQ ID NO: 346374 - DNA, 579 bp, Homo sapiens
gcattatgccaactgaacgaagccgggcagaaaaggccacctattgtacgattctatttagatgaaaacaaaataggaaaatctatagagacagaaaacagatttgtggttgcttaggattgagtaggggatgggtgcataggacgttaacagctagggaaggcggggtttctttttgaagagatgaacatgctctataattcattgtgatggcggctccacttatctgtgcatatactaaaagccactgacttgtagacattaatgtgtgcactctacactatgtaaattatatctcaataaatcctttcaaaaatacacagaagagtaaggggttttggaatgttgcagctgggatgcagtttgaaatactgaataggcctcatcgagaatgtgaagtttcagtaaagacctgaggaagttgaatgagctgatcaatggatatatggwgggctatctttccaagccaaaaaattaactagagtcttgatcgtaaggcagcagcatgttggtatgtccagaggacagtgaggtggccaggaccactggtaagatcaagggtgaagatataaaagaatt

SEQ ID NO: 346375 - DNA, 579 bp, Homo sapiens
gcattatgccaactgaacgaagccgggcagaaaaggccacctattgtacgattctatttagatgaaaacaaaataggaaaatctatagagacagaaaacagatttgtggttgcttaggattgagtaggggatgggtgcataggacgttaacagctagggaaggcggggtttctttttgaagagatgaacatgctctataattcattgtgatggcggctccacttatctgtgcatatactaaaagccactgacttgtagacattaatgtgtgcactctacactatgtaaattatatctcaataaatcctttcaaaaatacacagaagagtaaggggttttggaatgttgcagctgggatgcagtttgaaatactgaataggcctcatcgagaatgtgaagtttcagtaaagacctgaggaagttgaatgagctgatcaatggatatatggagggctatctttccaagccaaaaaattaactagagtcttgatcgtaaggcagcagcatgttggtatgtccagaggacagtgargtggccaggaccactggtaagatcaagggtgaagatataaaagaatt

SEQ ID NO: 346376 - DNA, 589 bp, Homo sapiens
atccttaaagtaaatatattttataaatacatatagataaatacatatatatgtcaaggtacttaaatgaaaattaaatataggagaaaaataaaagttataaaatgaaaaatgtgacatatatagatgaaaaataaatacttgaaataaaaattccatgagatagaataagtaatggattttaccctaacatcagaacatttatagaacaaattrgaagcattacaaactaaaggacaaacggtaaactaaaataagaaaaccagaaactcactcataggtcagacaatgtgcatcagtgtaacatacatgtagtcaatatctcaaaaaggatgggtggggtaatcataggtgaataaggaatggtacactcattcctgagggcaccgaggagggaggatagctttagatttctaagggagagttttatccattcatgaaggtccaaccccatgaccaaacacctcccagtgagccccacctgcaacattggggatcaaattttaacatgagattggaaggggcaagcattcaaaccatagcaagagttaaatttcctttttaaaaaattcactgatatgattccatt

SEQ ID NO: 346377 - DNA, 589 bp, Homo sapiens
atccttaaagtaaatatattttataaatacatatagataaatacatatatatgtcaaggtacttaaatgaaaattaaatataggagaaaaataaaagttataaaatgaaaaatgtgacatatatagatgaaaaataaatacttgaaataaaaattccatgagatagaataagtaatggattttaccctaacatcagaacatttatagaacaaattggaagcattacaaactaaaggacaaacggtaaactaaaataagaaaaccagaaactcactcataggtcagacaatgtgcatcagtgtaacatacatgtartcaatatctcaaaaaggatgggtggggtaatcataggtgaataaggaatggtacactcattcctgagggcaccgaggagggaggatagctttagatttctaagggagagttttatccattcatgaaggtccaaccccatgaccaaacacctcccagtgagccccacctgcaacattggggatcaaattttaacatgagattggaaggggcaagcattcaaaccatagcaagagttaaatttcctttttaaaaaattcactgatatgattccatt

SEQ ID NO: 346378 - DNA, 589 bp, Homo sapiens
atccttaaagtaaatatattttataaatacatatagataaatacatatatatgtcaaggtacttaaatgaaaattaaatataggagaaaaataaaagttataaaatgaaaaatgtgacatatatagatgaaaaataaatacttgaaataaaaattccatgagatagaataagtaatggattttaccctaacatcagaacatttatagaacaaattggaagcattacaaactaaaggacaaacggtaaactaaaataagaaaaccagaaactcactcataggtcagacaatgtgcatcagtgtaacatacatgtagtcaatatctcaaaaaggatgggtggggtaatcataggtgaataaggaatggtacactcattcctgagggcaccgaggagggaggatagctttagatttctaagggagagttttatccattcatgaaggtccaamcccatgaccaaacacctcccagtgagccccacctgcaacattggggatcaaattttaacatgagattggaaggggcaagcattcaaaccatagcaagagttaaatttcctttttaaaaaattcactgatatgattccatt

SEQ ID NO: 346379 - DNA, 579 bp, Homo sapiens
tcagccagtacaggtatttaataaacaatgttaagcaaataaattagtacaccttacatttgtttaaatygttatattgagaaggagttcctgataattaatttttagttataatatttgtaggtagaaatgattgtgtgctcacttggaagaagtgagacagagtcttgctctgtcgcccaggctggagtgcagtggcatgatcttgtctcactgcaacctctgcctcccgggttcaagcgattctcctgcctcagcctcccaagtagctgggactacagacacgtgccaccacgcctggctaattttttgtatttttagtagagagggggtttcaccgtgtcagccaggatggtcttgatctcctgaccttgtgatctgcccgccttagcctcccaaagtgctgggattacagacatgagccactgtgccctgacatataattcttaatagtccccacacttcatgccaatgtagtctcaaaattcttctggtagcatgaactctataaggattttcttcatcataatcaagttcagactattctcttgctacacaaagtgacttcaagagtttatt

SEQ ID NO: 346380 - DNA, 562 bp, Homo sapiens
aactttgaacttgagagagatgatttagggcatctggcaggagaaatttctaagcagcaaaacattcaagaggkgatctggatttttctgaaagcatacagtcacatacggtcacaaagagatgatttgaaattggaatttttgttttgttttgttcttttgagatagagtcttgctatgtcacccaggctggagtgcagtggtgcgatatcagctcagtgctttctatgctaaaaccagaaaagtcccaaacaagacatattggtcacttttaggaatacatgaataaataccttttcccaaagagactgaaggaagttgaaatgtaatggtgagttgagattgcagttcctaggctgccctaccaatacttagcaaattcataagtcatgtaaaaactttttctaagccttgaaagtatgtttgtttagtccctgaaatctgaccactcgtctcctttttatttatttatttatttatttttgaaatggagtctcatctgtcgcccaggctggagtgcaatggcgctatcttggctcactgcaacctccgcctcccgggc

SEQ ID NO: 346381 - DNA, 506 bp, Homo sapiens
gattagattgtccagtaaaaattcaagtaacaattgtggtaattttagcaatataatcaattgccatctattgggaagttsactaagattccctcataggtgggttgggctgaataaattctgaataacaaaaaatatacatatatatatataaagcaacaattaatttcaccaaatagctatgatccaggtcttcaaatttcaggtcaggcagacttgcacaaacctaagatcatcttccttctgtgcaaaaacagaatgtaggtcaaagttgtgctggtgccaggcaagaacaagttggcttctcacctacttccatcttaccaagtaaattttgtgacttgaaaggtttgtattggagataatagcaggcacaaaagcatggaagtcagaagaaacagaatgtcttcaggaaataatcagtaattaacttggccaggagacccactgattttcaaacttttctgtccaaataccctctacagagaaaggataaatttgaatgc

SEQ ID NO: 346382 - DNA, 439 bp, Homo sapiens
agctgtgtatttttctttatcaactaaaataccagggagatggtcttttcttgaaacccagtggcctgtatgtgactgagaggaaaagctggcttggtcctaatggctgtttctctgtacctttcccytcccttaccaccttaagcccaatccaggtagagaatagggagaggcattctcctctctatggatttgaagtgaatcacccccacattattctcacatgcttttcttctctcacatattcctccctactcccccacccaatcattgtgcttatttgtacagatcttattgggaatattctttatttattttgtcatttcacttctattttaagaatgcataattgaaggagtagtcattttcagggagcaccaggtagaccctgggaacctaatgacttaatccttaaatatgttttgcccttgaaaaatag

SEQ ID NO: 346383 - DNA, 476 bp, Homo sapiens
atattattttacattttcttgcacacctctttaatatctgacttgatagaagacagctgaattgccatatatgcytctgcattaaatctgttgtggtatattggttttgggtaaagtagatgaaaagaaatccagtttcaaacatacatgtagttagaaaaagaggaatattttctaaccttttcagacaattttacataatattctttaatactacacaaaacttcacaagtattaattacttaaaatttatttgcagtgtggaacctgaaactatatcaatgaatttttttttctgttatattaaaatccttggcctatctgcatttttaaaggatcctttactcatgcatgattttgtaacaacatacattggtcatttgaaaaaaaaatcccttcagtgagtcagtgagttatgtaaatcttccaaatgacaattccttttcttacatgacatcaaaaactcacatttatta

SEQ ID NO: 346384 - DNA, 513 bp, Homo sapiens
ataaaaattaggaagttaaatatgtgtagtttatgatatttgtaaatctgtattgactcgcttgttccctaaatgtagatagaataccagatttaacaagaaagaaaattgcaaacaactaacatttattgatctccaaatctgagcacttccacaaatattatctaacaatctccctcattacctttatgaggcagacaattgtccatgtcagagacgttaaaactgaggttcaaaaaggtaatttagttggccaktatcatgtattatggtcttacttaggatggaggcattcatctaaaaattaggaagagataggagatgaacatttttacttcacttttaaatatctgctgtccaaatttgtttttggttttgtttttgaggacttatttctaccaggcacaatacatactgtggtcctgcaagaactaacagtgagtgtattagtccattcgcaaattgctataaagaaatacctaagactgggtataaacaaaagaggtttaattg

SEQ ID NO: 346385 - DNA, 594 bp, Homo sapiens
ctaccaggcacaatacatactgtggtcctgcaagaactaacagtgagtgtattagtccattcgcaaattgctataaagaaatacctaagactgggtataaacaaaagaggtttaattggctcacgatttcacaggctgtacaggacacatgatgctggcatctgctcggcttctggggaagcctcaggaaacttaaaatcatgatggaagatgaagggggagcacacacatgacatggccagagtaggagcaagcgagagagagggggaaggtgccacacacttttaaaggagcagatctcaagagaactcactcactattgtgaggacagtactaaggggatggtgataaacyattccagagaaactgcctccatgatccagtcaccttccaccaggtccctcctccagcactggggattacaattcgatatgatatttggtggggacacagatcctaacgaactattgctgtgtatgttatagttttacctacctctgaccagaccagtgacaccactgatcttttcagatcataaaaccttggctcccataatctcctatgtgtaaattacaaattcttttttcatttaat

SEQ ID NO: 346386 - DNA, 594 bp, Homo sapiens
ctaccaggcacaatacatactgtggtcctgcaagaactaacagtgagtgtattagtccattcgcaaattgctataaagaaatacctaagactgggtataaacaaaagaggtttaattggctcacgatttcacaggctgtacaggacacatgatgctggcatctgctcggcttctggggaagcctcaggaaacttaaaatcatgatggaagatgaagggggagcacacacatgacatggccagagtaggagcaagcgagagagagggggaaggtgccacacacttttaaaggagcagatctcaagagaactcactcactattgtgaggacagtactaaggggatggtgataaaccattccagagaaactgcctccatgatccagtcaccttccaccaggtccctcctccagcactggggattacaattcgatatgatatttggtggggacacagatcctaacgaactattgctgtgtatgttrtagttttacctacctctgaccagaccagtgacaccactgatcttttcagatcataaaaccttggctcccataatctcctatgtgtaaattacaaattcttttttcatttaat

SEQ ID NO: 346387 - DNA, 593 bp, Homo sapiens
tgctacattgcaaagagtgtgccaataagtccaggttgatatatatatacctttaaagtaagcagggtcaaatggggcatgaatgaaacagttctaatcattattaccacctaaaaaaaaatcacaaacatattgttgtatataatgataaactagtattttagaaactcttattcaaattaaattacatcaagttgcaattaagtagctcatattttcttgaaattgggtggatttcatttcaaaaagtgtgtttacactttttacatcattatgttttattctaaactaggtgaaaatattaattctgtttttgtggcgtgctgggggttgggagatggtgtttgaagcagtctagcatgcatgcaaacaatgcggagttttcctgcagagaattttaaaacascaataaaaccaactaaaagtttatctgctctttgctaacaccatgtgagtttttgagtttctgcttcttagtataacagactaacattccaccaaatgacctccctccctattaaaaacaacaacaactatgaaacctgaacataatacaaaagcaaataccttaaagtactggggaggaaacagca

SEQ ID NO: 346388 - DNA, 593 bp, Homo sapiens
tgctacattgcaaagagtgtgccaataagtccaggttgatatatatatacctttaaagtaagcagggtcaaatggggcatgaatgaaacagttctaatcattattaccacctaaaaaaaaatcacaaacatattgttgtatataatgataaactagtattttagaaactcttattcaaattaaattacatcaagttgcaattaagtagctcatattttcttgaaattgggtggatttcatttcaaaaagtgtgtttacactttttacatcattatgttttattctaaactaggtgaaaatattaattctgtttttgtggcgtgctgggggttgggagatggtgtttgaagcagtctagcatgcatgcaaacaatgcggagttttcctgcagagaattttaaaacaccaataaaaccaactaaaagtttatctgctctttgctaacaccatgtgagtttttgagyttctgcttcttagtataacagactaacattccaccaaatgacctccctccctattaaaaacaacaacaactatgaaacctgaacataatacaaaagcaaataccttaaagtactggggaggaaacagca

SEQ ID NO: 346389 - DNA, 599 bp, Homo sapiens
aaagaaggttttaaaaaacaacgctttttatacaagggagcagcaatacaattgatggctgattcttaacagaaactataaggagaggataaaaaaagagtgaagttacatctttaaagtgccaaaggaaaaaaatattggtcaactcatattatatatccaacaaaagtataattcaagaatgaaggcaaaatatactttttcagacacaaaaaactaaaagaattcattgcctgcaaacctatattaaaagaaatagtaaatgaaattctttaggaggaagagaaataataccagatgcaaatttgaatcctctgaaaagaataaagactaataagggctggacacattggctcacgcctgtaatctcagcacttttggaggccaaggtgggaggatcacgaggtcaggagttccagaccagcctggccaacatggtgaaaccctgtcactaccaaaaatacaaaaatttgctggccrtgatggtgcacgcctgtaattccagctatatgggaggctgaggcaggagaatcatttgaacctgagaggcagaggtcacagggagccaagatcgcaccactgcactcattccagcctgg

SEQ ID NO: 346390 - DNA, 464 bp, Homo sapiens
tatataaatgtactggaacttttaaaatatttctgacggcaaacaatcactattttgggttcaagcaatactactataccattaatacatttactctacaacctataagtcaaaataggtgtgttaattgtccaaggattccacctagagtagtaggtgctggtagatggtttcgccctttctatggttaaaattatagcattacagttatcattactaaagtaaaacatttttayttacccagtgtagaacatatttctcatctctaatatctgaattcatgattgtcaaagaaaagttacccatctaacatttgaccatgctgaaattccttgaaactaaaaataggcagtgcctttggtataaaattgatgtatgaggttccccaaacaagatgtttatgcatgggcctttgtagttactgtaatttcaaattgtaaccacattgttctgatgatggctaa

SEQ ID NO: 346391 - DNA, 582 bp, Homo sapiens
atatgcttgaaatttttcataaaatacattttaaaacatagacaaagttgagtaaaacattatttataaagtggattcgagaatataaaagtatattacagtttctgagagaaaacacaatgtctctatcataaaattatatgtatgtagcccataataatgttctttttagccaaagttttaccaaataaagcatattattaaacaaaaactactttagatcttagttcatgataacaaattattttcatcaaagattatgtttgttattacaatatatgattatgacacatagtctcaatattttctttttcataatctttaattacactgtgtacataaaacttgaaccctttctgtttttatactgtggttatctcrttattataaatattcttaaatgattttatgtttctataataaaatgcaatgcaaattgtaaaatgcaatatctaacttggtgagatcaggggaaatagctagtaattttcttggtaagtgaagcagaacattaaatgacttattatcagattttatattgtattgagaatctgtgccataaatcttactatatttgaatta

SEQ ID NO: 346392 - DNA, 562 bp, Homo sapiens
ttaaaccaacaaagatcaaaagagacaaagaaggccattacataatgttaaagggatcaattcaacaagaagagctaactatcctaaatatatatgcacccaatacaggagcacccggattcataaagcaaataacagaatttcaaaatcaatwtcagggcatcacattcattcatgctttagaaggctctaaagcctagaggagagaggtcaccagaacaggacagtgaagatacagagaaaaggtacagagcaatagaatgagagaagcaatgagaattttgattagactggtacatagatcccgtgaaagtaatcatgtctatgcagtggcctccaaactggtgttgttactttcacattctaccctctctctcttctcctacatagcactacaagaagagatgtcctaaaattctgctttttacaatgtgtcctctcaaaacgtattttctatggctcatgcccggaaattcaaataactctgaaatgatatccaggaaattccataatttcattttcctcattcattatggtaggaaatataccttgaacatccatt

SEQ ID NO: 346393 - DNA, 606 bp, Homo sapiens
gatgtgacagttttcctaaaggccagtgatgagctcaaattgttgagctcaaattgtttctttggctcaggagcaaatgaataatatttcttagaatttgacttggtttctacataraagagaaattaaaagatggaattttaattcctagctgcaatgaattctgaagatttcgaggattccagctaattgtctgctacttaatttctggcaggcattatggagggcataatgattttttttctatatagcaagttttattaggatattaaatcaaaaacttatattcaacagtgtgattcttttaaacattagtgcttccattaaagatgagtgggctcaactacaagaaagaaagttttaaagtacaataaattctctctgatccaagtatgaacacacataacagttcggaaatcatcacgattatttctttaattctatgtaaaaattcttccttatacaatataaaatatggattattgatttggcactgatggtttgaatccatgttttaacatactcaaactccaattttctacagtaatgagcaaaaaaatccaaagagaagtgaaaataaaaaaatctttgctgaaaattgaacgt

SEQ ID NO: 346394 - DNA, 585 bp, Homo sapiens
aaaattattttaagatggatcataaacctgaacacatgagcttaaactataaagcctttagaatacttcacaggaaaatatyattacatcctatgatttctgaggagaaagaaagcaaaaaatataaagtaagttaaaaagatagctacttttatacaaatttaaagtttctgttcattaaaagacactgtttataaatgaaaaataagacacagattgggagaaaatgtttgggaaacataaatctgggaaaaatacttcttccttgaaggtgtaaataactcctccaaataaataataccaatattcccattttttaaatgggcaaaatgctaaacaggaactttatatatgacgctatctgaataaacaattagtaacaaagtgcctaataacactagtcttgagggaaatgcaaattaaaaccataatgagatgccactacacatacactagaatgactaaaatgtaatatactaacagtaccaaatattagcaaggatactaatatgtagccagaagaacactcatacatttctggtgaaaatataacatggtacaatctctttggagaaaagtatgaaa

SEQ ID NO: 346395 - DNA, 582 bp, Homo sapiens
gtggaggagaaaatgttctttaaaaatgtttttacaatcagagcttagatatagtggtctttgaatttgtgaatactggtattcaagtttggcttggagatgtttttttctttcttgtgtatccattgggcataaaggagtattagactttgtactcaccttgttattttaaaacagtgctatgtgtttgacatcagtggtgcctgagcatttatgaattttgatcaacacttttctatgcacattctattccagacgttccttaatattgttaaaataaatttccaagcaaaatgacacaatttaagacatgtcaaacttttaaaaattgtcgatttattttattttggacrtgcccaggcctttctaatttcatagtttatggtgattacaacaaaaataaccacagagaaatacatcaaattctgtatgtcaattctataagaggcttgatgggatttcatagcaatgactataaaaaataatcagttataattttatttctatcttaaataatattgaaaggcacaaccttaaacagtagtttcccattgtgattcaatatataattaaaactaaata

SEQ ID NO: 346396 - DNA, 522 bp, Homo sapiens
agtttgagtccctagcagagaatcagctgtaaatcaggaatggaagaagagcctgtatttacaaagactgagaatgcatagaaaacactgtgaatacacgtaagagactcatggcagatacacatgatttgttcttaggtcagtgagcctaactctgagttttgctaattcagctgatattatttctttttctttctttgcaacctccgcctcccagcttcaagcgattccccctgccttggcctccccagtagctgggattacrggtgcccaccaccatgtccagctaatttttttgtatttttaatagagatgaggtttcatcatgttagccaggctggtctcgaacaatccgcccgccttggcctcccaaactgctgggataataggtgtgaggcaccgcgcccagccttagctgacattatttctaccactaccttaaatgaggtttgactcctagtacattacctgactcaggctcacccaattccccagctaatccaggccacactgcaagtgaag

SEQ ID NO: 346397 - DNA, 578 bp, Homo sapiens
tttcaactattcatcattaagtatgatgctagctgtgggtttgccatatagggcctttattgtgctaaggtatattccttttatacctaatcagagagtgtctatcatgaaaggatattgagttttgtcaaatgctttttttgtgtttattgagataatatggttttgtcttatattctgttaatgtgatgtatcacatttattgatttatgtgtgttaaagcacccttgcatcccagggatcaatcccacttgattatggcgaatgattctttaaatatgttgctaagtttggtttgctagtatttttctgaggattgggcatcaatgttcatcaggaatattggcctatagtttgtttgtttgtttttccttatagtgtcctgatctggttttggtattggggtaatactggcctcataaaatatgtatgaaaatattccctatttaactttttggaagagtttgagaagaattggtatctactcttctttaaatgtttggtagaattcacttgtgagtccatccagccctgagcttttccttgatrggcaaatttttattactgattcaatctgc

SEQ ID NO: 346398 - DNA, 605 bp, Homo sapiens
ttaacaacttggccttttaaagtaagagagagttcagggactctgtctgctttatatattgttttctagcaattcttctgtttaattattgccaacttgagtaccttgtgtctccaagtcctaggcacaatatccatcartgaatttgcccgcttgtcaatagtactcttgtcaggaggcacttcaggttgggctctctttaccttgataagtcagttatatctccccatgtacccacttctcccaaataaaagtttttatgctgcaatcttattttctatatttgtctatatggatttctatggtttgaacatgtcccccaaaagttcatgtgctgaaaacttgatccccattgcagcagtgctgagaggtgggacctttggaaggcagagccctcatgaacagataaatccattcacaaatgaatggattaatgaattaatgggttactaagggggaatgggttaattatcacaagagtgagactgttataaaaggccagttttgccatgtcttgggagtcccctcaccatgtgatgccctgtgtcacatggggtctctgcagtgttccaccagcaagaggtcctcaccagatgtggacccag

SEQ ID NO: 346399 - DNA, 379 bp, Homo sapiens
cccttgtcacctacagcctggaaaccataaacagcatcaggaggtaggctcctacaggttcctgggcagaagggggcaggtccctggtaaggcccaccttcagaccagggagggccagcyggctgccagtcccacagactggggtgggaatttgttgtgccttttctgggcctgcccatggccacctatggaccaatcagcatgcacttcctcccctgtcaggcccataaaagccctgggttcagcagtgctgagccagcattggctcaaccagctgtggagaggagttacccacaccagggcttcacctctgctgagagcagcagatgtcgggatgaccagctgcagacaggagctgttttagaagctgagagtagaa

SEQ ID NO: 346400 - DNA, 446 bp, Homo sapiens
tgagatacaagaaaatacagacagataatttgatgaaaccaggaaaataatttgctatctgaatgagttattcaatgaagagatagaaaccataaaagagaaccaaacagaaatcttggagatgaagaattcaatcaatgaaatgaaaaatatcgtagagagctttgacagcagactacatcagactagatcatagaaataatctgtgaactcaaagataggtcttttgacatgactcaacaagaaaaaagatgaaaaagagtgaagatggcttakgagaagtgtgggcggctttaagataacattttcattattaaaatttaacaagaagaaaagacagaggaaggaacaaaaagcttatttaataaaataattgctgtaaacttcctaagtttttggagagatatggacatccagatccattaatctcaaaggttccccaaaag

SEQ ID NO: 346401 - DNA, 446 bp, Homo sapiens
tgagatacaagaaaatacagacagataatttgatgaaaccaggaaaataatttgctatctgaatgagttattcaatgaagagatagaaaccataaaagagaaccaaacagaaatcttggagatgaagaattcaatcaatgaaatgaaaaatatcgtagagagctttgacagcagactacatcagactagatcatagaaataatctgtgaactcaaagataggtcttttgacatgactcaacaagaaaaaagatgaaaaagagtgaagatggcttatgagaagtgtgggcggctttaagataacattttcattattaaaatttaacaagaagaaaagacagagraaggaacaaaaagcttatttaataaaataattgctgtaaacttcctaagtttttggagagatatggacatccagatccattaatctcaaaggttccccaaaag

SEQ ID NO: 346402 - DNA, 569 bp, Homo sapiens
agatcctggcttctgtaaagaccttagagagttcaatcatttgcatgtgcataaaatatctaggaagacacctagaaattaggaagattggttgtctctgaagagggggagtaagtgacagtggctttgggctggagggggagggagacttttcactgtgctctcttttgtattttttaaaattctgagctacwggactataacaaaggaaaaagtagtatcacttaaaattatatgttattactactactattattattattattatttgagcccaggctggagtgcggtggaatgatcttggctcgctgtaacctccgcctcccaagttcaagtgattctcccacctgagcctctctagtagctggaactacaggcatgcaccaccacacccagctaattttttatatttttagtagagactgggtttcaccatattggccaggctggtctcgaacacctgacctcaagtgatctgcctgccttagcctcccaaagtgctgggattatagccactgtgcctggccatcacttaaaaactttaggagatatacctaatgctaaatgac

SEQ ID NO: 346403 - DNA, 569 bp, Homo sapiens
agatcctggcttctgtaaagaccttagagagttcaatcatttgcatgtgcataaaatatctaggaagacacctagaaattaggaagattggttgtctctgaagagggggagtaagtgacagtggctttgggctggagggggagggagacttttcactgtgctctcttttgtattttttaaaattctgagctactggactataacaaaggaaaaagtagtatcacttaaaattatatgttattactactactattattattattattatttgagcccaggctggagtgcggtggaatgatcttggctcgctgtaacctccgcctcccaagttcaagtgattctcccacctgagcctctctagtagctggaactacaggcatgcaccaccacacccagctaattttttatatttttagtagagaytgggtttcaccatattggccaggctggtctcgaacacctgacctcaagtgatctgcctgccttagcctcccaaagtgctgggattatagccactgtgcctggccatcacttaaaaactttaggagatatacctaatgctaaatgac

SEQ ID NO: 346404 - DNA, 662 bp, Homo sapiens
ataaatgttccagggaaaatgaatgtccagaggctgaagagtaggaagacagtcagcctcacagagacttgggagaagaggctggaggatgggcaggacataatagcacatcatgttcaaaatgctaaactgtacagttcccatggcaaatggcaagaccaaaaaacacattggcagcagcctgagaatggatgaggagccaggggaagacagtgcttcaattgaaaaaaaggggttagtagtgccaacgctgcacaggatgcaagaaaaataaggacctagaagaagtccttttttatttagctacaacatgatgattggagacctgaagagcagagtcaggacagggtgtggcagaagcagtcttctgcgattttcaagatgaatgtgggttgcagatgtggggatactgagtgcagacaaatcttggaagcaagactggaaaagaaatgaggaataaaaatggctraaaaagtcagagaataatttgttttattattcaataataaataatttgtattatttatttcagataataatacattcaaataataataatcataatttcagtatcttccacagaaaagggagagaaggctaagttttagctccttctgtggcccctacctcaggagtaatgccttaagtcaggaggtggtttt

SEQ ID NO: 346405 - DNA, 387 bp, Homo sapiens
gggtggagcccactgcagcttagcaagccttactgacactacagactccayctctgtgagcagggtatagctgaacaaaaggcagcagacaacttctgcagacttaagtgtccctgtctgacagctctgaagagagcagtggtgctcccagcctgacatttgagctctgagaacagacagactgcctcctcaagtgggtccctgacccctgtgtagcctaactgggagacacctgccagtagaggccgacagacacctcataaaggcgggtgcgcctctatgatgaagcttctagaggaaggatcaggcaacgatatttgctcttctgcaatatttgctgttctgcagcctccactggtgatacccaggcaaacagggtcttgagtg

SEQ ID NO: 346406 - DNA, 387 bp, Homo sapiens
gggtggagcccactgcagcttagcaagccttactgacactacagactccacctctgtgagcagggtatagctgaacaaaaggcagcagacaacttctgcagacttaagtgtccctgtctgacagctctgaagagagcagtggtgctcccagcctgacatttgagctctgagaacagacagactgcctcctcaagtgggtccctgacccctgtgtagcctaactgggagacacctgccagtagaggccgacagacacytcataaaggcgggtgcgcctctatgatgaagcttctagaggaaggatcaggcaacgatatttgctcttctgcaatatttgctgttctgcagcctccactggtgatacccaggcaaacagggtcttgagtg

SEQ ID NO: 346407 - DNA, 407 bp, Homo sapiens
gggagtgggggcctgggacagggatagcattaggagaaatacctaatgtaaatgaggagttgatgggtgcaacaaaccaacatgacacatgtatacctatttatcaaatctgcacattgtgcacatgtaccctagaacctaaagtataaaaaaaaaagtttacagaaactttcccaaggccacagagctgataaatgatggaatctgaagataaaaaaagtttaaaaaaaatcagatctcaagagatttattcactaccatgagaatatggggtaaaccgctccygtgattcagttttctcccactgggtccctctcataacatgtgggaattatggaagttacaattcaagatgagatgtgggtgaggacatagccaaaccatatcgctgggctagtgcaatagtg

SEQ ID NO: 346408 - DNA, 513 bp, Homo sapiens
tacaactaaccatgagatgtgggtgtggacacagatcgtaaccatatyattctgcccctggcccctccaaaatctcctgtctttcttccatttccacatacaatcatgacttccctatcatcccccaaagtgttaactcattctagcattaactcaaaagtccaaggtccacagtctcttctgagacaagactagttccttctgcctatgagcttataaaataaaaaacaagttagttacttccacaatacaatgggagtataggcattggataaatactaccattccaaaagggagaaatcagctgtaagaaagggactacagtccccatgcaagtccaaaacacagcagggcagtcattaaatgttaaagctccaaaataatctcctttgactctctgtctcacatccagagcatactggtgcaagaagtgggttcccaggttttgagcagctctccgactgtggctgctgtcatgagctggtgttgagagtgcttgtgtcttgtggtgtt

SEQ ID NO: 346409 - DNA, 546 bp, Homo sapiens
tatgcactcataaatttattgctgcattattcacaatagcaaagacctggaatcaacctagatgcccatcagtgatagattggataaagacaatgtggcacatatataacatggcatactacagagccataaaacaaaaacaaaaaaatcctttacagcagcataaatgcagcaggaggccataattctaagcaaattaatgtaagaacagaaaaccaaacaccacatgttctcacttataagtgagagctaaacattgagcacacatgtacataaatatgggatcaatagacactgtaggctaytggggatgtaggttaaaaagggggcttaaaaaactacctatgaaggtactatgctcactacctgggtgaaaagattcacaccccaaacctcagcatcattcattatccccatgtaactaacctgtatcccctgtaacttaagtaaaagttgaaatttttttaaaaatcagtgataaagaattctgtaagcagcaagaaaaaataagcacatgatatacacagaaacttgagtaaggcaatt

SEQ ID NO: 346410 - DNA, 462 bp, Homo sapiens
aatacattcaaactgttgaaagcaaaaactgccactcaagaatactttacctggcaaagctgtccttctcatatgagggaaaaaggaagtattttccagatttacaaaaaatagctgagatagttgattatcactagacctgccttacaagaagtgctaaagggagttcttcaatcataaatgaaaggttgctaattattatcrtaaaaacataaatgtagaaaactccttggtaaaagtaagtacaaagtcaaattcagaatacttcatttttttttttttttgacaaagtcttgctcttgttgcccaggctagagtacaatggcacgatcttggcttgccacaacctccacctcctgggttcaagcgaatctcctgcctcagcctctcgaggggctgggattacaggtatgcaccaccacacccagcaaattttgtatttttagtagaatcggggttttt

SEQ ID NO: 346411 - DNA, 608 bp, Homo sapiens
caactacacaaaccaacagaatagccagctaacagcacaatgacaagatcaaatccacccatatcaataaaaccattaatgtaaacaagataaatgcctcacttaaaagacagagtggcaagctggataaaaaagcaagactcaatggtatgctgtcttcaagagactcatctcacacataatgacactcataggctcaaaataaaaggatggagaaaaatctatcaagcaaatagaaaacagaaaaaagtaggggttgcaatcctaattttagacaaaacaggttttaaatgaacgaagatcaaaaaagaaaaagaagggcgttaaataatagtaaagcattcaattcaacaagaagacctaactatcctaaatatatacgcacccagtataggagaacctaaatttagaaatcaagttctyagagacctacaaagagtcgtagactaccacacaaaaatagtgggggacttcaacactccactgagaatatcagacacaccatcaaggcagaaaattaacaaaggtattcaggacctaaactcaacattgagccaaatggatctgagagacctttacaaaactctttacccaaaaacaaaagaata

SEQ ID NO: 346412 - DNA, 544 bp, Homo sapiens
gggagaagggagagcatcaggaagaatagctaatgaatgctggctaggcttaatatgtaggtgatgggatgatctgtgcaggaaaccaccatggcacacacttaccattgtaacaaacctgcacatcctacacatgtacccctgaacttaagagaaaagttgaatagaaaaataaaagaaagctactttaattataaaaagaaagaaagaaagaaagaataaacactggcacagacaaggatgctctctcaccacttctattcaacatagtattggaagtcctagccagagcaatcaggtaagaaaaagaaataaagggcatccatttaggaagagaggaagtaaaactatctctatttgcagataacatgattctacatctagaaaaacccattgtcttagccccaaagctcctccagctgataaacaacttcagcaaacttcagcaaagttgagkatacaaaatcaacatacaaaaatcactagcatttatatacaccaataacagccatacctaggaatacagctaaccagggaggtgaaa

SEQ ID NO: 346413 - DNA, 419 bp, Homo sapiens
ctagagaaaccactaagaaaataacaaacaaacaaacaaacaaaatgtaatgtctgtaggatctgtagtgatatctcctctttcattcccgatagtgataaaagatgttttctctcttttctttttccttgatcagtctggctagaggtttgttaattgtattaatctttttaaagaaccaatttctactttgatgattttttctttgacttgtatttcattgtttttcattcttatcttcattatttcctttactgtagttactttgggcttaattarcatttttttctagcttctttatggtagtagcttagataattgattttagaacttttatcttatccaatataggcattttaaagcaatgaatttcctctaagcacttctcagggtgttccctcaaattttgatatgttgtg

SEQ ID NO: 346414 - DNA, 581 bp, Homo sapiens
cattaaccattaatatcaaaggcacacagatgcaaaaccagcatctgggcctgtatgtcagattaacaaggttttcttgaagcattaactggctccttaataaagattactaaaggtaataaaaggcttgtggaagttatatcttatggtcaatttaaaatttaatagatagtttataaaattttcaaaaacaaatttaattggcttcacactgtttttattagggcttattgtttggaaaattaagtcttctctctcaaagaatgaaggttttcatcttttttttgaaatccttgagttatcgctttggttaaataaatgacttatttgacaatgacttgtgatcctattttgtgatattgatagtgacagggggcagagaaattctaggcagaaaagggcaggttcccaacaaactccaccctcaagcagaaaatcctgcagccmgtgggccaatgtgagaacttctatccctgttttcccctcaaatgttgtctttttctaaaccatccatggcccactccaccccatcttgcacctataaagagctcagactcagccagcagagagaagaagcagct

SEQ ID NO: 346415 - DNA, 610 bp, Homo sapiens
tctagtaaatttttcatttaggttattgtaatttttcaactctatcattccattttgctctgtttttttcttagcaaactttttttttttttttgagacggagtctcgctctgtcacccacgctggagtgcagtggcatgatcttgactcactgcaagctctgcctcccaggttcacaccattctcctgcctcagcctccccagtagctgggaccacaggcacccgccaccatgcccagctaattgttttgtattttcagtagagatgagatttcaccgggttagccaggatggtctcgatctcctgacctcgtgatccacccgcctcggcctcccaaagtgctgggattacaggtgttagcaaactttttatcgcagaacagtttaaaacatacagaaaaattgtaaagacagcccagtgagttcccattcccagwtttccctattattgtctagaaagatgttataatcttcaactatgatttggtttcttcctttagttttctcagttttgcttgtccgtaagtaaaaaatgttatgatattagattcaaacacatttaagagttatgccttctttgcgaattgactattttatcattataaaatga

SEQ ID NO: 346416 - DNA, 454 bp, Homo sapiens
agagaaattctaggcagaaaagggcaggttcccaacaaactccaccctcaagcagaaaatcctgcagccagtgggccaatgtgagaacttctatccctgttttcccctcaaatgttgtctttttctaaaccatccatggcccactccaccccatcttgcacctataaagagctcagactcagccagcrgagagaagaagcagctggacttcagggtctacagctgaattttggagagaagcagcttgacttcagagggacagcttgatagcataactttggagaggaacctggccatagatggccagactttaggggaagattacctacctgccccatccccttttcagctccccttcctgctgagagccactttcactggcaataaaatcccctgcttttaccatccttcaattcatttatgcaacctcatttttcctggacactggacaagc

SEQ ID NO: 346417 - DNA, 454 bp, Homo sapiens
agagaaattctaggcagaaaagggcaggttcccaacaaactccaccctcaagcagaaaatcctgcagccagtgggccaatgtgagaacttctatccctgttttcccctcaaatgttgtctttttctaaaccatccatggcccactccaccccatcttgcacctataaagagctcagactcagccagcagagagaagaagcagctggacttcagggwctacagctgaattttggagagaagcagcttgacttcagagggacagcttgatagcataactttggagaggaacctggccatagatggccagactttaggggaagattacctacctgccccatccccttttcagctccccttcctgctgagagccactttcactggcaataaaatcccctgcttttaccatccttcaattcatttatgcaacctcatttttcctggacactggacaagc

SEQ ID NO: 346418 - DNA, 569 bp, Homo sapiens
aaggaactcatttcaggtcacaaggacagcctgagcaaagataaagtttgtttggttgattagctcaagatagctggggcacactataggtgaacaggtgtaatagaagataaaaatactgatcttaattactgggatttgagagaaagaaaaggtttggtcttgrtgcacaagaaagctttaacagagaagatgggacttgagctgaatcttggaaaatgagtaggattcgaagaggagcaggagaggataagagtgaacttaatatagagaagaatatatttgatagatgtatttagggctggaaaacagtttgattagaataaagcacttgtatgaaaataatcatgactgtaaaagaagatcaggaagattttggagaaggatagaacattcccagtaaatagtttgtctaattctcatgtattaggttatctctgctatgcgatgtgcaaaggaatcaaataatgataacattgggaagccaggagtggcagcagaatatcaggtggcctagaaaacagaaggactgaaatagaggaaccagtagggaaactgttactcaacct

SEQ ID NO: 346419 - DNA, 569 bp, Homo sapiens
aaggaactcatttcaggtcacaaggacagcctgagcaaagataaagtttgtttggttgattagctcaagatagctggggcacactataggtgaacaggtgtaatagaagataaaaatactgatcttaattactgggatttgagagaaagaaaaggtttggtcttgatgcacaagaaagctttaacagagaagatgggacttgagctgaatcttggaaaatgagtaggattcgaagaggagcaggagaggataagagtgaacttaatatagagaagaatatatttgatagatgtatttagggctggaaaacagtttgattagaataaagcacttgtatgaaaataatcatgactgtaaaagaagatcaggaagattttggagaaggatagaacattcccagtaaatagtttgtctaattctcatgtattaggktatctctgctatgcgatgtgcaaaggaatcaaataatgataacattgggaagccaggagtggcagcagaatatcaggtggcctagaaaacagaaggactgaaatagaggaaccagtagggaaactgttactcaacct

SEQ ID NO: 346420 - DNA, 530 bp, Homo sapiens
agccacgagacctacctggaaggtaacagcttttcaggcagagggaacaacagcatagagaccctcaagctgcatgtggtatgttcctggaccatcaagaaggctggtatggctgacctgacatgggataattgagggaaagggagttggagatggggtcccaaagatctggaggtggggtggtggtggtgatggtggaacacagcttatagagtcctcaaaagttctgctctgaatgagatggaaaccataaagttttacagaagaacattaaggaagacataatgcataaatgcagagataaattctgcttccaggatggaaagattcagtattctaaagatgtcaaagttcaaaaartcccaataaattgtttttagaatatgacaaattgatttttttgtttgtctgaaaaaaaatatacacaggggaatatagacagttttgtacattaaaaataatgatgaaagactcacccaaccagacatcaaaatatattttaagctatagtaaataagtatatttgatac

SEQ ID NO: 346421 - DNA, 603 bp, Homo sapiens
gccattcaaaggaccctaaacctggcataataccagggaccaacaagtaccactggaggggctgaggcctccattgtgctgactacttgtgattgtgctttaatcaggcgaaactaggaaggggtatccaagcaatgatggccacaagttaaaaagccagaatggaaaatacaaaatataaagtccttcagaaataactaggctcccatctttgctagcatcgcccaaaaacttagaaaatcctgttctctacaatgccaagttatccacttgcaatgccttggtaagctaacttccagccttgaatgaaattaaacacaaacaaaaatcttaccttccataccactcytactccccagccctgtacctcatccttgcttagcaaaagacatttctctttctttcaaaagaaagggagcttcttttgttatacctaaggacatatgtgaaattttgttaccgaaaagaaattggaatacaaaacgaacagaacagaatggactagaatacataacagttggcattgagtctcgtgccagttgcatcatgccacctggtaatgcaccagatgtgagaaagagaggcaacctcagttaaggtaaa

SEQ ID NO: 346422 - DNA, 498 bp, Homo sapiens
ggtgagaatgtggggggtcaaaagggtgcattgcattaagcacatgatttacagctgtgatggtttagcatttgccctgctacttgagataatggagagcaggttcttttaactcaagatacaatggatcctgagagagcaaggagmaaggagccagcaagtctagacacattccagagccatgagccctggattctgtccaagccatgagggattttataccctgggcttagattatggtgcatcagggtagccttccaccctttagcacagagcttggtgttccaaaggccacaaggggttttagaccctggaccccagacatgttccaagactcttttaccttatgtcagacatgcaagccctgcctcagcttctcccaacactcagcttttcccaacaccattagagtgcttagtaatcatacaagtggtgtgattgcttatcttgactaatttttgttgttgtttgtttctgtttctgttgtcatttcattct

SEQ ID NO: 346423 - DNA, 470 bp, Homo sapiens
taggacggacccagtggggggtacttaaatcatgggggtaggtctttcccatgctcttctcatactagtgaataactctcgcaagatcgatggttataaaggggagcccccctgcacaagctctcttacctgccrccgtgtaaaatgtgactttgctcctcatttgccttccactcagccatgtggaactgtgagtcaattaaatctctttcctttataaatcacccagtcttgcgtatgtctttattagcagcatgagaacaaactaatacatctatactgggatttacttctagattttctgatttaacaaatctaggatggacctgaaattaatatttttaaaaagcttccaaatgaataaaatctgccatcaagactgaaaacaattagggtgtaatgttaactactagaggggcaaaaaccagcaataacagttccctgaactggaggagctgaggttcccaact

SEQ ID NO: 346424 - DNA, 470 bp, Homo sapiens
taggacggacccagtggggggtacttaaatcatgggggtaggtctttcccatgctcttctcatactagtgaataactctcgcaagatcgatggttataaaggggagcccccctgcacaagctctcttacctgccaccgtgtaaaatgtgactttgctcctcatttgccttccactcagccaygtggaactgtgagtcaattaaatctctttcctttataaatcacccagtcttgcgtatgtctttattagcagcatgagaacaaactaatacatctatactgggatttacttctagattttctgatttaacaaatctaggatggacctgaaattaatatttttaaaaagcttccaaatgaataaaatctgccatcaagactgaaaacaattagggtgtaatgttaactactagaggggcaaaaaccagcaataacagttccctgaactggaggagctgaggttcccaact

SEQ ID NO: 346425 - DNA, 294 bp, Homo sapiens
tttctttaacgagctcaatggttaaaactcagcttaattaaaagctaacrtccaagttctgtgtgtgtatgtgtgcatgtatgtttgtgtttaaaaggccttcatgcttttgttttttttctctcctaagactttgtattttttgatcaaaagttttttttcttctcagttgaccaaattctgttttcttcatttacttctgctgtctctcctttctcttgcaccctctgcagcatgggggacctaaagtagtttataatagcctggaatttcttaaagaaaatggagaaggca

SEQ ID NO: 346426 - DNA, 618 bp, Homo sapiens
caagttctgtgtgtgtatgtgtgcatgtatgtttgtgtttaaaaggccttcatgcttttgttttttttctctcctaagactttgtattttttgatcaaaagttttttttcttctcagttgaccaaattctgttttcttcatttacttctgctgtctctcctttctcttgcaccctctgcagcatgggggacctaaagtagtttataatagcctggaatttcttaaagaaaatggagaaggcatcagactcccttttggggagaagcctgtttttccttatagaaccccaagagtgcaaacaggcaagtttgtctcagctctgaaactgtttgcttttgtattttgttacctgatgttctgactaaaatagagtctcttgggttygtaaggaagactgtagtttagacactttaaaatgtctctgtttaaaaaaatttttttacttgcactgtaaaagtatcacatggtctagccttataataattctccgtttctggagacccagtattcagtgcgggctctgcccagagctcacacatacagttaaaagataggtagccctatctataaaattggtttccttttaaaatcctatgatagatttctataattttatga

SEQ ID NO: 346427 - DNA, 618 bp, Homo sapiens
caagttctgtgtgtgtatgtgtgcatgtatgtttgtgtttaaaaggccttcatgcttttgttttttttctctcctaagactttgtattttttgatcaaaagttttttttcttctcagttgaccaaattctgttttcttcatttacttctgctgtctctcctttctcttgcaccctctgcagcatgggggacctaaagtagtttataatagcctggaatttcttaaagaaaatggagaaggcatcagactcccttttggggagaagcctgtttttccttatagaaccccaagagtgcaaacaggcaagtttgtctcagctctgaaactgtttgcttttgtattttgttacctgatgttctgactaaaatagagtctcttgggtttktaaggaagactgtagtttagacactttaaaatgtctctgtttaaaaaaatttttttacttgcactgtaaaagtatcacatggtctagccttataataattctccgtttctggagacccagtattcagtgcgggctctgcccagagctcacacatacagttaaaagataggtagccctatctataaaattggtttccttttaaaatcctatgatagatttctataattttatga

SEQ ID NO: 346428 - DNA, 527 bp, Homo sapiens
tctctgacatgaaaggactaaataaaaatacatcattctctaacgtttttggaaaagatgatctttgaaaagaaatctgcagaagactgagaaatgagtcacaataaggaacttaagaaagggagagaagcctgggcaacatagtgagagaccctcttcctacaaaaaataaaaacaattagccaggcatggtggcatgtgcctgcagtcccagttatctggaggctgaagtgggaggattgcttgagcctgggaggtcaaggctgcagtaagccatgattatgccactgactccagcctaggtgatagagtgagaccccatcttgaaaaaaaaaaaaggaaagaaagagagagacttagttttaaaaaaaagtgctgagcaatagggcyataaaatgcttaatcaacccagtgtgtatctccatggggttccattcacattagtttcagcacagttatgaaacaatgcaaatgttaaaataatttctgaaagatacatagcttataaaattaattatttaaaatca

SEQ ID NO: 346429 - DNA, 575 bp, Homo sapiens
aaaactttcacagaatgtaatgtcaaatagagttagaataactttgatatttacatctgtttaagatcatctggttaagctacagtttctttctctagtagatgtatcccttttggtcagcgcagcgccttcttgggaaaaagcctctcctggaatcaggtggggctgactctgatyctaggctctcagagggagtttatgacccaggcctgtcctgtgcaagctctcctaaatcatttgctagcgtatgcaagaaaaaggtactcttttcttcgctagcagtatgtatgtactaaacacaaactgaatgcagtcttggagctttttgctaccaccagaattttggattagctgggataccagtttttctcttctgatttgatataatttcagccagaaacaactttgatgtcttagttggcctgtgctggcccaaattgggctaggtacatataaaatttccactggtgctttcaaaatactgaaaatatctcatggacgactcttcttactatcttgaaaggaaactggaaaatatagccttggattgtcataaaggtcacttatggatttta

SEQ ID NO: 346430 - DNA, 601 bp, Homo sapiens
gcaagacagaccaggtccttgcccttgtatgaagacatcatttatgtgcaatactcccttagactaaattggatcagcataagataaattcctgacagtcagactataaggtttattttgatccatgtataataacattatactgttgtcccaatggtaaagaaaatcaaacaagttaaaggtcactacaatagggtctagatcacaatctatgttagcagagcagagaagaagcttcaggaacacctgtactctcttactacttgatacctttcatcatagctgtctacatttggttaactctaatttattgtgctttctgtcactgctttgcacaggttatctcatttgattcccccatcatcctaataaagttctatcatttcttgtttataaatcagaaaactgatcatcgagagaaggtaagtagaatgcccaaggtcacatatctagtaaggagrgggttggtagtaaatgaaggtctgtctgactgtaatactgccttcccatgaaataattttccatgatgctaatacatattgggaaaatggtcagcaagcacctaaaatagataaagaaataaatatagagaagacaaaag

SEQ ID NO: 346431 - DNA, 597 bp, Homo sapiens
tgccgataattttgagctataagaaggtacagttcggccggatgtggtggctcacacctgtaatcccagcattttgggaggccagggcagatggatcacctgaggtcaggagttcaagaccagcctgactagcctggtgaaacctcatctctgctaaaaaaatgcaaaagttagccgggcgtagcggcatacacctgcartcccagttactcaggaggctgaggcaggaaaattgcctgaacccagaaggcagaggctgcagtgagccaagatcgcgccattgcactccagcctgggcaacaagagtgaaactccgtctcaggaaaaaaataagtaaataaataaaagaaggtacagctcttagtattgacctcatcattcccctctctccgctcatccaatgactatagtctactcagtggttccactatgcatacttgtaaggtaatgatttagattcaggatagagtctctatagattctgtaaagtctctttgggtaaatacaaaaagtgttttaaaaaggtgtcatataaaatttcttagaatattttgaaaaagcataaaggatgtctcattattttctttgcgctaagca

SEQ ID NO: 346432 - DNA, 597 bp, Homo sapiens
tgccgataattttgagctataagaaggtacagttcggccggatgtggtggctcacacctgtaatcccagcattttgggaggccagggcagatggatcacctgaggtcaggagttcaagaccagcctgactagcctggtgaaacctcatctctgctaaaaaaatgcaaaagttagccgggcgtagcggcatacacctgcagtcccagttactcaggaggctgaggcaggaraattgcctgaacccagaaggcagaggctgcagtgagccaagatcgcgccattgcactccagcctgggcaacaagagtgaaactccgtctcaggaaaaaaataagtaaataaataaaagaaggtacagctcttagtattgacctcatcattcccctctctccgctcatccaatgactatagtctactcagtggttccactatgcatacttgtaaggtaatgatttagattcaggatagagtctctatagattctgtaaagtctctttgggtaaatacaaaaagtgttttaaaaaggtgtcatataaaatttcttagaatattttgaaaaagcataaaggatgtctcattattttctttgcgctaagca

SEQ ID NO: 346433 - DNA, 597 bp, Homo sapiens
tgccgataattttgagctataagaaggtacagttcggccggatgtggtggctcacacctgtaatcccagcattttgggaggccagggcagatggatcacctgaggtcaggagttcaagaccagcctgactagcctggtgaaacctcatctctgctaaaaaaatgcaaaagttagccgggcgtagcggcatacacctgcagtcccagttactcaggaggctgaggcaggaaaattgcctgaacccagaaggcagaggctgcagtgagccaagatcgcgccattgcactccagcctgggcaacaagagygaaactccgtctcaggaaaaaaataagtaaataaataaaagaaggtacagctcttagtattgacctcatcattcccctctctccgctcatccaatgactatagtctactcagtggttccactatgcatacttgtaaggtaatgatttagattcaggatagagtctctatagattctgtaaagtctctttgggtaaatacaaaaagtgttttaaaaaggtgtcatataaaatttcttagaatattttgaaaaagcataaaggatgtctcattattttctttgcgctaagca

SEQ ID NO: 346434 - DNA, 621 bp, Homo sapiens
ctcatctccctgtgacctggaagccccctccctatttgagttgtcccacctttctggatagaaccaatgtacatcttacatatattgattgatgtctcatgtctccctaaaatatataaaaccaagctgttccccgaccaccttgggcayatgttgtcaggacctcctgaggctatgtcacaggcaagcatcctcaagcttgacaaacaaactttctaaattaatggagacctgtctcagatattcagggttcacaatatttttattttaagaactaattactaaacttatcttgcggtcttaacaaaaaagggtaggtggcatagtctagtgaaaggaacactgggctgggagctgaaaaaaataggtcatttgttcttggatatgccacctgctggatgatgatcttgggtggtccaagcctcagttttcaaatttgtaagatggagttattgctatctgcctttccattctatggggttaattgctgggatcaaataaactaatgaatgcagcactacacagatataaggctagtcaatactttggagaatcttgaacaattctgtctgaacatcagttataatgatttcttcccaaaccatcatgtcactattataa

SEQ ID NO: 346435 - DNA, 621 bp, Homo sapiens
ctcatctccctgtgacctggaagccccctccctatttgagttgtcccacctttctggatagaaccaatgtacatcttacatatattgattgatgtctcatgtctccctaaaatatataaaaccaagctgttccccgaccaccttgggcatatgttgtcaggacctcctgaggctatgtcacaggcaagcatcctcaagcttgacaaacaaactttctaaattaatggagacctgtctcagatattcagggttcacaatatttttattttaagaactaattactaaacttatcttgyggtcttaacaaaaaagggtaggtggcatagtctagtgaaaggaacactgggctgggagctgaaaaaaataggtcatttgttcttggatatgccacctgctggatgatgatcttgggtggtccaagcctcagttttcaaatttgtaagatggagttattgctatctgcctttccattctatggggttaattgctgggatcaaataaactaatgaatgcagcactacacagatataaggctagtcaatactttggagaatcttgaacaattctgtctgaacatcagttataatgatttcttcccaaaccatcatgtcactattataa

SEQ ID NO: 346436 - DNA, 363 bp, Homo sapiens
aacaccagtcatattatgctaatttaaattccagcagttttgtgtcaattaattatgtcattaacaccagttaacaaagcacagccaagcctaagcacagacctcctcccagccacctaacaacaactgttcttccacagcagtttgaacacaaagccaggagacagcggcttacagtaacaccctcagctttgcatctgtattgctgtgcgaccttgagaaaagtatttaatctctcccttcttcaattgtcccattggaaaacagtgactactattaaagatcacaggaccactgaggayattactgaatgatttctaaagcactcagaaatgccttatacacattaaatgattctctctc

SEQ ID NO: 346437 - DNA, 432 bp, Homo sapiens
tttctaagaataaagatgcagttcaaaattcactccccttcccatcctccaggacctagcatagtgccttatacatagtaataactcaataaatatgtattgatttgatctgataacctaacagtgttagaatgcatttattcagaaaacatattagtcatttgatcattacaattgcctcgacctaaagcatacatygcaaaccctgagacctgtctgatgcagcagaaactaagtttggatactaatcctaggagaccttgaagcgaaggcaacattatgtctagggtttttttccccccgccccccacagtgatacatacctcagagtcaagagaagagataataaatctaattgatcgccttgcacgttatcttaacacagagtcaggcacaaactctactgcaatatttaaatgaaaaccacacaga

SEQ ID NO: 346438 - DNA, 534 bp, Homo sapiens
ttcttcatcttgattttgctgttagatatctactacttcaatacatagccaatattatcatgcactgaactaagtcagcagttttgacatcttcatttcaatgtccttttctgtaccttcagcaatgttaatgttacaaattataggagggcatattaatagccatacccaagaagcagaaagaaaagtgcatttttttaaactaagtactaacttgggatttcccgggcccattgtcaagtcagcygaacccacagctcctccattgtgatgataatggattccgtgttgttggcgcaaaggtcgcgaggtcaccgtaagctccttaatggactgtgaaataactttaactgcattaacctctctggatcacatgggtggcaccaacagccactcctgaaattctcattctcttatagagacaataccattagattattatattttccatttggaatggcaataggctcaaagcaattatgcagctaagcatttccattaagtgaataggaccttaaaaaagattaactagaa

SEQ ID NO: 346439 - DNA, 534 bp, Homo sapiens
ttcttcatcttgattttgctgttagatatctactacttcaatacatagccaatattatcatgcactgaactaagtcagcagttttgacatcttcatttcaatgtccttttctgtaccttcagcaatgttaatgttacaaattataggagggcatattaatagccatacccaagaagcagaaagaaaagtgcatttttttaaactaagtactaacttgggatttcccgggcccattgtcaagtcagccgaacccacagctcctccattgtgatgataatggattccgtgttgttggcgcaaaggtcgcgaggtcaccrtaagctccttaatggactgtgaaataactttaactgcattaacctctctggatcacatgggtggcaccaacagccactcctgaaattctcattctcttatagagacaataccattagattattatattttccatttggaatggcaataggctcaaagcaattatgcagctaagcatttccattaagtgaataggaccttaaaaaagattaactagaa

SEQ ID NO: 346440 - DNA, 561 bp, Homo sapiens
acattgtatcaataggctaaaatcctgaggtcaattaatgtaaaacgttatatagtttagtattctgaaatcaattaatgtaaaacatgatatcaatagaatgaaaaacaaaagccataagatcatctcaacagatgcagaaaaagcatttaacaaaatccaacattcttttgtaataaaaactttcaacaaactaggaacatctacaagaaaaccccatagctaacattatacttaatggtaaaagactggatagtttctcccttttgatcagaaataagacaagaatatttgatcttgccacttctattcaatatttatactaaagatttaagctagggtaattaggcaagaaaaagaaaaagaaataaagggaatacagattggaatggaagaagtaaaactatctctatccacagattacatgaccttgtacttagaaaatcctaagtaatccactaaaaaaactaktagaatcaatacgttagttcagcaaggttggttgtaggacacaagatcaataacaaaagccaattctacttccatacactcgtaatgaac

SEQ ID NO: 346441 - DNA, 525 bp, Homo sapiens
gcatgctgtcctctcctctctggatctgtaggtaataaaaactgcttctgttatttcatgtgttttgttgtgccacctcctttgtgtctcattcgactgacatagctgaacctaaccctcttcctgggcagggctttcctagacagtggctgtttgggtaggaataaactggacacagatcagagaggacccataagggcatcttccagcataaacaagtttcctgtgagaggaggacctggttgcaggttggatgcttaggcattaggccatctaccaggataaagtagtgtcctggagctgggcacagtggctcatgcctgtaataccagcagtttgggaggccaaggtgggaggattgcttgaggccaggagttcaagagcagcctgggcaacatagtgagactccatctctataataatawttttttttaaataaaggaaagccttgagagctgtaatacaggaaaaaataaatgaaaaaaaagtgtcctaggaaaggtacactgtaaacatcaacaacca

SEQ ID NO: 346442 - DNA, 620 bp, Homo sapiens
ttcaattttttaagaataagaataatgctttaaataaaaagcagacttctaaattatatatactgtatgatycacttatgtaaaatacatataaattctcattggaataagatttaaaccataaaaagtaaaatattattaatgagtaagacatctctcagttatgcaattacaaatgatttttatttatacacttctattttgacattttcctgatgaccttaaactacttttatcatacaaaaattattgaagaaaaatatagaaaaattattcaatatagtgattaatgaatacaaattatatcagtatcaagttaccattttttctcttagatcagcagtgaaaaagagcaactaagcatgagttgctaagacagagcccctggctgcaatgttgcatgaccagggattaagaactgtcaatacagtaccgcgacattcaggaattaagggattaacctgaaatttgggcaaaaattcattgtatcaaggtgttaattaaaattagaatagaacattagaaataagccaagcattcaacagtggtgatttagttaaacgagattcagccatacagtgatctattaaatagtcatcaaaaaggtatttggggagtgc

SEQ ID NO: 346443 - DNA, 620 bp, Homo sapiens
ttcaattttttaagaataagaataatgctttaaataaaaagcagacttctaaattatatatactgtatgatccacttatgtaaaatacatataaattctcattggaataagatttaaaccataaaaagtaaaatattattaatgagtaagacatctctcagttatgcaattacaaatgatttttatttatacacttctattttgacattttcctgatgaccttaaactacttttatcatacaaaaattattgaagaaaaatatagaaaaattattcaatatagtgattaatgaatacaaattatatcagtatcaagttaccattttttctcttaratcagcagtgaaaaagagcaactaagcatgagttgctaagacagagcccctggctgcaatgttgcatgaccagggattaagaactgtcaatacagtaccgcgacattcaggaattaagggattaacctgaaatttgggcaaaaattcattgtatcaaggtgttaattaaaattagaatagaacattagaaataagccaagcattcaacagtggtgatttagttaaacgagattcagccatacagtgatctattaaatagtcatcaaaaaggtatttggggagtgc

SEQ ID NO: 346444 - DNA, 620 bp, Homo sapiens
ttcaattttttaagaataagaataatgctttaaataaaaagcagacttctaaattatatatactgtatgatccacttatgtaaaatacatataaattctcattggaataagatttaaaccataaaaagtaaaatattattaatgagtaagacatctctcagttatgcaattacaaatgatttttatttatacacttctattttgacattttcctgatgaccttaaactacttttatcatacaaaaattattgaagaaaaatatagaaaaattattcaatatagtgattaatgaatacaaattatatcagtatcaagttaccattttttctcttagatcagcagtgaaaaagagcaactaagcatgmgttgctaagacagagcccctggctgcaatgttgcatgaccagggattaagaactgtcaatacagtaccgcgacattcaggaattaagggattaacctgaaatttgggcaaaaattcattgtatcaaggtgttaattaaaattagaatagaacattagaaataagccaagcattcaacagtggtgatttagttaaacgagattcagccatacagtgatctattaaatagtcatcaaaaaggtatttggggagtgc

SEQ ID NO: 346445 - DNA, 616 bp, Homo sapiens
aatgatattgactatttgagtaacacaaytaacaggaactatttagtacatttagaaagtgcattaatctagtagagaatacattctgtgacatacatgtcacatttgtaaaaattaaccatacctataccatgagtcaagtctcaatgcaatttcaaagaactcgtatcatacaaacaaaaaattcaactggacatttactttatggttgaagaaatacaaacagtaaataaatatctgataaattgttcaaattcctagttaccagataaatgcaaactggaagggattggggtactatctttagcctccttaaaagaaaacagttatcagccaagaattttgtatccagcaaaacaaagcttcataaatgaagggaagatacagtctttttcagacaaacaaatgctgagagaattcgctactaccaagccagcactataagaactgctaaaaggagctctaatcttaaaacaaatccttgaactataccaaataaaacctccttaaagcataaatttcacaggacctatacaatagcacaaggaaaaaaaacaacaagttattcaggtaacatggtgaatagaatagtactcacttctgaatacaaatgttg

SEQ ID NO: 346446 - DNA, 616 bp, Homo sapiens
aatgatattgactatttgagtaacacaattaacaggaactatttagtacatttagaaagtgcattaatctagtagagaatacattctgtgacatacatgtcacatttgtaaaaattaaccatacctataccatgagtcaagtcycaatgcaatttcaaagaactcgtatcatacaaacaaaaaattcaactggacatttactttatggttgaagaaatacaaacagtaaataaatatctgataaattgttcaaattcctagttaccagataaatgcaaactggaagggattggggtactatctttagcctccttaaaagaaaacagttatcagccaagaattttgtatccagcaaaacaaagcttcataaatgaagggaagatacagtctttttcagacaaacaaatgctgagagaattcgctactaccaagccagcactataagaactgctaaaaggagctctaatcttaaaacaaatccttgaactataccaaataaaacctccttaaagcataaatttcacaggacctatacaatagcacaaggaaaaaaaacaacaagttattcaggtaacatggtgaatagaatagtactcacttctgaatacaaatgttg

SEQ ID NO: 346447 - DNA, 588 bp, Homo sapiens
atagacaaggaccactgcttaagctcttctcatgtgtatcacagtcacgtggccctgacttgtgaaagtgcctatgattccttcatctagtagtttgtttgtttaatgggtaattattttggagactacaaggtaatatttattttttaatttgatgtttctttttaacactattttttagtgttttggagccctcaccacctctgataaattaatttatttcaattcaacaaatatttctcaaatgctcattatgagccaggcattmtacttagggcaggggatacacagatttataacatagtccctgccactgagaagctgaccacaaataaagatgaaataaaatgagaagaatgacacaggaagagtatgtctgagtgttaccagatcactaaagagggaatatgaaactctatcttgaatgacactgagatgttccatgaaagagaggacatttgacttgagtcttgagggatgggtaactgagtagaatcgtgattaggagtacggaccctagagctacctgggctcacattttggccctcccgctcctagctatgagattacaagaaagttgcttaattc

SEQ ID NO: 346448 - DNA, 642 bp, Homo sapiens
ctgcagctggttccccaggtgaggccactgttgtttcctattcagttgtacagctgtcactcaatcacagtgtgtattgttgcgagcagctcactcatttctgccaaaatttccatttgctcatggtcttatgggtacatttgtcaccagtttttacttgtatctgacattcctggttggggaatgttggggtcacccacatgtgtgggaaagtaagtgacagcatggggttgggccagcttggacctctttgtgcctgacctcctgagctccatatcttattgcagcatagccagggtgatatactctctctttaatacagggtcttctcctacatttgcaacataccatggccaaagtgcaagtctctgtgcactctaccacttagactccagtatctatttggatttcagcctccagggtcaatctttggagaactttgaatgacaggctgaggaatttaaacttaattcaataaaccataaaaagctgttaaaggtctttgtgtaaaaaagtgatatgataactcagcagcatttaagawtagaaaaacagaataaagaactaagaaggttttaaaagacaggacaagaaccgatacatcatggaagccagagaaggaggaatttcagtaataaaaag

SEQ ID NO: 346449 - DNA, 422 bp, Homo sapiens
atgagatcaatgaggaaattactatagattaagaagaaaataggccgggytcggtggctcaggcctgtaatcccagaactttgggaggctgaggagggcagatcatgaggtcaggagatcgagaccaccctggctaacacagtgaaaccccatctctactaaaaatacaaaaaattagctgagcatgttggcacacgcctgtagtcccagctactcaggaggccgaggcaggagaatcgtttgaactcaggaggtggagcttgcagagagccgagattgctccactgtactcctccagcctgggcaacagagcgagactccgtctcaaaaaaaaagaggaagaagaaaataagcccagggactgagctgggaccactttaacaataatggaactgggagaagagaagaaactagcaaagaag

SEQ ID NO: 346450 - DNA, 548 bp, Homo sapiens
cacaactcccttttctcaggtaccttgtcctgcaaatcccagccacttcagctgccttaatacgcaactctctccttcagctcactgtgcctgctgcagtttgagctcttcctcctgtgctagcagtagggaaagtgcccccattcagaggactgtgtcatttatgaagctcacttcatgagtttttcttctgtcaagtctctctgttatttaatacrtgcaaacaatgcattgtatattttgcccagttttatacttgcctactgcagaaagacaagtctgagaacagttatactaccatggccaaaaacggaacctcttaactattttttaaaatataaccacttttctgtatctccaagctgccattatttttcattttgattgtatatcctagtaattggtctaccagtgtttaccctgtttcctatacactatatgtctcacggtaagcagaagtcggagggttatttatcatatatgagtctgattatgccacctcattgcttaaaattcttagatgtgtcacagttcttttaggctaaaag

SEQ ID NO: 346451 - DNA, 540 bp, Homo sapiens
ccctattgtctggagaaatgtctattcagatcttttgtccattttaaaaattgagttgttttacatgattgagttataaaagctatatattctatataccaggccacttttgggcacataatttgcaaatatattctcccgttctgtyggttgtcttttctacttcttgatggtgttctttgaagaacaacaatttttaatatcaatgacattcaattcatctatttttttctttttttccttttttgctcatgctttttcttccatctctgagaacaatttgccaaatccaagattatgaagatttagacctatatttttttctaaaaactgtaaagttttaattctttcatctaggtctttgaaccattttgagttaatttctatacactacatgaagtagggatccaactttatctttttacatgtgactattgttatatctgttccatttgttaaaaaaaaaacccacaaaactattcttttcctattgaatggtgttagcacccttattgaaaatcaattgatcatagatgtatc

SEQ ID NO: 346452 - DNA, 609 bp, Homo sapiens
ttgttaagttattgaaagaaaaaaataaagacctatgcaaattcttacagaatactagtataactgctcgatcccaacatctgcaataaaatagaatttgaaatctgtgcattttcattcaatattccaaagccacacatcatagtggcctacattctagactcattgctatatgtcctgtcaacagtatatcctcacagtcaaatggtcagttctctctgtaagtgcagcctggacctcaatgagtatcagctcactgtaaataatttcacgctgagatgtcaagtgagagagttccactgtgacactgatgagtggcaaggtagcagaaagcatccaagaaaaccctagcaagctcagcactgcaggagtaaagaagaaaagaagtgcagacacagctgtgttgccactgaaatcctctttatggtgtctctgtctcaaaaggccttcagttcaaaatatagaggaagaatatatttggatgtttactctctggccaagaagcacttctttgttttcgtctccttcrtgtattttcactctcattgttacatatctttggttagatcaacacacatcataaccaacatgagcagtaagagaagagag

SEQ ID NO: 346453 - DNA, 448 bp, Homo sapiens
tagtgtaatgagatttttgtatagaaagcttaccatggcagaggtatgaagaacctgctagaataagacaaggcacaagatcaaactaaaacagggatcaagaaggcatgattgaaacccttgaaaatgatgttcagagttgaaccatacagaacacaracccttttaatgttctataagaaagttgttgacaaaatgctgtaggagttcaacctgtgaagccatgcaagggtcttaggctcataagagccctgagcttggtgtctgctcttctgttggcattgcgtgttttgtaggtgaagtctgatgggacaatgaagcataagcctaagcagaggagatacacacaatatgtgtgtctgctgttacttgacatccatttacatatagtgtttgcagtgccccgagcacagaattacagtggactcatgatgtagaagtgcaaagc

SEQ ID NO: 346454 - DNA, 448 bp, Homo sapiens
tagtgtaatgagatttttgtatagaaagcttaccatggcagaggtatgaagaacctgctagaataagacaaggcacaagatcaaactaaaacagggatcaagaaggcatgattgaaacccttgaaaatgatgttcagagttgaaccatacagaacacaaaccsttttaatgttctataagaaagttgttgacaaaatgctgtaggagttcaacctgtgaagccatgcaagggtcttaggctcataagagccctgagcttggtgtctgctcttctgttggcattgcgtgttttgtaggtgaagtctgatgggacaatgaagcataagcctaagcagaggagatacacacaatatgtgtgtctgctgttacttgacatccatttacatatagtgtttgcagtgccccgagcacagaattacagtggactcatgatgtagaagtgcaaagc

SEQ ID NO: 346455 - DNA, 401 bp, Homo sapiens
acctttgacatgaactgccttttttttttctctctttcagttaaacatttctttttcatttcacccattcttctctttcttgcccatccctgagataaatgtatccttggtagctttcacaggtaaccaccctcacccatgcattttttcccatcccctgttccaaggcctygctccaaacattgtcctccctctctcttctctgcagttagatcattagtcacattataaaaacatactcaggtcttctcactcaaataaaaccgttctttcattctgtctgctgttcaaattctcatttccctttccttttgtgaccaagctgcttttggtactcttactgaaagtttctttgtgaacaactttcctaaacttgttaaacctctaaagatcagacttgt

SEQ ID NO: 346456 - DNA, 542 bp, Homo sapiens
gttgcctgatgctaacaatagttttttaaaggtctaaaggaaagattttcttccacataatattctgtgccctgcagaaggtcttttattttgccttttgataactggcttaacagattttttgttttatcaaaataattcctgtgccattattattaagttttggttggcttataaaaaagatttaaaaaatttctttttaaattaaggttattgcatccatgtgtctttttgtatgtgcttttgaagtccttgtgacattgagttatagggctttgactcctgggtctaaaaaggaaaccatgtcttgctaaatcttaaatgctgacagcaattaaagcctcatcttcaggcctggcagaaaatgccaatcaaataaagagcatacctgagacatagggccagaaattaaagytattcaactccccaaggcccagagactgtagcaaaagaggtgggagcatgagactttgtaagggccaattttgagagataagtttagtttctctatacattaaccattaatatcaaaggcacacaga

SEQ ID NO: 346457 - DNA, 581 bp, Homo sapiens
cattaaccattaatatcaaaggcacacagatgcaaaaycagcatctgggcctgtatgtcagattaacaaggttttcttgaagcattaactggctccttaataaagattactaaaggtaataaaaggcttgtggaagttatatcttatggtcaatttaaaatttaatagatagtttataaaattttcaaaaacaaatttaattggcttcacactgtttttattagggcttattgtttggaaaattaagtcttctctctcaaagaatgaaggttttcatcttttttttgaaatccttgagttatcgctttggttaaataaatgacttatttgacaatgacttgtgatcctattttgtgatattgatagtgacagggggcagagaaattctaggcagaaaagggcaggttcccaacaaactccaccctcaagcagaaaatcctgcagccagtgggccaatgtgagaacttctatccctgttttcccctcaaatgttgtctttttctaaaccatccatggcccactccaccccatcttgcacctataaagagctcagactcagccagcagagagaagaagcagct

SEQ ID NO: 346458 - DNA, 627 bp, Homo sapiens
gaagtttgtaaaaaaatgaaattttattaaaggcttgcaaaagatctgaaataataacgcttttcaactattgaaaaatttcgttaatttatttactgactcttattaaatccccactactgccaatacaagccaaggagatttttaatagcacgacttcttggagatgaaactcaataatttgacaccagatgcatcagaaatttctggacatggaattactgaagccgatccaagtgctattacaacattccattaccatactccaggataacctgccaaattcacctcttgtccttcaactttgtcattcatcatccttaatgatgcagtttcctagcctcagaacgagcagctgttaggtgcctacaggataccctcctcggttatttcctctcaggtgatgycttctcactcaaagcataggagggaactgaggcaatttacctacattcaatactactttaactatcaacatttagatcatttagacaggagtattttgaacttttagggcacactttacatggaaatttgtagcaactctctacttgattttttatgaatgatctacaaaacaagcaatttagaataaactgtgtatgtgttatcagacttgtttagaat

SEQ ID NO: 346459 - DNA, 627 bp, Homo sapiens
gaagtttgtaaaaaaatgaaattttattaaaggcttgcaaaagatctgaaataataacgcttttcaactattgaaaaatttcgttaatttatttactgactcttattaaatccccactactgccaatacaagccaaggagatttttaatagcacgacttcttggagatgaaactcaataatttgacaccagatgcatcagaaatttctggacatggaattactgaagccgatccaagtgctattacaacattccattaccatactccaggataacctgccaaattcacctcttgtccttcaactttgtcattcatcatccttaatgatgcagtttcctagcctcagaacgagcagctgttaggtgcctacaggataccctcctcggttatttcctctcaggtgatgtcttctcactcaaagyataggagggaactgaggcaatttacctacattcaatactactttaactatcaacatttagatcatttagacaggagtattttgaacttttagggcacactttacatggaaatttgtagcaactctctacttgattttttatgaatgatctacaaaacaagcaatttagaataaactgtgtatgtgttatcagacttgtttagaat

SEQ ID NO: 346460 - DNA, 518 bp, Homo sapiens
gcctacaggataccctcctcggttatttcctctcaggtgatgtcttctcactcaaagcataggagggaactgaggcaatttacctacattcaatactactttaactatcaacatttagatcatttagacaggagtattttgaacttttagggcacactttacatggaaatttgtagcaactctctacttgattttttatgaatgatctacaaaacaagcaatttagaataaactgtgtatgtgttatcagacttgtttagaatatgatccttttcacattatactcttcactccatcatttctagtgaggcttccagaaactttgtaacaacaaagaagaaaacttatatcccacaactaattgtatrgattagacaggtcagaaagtggtggttacaaggaactctcaagagtagcagtgaaaccacaacaatatgaagcagcttttttagaactactcttcaaactcatttgaagaaatagataaaatgacaaattgtttctttgattttcaaatg

SEQ ID NO: 346461 - DNA, 524 bp, Homo sapiens
catcttatatcaattacaatatcaaaagaaaatagatacagccttgtaaaaaccatttcttgtcattggtaagttgtagttttcaaggaatttattcatttaattcaagttgattaatatattggcatttagttatttttattactccaatactgaattttcacatctgtagaggcagcacttctgtaatgattttttaaggagcttggccaacccttttcccactttagcaaccatttaactgataaaaattataaaaagaaaaaaaattaaagtgtctagaaatygaccatgaaaatatagcaaatagagaaacattaattgaagaaaatctgttatctcagtaggaataacaagactctagtccccatcatcctcccttcagccagcaacattttatgaaagcttatctcagctctaaggggctatggttttaccctgaaaggggcaggccatcattatttttcaccccagctcagtgttgtagaagttctgttttaagtggtcatgacccaaaacattgg

SEQ ID NO: 346462 - DNA, 581 bp, Homo sapiens
cattaaccattaatatcaaaggcacacagatgcaaaaccagcatctgggcctgtatgtcagattaacaaggttttcttgaagcattaactggctccttaataaagattactaaaggtaataaaaggcttgtggaagttatatcttatggtcaatttaaaatttartagatagtttataaaattttcaaaaacaaatttaattggcttcacactgtttttattagggcttattgtttggaaaattaagtcttctctctcaaagaatgaaggttttcatcttttttttgaaatccttgagttatcgctttggttaaataaatgacttatttgacaatgacttgtgatcctattttgtgatattgatagtgacagggggcagagaaattctaggcagaaaagggcaggttcccaacaaactccaccctcaagcagaaaatcctgcagccagtgggccaatgtgagaacttctatccctgttttcccctcaaatgttgtctttttctaaaccatccatggcccactccaccccatcttgcacctataaagagctcagactcagccagcagagagaagaagcagct

SEQ ID NO: 346463 - DNA, 524 bp, Homo sapiens
catcttatatcaattacaatatcaaaagaaaatagatacagccttgtaaaaaccatttcttgtcattggtaagttgtagttttcaaggaatttattcatttaattcaagttgattaatatattggcatttagttatttttattactccaatactgaattttcacatctgtagaggcagcacttctgtaatgattttttaaggagcttggccaacccttttcccactttagcaaccatttaactgataaaaattataaaaagaaaaaaaattaaagtgtctagaaatcgaccatgaaaatatagcaaatagagaaacattaattgaagaaaatctgttatctcagtaggaataacaagactctagtccccatcatcctcccttcagccagcaacattttatgaaagcttatctcagctctaaggggctatggttttaccctgaaaggggcaggccatcrttatttttcaccccagctcagtgttgtagaagttctgttttaagtggtcatgacccaaaacattgg

SEQ ID NO: 346464 - DNA, 581 bp, Homo sapiens
cattaaccattaatatcaaaggcacacagatgcaaaaccagcatctgggcctgtatgtcagattaacaaggttttcttgaagcattaactggctccttaataaagattactaaaggtaataaaaggcttgtggaagttatatcttatggtcaatttaaaatttaatagatwgtttataaaattttcaaaaacaaatttaattggcttcacactgtttttattagggcttattgtttggaaaattaagtcttctctctcaaagaatgaaggttttcatcttttttttgaaatccttgagttatcgctttggttaaataaatgacttatttgacaatgacttgtgatcctattttgtgatattgatagtgacagggggcagagaaattctaggcagaaaagggcaggttcccaacaaactccaccctcaagcagaaaatcctgcagccagtgggccaatgtgagaacttctatccctgttttcccctcaaatgttgtctttttctaaaccatccatggcccactccaccccatcttgcacctataaagagctcagactcagccagcagagagaagaagcagct

SEQ ID NO: 346465 - DNA, 569 bp, Homo sapiens
aatgaacagttgagcaaacaacaaccagccccacaggtatggaatcagtatccagagttgcttcaataaattatatataatgttcaggttttaacaaaaagacatgcaaagaaacaggaaagtgtgacccatatcgacattagtttcttaattgtaacaaatgtaccttactaatgttagatgttaataatagaggaaacagcttgggaactcactgtgatatctttgcaatgtttctatacattytaaactgttctacaatacaaagtttcctaagaaaaaagaaaaccaaatggaattacagagttgaaaattacaataacctaaatgagaaatttactagtagaaagatgaaaagaaacataaaattatttgaaaaaataatggttaaaaacttcccaaacttcaggaaaaacactaatctacacatttaagagggtcgacaagcacatcctccaagtagaataaactcaaggaaattcatacctagacactttatggtcaaattgtctaaagacagagacaaataaaaatcttaaaaacagccagagaaaaatgattcataatgt

SEQ ID NO: 346466 - DNA, 608 bp, Homo sapiens
ggatataacttaagttgttttaacagaccaaaagagaaagtggcttaaacaagaaaggtgcttatttctctagtgacmgtcccaaacagtcctatacagggggatagagcaattgtattctacaagatgcttcttcagtcttgtagttctgctattcttggatatattgccattgttcacatggcaaacatgtgtcttcaatgctacattcccttttcagttagtaagaggggaggagaaggaggagggtccaactattcatattaaggttctatgacctgtaacttgcagatgtaacttctgtccagattccattgttcagaacttgatgtcctggtcagatctacctacagtggtggctgggaagtgtactcattgattattaataaagaaccatgagcccagttcaagcttggttggtttcataactaaaaggaaaaagagataatgagtttcgggggaaactagtggtacatatataccatggcatactatgcagccacaaaaaagcacagaataatgtcctgtagtggaaacataaatgcagctgaaagccattatcctaagccattactaatgcagaaacaaaaaaccaaatactgcatgtt

SEQ ID NO: 346467 - DNA, 593 bp, Homo sapiens
tcatcacttttttttataaactatcagtatatctagataatttataaggccctcttccagcttcaaatgttattttataaatttttgaatgtgttaagtttaagagtgtatttgattaaggcttagtgctaatggaaatcttattaaatgttattagaaaaaagatttctttaaaaagataaatatgttccaatactatactaattttagaaaaataaatttaatctttttatatcagttatctaatgtcatttaatcatatagataaaaggtctttaagttctaacagagttaatacaggatcrtcatctaattcaaatattaaaatttaattttccaaccatggaaactgtgctacatttatattaataatcactggaagtattctggaggttcttttgtgcttttttcttaggcatttaaggagactggtgaatagccatacttgccatggctattcttttgttcactctttctttagggaaaaaaatagacaagaaaaagcataaaagaataaaaagaaatgcatccttgctgtggtgtttcatgacatttctgcacttgaacatctggaaagcctagtgtgacagtga

SEQ ID NO: 346468 - DNA, 505 bp, Homo sapiens
ctagaaaatggaagcaagagtttgcaaggatctagacacaatgttaagactccaaccaagaggcttggggttctgaataagtctctaattttaatgaagtcatagagtgccaatcaggaaactgaactggagcccaaaaataaagatagttgcagagagtgcaggggtggcacttagcacacaggggctcagtgttcaatagacataccaagtgttagtctacgcaggtaaactaatgccttacccygcacactcttcaagttgagatttgtaacaccagtggacccatttacatatcctcataacccatttactctgggcagcacattccacaaaacagagatactaactagcaatacttatggtagtttctgcttaagctgctgactttcattcattgtaaaatgtgactcatggatagatacatatgtatgaccaccaatacataaattataaatgaagaaaaaatcatatggccagtagtttactgggaataatgcactct

SEQ ID NO: 346469 - DNA, 522 bp, Homo sapiens
aagactaaattttaccctggagctcagtattattttctgccatgtgttaatttcttgcatgaatgccttatttaccttcatttagactatgctgcaggtggaatgcgagcagtacttattgctgatatttttgttggccaaagctgaaggacatctcagggtcttgaatagctctagggtttcatgactatgarggcgatttcaaggtttgacttgtcatcgtggaagactggcttcttaaacataatcctatgagccatgatttaaattaacaaaccttatcaatagcttcacaacagttggcatctgttttaaaggactcactttttatttaagattgcattgtaaccacaactcagttcatcctgtaggagtgctcattgatacaattattgagtcaagtactcttactaaacgattattaggttttagctgctgtgttataagctatattttctctcttaaagcagtcagtttatagcatattattcaatcccatgtgcattacaaaacttatggcca

SEQ ID NO: 346470 - DNA, 522 bp, Homo sapiens
aagactaaattttaccctggagctcagtattattttctgccatgtgttaatttcttgcatgaatgccttatttaccttcatttagactatgctgcaggtggaatgcgagcagtacttattgctgatatttttgttggccaaagctgaaggacatctcagggtcttgaatagctctagggtttcatgactatgagggcgatttcaaggtttgacttgtcatcgtggaagactggcttcttaaacataatcctatgagccatgatttaaattaacaaaccttatcaatagcttcacaacagttggcatctgttttaaaggactcactttttatttaagattgcattgtaaccacaactcagttcatcctgtaggagtgctcattgatacaatwattgagtcaagtactcttactaaacgattattaggttttagctgctgtgttataagctatattttctctcttaaagcagtcagtttatagcatattattcaatcccatgtgcattacaaaacttatggcca

SEQ ID NO: 346471 - DNA, 628 bp, Homo sapiens
tattgtaataatgttaaaaaccaagcaaacacaagcactttgttcacagagttgtgttattggtcctcactgaatttaagtatttaccaatcatatatccttgagtgaaattttagataaatattatttgcaggcattaattgattccaaagggagtctttgatgttctctctatagtcctagggaataactctggtttctttaaaagattgctggacctaaaggaaggaaaaaagacatgtcagtcctttgttcttcttcaatacttataccttcccctggtttttcacttctggagtgcctttcttagtttctgatgcaagcagcaaaactagatagccttgtcatcagccttcattccagttctgccatcccaacctggtaggaattaggataaaaatcacttcttcaaatggcagatcctgtggcttagactatgaagattatgagattcccactttaacccctaatcagacttcagacctagtctcactttctcaaaggaaaccctaacccagctttccccttgactccccrcctttgtcttttagtaccctatccccacctcatgtgtagccttctattttggtcccacattcctcaactagttcaggaagtttcatggaat

SEQ ID NO: 346472 - DNA, 561 bp, Homo sapiens
ccttcattccagttctgccatcccaacctggtaggaattaggataaaaatcacttcttcaaatggcagatcctgtggcttagactatgaagattatgagattcccactttaacccctaatcagacttcagacctagtctcactttctcaaaggaaaccctaacccagctttccccttgactccccgcctttgtcttttagtaccctatccccacctcatgtgtagccttctattttggtcccacattcctcaactagttcaggaagtttcatggaatcatgtgctcrtgtttggaaatccttactgacaagccctccttgggctaaatatcatccagataattgtagccttattccacatcctgtgtttactgatgcctaaaaaaagaaacataatctcttcttggtgacaaacactttgataaggaaaaatataaaacttgagaaaaaacttgagaaactttagaaatatatctcttgtttaattagagagtttactttgggatcaagaaaaaggatgcagcaatgacttggactttttttttattcagtagcaacttcc

SEQ ID NO: 346473 - DNA, 494 bp, Homo sapiens
gtgcatctttttcatcaatgtcttcaagttcctgtttctgggtttaccaaagcctctaactggtcaagattagtccagctacttccaatgttgaggctctggtgcattagaaaatgaagaaatgtctaatattcttatgaaggatgtggtatattaagwattttaatatgaacactgctttcaatttgtcatgtcagtgtgtctgtgactgtgtggtaaaattcagatagagacaacattaaaatttaaatctaagggcctttaagaaggtgagatccaggctgcattgccctctaaagttcctcaaaattaggcctggcaccttcttcctcaatgactgagtgactatgaacatgtactctgtggtcccagcaggtgtttcttaaatctggcagtaatgctgaagtcagcttggcagcttcaccaggaccactgtcacttggcatgtcctgctttaatgtgtgaagctgacttactcccttctcctttttgtg

SEQ ID NO: 346474 - DNA, 620 bp, Homo sapiens
tattcttatgaaggatgtggtatattaagaattttaatatgaacactgctttcaatttgtcatgtcagtgtgtctgtgactgtgtggtaaaattcagatagagacaacattaaaatttaaatctaagggcctttaagaaggtgagatccaggctgcattgccctctaaagttcctcaaaattaggcctggcaccttcttcctcaatgactgagtgactatgaacatgtactctgtggtcccagcaggtgtttcttaaatctggcagtaatgctgaagtcagcttggcagcttcaccaggaccactgtcacttggcatgtcctgctttaatgtgtgaagctgacttactcccttctcctttttgtgttttagcaagcagaacttcatgacttgtgttgccatgagttacccttggaagtgtaccatttctacataacaattggatttctgagaaattcgtcaatygtgtcaaattgcaactttcaatcagatataattcaagtgagattaaactatatttagaacgtttaaccctgattcctgttgggtaagacataaagaaatccactatggatgactgagccttcagcacaatttcacccttaaattattagactgtaa

SEQ ID NO: 346475 - DNA, 521 bp, Homo sapiens
tggtaacatctgtttctgacactgtatcatttccttaaacttaacrttttccttatgtcaatatcaagttcattccatttttattatggcattggagaataatgtataattagtaacagttatttgaaaatctgtaaccacctgtatagtcttatttgcataataaaaagggagggttatcagctgcacaacaatgctgctctagtctgctaggttaatgaggaattcagttggtgagcagagtgaagtatttatcttaaaattaaaaagagccttacatttaagtaaatgattttcagaatgaacgtcttcaatttaggtggcacacatcattaatttctctgaaattgttttgtacatttgtttcttaaatgttgactatataaaatgccattaaatatatttatttgaagtaatatgctctagtaggcatgatgaggtaaatgtgatttaactgaaatttatacttggatttttaaatctaattttacatggagcttcaaaattctcactgtgttaat

SEQ ID NO: 346476 - DNA, 318 bp, Homo sapiens
ttcctaagagtggaaatttgacataactcaagtaaaaactacttcagacagtagcagaataaatattataacttttatataaaaactggtttattgctctcttgatcagcaatggagagacaaggacactcattattatataaatcattctccagaatttatgaggtaataaaagcagcaaaatatagattcataacggagagaatttatgaagtagctttcaaaaccctttcrgttaagtttccatgtatattagaaactaaaaggttgacttaaggactttggcttatggttattcacttattaaaacatcgtatt

SEQ ID NO: 346477 - DNA, 318 bp, Homo sapiens
ttcctaagagtggaaatttgacataactcaagtaaaaactacttcagacagtagcagaataaatattataacttttatataaaaactggtttattgctctcttgatcagcaatggagagacaaggacactcattattatataaatcattctccagaatttatgaggtaataaaagcagcaaaatatagattcataacggagagaatttatgaagtagctttcaaaaccctttcggttaagtttccatrtatattagaaactaaaaggttgacttaaggactttggcttatggttattcacttattaaaacatcgtatt

SEQ ID NO: 346478 - DNA, 595 bp, Homo sapiens
tgtggggaatgagaaataagtcrgagaggagtgttttgaggtactcataatattttattttttgataaacattaattttgataattttagatttacaaaaaggttgcaaagacagtagagttcctgtgtaaccttcaccacacttcccctaatgttaacatttttacataaccatttgtacttttctcaaaagcaaacaattaacattagtacattacaatgaactaaactacagacataattcagatttcaccgtgttttccactaatgtcaccttttttttttggtccaggatgaaagccaggacaccatatttcatttagtcaccattttccttagcttcattccaaattgtgacggttcctcatcttacctaattttttgtgaccttggcagtttttaagacaactgttcaggtattgtgaggtccctccgtttggttttacctcctgtttttctcatgatgagactgcagctatagattttggggaagaatgccacagaagtgcagtgcacttctcatcacatcatatcaaggggtacatgatatcaacaaaatttctcgtggtaatattaatctttgtcatttggttaa

SEQ ID NO: 346479 - DNA, 569 bp, Homo sapiens
tgctgggattacaggcatgagccaccatgcccagcctgttagtaccactttctaagcacaagataaaaagcttatctttgcctaaaatrtcttcattaccatatttctttaataagacctttatcatctcctgtagtatctgtctgtgttatatgaagttttacagtaaaatttcatatatgccatttggtgggttactatggaaaattttatctgatgttaaagttgtccatcaaactacttgacaataacatctcatttataaacatcattcagatttattggatgatgtattattactcaggttaaataagcattctagtaaactgaaaattgttaatacatacataccacaacatttactataacgttcataacaaattttcaaatgactcaaagacaagtacttttttaagctaaagttgcaatcaaactagtttgatctttgattaatgctagtggagctagaggccttctgttgtatctgatctcctgtgaacagtggcaatttctaaatagttctgaagatgtaatatttgaccaaatctgcccttatctggggttttatt

SEQ ID NO: 346480 - DNA, 636 bp, Homo sapiens
ctggcatttgtgtaaatcacttacctggatatagtacattatctcattaaacgtgacaacaaagttcaaattaatacttcctaaaattaatacttcctaagcaatagttctttagttcttaattccacataaggtttgaaagagttaatttatgttaagtgattatttaatctgaatcatattttctcactctaaagggaaaagtcatcaatataaaaatggatgctgaaaagaaaaagtgttcaaattcaattaactgtgtgtgcataataattgacttctgatttttctgattttcagataatccatcccctgctactcttactagctttaagaaaaatatttgamatcttcttagattctaaaatcactttattcatactcatattcaagggtcatggagaccttaaaagccaacagtatttttgaacttcacggctccctcatcctcccacagccacactccttgctccagccctcgggccccccgcttgtccctctacacacccacagtggtttcaaactataggcctccctcacagtataaagaaaaatactaccttttgttacagaacagaattcttccatttacaaagactgctaatactgagtgctgggtttatgaggtaacgttac

SEQ ID NO: 346481 - DNA, 548 bp, Homo sapiens
catgcaaattagagtccaccaaaaagtgttaccgaaggaaatcaaattggatcaagcaaaattatacagcaggataatttaaaaagataaatctctgctgttttattatgcttctttggcaataactgggccttctggtgaattaggatatcaaatattaaaattcttgcagaaccttcttgggtttgggatcacctaaaaaatgttaatagcttaatattatttcaaacagaagttcctggttatgattcctctgtgtgtgtgtgtgtgtgtgtgtgtgtgtgtgtgtgtgtgtgtgtgtttccacaagaartctgaaaatttgttagagtctaaaaaataatttttaaatttacaatcacattgttcttaactcttatccacatattttattgaattaaaaactcatacttggacctaaaacttctacattcagaaatacgtgtttgtcctgcatgtcaacaataattatatgtctgaaaattaatatgcattcctatcttaaatctttttaagacatttcatgaagaaacatatactatatgcat

SEQ ID NO: 346482 - DNA, 548 bp, Homo sapiens
catgcaaattagagtccaccaaaaagtgttaccgaaggaaatcaaattggatcaagcaaaattatacagcaggataatttaaaaagataaatctctgctgttttattatgcttctttggcaataactgggccttctggtgaattaggatatcaaatattaaaattcttgcagaaccttcttgggtttgggatcacctaaaaaatgttaatagcttaatattatttcaaacagaagttcctggttatgattcctctgtgtgtgtgtgtgtgtgtgtgtgtgtgtgtgtgtgtgtgtgtgtgtttccacaagaagtytgaaaatttgttagagtctaaaaaataatttttaaatttacaatcacattgttcttaactcttatccacatattttattgaattaaaaactcatacttggacctaaaacttctacattcagaaatacgtgtttgtcctgcatgtcaacaataattatatgtctgaaaattaatatgcattcctatcttaaatctttttaagacatttcatgaagaaacatatactatatgcat

SEQ ID NO: 346483 - DNA, 577 bp, Homo sapiens
tagtcaatgatttttgataaaggaggaaagtcagtacaatggagcaaggatagtcttttctacaaatggtagaacaactggacatccagatgcaaaaaaaagtgactctagacacaaaccttacacctttcacaaaatcaacacaaaagagagatttaaatgtaaaacacaaaactataagctcctatgagatgacacagaagaaaatctagataacttggttatggtatttatattttagacaaaaccccaaagagatgatccataaaaaayaaatcgataaggtagacttcactaaattaaaagcaaatttcaagagaatatgaagacaagccaaagactgggcaacaatatttgcaaaagacatttgataaaagactattacccaaaatatacaaagaacatttaaaagtgaacaatatgaaaacaaacaacataatttaaaagtgggtcagaaactttaatagacacctcaacaaagaaaatatacagatgtcaaataagcatacaagaaaatgctccacatcatatatcacctggaaatgcatattaaaacaagaatgagatacttctacat

SEQ ID NO: 346484 - DNA, 620 bp, Homo sapiens
ttaaatgtttttagcaacttctgccaaactatcaacttgaaaggttgtgtgtacatttactttcaccagtgaatctgtatgttcctcatcctcactaaagtgcatgcctttgttctggttaatttgataggtaaaaataatttaatctgcctgtcttatagtacaagtgaattttaattttttcatctgtttattaaccatgtgtactgcctctttttttaattgtattcttctagttggggggactcttgttctttttttttttttcttttgatcattgctctaactcacctggatttttcattcctcattggctggtgtcactaaggcaatgtaaactaagagtcaagtaaagtactttagctttcctaatgtaccattttttaaattgtatttcttatatttgtgtgcaaaatggaaaattcatactaagtaagaggcaatggtgaactaaaaatgacctctgattggcaggctactttagaaaatcaatgtgaggacaattttatatagctcactaattcaaaaatctctttcttgtacttccttagactggcagcwgttcttgcatcacggaaaacacatttgtctcaaatttaaaatttagggtaattcctaac

SEQ ID NO: 346485 - DNA, 622 bp, Homo sapiens
ttgcacttccatgttcactgcagcactattcacaatagccataatatggaatcaacctaagtgtccatcaatggatgatgactggaaaaagaaaatatgatatctatacgcaatggaatacaattcagccttaaaaaagaaagaaatcctattatttacgaaaaaaatatgtaactggagaacactgttaagtgaaataagccaggcacagaaaaacaaataccacatgatctcacttatatatggaatctaaaaagttgaactaatagaaatagagagtagttaccagtggctcaggagatgttggtctaagatacgaaatttcattatgaggactaagttcaagaaacctattgtacaacatggtgactacagttaataacaatctgtattcctgaaaattgctgagacagtagattttatgtgttcccaccacaaaaaaataagcgtgtgaagtaatgcatacgttcattcgctcaatttagcaaytgcatatttcaaaataagttgtacataataaataaatgcaatgtttatttgtcaattaaaactacatttaaaataaaattacaaagtgaaacaaagttagaagtgaactctggtaaagaagaccttctactaa

SEQ ID NO: 346486 - DNA, 549 bp, Homo sapiens
gggaacttaaaagattcacattttctacttaaaagcaaagttacaaagcctgtggaattgctctgacttagaaagaacttgatcatgcttttggagtctctatgtgttctctctctgttggttagttttaaatcagcctgcctcacaagggagcctgcatttgattcccaagcccacctcacatttactgaatcaaagtctctgggaaggtggcagtctgagactgtgcatttttaaagagttctccaaataatttgtatgtgttctaaggtttaaaattcacagctyctcgaagaggtgtccagctcaggttaggagatataattggaggtgatacaattatgtttgggccaagcactgggccatgtgtaagctcttgctcaacgcaaaaatctgatatgcaccaaatcctttaaaaacagctctccaaggaaaatttaggtaacctattcatactgctggcatgtgctcctcctgtttccaccctcgtttattttggatatttttccagtcctggaaatcatcttccattttggcaccatttcttga

SEQ ID NO: 346487 - DNA, 549 bp, Homo sapiens
gggaacttaaaagattcacattttctacttaaaagcaaagttacaaagcctgtggaattgctctgacttagaaagaacttgatcatgcttttggagtctctatgtgttctctctctgttggttagttttaaatcagcctgcctcacaagggagcctgcatttgattcccaagcccacctcacatttactgaatcaaagtctctgggaaggtggcagtctgagactgtgcatttttaaagagttctccaaataatttgtatgtgttctaaggtttaaaattcacagcttctcgaagaggtgtccagctcaggttaggagatataattggaggtgatacaattatgtttgggccaagcactgggccatgtgtaagctcttgctcaaygcaaaaatctgatatgcaccaaatcctttaaaaacagctctccaaggaaaatttaggtaacctattcatactgctggcatgtgctcctcctgtttccaccctcgtttattttggatatttttccagtcctggaaatcatcttccattttggcaccatttcttga

SEQ ID NO: 346488 - DNA, 599 bp, Homo sapiens
aaatataaagtgctttaaagacaaattgagaaagacataggcttttaacaaaagggaaaataaacactttggaaaatgaaatttactttgagtagctttatttgtcattaaactcagttactccataaaataggcccacacttattctttcctagacctaattgacctcttatcagaaagtgttcagtatgtttgagatgaaaaagtaatctctaagcttattgcattggtcattagctcttttacagctataaaaccagaagagattatagattttcatcttttataccaaccagcaacagaatgagtgggtttccttctgcagctctcatactcccttcragagctctcagcccatgcaactgtgaattgatttgaaagctaaattattaactcattatacttgcatccatcctgagttagagtttgttcacagaaaaaataagaacaccatgattcgcctgtcattaaatggcaactgaacaaattgcatagttcagcatctacagggacacgtttgaagtcattcaattggattcatatcaatttcttgaataactgtaaatagcagtgctttctgctggtagggctttgggaga

SEQ ID NO: 346489 - DNA, 570 bp, Homo sapiens
tatttcttattcttgctttattctcttgttttaatagtgtacatatccaggagcttccagaaaaagggggcataggagatatatttgkacacttttcacatctgaatgtctgttccacttacaattagttgcctggatatagacttctcgtatggaagtgatttctccctagggttttgaaggaatttcttttctgtgctttagcttctaatgttgctgttcaaatgtctgctgccattcttatgtttaaaaagttaaacattttatttaatttaaaacatataaatattcattcattgactggtattttagttgtaaagtcaagtttatttctttgaatatgaatccccgattgaatttccttataatctcacatgaaaaacacctgtaatgcatcatctataatttgtgtttcctgttctttaaagagcagtggattctagatttttcatttattgacatgccccttccaattttgacatccttttaagctgatcattttattcctcactgcttacccagtgttgtgctgttctggtagcatcaccaaaaattacaattatgtttatt

SEQ ID NO: 346490 - DNA, 605 bp, Homo sapiens
tctatggaaagccttgagtgctggtgttggactgaaggcacagcaggtactggtgttcatgatgatggttgaggaatttgaggatatatgagcagaccactgaatgaatttgctacattattttataaaaattagctaataagaacccagagttctcatgaacacactacggctcacacaaagatgagttgataatcaccaagaatgctgaaagcaagattactttggtctcagtcaggcactcattgctcttaaatcacttggctcctaatttagattatggggaataaaacaaaccaagagatgtttttaaatgcttgatacattattaaaattgtctaaaaggtaagtgtgattgattatggaactctaatatttttagctctccaggaaattaatccttataacacctaaaattattattggtcaatcctacattctggtatcacacacgttttaagaacacmctattaaatttttcaaaaagtgtttgttgaggacttacttgtgctaggcactatttttgttgttggagttaaaactttgagcaagatggacaaggtctctactctgatggaacataaattctagtgggttgagaccat

SEQ ID NO: 346491 - DNA, 581 bp, Homo sapiens
tcaccatagatttgatgtttttgtttcaatcttagcaaaatttatgttgttctggtaggggctcttttcaaactaatgttttagcttccttagtacctcaaaccagatcctgtttagacatattataacaacttagtatgagtttattttggtgaaaaaaattgaaattcatgcatagtttttcataatatgcattttccatgaatttttaaaagattccgtgcactgacagatggcagtagtgggaaccaattgatggtaagaccagacacasttatctcttgggtatatcaaacaatgattacttatttaaaggatgcacaagaaaaattagcatatgatgcacagtggagagatcagcacaaacacataggtttgtggccccaaagctcaccagcaaataatgtctgagtgagagaagggcatgttatacctttggtgagataatagcttctctctagcccagccttatatacagaagggtggagctggctgcatgagaccacctcatctgagtcaggtaggagctctgcagtacacaaattgcaaggtacaggacattgaggtgtaaatgtttttta

SEQ ID NO: 346492 - DNA, 581 bp, Homo sapiens
tcaccatagatttgatgtttttgtttcaatcttagcaaaatttatgttgttctggtaggggctcttttcaaactaatgttttagcttccttagtacctcaaaccagatcctgtttagacatattataacaacttagtatgagtttattttggtgaaaaaaattgaaattcatgcatagtttttcataatatgcattttccatgaatttttaaaagattccgtgcactgacagatggcagtagtgggaaccaattgatggtaagaccagacacacttatctcttgggtatatcaaacaatgattacttatttaaaggatgcasaagaaaaattagcatatgatgcacagtggagagatcagcacaaacacataggtttgtggccccaaagctcaccagcaaataatgtctgagtgagagaagggcatgttatacctttggtgagataatagcttctctctagcccagccttatatacagaagggtggagctggctgcatgagaccacctcatctgagtcaggtaggagctctgcagtacacaaattgcaaggtacaggacattgaggtgtaaatgtttttta

SEQ ID NO: 346493 - DNA, 581 bp, Homo sapiens
tcaccatagatttgatgtttttgtttcaatcttagcaaaatttatgttgttctggtaggggctcttttcaaactaatgttttagcttccttagtacctcaaaccagatcctgtttagacatattataacaacttagtatgagtttattttggtgaaaaaaattgaaattcatgcatagtttttcataatatgcattttccatgaatttttaaaagattccgtgcactgacagatggcagtagtgggaaccaattgatggtaagaccagacacacttatctcttgggtatatcaaacaatgattacttatttaaaggatgcacaagaaaaattagcatakgatgcacagtggagagatcagcacaaacacataggtttgtggccccaaagctcaccagcaaataatgtctgagtgagagaagggcatgttatacctttggtgagataatagcttctctctagcccagccttatatacagaagggtggagctggctgcatgagaccacctcatctgagtcaggtaggagctctgcagtacacaaattgcaaggtacaggacattgaggtgtaaatgtttttta

SEQ ID NO: 346494 - DNA, 581 bp, Homo sapiens
tcaccatagatttgatgtttttgtttcaatcttagcaaaatttatgttgttctggtaggggctcttttcaaactaatgttttagcttccttagtacctcaaaccagatcctgtttagacatattataacaacttagtatgagtttattttggtgaaaaaaattgaaattcatgcatagtttttcataatatgcattttccatgaatttttaaaagattccgtgcactgacagatggcagtagtgggaaccaattgatggtaagaccagacacacttatctcttgggtatatcaaacaatgattacttatttaaaggatgcacaagaaaaattagcatatgatgcacagtggagagatcagcasaaacacataggtttgtggccccaaagctcaccagcaaataatgtctgagtgagagaagggcatgttatacctttggtgagataatagcttctctctagcccagccttatatacagaagggtggagctggctgcatgagaccacctcatctgagtcaggtaggagctctgcagtacacaaattgcaaggtacaggacattgaggtgtaaatgtttttta

SEQ ID NO: 346495 - DNA, 576 bp, Homo sapiens
ggacaataaaattcaacatcttttcatggtaaaaactctcaagaaactaggcatcataggaacatacctcaaaataataagagccatctatgacaaactcacagccaatatcatactaaataggcagaaactggaagcattccccttgaacttgaagatgtccacactcacaactcctattcaacacagtactggaagtcctagccagagaaatcagaygaaagaaagagataaaaggcatcgaaataggaagacagaaagtcaaattatctctttttgtggacaatacaattctagaccttgaaaatcctaaagacaccaccaaaaggctcttgcaactgacttcagcaaagtttcaggatacaaaatcaatgtacaaaagtcagtactatgcatttctatgcaccagtaatgttcatgctgagagccaaattaagaacacaatcccatttacaatagccacacaaaaaataaaacacctaggaatacatctaacctaggaggtaaaagacctctacaaaaagaactaaaaacactgccaagagaaatcataaatgacacaaacaagtgtaaaaa

SEQ ID NO: 346496 - DNA, 639 bp, Homo sapiens
gtgataatactataaaaacgacaatgaagtcattactatttgagtgacgatatgcagaaagaaatggggatgtggttgggatgaggctcagggaaggggcttatggggtgggcagcaaagttctatatttttgacctgggcctacatttgacttttttgggggcatatgtgcttttttttataataaaaattttatttttaaaaattgtcaccatatagttagtgaggggccctgtatgctggctcccttattctttaaccattgtccctgatgttcttgaaaacattcttgctttttggcaacaatagaagattgaaraaatgttctgatttctttccatcttaaataatgaaattagctattctccaaggaattctttttccttttagcaggaaataattgtaaagtccaggagctgggctctgggagttgcacatgagaatgtgtgctgagccagaatgctattgatgtggctgttaggccactcagagctgaaaaaattcttcttaagcttattatttcacactgatatttccaatttaacttactatgttgctattccatactttttacactttataaggtttcatcaactacagatctttctcctgaattgacaatcttttcagtatgatgaa

SEQ ID NO: 346497 - DNA, 563 bp, Homo sapiens
gaaattagctattctccaaggaattctttttccttttagcaggaaataattgtaaagtccaggagctgggctctgggagttgcacatgagaatgtgtgctgagccagaatgctattgatgtggctgttaggccactcagagctgaaaaaattcttcttaagcttattatttcacactgatatttccaatttaacttactatgttgctattccatactttttacactttataaggtttcatcaactacagatctttctcctgaattgacaatcttttcagtatgatgaaactcctggattgagctaagacatgacttctatcaattctcctctttggtatagtaattcataaacttctgtcattcacataattcatatttttttgccatatttgccaaatttctaattttgtaccacctgtattgttgttttcttaacatttttatttaatcaaytaaattgaacctcttaaaatacttagcttcctattaagcaataattctctgtgtaaattgcagggtttaattaactggtcatatattgtaccactgcacattaacatga

SEQ ID NO: 346498 - DNA, 651 bp, Homo sapiens
aattaggcagatattaagctttattaacatttttaaaagaatttttatactaacttttaataaacttgtggacactgacagccatattaggtcaggcagtcactagacaagtgtggtacccaagggaccctggagtaagagtgatgttcaaatgttgctgacagtagcgtccagctcacttgttcactttcagcacattgcaacatgttgcagtttacttgtgcctggtctagtggatttacaaaggatactccttagttttagctaaactaayctgccaaatggaatcatgactttacatgatgtcttccaggagactatggatcaaggataacaccaataatagaagaacaagtgaacccataagaaaagatagggccaggccaggcacggtggctcatgcttgtaatcccagcactttgggaggccgaggcagatggaacacttgaagacaggagttcgggaccagcctggacaacatggtgaaaccccatctctattaaaaataaaaaaaaaattagacaggcatggtggtgggtgcctgaaatcccagctactcaggaggctgaggcaggagaatcacttatccaggagacagaggttgcagtgagcaaagatcacgccattgagatcctgcccaggcaaaaagag

SEQ ID NO: 346499 - DNA, 614 bp, Homo sapiens
cctgtccaacataccaggaaacagcagagaaggaacttctaccacccagcatttttgatcccatcagaccccaaagtcacagttcattccctggtctgtttgctctctctaaaagccatgaaagccagtttccttcttcctgttgatggtgaccaatcaaagctgaactactcagagtatgagagtctggagggcaggggctagagcttctatttgtactgcataccccaacagccaatgcagggctgggtacaatgagtgtttaataaatacagagggacactttttcrttttatataaatatctctccaattttttaccagcataaataataatattagtagataccatttactgagcactatttgtgtctcaggcatcatgctaagcattttaccaacattgcctcagtttctccccaaacatccctatgaggcagatgctatagtttccacattttaaggtgaggagactgagactcagtggggttaagtgccccaccaaggtgacagagttactcgggcactgtaactagaattggaacccaagtctgtcaccctaaagcccatatttttaccacctatatcacactatttaaaagtatttccccccca

SEQ ID NO: 346500 - DNA, 540 bp, Homo sapiens
gggtgggaggtaccacgaaaaacatataaaatagtgtttttattttatatgttgattgtcacaatctgcacaatatgcagattgtgagaactgttgccattgttattatttaaaattattcttctgtagtgcatgcacaatcatactacacaactcaatacctcagcrtgaagtattctgccctgcttataggactgtataaaccaaatctatttatacgctaaagttaagcagtcttgtatttaaaagatattcagccaaaacctggcttgagcaagacttcaatattcaggctctctttcttgaaacacccatggagttttcaataattatttattaagccacaagcttcctatctggcccgattttctctccctttcttcaagggatcgtgtagcagcttccatttcctattgttttatgcaggctggattcttatttcacactctggactatcagtttctgaatatcagaagataaggatggtggtacttttcgaaggttccatttctacttccagtaatagccaatgaggttcag

SEQ ID NO: 346501 - DNA, 587 bp, Homo sapiens
atgcaacaacatgcccagataattgttttggttttctgtagagacgagatctccctatgttgcctatgctggtctcaaactcctgagctcaagtgatcctcccacttcagcgtcccaaagtgctgggattccaggcatgagccaccacaccgtgctatcttcactttttatgtataaattgmacataatatagtatatgaacaaataatcagtctatctatggtcttaaaatttcatggtgaaaagagcaattaggggaaaattgtctaaaaaggctcctgaagggagtaataatgaaaaaagggttgagaaacactgacctaaggaaagccctcccaaactggtgagcacctgcagagcatcagtgatgtctctgtttcctcctctttgggtccctgaggtctgagatcatgacttgactctggcctgggtgtcttccagctctgcttcacacagtggttgggccatcttccaaggctgtagaaatgtatatgaagcctttcatgtgtcccagatttccaccaaccactattttccttcagatctttatctttttgatctgctttctgaatgtacttacttatctc

SEQ ID NO: 346502 - DNA, 559 bp, Homo sapiens
cacacaaaaccgctctgtgggacatcctacaagacacaggtctcatcaaaaagtcaatatatcaacgaaaaaatgttgcagatagaagaagcattctagatttaaagagaataaggaaacataaccacgtgcagtatatcaacctakatttctttctggggaaattttactctagggttggtattaatatcagaaagaactagagaattattgttagttttcttaggcaagataatgttatgtaattatatgggagactgtccttttgtaggacatacatgctgaaatatttaaggtgaaatatctatgtctgtaatttattattaaaaagtttatcccctcaatatatatgcctatataataaggtatgcatatatggtacacaaagtaaaaatgaaaaaaaaaaatgttcacaatgcttgatggctgcttatttgactattcctccaatttttgtatgtttgaaatgtttataataaaaattgaagagaaattatgctcttttaaaaaatttacattccaagcacttgggagttgggaaaaaaaatattcacagaca

SEQ ID NO: 346503 - DNA, 562 bp, Homo sapiens
  misc_feature (1)...(562): n = A,T,C or G
nnttttttaattcaacttgcccttctgtgacttttaaacggggtgtttagaccatctgcattcaaaattaatattaacatgtgaaattttgagcatatcatgaagttgttagttgtctgctttgtatttctatggtgtttttgctctacagggtctgcaggctatgtgtttagctgtgtttttgtggtaacaggtatcattcttttgcttccatgtttaaaactcccttaaaggtctcttataagactggtctagtggtaacaaattccctcagtgcttgcttgactggaaaatattttatttctccttcagttctcttgaattattttttcaaatatactttccaggttgtttgctttttctgcttctctctcaggaatgccagtaatttatagatttggtgacttcacataatcccatatttctcgaagtctttgctcatttaaaaaaattcctgccaggtgcagtggctcacacctgtaatctcakcactttgggaggctgaggtgggcacattacttgaggtcagaagttcaagaccagcctggccaacatgatgaaa

SEQ ID NO: 346504 - DNA, 562 bp, Homo sapiens
  misc_feature (1)...(562): n = A,T,C or G
nnttttttaattcaacttgcccttctgtgacttttaaacggggtgtttagaccatctgcattcaaaattaatattaacatgtgaaattttgagcatatcatgaagttgttagttgtctgctttgtatttctatggtgtttttgctctacagggtctgcaggctatgtgtttagctgtgtttttgtggtaacaggtatcattcttttgcttccatgtttaaaactcccttaaaggtctcttataagactggtctagtggtaacaaattccctcagtgcttgcttgactggaaaatattttatttctccttcagttctcttgaattattttttcaaatatactttccaggttgtttgctttttctgcttctctctcaggaatgccagtaatttatagatttggtgacttcacataatcccatatttctcgaagtctttgctcatttaaaaaaattcctgccaggtgcagtggctcacacctgtaatctcatcactttgggaggctgaggtgggcasattacttgaggtcagaagttcaagaccagcctggccaacatgatgaaa

SEQ ID NO: 346505 - DNA, 549 bp, Homo sapiens
ttcaggcgattctcctgcctcaggattacaggcgcctgccaccacgcccggctagtttttatatttttagtagagacagggtttcaccatgttggctaggctggtctcaaactcctggcctcaagtgacctgcccacctcggcctcccaaagtgctgggattacaggcgtgagccactgcacccggcccattgtgtcattcttatgcctttgtgccaagacctatttttcaataaaaggaraaatgaagttgtaaagctatacacacacagagtgtataacttcacttatgtttttaagaaaaacccattaaaattatttgtatcttgcatacatatgtatataaatgcataaaatgttgagaaggacatattctagatttatagtaatagttattttttaggaaaaatgaagacttttttgttctttacctgcatctctagtttttgaatttatacaaaacactgtattcgtgtattacttttatatttttatgtagattttctaagctggtgtaaattttgaaaaaaattaagcatatgtgccaaaa

SEQ ID NO: 346506 - DNA, 576 bp, Homo sapiens
tttgcccttccctgaaggtcccaggggaccagagaggaagagagactgggcatggttaggaaccacccccccggcaccctgagtgcttcctcgcgttgcggggacagctcctctgtcaccagatagagtcagagccagtcctctccactccctaacgcttgtgttccctccttcgcggtaggccagggcactctccctaaaggcagctgaatgggcttaacacaaacccttttccttcagcacccattgacaagtgagttttagtccagtggggagaactgaggctttgacagtgttcgaaaatgctttctttaataagccgaactctggaatcccgtagtcacagacaacatgcgaatgcagagggacagaaccagggagagctgagaaacagatccccaccccccagcttcaacttactttttttttttttttttttttgagacagagtcttgctctgtcgcccaggctggagtgcagtggcttgatcttggctcattgcaacctccacctcccaggttcwagccacgctcctgcctcagcctcccaagtagctgggattacaggcacccccca

SEQ ID NO: 346507 - DNA, 450 bp, Homo sapiens
gcaatgtgtggaagatgacatatgaacattgtcaacatatttgggtatgtgtgtatacmtttatccataaacaaataaaaatgtatgttaagcatgcaaattttaattaaattttcctaagaaactaacaatacaaacaaaaataaacctttatgtatagcattaaatattttactataggtaagaaatgaatagagaaaaaacacattttctgaaggacatatattcagttttaaatgataagccttctggtttcttttagttggttaagcccgcaaaagggaacactataataaattacattttattgcactagatttcaataacataactttgaaagaggtattataattttcagggtaatttgtagacatttgttcaaatatcttaatttctaaagatttattaccatgatttaaataattttgaaactttatattaaatatatta

SEQ ID NO: 346508 - DNA, 622 bp, Homo sapiens
tataatttccacacaggccagttcatagaaaagaggggaaataaaggataattatttgatcagacctgaggcttttttataattctcaataacactacaaatttacatcagtatttgcatgctctctgctaaaggaaaaaagaaaaaaaaaacataatattggtttttgttccattcaaatttcttcatacttatattaaaggtaaacaaacatgtttaattcctcagaaggggatgaattttttaaaaagcacaaattaaggaatattataagattatataaggaggtattaaattataataataataaaaattgtgaaacatatattaaaaaaacaagcctactttataacattgcaatattgtgcaatatataagctaaaaggtggaggaggccacaagtagtagttgtaacccatacttgaagtcagttcacttaacgcaatcacagcatctttcctcctaagcttttgctttctgttgcagagtcactctcaggtggytgaggtctttctccagccaggtaaccactttaatcttcctggaatgctttttgaggatgcctctttctgttgcttcttaagatttcatgatgatagaaaattactttattgttttgtca

SEQ ID NO: 346509 - DNA, 568 bp, Homo sapiens
tcagcccttacatcaggatatatgatctctaaagatgatgaggacaaataatttaaatggcttttttaaagctgagggaaaaaaagcatgcacatatacacacatacccaatcagtacttttgaccttagaaaaatctttggaggttgcataatgaagtctattataaaatgtacaagttaaaagggcacttatgattccaagtggcttcttttgtaaaggggattcctttgtctgttctatattaattaccattatttttgcttgctgcatagaatatgtgctatttattctgcagaattcctgtgcatggaatagaatattacttttaaattgagtttcaaatattttaattaaaataatactatttcaaaaagatgctgattgtgtaaagaattttagtgggtaaacactacagctatcttatttttaaacagatatttgattagtatasttaaatgtaaatctttgtttctctgactgccacctattggatttatgctaaatgggatttcatttcttgtactcagtcatgaaacctgctgcattctagtgatgtaactttggtc

SEQ ID NO: 346510 - DNA, 554 bp, Homo sapiens
ctgtacacattcaatgaaatattattcagcctttaaaaaagaaattcttgagtttcatggacgaaaattaagaacattatgacagacgaggcagttagggctgggtaggcagatagagagggagcgtcttggaagaaggacagagaaaggcgatgttcaagggaacaaccatgggacaacacctgcaccacctctacagctattgggaataaatgtggttaagaacttccccttgagtcaggatgtctgctgagaagggatagtcccagcctaataaattctactcattctcttttgtctctgtgcctcattcttcttggtcatgtgacaagaactcaaacctagctgaaccagggactaagcagattgcaacaattatgctaaacaaaataagccagtcacaytcacatgatttcatttaactgagatatctaaaatagtcaagcacatagaagcagagagtagaatggtaggtgccaggcactttggggagagggaaatagggaattgctgctcagcaatgagttgaaagcttgctgaattacaaatcaaag

SEQ ID NO: 346511 - DNA, 460 bp, Homo sapiens
tgaaaaatataagttgtatttcagtatttcttattttagttgtattaaaccatgtacaaataattatacatctcaatatattttcacaaataaacagatgataataagaygcacagagacttatgtaattttttagtcttcctcttagggaattttttttccaatattttgtcattgagtatatttgctatagatgatatttatattttattaattatatgaagaaaattttcttctttgttcagtattgaatttctttattgaacgtaggtaaaatttggtcaaattatttctctgtattttttaagaggaatcatacacaagtatacatgtacacacacgcacgttaacagaaaacaaatattggtggtaacaaagtaagtaaaaaatataggcaaatcaccattaagtcagtataatatgtgtttcagattatactagtcactgcttacaaataatt

SEQ ID NO: 346512 - DNA, 558 bp, Homo sapiens
tttgctatagatgatatttatattttattaattatatgaagaaaattttcttctktgttcagtattgaatttctttattgaacgtaggtaaaatttggtcaaattatttctctgtattttttaagaggaatcatacacaagtatacatgtacacacacgcacgttaacagaaaacaaatattggtggtaacaaagtaagtaaaaaatataggcaaatcaccattaagtcagtataatatgtgtttcagattatactagtcactgcttacaaataattctcctaaatattaggtaaaaagatgtacatttcctaaaatccataacaatatatgtgctatctctaaactttatatatttatgaatttcataattacaaactaaattaatttgcacttttgcttccaagaaggctgtagttgtagtcagaatgatttggaaaataataacttctgctgtaacaactaggaaaaacattatttattcaactatatttattttttaaacaatggcctcagagagctaagtaagcaagaaatataatacaaattaaaatttcag

SEQ ID NO: 346513 - DNA, 558 bp, Homo sapiens
tttgctatagatgatatttatattttattaattatatgaagaaaattttcttctttgttcagtattgaatttctttattgaacgtaggtaaaatttggtcaaattatttctctgtattttttaagaggaatcatacacaagtatacatgtacacacacgcacgttaacagaaaacaaatattggtggtaacaaagtaagtaaaaaatrtaggcaaatcaccattaagtcagtataatatgtgtttcagattatactagtcactgcttacaaataattctcctaaatattaggtaaaaagatgtacatttcctaaaatccataacaatatatgtgctatctctaaactttatatatttatgaatttcataattacaaactaaattaatttgcacttttgcttccaagaaggctgtagttgtagtcagaatgatttggaaaataataacttctgctgtaacaactaggaaaaacattatttattcaactatatttattttttaaacaatggcctcagagagctaagtaagcaagaaatataatacaaattaaaatttcag

SEQ ID NO: 346514 - DNA, 613 bp, Homo sapiens
attttattttcctgccttcttggagtagcaaagccttatcttgctttaaggcaggacctaagcacaataatttcctgctgtatgtttctggaaatacaactctccaagaggcaaactctttcaaagctagcaagcaattccagctatctaggcttcactttttctcaggatttcagccattgatggcaatctacagagagctcaaagttttgaaaaaaaaatttaatttaaatggaagatagggrcaatcaaagaatactagaatctcagtgaccttatatagacccatgcttttatgtcccataatcttacttaaatggaaattgagtctgaaagattctaaatatgttatttaaggtaaaatgcatggccattggcaaggtcaggtaaggttgccaggacactgcaaaccccttttgcactgttagtttcttaaatacatcttcagtttctagaaaggatgctatatatttgccttattgaggaatttcttctctttttgtttctattatgactcatgcagataacaaaaagcatgcttaatttctgtaatgacagagaacattgccatttgtgtattctctaaaagtgtttgaaatctaaattactgatt

SEQ ID NO: 346515 - DNA, 613 bp, Homo sapiens
attttattttcctgccttcttggagtagcaaagccttatcttgctttaaggcaggacctaagcacaataatttcctgctgtatgtttctggaaatacaactctccaagaggcaaactctttcaaagctagcaagcaattccagctatctaggcttcactttttctcaggatttcagccattgatggcaatctacagagagctcaaagttttgaaaaaaaaatttaatttaaatggaagatagggacaatcaaagaatactagaatctcagtgaccttatatagacccatgcttttatgtcccataatcttacttaaatggaaattgagtctgaaasattctaaatatgttatttaaggtaaaatgcatggccattggcaaggtcaggtaaggttgccaggacactgcaaaccccttttgcactgttagtttcttaaatacatcttcagtttctagaaaggatgctatatatttgccttattgaggaatttcttctctttttgtttctattatgactcatgcagataacaaaaagcatgcttaatttctgtaatgacagagaacattgccatttgtgtattctctaaaagtgtttgaaatctaaattactgatt

SEQ ID NO: 346516 - DNA, 613 bp, Homo sapiens
attttattttcctgccttcttggagtagcaaagccttatcttgctttaaggcaggacctaagcacaataatttcctgctgtatgtttctggaaatacaactctccaagaggcaaactctttcaaagctagcaagcaattccagctatctaggcttcactttttctcaggatttcagccattgatggcaatctacagagagctcaaagttttgaaaaaaaaatttaatttaaatggaagatagggacaatcaaagaatactagaatctcagtgaccttatatagacccatgcttttatgtcccataatcttacttaaatggaaattgagtctgaaagattctaaatatgttatttaaggtaaaatgcatggccattggcaaggtcaggtaaggttgccaggacactgcaaaccccttttgcactgttagtttcttaaatacatcttcagtttctagaaaggatgctatatatttgccttattgaggaatttcttctcttyttgtttctattatgactcatgcagataacaaaaagcatgcttaatttctgtaatgacagagaacattgccatttgtgtattctctaaaagtgtttgaaatctaaattactgatt

SEQ ID NO: 346517 - DNA, 599 bp, Homo sapiens
agaaatcattagttaggtgtatatctagaaaacataaatctacagaatgtggattatggggttggatcaatattagcctgaatatttaagaatttaaatgctaaatgttgagtgactcatttgctcttccttccagtggtctctaatttgagtacatgtcctcaaacattgttttcaaaaaagatttaaaatgtgtagaatgaagtagaaaatcacatttcttaaacgattttaattaagcatgttatatttattatacaattccctttttttggaggcagataaaagtttactatgcattccataagacaagactaaatgagaaagaccaagaaaaawacagtagaagcatacagagatacaagagtcctcaggtagaaacatttgtttgtttgtttgtttgtttgtttttgagacggagtctcgctctgttgcccaggatggagtgtagtggcacaatctcagctcactccaatctctgcctccctggttcaagcgattctcctgcctcagcctgccaagtagctgggattacaggcatgtgccactatgccctgctagacaattcacattttcttttgagactttagactatatat

SEQ ID NO: 346518 - DNA, 599 bp, Homo sapiens
agaaatcattagttaggtgtatatctagaaaacataaatctacagaatgtggattatggggttggatcaatattagcctgaatatttaagaatttaaatgctaaatgttgagtgactcatttgctcttccttccagtggtctctaatttgagtacatgtcctcaaacattgttttcaaaaaagatttaaaatgtgtagaatgaagtagaaaatcacatttcttaaacgattttaattaagcatgttatatttattatacaattccctttttttggaggcagataaaagtttactatgcattccataagacaagactaaatgagaaagaccaagaaaaatacagtagaagcatacagagatacaagagtcctcaggtagaaacatttgtttgtttgtttgtttgtttgtttttgagacggagtctcgctctgttgcccaggatggagtgtagtggcacaatctcagctcactccaatctctgcctccctggttcaagcgattctcctgcctcagcctsccaagtagctgggattacaggcatgtgccactatgccctgctagacaattcacattttcttttgagactttagactatatat

SEQ ID NO: 346519 - DNA, 594 bp, Homo sapiens
acatcccaatacagactttgtagttgcatctccactcacccccaatgagatctacttggatttaaatttaattattagtgatgtagcaatgagaggtgactgaggtaggttgtgaggagaaatgtttataagacaattgccaaagggagattgttaaagatatgtcagcagggaaactaacctgagaatggaaaggagagactacttctccaactgaggaagtttagagggaagtagggtttaaggcacatagacccattagaatcccccatgtggtcccacttttataaataccttaacttgytaattataattaaggacagggaaggctgttatttgcaattcagcaagctttaaactcatacattgtgtctaattttctgaaatatttgtattgtgtcttaaaagagccaagaacttatttcaaggaagtatagaaaccctctgattctctgaacatgattggaaatgtgaatttaaattcatgagattctccttttctttctgtaatctttctaaggcattccaaaggggctaatgcaaaacaaagtatttaaattattatttatgccataatattttattgtaccagtc

SEQ ID NO: 346520 - DNA, 518 bp, Homo sapiens
agtttggaacttcttcgagacttcttgaatggctttgaccaaaatgctgatagtgatatggaaaatgaagtccaggctgcrgtattctcagagggagatgaggaacttggtgggaactggagcaaaggtcactcttgctatgctttagcaaagagattggagacgttttgctcctgccctagagatctgtggaactttgaaattcagagaggtgctgtatggtatcaggcagaagaagtttcaaagcagcaaagtgttcaagatataacctgggtgctcttaaaagcattccgttttatatattcacagagaaggtttgaaattggaacttatgtttaaaagggaaacagagcataaaaatttggaaaatttgccgcctaaggatgcaaaagagaagcaaaacccattttctagagagaaattgaagtcagccccagaaattagcataagtaacaatgagccaattgtaaatcacaagacaatggagaaaatgttcccagggcatgtcagagaccttc

SEQ ID NO: 346521 - DNA, 518 bp, Homo sapiens
agtttggaacttcttcgagacttcttgaatggctttgaccaaaatgctgatagtgatatggaaaatgaagtccaggctgcagtattctcagagggagatgaggaacttggtgggaactggagcaaaggtcactcttgctatgctttagcaaagagattggagacgttttgctcctgccctagagatctgtggaactttgaaattcagagagrtgctgtatggtatcaggcagaagaagtttcaaagcagcaaagtgttcaagatataacctgggtgctcttaaaagcattccgttttatatattcacagagaaggtttgaaattggaacttatgtttaaaagggaaacagagcataaaaatttggaaaatttgccgcctaaggatgcaaaagagaagcaaaacccattttctagagagaaattgaagtcagccccagaaattagcataagtaacaatgagccaattgtaaatcacaagacaatggagaaaatgttcccagggcatgtcagagaccttc

SEQ ID NO: 346522 - DNA, 518 bp, Homo sapiens
agtttggaacttcttcgagacttcttgaatggctttgaccaaaatgctgatagtgatatggaaaatgaagtccaggctgcagtattctcagagggagatgaggaacttggtgggaactggagcaaaggtcactcttgctatgctttagcaaagagattggagacgttttgctcctgccctagagatctgtggaactttgaaattcagagaggygctgtatggtatcaggcagaagaagtttcaaagcagcaaagtgttcaagatataacctgggtgctcttaaaagcattccgttttatatattcacagagaaggtttgaaattggaacttatgtttaaaagggaaacagagcataaaaatttggaaaatttgccgcctaaggatgcaaaagagaagcaaaacccattttctagagagaaattgaagtcagccccagaaattagcataagtaacaatgagccaattgtaaatcacaagacaatggagaaaatgttcccagggcatgtcagagaccttc

SEQ ID NO: 346523 - DNA, 594 bp, Homo sapiens
acatcccaatacagactttgtagttgcatctccactcacccccaatgagatctacttggatttaaatttaattattagtgatgtagcaatgagaggtgactgaggtaggttgtgaggagaaatgtttataagacaattgccaaagggagattgttaaagatatgtcagcagggaaactaacctgagaatggaaaggagagactacttctccaactgaggaagtttagagggaagtagggtttaaggcacatagacccattagaatcccccatgtggtcccacttttataaataccttaacttgctaattataattaaggacagggaaggctgttatttgcaattcagcaagctttaaactcatacattgtgtctaattttctgaaatatttgtattgtgtcttaaaagagccaagaacttatttcaaggaagtatagaaamcctctgattctctgaacatgattggaaatgtgaatttaaattcatgagattctccttttctttctgtaatctttctaaggcattccaaaggggctaatgcaaaacaaagtatttaaattattatttatgccataatattttattgtaccagtc

SEQ ID NO: 346524 - DNA, 563 bp, Homo sapiens
tatccaggcagaagtttgttacaggggtggagtcctcatggagaacctctgctaggacactgcattagggaaatgtggggctggagccccacacagagtccctcctggagttctgcctagtggaagtgagagaaaagggccaccatcctccagaacccagaatggtaggtccaccaacagcttgcaccatgcacctggaaaagccacagatgctccatgtctgtctgtgaaagaagacaagagggaattgtaccctgcaaagccacagggrtggagctgcctatggtggtggtagccccatctcttgcatccatgtgacctggatgtgagacatggattcaaagggaatcattttggaacgttaaggtttaaagactgccctattggatttcagacttgcatggggcctttagcccctttgttttgtccaatttctcccatttggtacaggtgtatttacccaatgcctatatcctgattgcatctaggaagtaactaagttcctttcgattttacagactcctaggtagaatggacttgccttgtctcaggtgagattttgt

SEQ ID NO: 346525 - DNA, 563 bp, Homo sapiens
tatccaggcagaagtttgttacaggggtggagtcctcatggagaacctctgctaggacactgcattagggaaatgtggggctggagccccacacagagtccctcctggagttctgcctagtggaagtgagagaaaagggccaccatcctccagaacccagaatggtaggtccaccaacagcttgcaccatgcacctggaaaagccacagatgctccatgtctgtctgtgaaagaagacaagagggaattgtaccctgcaaagccacaggggtggagctgcctatggtggtggtagccccatctcttgcatccatgtgacctggatgtgagacatggattcaaagggaatcattttggaacgttaaggtttaaagactgccctattggatttcagacttgcatggggcctttagcccctttgttttgtccaatttctcccatttggtacaggtgtatttacccaatgcctatatcctgattgcatctaggaagtaactaasttcctttcgattttacagactcctaggtagaatggacttgccttgtctcaggtgagattttgt

SEQ ID NO: 346526 - DNA, 594 bp, Homo sapiens
acatcccaatacagactttgtagttgcatctccactcacccccaatgagatctacttggatttaaatttaattattagtgatgtagcaatgagaggtgactgaggtaggttgtgaggagaaatgtttataagacaattgccaaagggagattgttaaagatatgtcagcagggaaactaacctgagaatggaaaggagagactacttctccaactgaggaagtttagagggaagtagggtttaaggcacatagacccattagaatcccccatgtggtcccacttttataaataccttaacttgctaattataattaaggacagggaaggctgttatttgcaattcagcaagctttaaactcatacattgtgtctaattttctgaaatatttgtattgtgtcttaaaagagccaagaacttatttcaaggaagtatagaaaccctctgattctctgaacatgattggaaatgtgaatttaaattcatgagattctccttttctttctgtaatctttctaaggcattccaaaggggctaatgcaaaacaaagtatttraattattatttatgccataatattttattgtaccagtc

SEQ ID NO: 346527 - DNA, 307 bp, Homo sapiens
tgaattccctctgaaaggtcatatatcttttattctttaggatttgtacctggtgccttatttagtttatttggtgaggccatgttttcctgggtggtgttgatggttgcaaatattctttggtgtcttgacattgaagagttaggtatttattgtaattttcacagactgggcttatttagtctgtcctccttgggaagactttccaagtatgtgaagaaagttagcccygaaacccaataatactatagtttttgcagacttttagaggtactatcttgttgatcttggataaaatctagaagaa

SEQ ID NO: 346528 - DNA, 626 bp, Homo sapiens
accacgtttttcggattggtgaatatatctagagattttatttccagtatactcacatgagagttttaatgggactttctttgtgtcacagaatattttttagaaaacttctatgatattaaatacagtatttatttagtatattatatttattatatagtatttgatggcagagtgttcatgtgttttttttcaatcatttccccttttagagaaaatgaaggtatttccaatttttgatcattgtacatattgaagcaattactattcttgcttattttctggaaatgtgcacgttcacttatccaatggaatcacttagtcaatataatcacttagtattatcaattagataatcaatataatcacttagtattataatttggacagtgctgttatacaaagctttttcatccatgtgtgttaaattctctgaaaaagcagaatggtaaagtttagtttgtattatccagtgttccaagccttttcattagccttagattaaactcaaacttctgtggaaagatacactccagagacawcctagtgatataactttccaaaatctataagtgttggataaattcattcatttatccaacagctatttttcaatgcctactatc

SEQ ID NO: 346529 - DNA, 624 bp, Homo sapiens
caattcacatacttacttaggtgactatattgactcctgtggccccagctggctctaggtttgagcagtcttctcactctcagacttatatatctgttttgtcaccagacatctcaacttgaattgttgctggacatttcatattcaacagactcatcaattatttaatatttatttcccaaatttgcttttttgttattcttccctattttagaatattgtacctttaactaygtttatgccaaaaaaagggcagccatatttttcaaaatttaatccgaaagggattaacctatataggcaattaatctctaaatttgatcaattctacttcacatatatattaattctactccatatatatctcttttgtttctcccattctctttaacaccactattaatactgcaattcatactagaaccttccctctcttccctcccctggatgatgatgatgatgatgatgatgatgatgatgattattattattatttaagacagagtctcactctgtcatccaggctagagtgtagtggtgtgaacatagctcactggaacctcaacctcctgttcccaggattattgaaatgagtttctttcttgtctctcaactcaattatta

SEQ ID NO: 346530 - DNA, 542 bp, Homo sapiens
taatacagtgtatctgacctcacatcaaatgaaacaatgatattgacaagattctatgaagcaaatggcccaaatattttctatttgattaaatcacctttaatgatgtgaattatgaaatgttttacaacacattttttagtaaaaactatgttttttactctagatattataagttcttataagggtaatctgtagaaccatgtaaaatatatactttctcatcaaaagaataatcatacgcattcttatagtactattaattccttaaactttaaattgttatttttaattcattaagtagcaaatcctgaacaaatacatggttttcattctccttattttacatatgaaaatcactgagcttaaaaattctcacttaattttttaacaaagtttttaaataaaatatgttttatgaatttacaatgctttacraatttacaattcaaatttttaaatatattaaaatgctatatcttaaagtgaaaatgaaaatataatctgtttacatagacaattaatacattcaggtaaaaaaa

SEQ ID NO: 346531 - DNA, 480 bp, Homo sapiens
cctacagtcaatggatatgaatatattggatgtacattctgtcctggctgggcacgtaaaatttcctatggagtgattcactttctcattcctgtctgtcagctataagtcaacacacatagtaatttgcctctgagaaatctttaaatgagaaatagctagacttccaaaatattaagctattgtgatttcaagatttaatctctttcagcagctagtgctatggtaaataattcatccaccaaacagttgagtaccttccttagaaacctccttttgcctgagatcatattcttttttatttkttaattttggccttttttgaacactcaaattttgcctgctgccaaacataccttgcatcagttttgtcttgaccgttggtctaggaataagcctagaccaatctcctttgtcttaccagcaaacaggtgaattatccgcatgctttaaagctgagcccattcaagatagaatggt

SEQ ID NO: 346532 - DNA, 627 bp, Homo sapiens
aatttatatatgttttagtatgcactataaaatttagaacatacaattacagttagaagcatttttaaatatgacattaattttattcatcataaaaatggacttgtgaagctaagaactgagaagaaattctcttttttataaagtcaatagttgttatatatctttaatttaaattttcttatttctctttgtatctaaaaaccctattataattctttctcatatatttttcattcactactcmattttggtgtgcatgaatttgctagacattccaatttcaatccagcagtgcaagaaaaataaatcaacttattgacaattaaatctcatatccaatgtggttgcacaatgcacttgaaaataactgccattattctgtaccaaaaaaaaatatatgttagtactttgaaacatagctgtcatttgaattagaaaattaacttcacaaatttcaatcatcacaagaacttagatttataactagcatgatctgatacttggtgtgacataatttccacatattggaagactatccctataaatcaaggtacccgtctgaaataatagggaagaatgtggcaaatgaactaaacacaagtgaaatgcaatatttgctagaaa

SEQ ID NO: 346533 - DNA, 567 bp, Homo sapiens
cataaccacatagattatgataaaaattgcccaaaggaaataaaagatgtattttactggaagagataaaagagactctgaacaactaaaaaataactaaacacaygtactgaattataatttcttttaccttcttagggttctatatgtattcattcaatttcataatgttacactcaattgcaataatatttgtttataatataattcactgtttctatatacaattgaaattatacttattctttcccaaagaatcgtagttagacttttataaaattgcaagtattttaacatagtctttctgttttgatgcaatagtgacttctgttgacctgtcattctgaggctaaataatatgttcatcccaacaattcacccaaacataatggcagagtgaaaacaaagtaccttcaatagcaaatctttggaaaaagagcaaaatggaaaaaataaaccacttcatagcatactgtcaattatcaaaagataggggaaaaataatacaaaacatcttctgactgatggaagagtgtgtgcatgtaaaagaatttgactgcctcctga

SEQ ID NO: 346534 - DNA, 567 bp, Homo sapiens
cataaccacatagattatgataaaaattgcccaaaggaaataaaagatgtattttactggaagagataaaagagactctgaacaactaaaaaataactaaacacacgtactgaattataatttcttttaccttcttagggttctatatgtattcattcaatttcataatgttacactcaattgcaataatatttgtttataatataattcactgtttctatatacaattgaaattatacttattctttcccaaagaatcgtagttagacttttataaaattgcaagtattttaacatagtctttctgttttgatgcaatagtgacttctgttgacctgtcattctgaggctaaataatatgttcatcmcaacaattcacccaaacataatggcagagtgaaaacaaagtaccttcaatagcaaatctttggaaaaagagcaaaatggaaaaaataaaccacttcatagcatactgtcaattatcaaaagataggggaaaaataatacaaaacatcttctgactgatggaagagtgtgtgcatgtaaaagaatttgactgcctcctga

SEQ ID NO: 346535 - DNA, 475 bp, Homo sapiens
gtgtgcatgtaaaagaatttgactgcctcctgatttgcttcctgggattatatttattaggtatttactttttatgaggtgagaaattaggggcagatgtttgacagatttatgttttctctagcagtgaacttcatctagaatcgtggtaagctggattactttcaagttctagacactgtttttttagtttgtttctttgttttttaaaataaaacaccagatatctgatcatggtctttgtggccttatcgctacaaatgttagccatatacatataattttaagtattctattagttacatgaaaaataaagtaaaaattaatggtaaaattaattttagtgatatatttatctaacccaataaacccaaaatagtatcattcarcatgtaaccaatgcaaaaatttttgataacattttaacttatgtgtacaggtttttgaattctcatgtgttttgtacagttaaaga

SEQ ID NO: 346536 - DNA, 475 bp, Homo sapiens
gtgtgcatgtaaaagaatttgactgcctcctgatttgcttcctgggattatatttattaggtatttactttttatgaggtgagaaattaggggcagatgtttgacagatttatgttttctctagcagtgaacttcatctagaatcgtggtaagctggattactttcaagttctagacactgtttttttagtttgtttctttgttttttaaaataaaacaccagatatctgatcatggtctttgtggccttatcgctacaaatgttagccatatacatataattttaagtattctattagttacatgaaaaataaagtaaaaattaatggtaaaattaattttagtgatatatttatctaacccaataaacccaaaatagtatcattcaacatgtaaccaatgcaaaaatttttgataacattttaacttatgtgtacaggtttttgaattctsatgtgttttgtacagttaaaga

SEQ ID NO: 346537 - DNA, 606 bp, Homo sapiens
ggcactcaacttctattatgaacaactagatagacataacagaaaaaggtgacatgattcatacttcagaataagcttaaattgttaaaagattcaaatgtgaaaaaaaattaaaacaagttttagaataaagcatgaataaattttttcataacctgggtgtgacaaaaatctttcaaactatgactaaaaatacatatttaataaaatactcataaaatcttctatgtagaacaaaaatttcacatttacggccgggcgcggtggctcacgcctgtaatcccagcactttgggaggctgaggcgggcggatcacgaggtcaggagatcgagaccatcctggctaacacggtgaaaccccgtctctactaaaaatacaaaaaattagccaggcgcggtggcaggcacctgtagtcccagctgctcaggaggctgaggcaggagaatggcgtgaaccygggaggcagagcttgcagtgagccgagatcgcgccactgcactccagcctgggcgacagagcgagactccgtctcaaaaaaaaaaaaaaattccacgtttacatggcaaaaaacaccataagtcaaaagcacaatctgggaaacaata

SEQ ID NO: 346538 - DNA, 552 bp, Homo sapiens
ccctgtggaacaatgataacaggagagacagacattgatgtgtaaattacatcatyacccaaagccacttccactcaagcagagtcccagatcatattggggttcaaagggactctaatcttaccctactcattttttttttctcctaaactcttgccagaaatgagggaaacacagagatgcttgttcatgttagcttttctgacttgacctggaaactgagagtcatgtaacaagacaagggctgcccggagttcacagatttaaggatcaagtttgtgaagacattggcttagataaaaggacagtagttaacattaacattacataagcttgaacaactatctcaagagatatccagtactttgagagaaacaagaaattgtatcaacagtttataaataaatgtgaatttataataatacggctagaactgtctgtgaaaggaaaaaggctgacctttctgtcttgaaaaatatttttcttttctgaataatttagggctggacaatttgatcttttataggtcatactaatcaacattttgctatt

SEQ ID NO: 346539 - DNA, 591 bp, Homo sapiens
taaagaaaatcgtctctctttttctaacatacatactgtggtctgggcctaacccaagaaaaagaaaggtgaaataatttataagtcaagaaggaccctaagagtgaagaaggcattcagcatctgtttataagacttgtatggaaatatccatgatatartgattagaataacatgaaaacagggaccacattatatatatatataatatatacacacacacatatatacatatatatatgtaacagggaccacattatatatatatatatatatatatatacacacacacacacacacacatatatatgtatataataaatataagagtaatatttttgctttaaatccatcatcacataaaacataatgaaatttaaagtaataataacaccttagcaaatggcattattattgttattgagaaacggattgagaaacagattgaagcagttaggaggctgttggctgatctgagtcattttctacataaaatgcaaacttggaagcagtgaacaactttaatgtgactaaacccttttagtataaagtgaatacctctgtgcaagtttctagcccaaaaagttagaa

SEQ ID NO: 346540 - DNA, 591 bp, Homo sapiens
taaagaaaatcgtctctctttttctaacatacatactgtggtctgggcctaacccaagaaaaagaaaggtgaaataatttataagtcaagaaggaccctaagagtgaagaaggcattcagcatctgtttataagacttgtatggaaatatccatgatatagtgattagaataacatgaaaacagggaccacattatatatatatataatatatacacacacacatatatacatatatatatgtaacagggaccacattatatatatatatatatatatatatayacacacacacacacacacatatatatgtatataataaatataagagtaatatttttgctttaaatccatcatcacataaaacataatgaaatttaaagtaataataacaccttagcaaatggcattattattgttattgagaaacggattgagaaacagattgaagcagttaggaggctgttggctgatctgagtcattttctacataaaatgcaaacttggaagcagtgaacaactttaatgtgactaaacccttttagtataaagtgaatacctctgtgcaagtttctagcccaaaaagttagaa

SEQ ID NO: 346541 - DNA, 557 bp, Homo sapiens
ttgggcttgtttttagacctttttatttttggtctagaaagaaatttatttattattacactatgtctagaaagaaatttagttttatttatcttatttagagcttatgattcttctcaaaaccaggctatcatctcattgtatattgtctttcctaccatttatctattmtctccttctgtaagtcctatccgaaggtgaccatcttatcttacccttcatatctctcaaactcttctttttgtttatcatttattaatctttctgtacttcatactgtgtaaattttctgataccttttttctagtttattaaccctcttttttacccacatccatttttttatttgttcttaaatttcaatgaccatgtctttcttttgtagggttttcttagttcttttcacatcctatcataccaatttctgactcatgttatgtgtgtgtactttattttgctatttatttatttacttacttaagacatattttatatcagattattttgcctccttaaattcttgggtttctagtcctcttgtctgtttttttctgcta

SEQ ID NO: 346542 - DNA, 505 bp, Homo sapiens
gttagatttttaggaaagctttttaaaatttgttagtttgtttttgctcatccagagttctgacagaaatacttaacatcagtaactctctgtggtggtggacagaatttttctgttcttcaaacaagagtatggccttttgagggtcctggctttattcgtgtgtgccaactgcccccttatraggggagaagttcccctctatttccatgcagagtttaaaaccagaatccttgggttataaatattggctgccaccccagagctaaccttttcaccctgcatttcaccttgtattcgcagaagtcacatatttagctaatttctattgtgttcaggtctcttttcctctaaatctccaacttatttccctttatttattgaaaactctgtaaaatacttaaaatcctttttatattactgtttttcacatttttatgtagttttagcagactacttttagggacaatttatgttttgccataaatggaaactaggaattttc

SEQ ID NO: 346543 - DNA, 524 bp, Homo sapiens
ttaaaaatgctttgttttctcaaaacaaagttttagaaagatgttttctaaatcattgtactatcttcaacaataaagatttttaaaaacatttaacaaatgtttgtttgatggcttgtgtgggaattgaaacagcatatatctgcagtgcacaggaccagtactttaatttcaatactttcatgactgtgagagaaattacctttgtgattcttccccaggaaaaatctctgccaatctgtggcgggtaaatggtcaatttatttggctytacagtgggacacttggtttttcagggattaacttaaccagctttaaattaatcgggctatttccttctttattcttgataatttctgtgaattacttttattattttctattttagtttttgtggctacaaagtagatgtgtatttttatggagtacctggaaagttttgatacaagaatgcaatgcttcataaccacatcatgtaaaatgaggtacccatcttctcaagcatttatcttttgtgttacaaa

SEQ ID NO: 346544 - DNA, 606 bp, Homo sapiens
tttgtaaatttagtagagactgagttttgccatgttggccaggctggtctcaaactcctgaccccaggtaatccacccacctgagcctcccaaagtgctgggattacaggcatgagccaccatgcccaacctgacccctttatcattatatagtaaccttctttgtctcttgttattaggttagtgcaaaagtaattgcaatttcagattatgaatcttaaatcattataagaggctcaagcacatctttattaatcaaaataggaacrattacaatccacatatttttgccaatgaaaaatatgtttgttaattcttgtagcataaagattcatgcttcaggatttgacaaactactggagagcattttcttcatcctgctggttgtggaagcattttccctgcaaaaagttgttgcaatgcttgaaaaagtggtagttccttggtgagagatcaggtgaatatggcagatgaggcaaaacttcatagcccaatttgttcaacttttgaagtgttggttgtgtgatgtgcgattgggcattgtcctggagaagaattgggccctttctgtagatcaatgccagctgcaggcattgcagttttggt

SEQ ID NO: 346545 - DNA, 587 bp, Homo sapiens
ttgcccatttttctttgtgttgtatttattttccatactcatcaaaaacatcccaaaatgctagaggaaatgctctagaattcaggaataacttcttttgtggtagagaatttttatttcagagtatagacactgtttgtgctgggtttcttaattttactggatatcatcattttcttgggctgtttgatcaagtttgattttcccagtgcaacatttctgagagtaaatatgrtctgcttaataaaatatgttctaaagccagataagtgctttccagcaagtacaattttccttccagcaagtataatacctggtttataagcattacatatattaatattattattttgtcagatagatataataaaagtttaatatttcaatcttttatggtaagtgctatttatatactgtttaagaaagaggcacccatcatgacaataatgttctatattttcctatgaaagtcttgttttatatttcacatttaggttttgatggtccttaaatataagatttttatacatgatattatgtatggatttaggttaatttatttttatatggatagccaattgacccag

SEQ ID NO: 346546 - DNA, 535 bp, Homo sapiens
attacctcagttccaaatgctaagaatagtcactcccacttgtatatggttttcaatgtctctttgctgtctctcagttcctgtgtcccaagcgtggctactttggtactttatttccccattcccatgggatggctcacccttcaggaacaggataccacctcaatacctacttctagctattgactacatacccagaattcttagttcctcctgagattggaactatttgggggcccctgactgtagaatatagccagtcctttttcctagtggaactggaaacagctccaacagaaatrtgaattctaggaaaacaacatagatgtttaggaaatataaatgaatttactttttaactaagtcagatgtactaaagaaacagggcacctagtgtgttttatggtccatcttttcagggatagtatttgcataaaaagtacagaaataacagaaggtcatacttgagtagttaagaccatgtttcagctgctattcataatagcttacaacttcttattcccattttattcta

SEQ ID NO: 346547 - DNA, 495 bp, Homo sapiens
tgtaaaatcaaaagcaagttggtacttccaagatataatgctggtacaggcattgggtaaatgttctcattacaaatgggagaaatcagccaaaacaaaggggccacaggccctgtgcaagtccaaaattcagtgaggccatcattaaatcttaaagctccaaaataatctccttttactccatgtctcacacccaggacatggtgaagcaagaggtgggctcccaaggccttargcagctctgcccctctggctgtacagggcacagcccccgtggctgcttttatgggctggtgttgagtgtctgcagcttttccacatgcacagggcaagttgtcagtggatctaccattctggggtctggaggatggtggctctcttctcacagctccactaggcagtgccccaatggcaactctgtatggggactctaaacccactttcccctctgcattgccctagtagaggttttccatcagggctccacccctgaag

SEQ ID NO: 346548 - DNA, 531 bp, Homo sapiens
gtctggtaacttgatgccttcagctttgttctttttgcttaggattgccttggctatttgggctcctttatggtttcgaatgaattttaaaatagtttttttctagcctgtggaaagtgtcattggtagttggtaggaatagcactgaatctatacattgctttgggaattatggccattttaatgatattaattcttctaattcatgagcatgaaatgttttttcacttgtgtcatctctgatttctttgagcagtgttttgtaattctcaytgtagagatctttcacctctctggttagctgtttttcccctattcctaggtgttttattctttttgtggtaattgtgaatatgattgagttcctgatttggctcttggtttggctcttgttggtctatagaaatgctagtgatttttgtacattgatattgtatcctgaaactttactgaatttgtttatcagctgaaggagcttttgggtcaagactatggtgtttaactggaccccttccttacattatatataaa

SEQ ID NO: 346549 - DNA, 606 bp, Homo sapiens
acaatatgaaatgctggtgagaatgtggagaaacaggaactcttgttcattgctggtgagaatgcaaaattatacaaccatattggaagatagtttggcagtttattacaaaactagcatgctctgaccatatgatccagtaattgcactctttggtatttacccaaataagttgaatatttatatccacacaagatttatcacataagcgtttatagcagcttgattcatattgccagaacatggtagcaagcaggatgtttttcaggaggtaaatggataattcaactgtggttatatccagacaacaaaatagtattcagagctaaaaagaaatgaattatcaaggcaagaaaagacatggcggaaccttacaggcatattgctaagtgaaaaaagccarcctgaaaagacaacacattgtatgattctaactacatgacatcttggaaaaagcaaaatcatggagacagcgaagaagaaaatggtcaaccccacttttgtcacttctgaaaaattttagattatgagagtaatatgtctatcagaaaatatgtgcttccaaagcaatgtcaagtctgctcagggtatgcacagcaacagaaa

SEQ ID NO: 346550 - DNA, 306 bp, Homo sapiens
ttgggttgttacaaacttctctcagctgcattcccrttagataaaactgaatgatgcattggaaacttggaaattaaaaacatgtatctgtggcagaaagataatgctgcacacaccatttttctttttgctgcttcactaaatcagttgatgctgaaaacaggcaataaggtgtataggccaggcccacagctccttttggtcaggtgccattaggacctaatgttaactgtcttctaatgcgttacatcaatagtacatgaatgagtaataagctctaacttttgcaaaatatgtgaacaaatt

SEQ ID NO: 346551 - DNA, 306 bp, Homo sapiens
ttgggttgttacaaacttctctcagctgcattcccgttagataaaactgaatgatgcattggaaacttggaaattaaaaacatgtatctgtggcagaaagataatrctgcacacaccatttttctttttgctgcttcactaaatcagttgatgctgaaaacaggcaataaggtgtataggccaggcccacagctccttttggtcaggtgccattaggacctaatgttaactgtcttctaatgcgttacatcaatagtacatgaatgagtaataagctctaacttttgcaaaatatgtgaacaaatt

SEQ ID NO: 346552 - DNA, 306 bp, Homo sapiens
ttgggttgttacaaacttctctcagctgcattcccgttagataaaactgaatgatgcattggaaacttggaaattaaaaacatgtatctgtggcagaaagataatgctgcacacaccatttttctttttgctgcttcactaaatcagttgatgctgaaaacaggcaataaggtgtataggccaggcccacagctccttttggtcaggtgcmattaggacctaatgttaactgtcttctaatgcgttacatcaatagtacatgaatgagtaataagctctaacttttgcaaaatatgtgaacaaatt

SEQ ID NO: 346553 - DNA, 306 bp, Homo sapiens
ttgggttgttacaaacttctctcagctgcattcccgttagataaaactgaatgatgcattggaaacttggaaattaaaaacatgtatctgtggcagaaagataatgctgcacacaccatttttctttttgctgcttcactaaatcagttgatgctgaaaacaggcaataaggtgtataggccaggcccacagctccttttggtcaggtgccattaggamctaatgttaactgtcttctaatgcgttacatcaatagtacatgaatgagtaataagctctaacttttgcaaaatatgtgaacaaatt

SEQ ID NO: 346554 - DNA, 516 bp, Homo sapiens
tcatttaaagcctgatactgactgcatctgtgcatgcacactcacgcacatgcacgcatacgcgaacacacacacacactcttatacatatatgggctctaagaaacagattttagacatttcaagagaaactctaaagagccagtatgattaaattacatttcgttatagtaaaataatgaaatgtcaataaaaaaataataaagtgtttactgtataggaatgtagtaattcttgaatagttgatayaatttttttcaaattatgatattatggtggattgcactgtttccttatatcacataaaaggtcttctggagggagtagggattccatctcacttgaagcttgagtttattctttctgttcacaactccctaatcttctctcaattatcattttgtctgcagggctactcagaaatccttgtgcttttctcatggtgaccatcttttacatttccctatggctgctaattccaaactcccctcaacagaatttttaaaatttacagag

SEQ ID NO: 346555 - DNA, 390 bp, Homo sapiens
actgataaacttctagaactaaaataaaagttattggatatcaaatacatgtaaaaacacctattctaatagttaaggtttaccaataatgaccagttagtacatttactatgttgaaacaaaacaggtaatgtttactaccattaaaatgaaaatgtaagatacatagaaagaatttttawatgagaaatgcgtgcttgatatagacaaccttaaaacagtttactgtaagacataaaatatctgaagagagaagagtgactagtgtaaatatagcaattctttacaaataggctaatttaattacaatcaaaattccagtaattttgattgtaattaaaatttgtggaagagattaaaatagtgcataaaagtgtcagctggaagaat

SEQ ID NO: 346556 - DNA, 586 bp, Homo sapiens
agaatgtgtatgcttctcttgcagagaatattttggaatccagcaaactaaacaacattaaatcaaacatttaaattaaaagccacagctgaccaaatattattgtatctgtttattttattatcttgaaaggcagctgcttcctaagtgaaagcaaattaaactcagttaagygaattttttaatttgatggcatgaacccgaaatcgatgtttgaaaacaagtggcttgattttaacccaccttgactagaaagtaaatagctgattctttttttatgtctctcatagaaaaatggtaagagatctgcagtggaagtcaggaaatcataaacctagtgtctgcctggtctctggagaagctgtatatctttgttcaagtgacttaatctttcagggtctcagtttccacattccattccatggactctcaacatataaaactgattttaaaaaaaacatccggtttaagaggaaaagagactccctatctgctccatcctacctcctgcccctagcatggaggaaccacaagaacacagggtgaaaaccatctcacacaaaacacatttaatagagtcctgctc

SEQ ID NO: 346557 - DNA, 582 bp, Homo sapiens
ttttctcgaaaaagtgttgatttttgtcagtgagcaccttttacttatgttggttttaactgacatgtgagtgtatttaagaatctgaaatctattttatgaatagctttaaagtgtcaaggccaggtgcaatggctcatgcctgtaatcctagcactttgggaggccaaggcaggctggatcacttgaggtcaggagttcaagaccagccyggccaatatggtgagaccccatttctactaaaaatacaaaaatgggccaggcctggtagcacctgcctgcaatcccagctactcaggaggctgagacactagaatcgcttgaacccagtaggcaggggtttcagtgagccaagattgcaccactgcactccagtctgggcaacagagcaagactctgtctcaaataaaataaaataaaatatttttaaaaatgtcagaagccttgtcaaccaccattgacaagagttatgataaactgatttaggattataaaaaacaattggtatggttttctttcaatcagtgtagtcccacagaggtgggaaacccagtgcttctggttggagtcagtttctcagta

SEQ ID NO: 346558 - DNA, 586 bp, Homo sapiens
agaatgtgtatgcttctcttgcagagaatattttggaatccagcaaactaaacaacattaaatcaaacatttaaattaaaagccacagctgaccaaatattattgtatctgtttattttattatcttgaaaggcagctgcttcctaagtgaaagcaaattaaactcagttaagcgaattttttaatttgatggcatgaacccgaaatcgatgtttgaaaacaagtggcttgattttaacccaccttgactagaaagtaaatagctgattctttttttatgwctctcatagaaaaatggtaagagatctgcagtggaagtcaggaaatcataaacctagtgtctgcctggtctctggagaagctgtatatctttgttcaagtgacttaatctttcagggtctcagtttccacattccattccatggactctcaacatataaaactgattttaaaaaaaacatccggtttaagaggaaaagagactccctatctgctccatcctacctcctgcccctagcatggaggaaccacaagaacacagggtgaaaaccatctcacacaaaacacatttaatagagtcctgctc

SEQ ID NO: 346559 - DNA, 623 bp, Homo sapiens
acttggaatgtttaatttgttgttatgtctttaattcatttagccrtcaagcaagtctctattgaattgccctgtcatatataatagaaaacaaatctacttagggaaaacataataagagaaagattaattgagggcatttccctttaaaacggtagcgcaacagaccttacagaattcaaaatggttgatggcccttcagagagccagtcgagaacgcattaccgtgtgtcaatcttggggtaggggttcatgtatgagaggtgcctctcacaaggcaaagaagcatggctggagtgaaacatgttgctgaaagctaaagctagcacctgagttctctgttggttcttcatctggtgttcagctctattgcttcagacccaaattagaaatatgtgcaaagagagaagtgaattttgaaacatgccagagggtatgagatggcaaggttgcttttgtttggttaggtttatgataagtttaggtagaatatgcacacttgatctcttctgaaagctttcctgaggattccatcagtgtgagggcatacctgcaaggaagcacatgccgcagcctgcacacaggcacgccccactatggcagtagctgaagaaggaagcact

SEQ ID NO: 346560 - DNA, 623 bp, Homo sapiens
acttggaatgtttaatttgttgttatgtctttaattcatttagccatcaagcaagtctctattgaattgccctgtcatatataatagaaaacaaatctacttagggaaaacataataagagaaagattaattgagggcatttccctttaaaacggtagcgcaacagaccttacagaattcaaaatggttgatggcccttcagagagccagtcgagaacgcattaccgtgtgtcaatcttggggtaggggttcatgtatgagaggtgcctctcacaaggcaaagaagcatggctggagtgaaacatgttgctgaaagctaaagctagcacctgagttctctgttggttcttcatctggtgttcagctctattgyttcagacccaaattagaaatatgtgcaaagagagaagtgaattttgaaacatgccagagggtatgagatggcaaggttgcttttgtttggttaggtttatgataagtttaggtagaatatgcacacttgatctcttctgaaagctttcctgaggattccatcagtgtgagggcatacctgcaaggaagcacatgccgcagcctgcacacaggcacgccccactatggcagtagctgaagaaggaagcact

SEQ ID NO: 346561 - DNA, 603 bp, Homo sapiens
ttagccttagccaaatgcattatgaagcatatgcttcttggtttggcatgaccttagttccctgttaactaaaataatagctacctgacaactcataaacatatatgtgattacaaacaccttgaattgaaaaaagtgcacgaaagttacatatttcaaactgtagatggatgtgggttgtgtagaacaatagggaaagaaacttaaaactgaattaagctattattttaaaggaacttactacatgggaaaaaacaaacaacaaaaaagactgcagtctaattctcaaaataggacaatggcatctaaggagtatattgaatgacctatgacacttaggtaatccttcttgtcttagttcattcacatgaatgctaaataatttcactcaacactttacatttagagaactcttttcaccttaaaggaattccaaagtatacatctagttgccatatatatatatatatatatatatatatagagagagagagagagagagagagagagagagagagaragagagagacagagagagagagaaagagagagacagaaagagagagagcagaccacttcatccaatactggaaaatgtccatt

SEQ ID NO: 346562 - DNA, 520 bp, Homo sapiens
gcttctgtatattaggataatagtgtaaattctagcacctagtaatatatactttataagttataaatgcattttcaatttgttatgatatataggcaaacaacatactctctgtattaggaagacacatagtgtatagattaaaggaaacggcgatccaggagcagtcatagctagtcagagcacatccagagcactgtgatcaattcatgacaccaccatttaagagagtagttgacaaattagacttcatccatagaggtgtgaccaggatgttgatggtcccaacagctgaacaaaaggtttggaaaggtaatgggagtatttaaaaagagaagacttaggaaaagcatgattgttttcttggaacatttgaaggcctatcaagtataccagaaaaaaaatctcactgttcatagtggagaaatagaacctgtatgagaaagcgttggagaatgtggtgattaatattgactgtctacttgaytgaagtatgcaaagtattgtacctgagtgtgtc

SEQ ID NO: 346563 - DNA, 635 bp, Homo sapiens
aatattgatttctctgattttacagagcactgtgtgttcagccaatagaacatttcattttctcctgctatttaggaactaatctgtcattgttctcttggctagagaaatatggttttccacaggtaggagtaagtgcaattttagttcactttgaggcaattcttatattactggatggattcgactatatttactagggatgaaaattatatctcttttcaatacaaagagaaagtgaatttagtgagagcggttcattccatttcataagggtctccaaaggcttggccttttccctctttctccatatctactaaggcaaattctcttcagggagattcagatatcaaattgagaaggcactgcaggaaaaaatttacctccattcctggagatggttctaggctaagccattcactttcctgttcttcagcttcaccccattaagaaaagaagaacacaagtagctgtttcccatgagtacctgttttaattctaccttcagggggaaaaaccagcttgtttgcaagtaatattatagttactatgcaatatataacctaatgtcacaaataacaatayagtgtgcatggtgcacattgcattaaagatttaatgaggcaggaaagttt

SEQ ID NO: 346564 - DNA, 551 bp, Homo sapiens
cgggctgcctagcaggaagtgagtggttggcattaccacctgagctcagcctcctaacagatcaggcaggcattagattctcatagaagctcaaaccctattgcgaactgcacctgcgagggatctagcttgtatgctccttatgagagtctaactgatgcctgatgatctgacgtggaacagttttatcccaaactcctcccctgcrtctgtggaaaaattgtctccaacaaaagaagtacctggtgccaaaaattttggggaccactggttaatgtatgttagtgatcagaacatttccagggcctaaggcatgagcctgaatgggctcaaaactgaagattctttaacaaccaaggatgttagagaagaggaagaaggcaagagagaaacctgttggaaaataattactataggagaacaaatgaaatatattccttcataattaaaggctactcaagcctatgatagtcataacatgacacaaaacctgcactttggtatatatgcgaagggttagatcacccaatggaagacctacttgtttgcca

SEQ ID NO: 346565 - DNA, 579 bp, Homo sapiens
ataattactataggagaacaaatgaaatatattccttcataattaaaggctactcaagcctatgatagtcataacatgacacaaaacctgcactttggtatatatgcgaagggttagatcacccaatggaagacctacttgtttgccatggctgaatggcattctcttaaccatcttcatttacatgaaactcattgttcacgactaacttgcatttgaggaaagcagaagtattgcatctggccactcgtattgcatctccttctcagccaagatgtcatgagcattagcaccactatcaatccagcagagctggctgcccattgcatcatgtgaattccagctgaatacatattagaattatataattgattgagtatgcaaaccckatggatttaccctcaagtctgaccaacattactataaatgcagaggaaacattagggagataattttgcttggataattataggcattcatgacccattgttgtctctttatttgttgtgcatttacttggataatgggttctaattgttgttcctgaaaaagaaagaaagtctgcaagcattaaaacac

SEQ ID NO: 346566 - DNA, 579 bp, Homo sapiens
ataattactataggagaacaaatgaaatatattccttcataattaaaggctactcaagcctatgatagtcataacatgacacaaaacctgcactttggtatatatgcgaagggttagatcacccaatggaagacctacttgtttgccatggctgaatggcattctcttaaccatcttcatttacatgaaactcattgttcacgactaacttgcatttgaggaaagcagaagtattgcatctggccactcgtattgcatctccttctcagccaagatgtcatgagcattagcaccactatcaatccagcagagctggctgcccattgcatcatgtgaattccagctgaatacatattagaattatataattgattgagtatgcaaaccctatggatttaccctcaagtctgaccaacattactataaatgcagaggaaacattagggagataattttgcttggataattataggcattcatgacccattgttgtctctttatttrttgtgcatttacttggataatgggttctaattgttgttcctgaaaaagaaagaaagtctgcaagcattaaaacac

SEQ ID NO: 346567 - DNA, 618 bp, Homo sapiens
atgatagtgctgacttttgggagctgaacagggattagttagtctcggatggaggagtgaaagggctgcaatcttccaggcagagggaacagtattggcaaaggcacagaagagggtggctgctgtataaagagkcgtggctgtaatgctgtgttcttacttcctcccatttgacataatcagcaaaagactgagggtgtttccctgctcacatggtgccttttacaagttggaagaaattgtcctttctagacatatgcagaaaaagtaaacagactagacacccagggacttcatggaaaagaagagggtaaactggattcaagccctcaatcttccccttccctgagtgcctttgtgcagtgtacaaactgcacaaccacatatgagtggcctcttgacacctcaactggagtcacaattttgctaacagtactacaggtaggtataactgcccctcctctgttatttctgtagcccatgctctgcattcaggacccaaaggcacaaggagactcacaagtgaatagaaggtcccatgagcatagtaagcagaggggtgattagacttgattcgaattcagacattctgaagcagacaaaatctaaatgggattt

SEQ ID NO: 346568 - DNA, 614 bp, Homo sapiens
ttatgatgtatgaatacagagaagcatataatatttaaattatacatatatatcaacttcatcaactatttatggtgatcactatgcttggccttctcatcttgttgatgtatatattctagctataggttgtaactaggcagtaaaagttatctggagagaagcaaataacaatgtaactatttcgaatgtttatattctttaatttctggcatcacatagcttataggttaaataaaatatgaaagagacatgtgaatctcwgcctttgaatacttaggatgtgtttgaatatataatattattgaagttgttatagattttcatcagttatataataaaatatattattggcacaaggctggacagagataggacctcaataagttctatctactaatatcactgtaaatactactggtttgtgtgggtcaggaatgctgaaatttaagtttttgaaagaatgaaactcaaatttgagttgacctttgggctcactcaagagatcatattgaatgcacgttgttaaaattaatatagagaaatgtattccaagacaataggtaaatttaaggaaacaatcaattcagccatattctctagaaaattgagaa

SEQ ID NO: 346569 - DNA, 614 bp, Homo sapiens
ttatgatgtatgaatacagagaagcatataatatttaaattatacatatatatcaacttcatcaactatttatggtgatcactatgcttggccttctcatcttgttgatgtatatattctagctataggttgtaactaggcagtaaaagttatctggagagaagcaaataacaatgtaactatttcgaatgtttatattctttaatttctggcatcacatagcttataggttaaataaaatatgaaagagacatgtgaatctctgcctttgaatacttaggatgtgtttgaatatataatattattgaagttgttatagattttcatcagttatataataaaatatattattggcacaaggctggacagagataggacctcaataagttctatctactaatatcactgtaaatactactggtttgtgtgggtcaggaatgctgaaatttaagtttttgaaagaatgaaactcaaatttgagttgacctttgggctcactcaagagatcatattgaatgcacgttgttaaaattaatatagagaaatgtattccaagacaataggtaaatttaaggaaacawtcaattcagccatattctctagaaaattgagaa

SEQ ID NO: 346570 - DNA, 559 bp, Homo sapiens
cagtaaatcttcactgtttggcaagagttatgttaattatgctacatagttacagttatattaacagctatgttaatataagggactagagcaggatgagaaaactgcagatttaattctttaactattaactaaatacctttcacgttaaatcaacatatcttawtttgtttaaaaatttgtaaaaaaaaaaaaaaaggcaaagttttttaaaaaattaataagtcgtatctataatttattatggcaatatgctttcatactttttcagtataaaagggtttatcaaatcaatcatattattccattttgcagaatgggaaacaggtttagagaaatatatcgttcaaagacatacttagaaaataaatcaagtctaattaagaaatgcaattgtggagattaaatcagatttcatagtacttaaaggtaattaaagaaataagtgtttgcttaatgattctcctgagaataagtaggagagatcattgaactgaagaagaaaatacttagaaacttcagaaatttatgacgctaacaccaaaatcatgaagtaaat

SEQ ID NO: 346571 - DNA, 585 bp, Homo sapiens
aataccaatccatgttttgttgtatcttgtttggccattcccctgttcactgtttctcttcaccccctcgattcaagaagcaaggccatcttgtgctacatgtttgaatgaagggatttgacagggcaaaaggcagagacataggaatctgccagaccccgagctctgaaagccaccagttccacaaatgtagctcatcctttttcaaatagaaaatgggatggatttggaaaggcagatggaaaaatgatgatggtagagatgttggtgggtcttagcatggaatgaaagaagctgaatgattcctgtgcctctaagaatggaatgaaagtagttgagagactttctagacctgaaaggaaaggtaattaggaggacggagaaaaagggataggtcagcagaaacatgcttgggtgaaatactcagtactggctggccctatcacatgtccccttgctcaacatatacacacagacattataccctcccctctacccttgcatataaggcctttggtactaggtaagcttaatagaactttgattcwagctgggagagaggagaagaaaacaacttgaaatggg

SEQ ID NO: 346572 - DNA, 581 bp, Homo sapiens
taatcttggctcactacaacctccgcctaccaggttcaagtgattctcctgcctcagcctcctgagtagctgggattacaggtgtgcaacaccacgcccagctaattattgtatttttagtagaaactgggtttcatcatgttggccaggctggtcttgaactgttgacctcaagtgatctgcctgctttggcctcccgaagtgctgggattacaggcatgagccactgagcccagcccttattaytttcttaataacattttcttttctctagctcactttattataagaatacaatatataatacccacacaaatatatgttaatctactatgttatcagtatggcttctgttcaacaggaggctattagtagttaagttttgaaggtatcaaaagttatatgtggatttctgactgcatgaggtggggttgatgctcctaaccaccatgttgttcaagggtcaactatatttatttaaacaatgtgatattttgatacatagataagttgtgggatgattaaatcaagataattaacattgttttgaagctgtttaaatttctggggctcatgtacca

SEQ ID NO: 346573 - DNA, 477 bp, Homo sapiens
agttattctctctttattttatatttcaatattttcctcattactaatccattcccatgttctgtaaacatactctttcaaattaaacaatcatctttttacttttgacaatatgttattccttctttttacaattatattcatggaaaataatagtttacactcataatattgggctcatgtgtcacattctttctttaaaagcttgagattaattctgccccaggacactgagaccggtatcatgaatgttaccagtgtggtcctaagtgtcagacccaacaagcctcatttcarttggccaattttggtcataagaaaacacggaatactcccttgaagtattcccatcatgtaggttcgacaacattgcattcattcttgctgttctgtgtgatttttttcaaagtgattcagaatcatttctcaacatgatgcatagggaaaatgacaacattgtatggcacactggggtga

SEQ ID NO: 346574 - DNA, 504 bp, Homo sapiens
gtcagcttcactatgaatagttgccttaataatgcagtatattgggatttaatgtgcaaaacatggatccatttgaagaaagattttttccccgatttgatttttgttttacttcctttcaatttttaagtttagctaaactaagctattactraagaattgcttgtttttttgtaaaattatttgcatgttatctcactgatacaactaaaattatgtcttcaaatacttaagggttttaaaaaattgaatcaaaaattaattttgccttaaacatgttgaaaatggtatttctaacattcaactgaaaatcttgcataattgagagggttttttatttccaattattgatttaaaagacaaataacatgtagttcttacattttctaatgtcacgtttcatcaaataaaaatcatcttaaaactcaagtatttttgtagtggaaaccagaaaactgcatcagacaacctatataatggaaataaaaaaaaaaaaaagatgga

SEQ ID NO: 346575 - DNA, 528 bp, Homo sapiens
agtaatttcattttaaaaattatgataaaacatcaaatctatgaattatagtacctaagtacctatacattttctagaaaacttagaatcatcaatgtatctgcaccaaattaatggctctgccccagaattgggatttgttaaagtactctcaatataatgtactggatttaaaccatttttatttcaaatggtagagagcctttctctaaataatgactgcatatctgtgagtagatgagcataaaagtggtgtactactgaggaaattatattctcccacattgtttttgatccccttcaattttgacacttgctgcaaaagactttatcttgrtaagatggcaaagataacagagctagcctgaccataagattcagatgccctgttctgtttctcctttggcaaatgtggcttagtataaagtgtgagcaaatgtcattgaaagagaagacagagcagaatataaataggcgctgcctataaggacgtttctgcacacctgtagcagtaagttgcattttaaa

SEQ ID NO: 346576 - DNA, 537 bp, Homo sapiens
acatcattagagaatttcaaattaaaacaacgatataccactacatacctattagaatagctgatgtctaaaacattgacaatatgaaatgctggtgagaatgtggagaaacaggaactcttgttcattgctggtgagaatgcaaaattatacaaccatattggaagatagtttggcagtttattacaaaactagcatgctctgaccatatgatccagtaattgcactctttggtatttacccaaataagttgaatatttatatccacacaagayttatcacataagcgtttatagcagcttgattcatattgccagaacatggtagcaagcaggatgtttttcaggaggtaaatggataattcaactgtggttatatccagacaacaaaatagtattcagagctaaaaagaaatgaattatcaaggcaagaaaagacatggcggaaccttacaggcatattgctaagtgaaaaaagccagcctgaaaagacaacacattgtatgattctaactacatgacatcttggaaaaagcaa

SEQ ID NO: 346577 - DNA, 537 bp, Homo sapiens
acatcattagagaatttcaaattaaaacaacgatataccactacatacctattagaatagctgatgtctaaaacattgacaatatgaaatgctggtgagaatgtggagaaacaggaactcttgttcattgctggtgagaatgcaaaattatacaaccatattggaagatagtttggcagtttattacaaaactagcatgctctgaccatatgatccagtaattgcactctttggtatttacccaaataagttgaatatttatatccacacaagatttatcacataagygtttatagcagcttgattcatattgccagaacatggtagcaagcaggatgtttttcaggaggtaaatggataattcaactgtggttatatccagacaacaaaatagtattcagagctaaaaagaaatgaattatcaaggcaagaaaagacatggcggaaccttacaggcatattgctaagtgaaaaaagccagcctgaaaagacaacacattgtatgattctaactacatgacatcttggaaaaagcaa

SEQ ID NO: 346578 - DNA, 506 bp, Homo sapiens
cctcaagcaattctcctgcctcaccctcccaagccgctgggattacaggtatcactatgcccagctatttttgtatttttggtagagtctaagtttcgccatgttgcccaggctggtctcaaactcctgagtcaagtgatccactcgccttggctttccaaagtgctaggattacaggtgtgagccactgtgcccggcccataatatatcttttttgatgaactaaaagtgtcttttaacaattgtattcagtttttaaacttgrtgctgagaaagaacaaaagcagctggaagcacccaggagctgccccggagctcccagctgaacctgctgctttggtggatgggcagaggctcacagaaacccatgtgaggcccggccactcggcaacccacagacatcaaatgctcctctctgattaaatgagtgctggctccagccttacccttactccactctgccctccttaggaggaggttcactggcccccccaactcatagactt

SEQ ID NO: 346579 - DNA, 506 bp, Homo sapiens
cctcaagcaattctcctgcctcaccctcccaagccgctgggattacaggtatcactatgcccagctatttttgtatttttggtagagtctaagtttcgccatgttgcccaggctggtctcaaactcctgagtcaagtgatccactcgccttggctttccaaagtgctaggattacaggtgtgagccactgtgcccggcccataatatatcttttttgatgaactaaaagtgtcttttaacaattgtattcagtttttaaacttggtgctgagaaagaacaaaagcagctggaagcacccaggagctgccccggagctcccagctgaacctgctgctttggtggatgggcagaggctcacagaaacccatgtgaggcccggccactcggcaacccacagacatcaaatgctcctctctgattaaatgagtgctggctccagycttacccttactccactctgccctccttaggaggaggttcactggcccccccaactcatagactt

SEQ ID NO: 346580 - DNA, 564 bp, Homo sapiens
ccactttttaatagaatttttagattatttcctatagagttgtttgaactccttatacattctggctattaatcccttatcaggtgggtagtttgaaaatmttttcttccattctgtgggttgtctctctgttgattgtttcctttgctgcataaaagctttttaacttgatgtgatcccatttgtccatttttgctttggttacccttgctgtggggtattactcaagaattttttgcccagaccaatgtcctggagaatttccccaaggttttattttagtaatttcatcgtttgaggtcttagatttaagcctttaattcattttgattttttttttttgcatatggtgagagataggggtctagtttcattcttctgcatgtggatatccagttttcccagcaccaattattgaagagaatgtcttttctccaatgtatgttcttggcacctttgtcaaaaatgagttccttgtaggtgtgtgggatttgtttctgggttctgtatcttttctgatggtctatgtatctatttttatgccagtaccattctgattaccac

SEQ ID NO: 346581 - DNA, 564 bp, Homo sapiens
ccactttttaatagaatttttagattatttcctatagagttgtttgaactccttatacattctggctattaatcccttatcaggtgggtagtttgaaaatcttttcttccattctgtgggttgtctctctgttgattgtttcctttgctgcataaaagctttttaacttgatgtgatcccatttgtccatttttgctttggttacccttgctgtggggtattactcaagaattttttgcccagaccaatgtcctggagaatttccccaaggttttattttagtartttcatcgtttgaggtcttagatttaagcctttaattcattttgattttttttttttgcatatggtgagagataggggtctagtttcattcttctgcatgtggatatccagttttcccagcaccaattattgaagagaatgtcttttctccaatgtatgttcttggcacctttgtcaaaaatgagttccttgtaggtgtgtgggatttgtttctgggttctgtatcttttctgatggtctatgtatctatttttatgccagtaccattctgattaccac

SEQ ID NO: 346582 - DNA, 564 bp, Homo sapiens
ccactttttaatagaatttttagattatttcctatagagttgtttgaactccttatacattctggctattaatcccttatcaggtgggtagtttgaaaatcttttcttccattctgtgggttgtctctctgttgattgtttcctttgctgcataaaagctttttaacttgatgtgatcccatttgtccatttttgctttggttacccttgctgtggggtattactcaagaattttttgcccagaccaatgtcctggagaatttccccaaggttttattttagtaatttcatcgtttgaggtcttagatttaagcctttaattcattttgattttttttttttgcatatggtgagagataggggtctagtttcattcttctgcatgtggatatccagttttcccagcaccawttattgaagagaatgtcttttctccaatgtatgttcttggcacctttgtcaaaaatgagttccttgtaggtgtgtgggatttgtttctgggttctgtatcttttctgatggtctatgtatctatttttatgccagtaccattctgattaccac

SEQ ID NO: 346583 - DNA, 575 bp, Homo sapiens
gatagctcaggctgttctgggtctcttgtgattccatataaattttaggtttttttctatttctgtgaagaatgtcattgatactttgatagggattgcactgaacctgtagattgctttgggtagtatacatattttaaccatattgattcttccaatccatgaacatgaaatagccttcaattttgtgtgtccccttcagtttcttccgtgaatgttttatagttttcattgtagagatctttcacttctttagttaatccctaggatttaaattttatttgtagctattataaacaggaytgctttcttgatttatatttcagattattctgttagcatatagaaattctactgatttttgtatgttgattttgttgtatcctgcaactttactgaatttcttgatcagttctaatagtttttgggtggagttctttttccttacaaatataaggtcatatcatctgcaaacaaggataatttgacttcttcctttccaattttgatgttctttatttttttctcttgtctgattgctccagctaggacttacagtactatgtggagtaaca

SEQ ID NO: 346584 - DNA, 575 bp, Homo sapiens
gatagctcaggctgttctgggtctcttgtgattccatataaattttaggtttttttctatttctgtgaagaatgtcattgatactttgatagggattgcactgaacctgtagattgctttgggtagtatacatattttaaccatattgattcttccaatccatgaacatgaaatagccttcaattttgtgtgtccccttcagtttcttccgtgaatgttttatagttttcattgtagagatctttcacttctttagttaatccctaggatttaaattttatttgtagctattataaacaggattgctttcttgatttmtatttcagattattctgttagcatatagaaattctactgatttttgtatgttgattttgttgtatcctgcaactttactgaatttcttgatcagttctaatagtttttgggtggagttctttttccttacaaatataaggtcatatcatctgcaaacaaggataatttgacttcttcctttccaattttgatgttctttatttttttctcttgtctgattgctccagctaggacttacagtactatgtggagtaaca

SEQ ID NO: 346585 - DNA, 603 bp, Homo sapiens
tgtttgtataatttccatgtgtttgtatagtttcccaagttcctcttgtattgatttctatttttttttgtccattatcatcagagagaagatgmttgatattatttccttttttattaatgttttaagacttgttttgtgacctaacacatgatctatccttgagactgatccatgtgttgaggaaaataatgtgtattctgcagcctttggatgaaatgttctgttaatatctattagatctatttggtctttagtgcagattaagtccaatgttttctttattgattttctgtcaggaagatctatccaatgatggatgagaggtattgaagtctccaggtattattgtattgggatctatctctctttatctctaataatatttgctttatatatctgggtactccatagttgggtgcctatatatttaaaattattatattttcttgctgaattgacccctttgtcattatgtaatgactttctttgtctcttcttatagtttttgtctcaaaatatacccggtatttcatgtaagtataactactcttgctcttttttggtttccattgacacagaatatctttttccatccattta

SEQ ID NO: 346586 - DNA, 603 bp, Homo sapiens
tgtttgtataatttccatgtgtttgtatagtttcccaagttcctcttgtattgatttctatttttttttgtccattatcatcagagagaagatgcttgatattatttccttttttattaatgttttaagacttgttttgtgacctaacacrtgatctatccttgagactgatccatgtgttgaggaaaataatgtgtattctgcagcctttggatgaaatgttctgttaatatctattagatctatttggtctttagtgcagattaagtccaatgttttctttattgattttctgtcaggaagatctatccaatgatggatgagaggtattgaagtctccaggtattattgtattgggatctatctctctttatctctaataatatttgctttatatatctgggtactccatagttgggtgcctatatatttaaaattattatattttcttgctgaattgacccctttgtcattatgtaatgactttctttgtctcttcttatagtttttgtctcaaaatatacccggtatttcatgtaagtataactactcttgctcttttttggtttccattgacacagaatatctttttccatccattta

SEQ ID NO: 346587 - DNA, 570 bp, Homo sapiens
aggcatgcttcattcttctttgttcttttatttggtttcctctgactgtgtattttcaaatagtctgcttcaagctcactaattctttcttctggttgattgattctgctgtaaagagactctgacacattcttcagtatgtcaattgaatttttcaactccagattttctgcttgaatctttttaataattttagttatttcaatccctttgctaaatttgcctgatagaattatgagttccttctctgtgttatctcraatttctttgagtttcctcaaaacagctattttgaattctttctctaaaaggtcacatatctgtttctccggaataggtccctggtggcttatttagtttgtttggtgaggtcacgttttcttggatggtcttgatgcctgtgaacgttcattggtgtctgggcattgaagagataggtatttattatagactttgttgtctagagacaacaaaggtactgcctttgtggtcttggataagatctggaagaactctctggttaccagggcagagactcttattctcttctcttactttctcccaaacaaa

SEQ ID NO: 346588 - DNA, 570 bp, Homo sapiens
aggcatgcttcattcttctttgttcttttatttggtttcctctgactgtgtattttcaaatagtctgcttcaagctcactaattctttcttctggttgattgattctgctgtaaagagactctgacacattcttcagtatgtcaattgaatttttcaactccagattttctgcttgaatctttttaataattttagttatttcaatccctttgctaaatttgcctgatagaattatgagttccttctctgtgttatctcaaatttctttgagtttcctcaaaacagctattttgaattctttctctaaaaggtcacatatctgtttctccggaataggtccctggtggcttatttagtttgtttggtgaggtcaygttttcttggatggtcttgatgcctgtgaacgttcattggtgtctgggcattgaagagataggtatttattatagactttgttgtctagagacaacaaaggtactgcctttgtggtcttggataagatctggaagaactctctggttaccagggcagagactcttattctcttctcttactttctcccaaacaaa

SEQ ID NO: 346589 - DNA, 570 bp, Homo sapiens
aggcatgcttcattcttctttgttcttttatttggtttcctctgactgtgtattttcaaatagtctgcttcaagctcactaattctttcttctggttgattgattctgctgtaaagagactctgacacattcttcagtatgtcaattgaatttttcaactccagattttctgcttgaatctttttaataattttagttatttcaatccctttgctaaatttgcctgatagaattatgagttccttctctgtgttatctcaaatttctttgagtttcctcaaaacagctattttgaattctttctctaaaaggtcacatatctgtttctccggaataggtccctggtggcttatttagtttgtttggtgaggtcacgttttcttggatggtcttgatgcctgtgaacgttcattggtgtctgggcattgaagagataggtatttattatagactttgytgtctagagacaacaaaggtactgcctttgtggtcttggataagatctggaagaactctctggttaccagggcagagactcttattctcttctcttactttctcccaaacaaa

SEQ ID NO: 346590 - DNA, 482 bp, Homo sapiens
gaagtgccgtgttacacgtccaatacaaactcaaactctctttagacttttggaaataaaaacataacgtgggagccaggagatacaaggtcacaaaacggatcatttgctttctcagcagatttgatggcatgaagcccttcaatgaacaggcctatcaaattaaaaagcaacatcttggattctgatttaaaaacagaatccaaaatgtcccaataaaattttattctattttgacgagtaagatggaaaacctcaaatatccaaatctgaagattcggtggaactttggcaggaaygggagaggactgccaagagaatgaataaagtaacaaggaacagtaacaacaaacagtgatgttaataatcataataagctttccccaggggctggggccaggcctcagcctcaggatgcatttcctcactgaaaaactccttcaggttaaccaggatgcaaacagggaagcgtagaaaggcaa

SEQ ID NO: 346591 - DNA, 563 bp, Homo sapiens
cagcctgcgcgttagaaaccgtgttccggagcctccgggactcaccgggcgtggaacggcaattccgagaaaatccacggttccagagccccggggactcaccsggcgtggaacggcaaatcccagaaaatccacggttccagagccccggggactcacccggcgtggaacggcaaatcccagaaaatccacggttccagagccccggggactcacccggcgtggaacggcagttctaagaaaatccatggcgccaggatggtctgcgctcaacgtggggctgccctgggctttgggggatttggccgtgggcaacagaaagacgggggagcgggcctgcgtgggtacagggaggccggattgcgctgggggtgctgagggatggagttggatggaaataaagtcaccacctgttgggcaaaggacatgggacttatcttaggtgggggcgacgtgggaagcaggagcatgagtcacgggcaggaagctccactctggggagggcgagaggccgggagggccaggaggacctggaggcctgtgcagccgccagatctgcaagg

SEQ ID NO: 346592 - DNA, 512 bp, Homo sapiens
aagtcggcagccccggcttggacgccatcggctggcttctaaccctgtttccctttcgactgaggcacagtgtccgtgtcatcagctgcccagatgctaaggggagagctcacgggcatttgccgtgtgtctgagcacaagggccagcagtggggaggcccgggaggcaggaggcaggggtccttgagtcctgaaggtcagcacaggatgagggcctgcagcgctgggacagccttgagcaacaggaggggctgggagggtggcctggaayagctcccactggcggccaggcaggtgcacacaaagggagattactggctcatcagccagtgtttgccttgtctttaccctgcggagggagttcccaggtgggagggctttccgactcctgccaaccaaccctttctcacgtctttcttgatgatgtcccctttctccctgtccccttgacactggacatttgagacagcctgtggccgagctcactggcctcagggacaagaaaggaatct

SEQ ID NO: 346593 - DNA, 512 bp, Homo sapiens
aagtcggcagccccggcttggacgccatcggctggcttctaaccctgtttccctttcgactgaggcacagtgtccgtgtcatcagctgcccagatgctaaggggagagctcacgggcatttgccgtgtgtctgagcacaagggccagcagtggggaggcccgggaggcaggaggcaggggtccttgagtcctgaaggtcagcacaggatgagggcctgcagcgctgggacagccttgagcaacaggaggggctgggagggtggcctggaacagctcccactggcggccaggcaggtgcacacaaagggagattactggctcatcagccagtgtttgccttgtctttaccctgcggagggagttcccaggtgggagggctttccgactcctgccaaccaaccctttctcacgtctttcttgatgatgtcccctttctccctgtccccttgacactggacatttgagayagcctgtggccgagctcactggcctcagggacaagaaaggaatct

SEQ ID NO: 346594 - DNA, 591 bp, Homo sapiens
attgctttattgccagcatccagggcagattgctctcactgtcctgcctttgataagtcattgtctgacctgcccgtatagatctcagcccacagtggtcttgttgtgctgcaggtatacagtacaactgaaagatattccaccatactttctactcaaaagttaacttctaatgcttcttgtacatgtttgaacaaaacttttcctcctcctccctctagttctttctcaaactgaraaaaaaaatgtgtagcagtgagtagaggaggctttaacaagggcacaaatgaaaagggaagaagaggtagaaataattgccacacaagaaatatcagtgtctctatcaaccagactttggaacactgagaattatagtggaaataagccacatactgtaaaaattggaatgcagcttgagccataaccttctactgctgattggtgcattttgatgggtgataaagatgttaactcattaatgacagacccacatagatggtaaatttgattaaaataatatttcaaggaactggactttatagacatttaaggaagaaagaataagaatactaggttaatggcttaaggggt

SEQ ID NO: 346595 - DNA, 551 bp, Homo sapiens
gctagggactctgccataaacctggctggatgaatagggccctaaagtactattagaactataattaatcaatgataagtattttcttgcacattttcttcaataccctctaacatttctaggtcaggtactgtgatctttccagtttacagccatattcatggtgcttarcacagtgtctggcatatggcagacaactcagtaaatgcaaacaattctcctacagcatggtatttcctaacctgatctggatttaatgcaatctatgaattaagaagtatgatttgctttacatggatcccaggcagctaggcaaggttgctgagtgggagtagagcacaatggtattcagcagaatggggtgagaagagctgaagtttagttcatgctccacatgcccggctgagtggtctggaaaagggcagtgttgcccagaggaagggacacttttttcttggcataaatgtgtggtcagcttgccatattatggctgtgtccggaagtggcactttttcttatccacatggggacgctgtatagtgtccacatta

SEQ ID NO: 346596 - DNA, 540 bp, Homo sapiens
ccattaacaataccctgactagggatgtgtagcatggcctgcttccaccatgcaggaagtgtaagatcagctgctcacacaacagtcatgttgccatgacctccttctcccaggtgggagaagggaagattatctccatggtcagtcctgcagataccacctggtaggggaatcggagcatgccaccctgctttggtggaaggtgaggtttttgcaacataaagttcctgcacaatgcactgaacccccagaaagggaggtgcggttgttccatttgtgttttaccagaagcggggcaggtattatcaaacagattttttgtcagtaggggtcaccacttccccaatwttttggccaggggaatatgcacctgtgtctactgatgatgttgggttggaggcctctgccgtgtcctgtcaggagaacatgggaggcatcaaggaaacccagggacttcaccttcatgttattcctcaaatcccatgttgttcctcaaatcccgagtcgtgggcatgccttattttcatctttgagaaattt

SEQ ID NO: 346597 - DNA, 593 bp, Homo sapiens
aaagttgcaaacttccttttataacaatatatagaaaatgttatacttttttagcagcagtatccccaatccaagaaaaaacctgcatttggtgggttaatgctttaataaactgcttggaataaagaattagaacttggagtcatatttgaataacagtagcagttgatagttgctgcagttaaggaacaaggggacaaccaactagcgtagtgtgtagttttttggtttttatttttatttttatttttttgagaggattctaagctaagagtcagaccttaactctttagaacagtaaaaggaccctggtgaggatcaggggaggtcagagaatgaggatgaagaatcttgtaatcaatgggcaaaaataaaattaaatctctcttagaatttgtgcctgagatataaatactctttcctgttttcccagggaattttcagtaacatttactaatgcatgtggcactgtttcctttatttagttggggaaggctgagaaatagtgtcactgagagcatcgtggtagagatcctgtgaataatgaggtcactgcataggagctaygcatagtttcagtgctattattatat

SEQ ID NO: 346598 - DNA, 570 bp, Homo sapiens
tgaaattttactccaccttaattctgcttatctttaagaaacaggatgcttgcaattagaagtttcccctggcgaccaaattggctgaaactggaaggatccaagacggcagctcacttgacctctgcagaacctctaacttcattataatctaatttccatgctaaatgaccttccctccagcccatgactattgacaatcaccatgacaatgactggaagaaaccataaaaggacaaaaaggaaggcagcactctggtcctgagaaattgtctgcctrtttctggaaaagacatgaatattcctatccttgcttttaatacccaacacctacatttaaggtgccccatatctgtggcttcctagctctcatgaactgagaagttgatttgtgagccacgctcctgcttctcagttccacggccatcaaatgaagcctgcattgcctgacaatcacttttggtttcacatattggcttcatgacaccaaacaaagaaagaacccatcttttggaggactggctttgtcagtaacactatctcttccttcctcaaggcatcccctcctgg

SEQ ID NO: 346599 - DNA, 536 bp, Homo sapiens
ttaatcacgccattatactatacactaatgaggaaattgaggctcatggctggtaggtggcaaagccagcaattgaagtcacatctgccaatttccaaaggatgtgttttttgctatcttttggaatgaatcatctataaaatgcttcccctgtcaaggttctgttttyattttttttcattacttttaattcagcccatttacctactttccaaccccctccccacaccaccttcacattaagccaccttttttttccttctgttcctattttgaaaaggcagacaaagctatagaaaaagaaaaattgattaaagagaggattggaatgtaaacataattgtctttattctccatcaattgccctggatattagaagatcccatgagctttccaaacaactaccctagcctaaattgttagtcataaaacaatttcctgatttcctgagggaccattactttttgtgaagctaatattccacattaggattcttttactatgaaatctcattaaatttggctcaaataattggg

SEQ ID NO: 346600 - DNA, 494 bp, Homo sapiens
attttttgatttttttttttttaaagagacaacggtctcactaatgttgcccaggctggtcttgaactcctggtcttacttgatccctctgcttttggcttcccaaagtgctgagattacaggcatgagccaccatatctggccaagggtgaacttttaagtattgttactgaggtatgcataattcctgtaagcaattgaacaattcaatacttctgaatcctcaaacctccagagagcaaggaacttaaacttgccaattaatggatttttcgatacctcagttgcttcctgtgaatgaggcacttgccctcccaagtttagcacagtctctttggggtcgccaarctgtgaatttaaaatttaactttcctcctcctcatcctcttcctaaggtgatgtctggcaaggctctcacctagaatcaaggcaagtttatgcctctagcaaacaggagactagtcatgttcaaggcaatgcaagaactcctccct

SEQ ID NO: 346601 - DNA, 635 bp, Homo sapiens
tactcttaagacaacagagatagtaatagtaataatcagcaataaaaataactataaaactttgcacttgcatagaaccttttatttcaagacctttagggacttgtcagaaggtataagtggaattttattttattttttgcttttttctttcagagaaaaaaaagacaaaactggaatgggatgctcccaaagtctcatttgccttaaacaaatctttgctctaaaattgcacattcctccttgaatttgatcccttaaattattacctactttattctcttaaaataaaataaataacttgtagcttttcccccgagattagctggccagacatgcagcgtgacaacctgtgttggtttttgctgatggaatctagaaaagtttttgtacaaatctgccccttccttactgcgtcacagagttctacagtgttttaagagtaccatgggtccttaatatgatacatacatgcacatgtatgtatatatatgtgcacatatatatcatggagatatggctttcattatgttattatgtgtattctagagggtttttttwaaatcatcaacaaagagaacaaacgacccaactctcatctctcataggccagcatataacttgaatggacgtaa

SEQ ID NO: 346602 - DNA, 488 bp, Homo sapiens
tgacttcctacttcatggaggaaagttaggaagctcatttccaggtttgtcagggatgccygatttcaaacccatgaacagatttctgcacagtagtcctgtggcggtaggttctgcttttcatcctggtaaccccccagcaccaccatgctacacagtatgcctgacagctgagagcaggtgggcttatcctacagcagaaaattggacctctctaacaactctgggtcctgagtttatagagtaatggtgcatagagtttctgcccaattctaatctcaatatccagttagtatttattaaaggaagaaaataaactaatagtgtctggaaaatgttcccctaccccagaacccaagaggctgaaatgtcagagatgtctaacatgcttggtgattcccagtgatgttcttagcaccaaagaaagcacaagagtacaaaagggggaggatattttatttcattcttctctgtatgatgcatccaaa

SEQ ID NO: 346603 - DNA, 520 bp, Homo sapiens
aagaagaaattattttatgtatggtttccctgctgaccaatgacatctctaccttgctagtgtcccacctgtcctccaaagtggctgaccccactggagattgttgcaggctgcagccatcttgatgatgagaattggcatcatctgggaggaacactcacttcgtaacacttyccttgaaagccatactgtgtaaaactaactgcagagatgcaaactttcttgttggaagcattggcctatgaaggtaatagagagccatagggagaaaaacaaattggtggaggaaaaagtgacctatactgccatctgtctgtctggaagagcataggtgactcaatccatttcacatttacctctcttcagcattcagctaaggtaaagaaaaaatggagggaaataacttggatcaaatgtctgtcagccccacccctcagcttcccaattatttcatccctcctccagcccaaacacatctttctctcacatcctgatagaggcatttccatctgtttgcaaa

SEQ ID NO: 346604 - DNA, 576 bp, Homo sapiens
tacatgtcacagagacagtggcttaatcataagagggtcttcatttttctcacttagtagaagtcctgaagtatgcagtcaagggcttatggaatactctaagatgtctttccaaggttatgcttccaaagacatctygagtctgtctacttctttccacctccattttgagaaatcttcaagttccatcattccctcctccccctgtcccctgggctactgcaacaatcactccccattttccttctgacctttttccaattcacagttaatacaatagcaaactcttcagtgacttcccattgcccttaggataaaattaaaagtcatcagaatggctgcttgtgccccgtttgatcttagcaactttgctggtcttgtgcttctctgtcctttccttgcagggtcccctacattttgatcttccctctctttcccaaactcctttagctctttctgatggcataggtccctcaaacgtgctgctcttcaatttttacctggctaacttctacttgtccaacaggacttaacttaaataccatgttcttaggcaccaaaagcaggttcccttgt

SEQ ID NO: 346605 - DNA, 576 bp, Homo sapiens
tacatgtcacagagacagtggcttaatcataagagggtcttcatttttctcacttagtagaagtcctgaagtatgcagtcaagggcttatggaatactctaagatgtctttccaaggttatgcttccaaagacatctcgagtctgtctacttctttccacctccattttgagaaatcttcaagttccatcattccctcctccccctgtcccctgggctactgcaacaatcactccccattttccttctgacctttttccaattcacagttaatacaatagcaractcttcagtgacttcccattgcccttaggataaaattaaaagtcatcagaatggctgcttgtgccccgtttgatcttagcaactttgctggtcttgtgcttctctgtcctttccttgcagggtcccctacattttgatcttccctctctttcccaaactcctttagctctttctgatggcataggtccctcaaacgtgctgctcttcaatttttacctggctaacttctacttgtccaacaggacttaacttaaataccatgttcttaggcaccaaaagcaggttcccttgt

SEQ ID NO: 346606 - DNA, 576 bp, Homo sapiens
tacatgtcacagagacagtggcttaatcataagagggtcttcatttttctcacttagtagaagtcctgaagtatgcagtcaagggcttatggaatactctaagatgtctttccaaggttatgcttccaaagacatctcgagtctgtctacttctttccacctccattttgagaaatcttcaagttccatcattccctcctccccctgtcccctgggctactgcaacaatcactccccattttccttctgacctttttccaattcacagttaatacaatagcaaactcttcagtgacttcccattgcccttaggataaaattaaaagtcrtcagaatggctgcttgtgccccgtttgatcttagcaactttgctggtcttgtgcttctctgtcctttccttgcagggtcccctacattttgatcttccctctctttcccaaactcctttagctctttctgatggcataggtccctcaaacgtgctgctcttcaatttttacctggctaacttctacttgtccaacaggacttaacttaaataccatgttcttaggcaccaaaagcaggttcccttgt

SEQ ID NO: 346607 - DNA, 576 bp, Homo sapiens
tacatgtcacagagacagtggcttaatcataagagggtcttcatttttctcacttagtagaagtcctgaagtatgcagtcaagggcttatggaatactctaagatgtctttccaaggttatgcttccaaagacatctcgagtctgtctacttctttccacctccattttgagaaatcttcaagttccatcattccctcctccccctgtcccctgggctactgcaacaatcactccccattttccttctgacctttttccaattcacagttaatacaatagcaaactcttcagtgacttcccattgcccttaggataaaattaaaagtcatcagaatggctgctkgtgccccgtttgatcttagcaactttgctggtcttgtgcttctctgtcctttccttgcagggtcccctacattttgatcttccctctctttcccaaactcctttagctctttctgatggcataggtccctcaaacgtgctgctcttcaatttttacctggctaacttctacttgtccaacaggacttaacttaaataccatgttcttaggcaccaaaagcaggttcccttgt

SEQ ID NO: 346608 - DNA, 529 bp, Homo sapiens
caagcaaattttcaagtgctgagatgaaatcaaccgcagtaacaaaaatatactagctccatttattattacccagattatcaaagatcttttttaaggtgtagccactgatccaagtaatcatgatacagaaaaaaatatcactttgattgtgcaatttttttgttactttaaaaaagcttgcttataaggctactgtgaataaaagcccttccagatgagaactcaaaaataacagcatatttttgcagagactctggttgagttaggacttaatgagaaaaattttactgcttttggggaaagcaatacaaatacaaattttgtgaatttgcttatgtacctttatggatatagacagtacttattaaatgttgaagcaaagcatgaatgattctatggaaagtgttggctgtcctgttcatattstgcataaagctgctcacacagcatctgatgtcctttctattgacaccgaagtaattgtcatgaaattcttgtactttggcatttatattgtttgtgcaat

SEQ ID NO: 346609 - DNA, 590 bp, Homo sapiens
attctaattaaatcagtactagaattaatgtgaaaaaagcaaaattcatcagtggaatttccaacatcctctccctaaacatttgactctctgatgcaatattccctctagacaccaaccagtgttctgtgtggtcacaattgtcccatcttttaatcatagtaaaacttacttcaggaatagcctatgaatttgtctatataaaagtctgagagctgacaatgttaagaccacttcaaaggaatatggaccagagcctcagaattaaagcctaaaatgcatgcagtgggatttcatggacaattggcatgcaggaaacattctgggcagaggcacatccaagtgttcttaaaatcacatcaaggcagaaaactttaagttggagcrctacctcacaccatatagcaaaatatattttaaatgaatcaaagaatgatacccttaactatgaaaaaaattatgagccttttacattgcaaaaaataaaaatagcaaagccaaagaaatatggcacagtgggaaacaagttatttgcaacccacattaacagtcatagggcctaatttccttaatatatcatgatttaacaa

SEQ ID NO: 346610 - DNA, 590 bp, Homo sapiens
attctaattaaatcagtactagaattaatgtgaaaaaagcaaaattcatcagtggaatttccaacatcctctccctaaacatttgactctctgatgcaatattccctctagacaccaaccagtgttctgtgtggtcacaattgtcccatcttttaatcatagtaaaacttacttcaggaatagcctatgaatttgtctatataaaagtctgagagctgacaatgttaagaccacttcaaaggaatatggaccagagcctcagaattaaagcctaaaatgcatgcagtgggatttcatggacaattggcatgcaggaaacattctgggcagaggcacatccaagtgttcttaaaatcacatcaaggcagaaaactttaagttggagcactacctcacaccatatagcaaaatatattttaaatgaatcaaagaatgatayccttaactatgaaaaaaattatgagccttttacattgcaaaaaataaaaatagcaaagccaaagaaatatggcacagtgggaaacaagttatttgcaacccacattaacagtcatagggcctaatttccttaatatatcatgatttaacaa

SEQ ID NO: 346611 - DNA, 577 bp, Homo sapiens
agcagcatgaaaatggactaatacagatgtccattagtattggaagctcaggagaaatctctggcccaaagacacaaatctgagactcacgggaattgaagtcaawgcaggggttggtgatccctggtacagcgtgcacagtgatgaaaggtccaggtctgcatcatgaagcgaactggcatttaaggaggggcagaggaggaggatcttccaaaggacaccagaatgagaatgagtggcaaaccaggaatgggcgagattcgaggaatcaggaatgggtgagattcgaggaaccagaaaagggttccctgtgagagaagagccagcaccaaatgctgcacaaacaacggcagaaatgactggacaatgaaagcctttgacaacctcggtgaaaatttcaaagggcatgacgaggatgaaattcaggctgtggtgggtggaaggtagaagtaaggagtggaattcagtgcattgactgctctgtgaagaagttgggctgtgaagggaagagaaagatggaaacaggtgtgcaagagcatttttttttaagataggagtgacttaaggatgtttacat

SEQ ID NO: 346612 - DNA, 609 bp, Homo sapiens
tttccttatctatgatatagtattttcatctgagatttaaaatatacaattttgaacataggtataaaatcatttcctgatgtggactatacaacaatgtcaagtttttctttgaacaaatagcaggaactgtgtttcctgaatttcacctttcctgcaaggggcaggatgaaatggaaaggactttggttgcaagcagagggattttatgtgatgtgtgggaaagatccctggccagaagatgtaaggtcgcatgtgaaacagatgaagacttgagattccttccggaattcaactcttcatctctccttagttacttttggtggtgagcaagaagaggggagaatggaagaaggacagaaaaagaggaaaggaaaaagaaaaagaagaaaaagagagagaaaataattagaattgattacatgacagagcccttactaagtgtgcagtactctgataaaaactttataaggatcttctcacatcatccttacactaccagtgaggtagacatgatggttgccatcctagcaaggwaacaaagaggttaagaaactgaccaaaggccacacagctgttaagtggctgagctgggactcaaacccaggt

SEQ ID NO: 346613 - DNA, 611 bp, Homo sapiens
tcaaactaagtatgcgtttctttttctctttgtgtcttttgaagtcttttaaattaataaatgctgaatctatgttatttggaggatatacgttcacaatcataattgcatattgtaaatgctcactttagcataatgaagttctcttccttgtcttaattttgtgacataaattctaccttctccaatattaatattatggcaacctttttggcacatgtatctggtatacatttcctgtccatttacttatgtcttaatatatttttaaatgttgaaatagttatagattcatatatacacagaaatgtgcaagtgattcactgaacctttcactcagccttctccaatggtaacatctcacataagtgtagcataatataaaaccaggaaaaatccacagagcttactcaggttttgtcaattatatatgcattcattactgtgagcatgcacgcaggtttacctaattttatcatgtgtatagattcgtgtatggaccatcacaatcaagataaaaaaygcacaagcaccatagagcttctttgtactacttttttattccccccatcttcacactatctttaacctctagtagctaacttatctgt

SEQ ID NO: 346614 - DNA, 534 bp, Homo sapiens
ccagtctactcagaccagcttcgtcagagctcagggtcaattttaagtaattatatttccccaacttcatttcccatggacatttcaataggatttctctgcccattgctgggagttgtagtgtggcatgttaaaggatcactcagcagggtgcccctctccctgtgggggctgatctgggtctcctcaaaggtctcaggtcacactgccccggaatgagccctggggttstggctcacagggactcgctctctcatccctggcccctgggccatggcttctgccttctttgtgtcctcaaggctaattctgcgggcaagacctgctctgtgcgcccctcttttctgaggctccaggctgggatgggtgccctctgcccctcagtgcctgctctcagcctgcactgacactcagatgcccactcccacagtggattgaatggtggccccgtgttctaacctccggaacctgtgaatgggatcttagttgaagaaggagtctttccagatataagctaagagccttgaaatgaga

SEQ ID NO: 346615 - DNA, 534 bp, Homo sapiens
ccagtctactcagaccagcttcgtcagagctcagggtcaattttaagtaattatatttccccaacttcatttcccatggacatttcaataggatttctctgcccattgctgggagttgtagtgtggcatgttaaaggatcactcagcagggtgcccctctccctgtgggggctgatctgggtctcctcaaaggtctcaggtcacactgccccggaatgagccctggggttctggctcacagggactcgctctctcatccctggcccctgggccatggcttctgccttctttgtgtcctcaaggctaattstgcgggcaagacctgctctgtgcgcccctcttttctgaggctccaggctgggatgggtgccctctgcccctcagtgcctgctctcagcctgcactgacactcagatgcccactcccacagtggattgaatggtggccccgtgttctaacctccggaacctgtgaatgggatcttagttgaagaaggagtctttccagatataagctaagagccttgaaatgaga

SEQ ID NO: 346616 - DNA, 554 bp, Homo sapiens
tgacatcctcaccacagaagaggcgtggaagagccatagggccttgggaatggcagtctgcctggtggtggggcatttgtctgggcactggaaaataggtggccctttgcatgcatggttagcagggacctgagagggctggcaggagtgccaggcatattttatcagctcttttgagctgcctgtgaagtgcgattgacaactgtgccacctcaaagggtaggagggtcagataagtgagacaggcaagagcttcagtacaattcctggcatgtgatgtgagctcaggaacacacaacagttcctactgtcactattattgtcagaatttggctatttggagattggtgcagataattaagcacatataaaatgctcagcacagaaataaaagctctttgtttctgacagctcagaactgcctggtgtggactgggctgatgtgggttctttgcaraactggctggcctcagagcagggacactagtgagaagtgtctggttcaggtgtggacagcccagagaggcttctcagtcccttccaccaacatgggg

SEQ ID NO: 346617 - DNA, 523 bp, Homo sapiens
cagtcattggccaagtcctgactgttctgcgccaatggctgcagagctgatgggttggagtgccctggctgtttgtctgttcagtcyctcaactgtatcaaaagctgtccaaagtttgagcaaaatgagaaaagagcattggcaatgcctgatcattggtgagccagtgggcagtgggaggaagggagcctggatgtgagatagagaacacagaaaatggagggatggctgcaaaggggagcagtgtgagtgggtggtggctggaggggaacatgcagtcaaggggttctgtacttctgtagccattactttggaatgggctattccagcatatgtttaggcagatgggaatcatcccccagggaggaagaaatggaaacggcaagaaggagaaggaaaagtgaggataagagaggtgggattcagagtgttgggggaacctggagtgggttgaatagggcacccttggaatccatggcctcccagaaccttagaatgtgagcttatttagaaatagtgtctt

SEQ ID NO: 346618 - DNA, 523 bp, Homo sapiens
cagtcattggccaagtcctgactgttctgcgccaatggctgcagagctgatgggttggagtgccctggctgtttgtctgttcagtccctcaactgtatcaaaagctgtccaaagtttgagcaaaatgagaaaagagcattggcaatgcctgatcattggtgagccagtgggcagtgggaggaagggagcctggatgtgagatagagaacacagaaaatggagggatggctgcaaaggggagcagtgtgagtgggtggtggctggaggggaacatgcagtcaaggggttctgtacttctgtagycattactttggaatgggctattccagcatatgtttaggcagatgggaatcatcccccagggaggaagaaatggaaacggcaagaaggagaaggaaaagtgaggataagagaggtgggattcagagtgttgggggaacctggagtgggttgaatagggcacccttggaatccatggcctcccagaaccttagaatgtgagcttatttagaaatagtgtctt

SEQ ID NO: 346619 - DNA, 605 bp, Homo sapiens
ctttgggccaagtgaaaccccctccctcggaggccccccttctgggactacaccttccacctgaatcttgtgccagcaacagaacttcttcctgcctttccagggggcagtaactaggtttgcatctgatggtggtcagtaaaagagataaaggacgcagggycactgtttggaaaacaacccatggaaggaccccccacccaaccccattgattcacctacctctccagccacccaccctccttccctcataataatctcctcccagatgaaggagctttcagagagccaaaagggaaggtggaagacacagtctcttttggtggacacggggaagcaagatgaaaaaaaccacaggacctagtaaggtaccgtcaagatccacccagccacctcccctcccaccagaagtgattgaagcccctcttcctggctcttagagaaccgcaggggacccggagcagacagcaggcctttctgatgcttaaagttttagcatttaggacaatgccctgtgcttatcctctgtacacccctagcttcctggccatctttggagttcattcattcattcattcactcactcattcaacaaatctccactg

SEQ ID NO: 346620 - DNA, 577 bp, Homo sapiens
tgataaagaattgaggcttccatggtgtccatgctgggcagagtcatggaccttctcaccaactcttctccccctcaataccctagagcagaaaggccactggacacaccaactgccctacacttaacaggcagcaggagagtccccttcactggggaagatgctcagtgtgacctttgggcttggtcctgmtgtgttctacaagataagacaacttagaaagtcccattctcagggcaacatctaggtttcacttgccttgttttgctgaatagttctaataaactcagttccaagacaaagtgttgatgcatgggctctttattcccagagcctgggttcctcaaggcaagaagtctcgtggctcagccttggaggtagaaggctgcagaacaggatgtcataggagatgcaagcgcttgctagatgtttgcatgtatgggtaaacatctgagcaccctcttggcagccaactgcaccaggacgatgcacagcagcccacccgcacatctccactttgtgtatttgtgctttgagaagtatgtacattaggatacttttgaatgtgtattagtct

SEQ ID NO: 346621 - DNA, 566 bp, Homo sapiens
catcactatcttgcaaatagttggtgctgagtaactgcccaatgaatcatcaagtcatgctactgagagctctttattgatggaaattgtttcaggcagagtcattctctggcatcaacatgacgtcatttacatccacatctttataaatgttcaataactttactgtcacaggtttgtcttactcatcaccttggatgcacagaaaatatgctagactttgatgtattttacagtacattagtttgagtgggaactcctctgaagcaactcaaatctagctcttactaaatttaaacattcctacaaaggggctttctcttctggatgcagatgtttatatggcatatatttattgtgttgcaatagggttgcaaagtgtgatatgtgtgtaacgaagtctatgcccccgcttcttcagaggtgaggcttgtgttctggtttaagcaaggtgaactctaactattgggggamcccatccccaatatttcaatgtaggttctttctattttccataagtgttggccagttgagaaataaagagagagggtaaaaagagaggaatt

SEQ ID NO: 346622 - DNA, 522 bp, Homo sapiens
tatgcttgtaatcctagctgcttgggaggctgaggctggagtatcacttaaacctgggagacagatgtttcagtgagccaagatcacgccactgaactctagcctgggtgtcagagcaagacttggtctcaaaaacaagttaaaaaaattaaaaaaataaataaaaagaggwagacgcgaaactgcagttacggtgaccaatagtcatccgtgttcacgtctctttaaaaatttgtattacaaaaatatgtgtatgtatatggcctctactgaattgaaaagacctgacattgataatgcatttcataacgaatataatttgatgatgtgatgaacataatgcatccctaataatctcatgattctttctttccctcagcaaataattttaagcttaggtcatgtgttttaaactgtgttggaagcaggggcactgtggagaatgtgcagaaagagctctctaaccgcacttaattttcattctagtgaggggggctggtggcttcaagaaacaagtcaaca

SEQ ID NO: 346623 - DNA, 556 bp, Homo sapiens
gcaacaccccaaaccttgacttctgtagtggtcacatgggcatatgcactttataaaaattcaccaagccatacatttgtgatttacacaatttactatacatatgttgtactccaatctaatacaaaaatttagaaaaaaaatgcaaaataaaaactaaaacatacctatactggaacttaacacttcttaaatacaaaaggccaktgtgctttcacagggccatcactgaatacgttggtctacactcatccttcactctgcaaaggttcactgcaggttacactatgtcagccaccatgctagaagcttggtggtgttgatgtctgctttcactgggattaatagcctacaagacacgatatgggaggtataaatgatcactctgaacttctactgattccagaatatacgtggtgtgaatttacctatatattgtttaaatagcaggtaattttttaaaaaggtccctacacagacactgccaccctgccccactggcatacacacgcacagacaccctgcccccgctagagctctacccccacctatgcat

SEQ ID NO: 346624 - DNA, 475 bp, Homo sapiens
tctaaaatcaaccacaacatcagccataaaacaattctaaacaaattctttaaaactgaaattataccaaccgcattctcaatacaaatggaaatcaatactaagaagacctctcaaaaccatacaattacatgtaaattaaacaacctgctcctgaatgacttttgagtaaacaatgaaattaaggcagatatcaagaaattatttgaaactaatgaaaacaaagatacaacaaaccataatctctgggacacacctaaggcagtgttaaraggaaaacttgtagaactaaacacccacatcaaaatgttgaaacaatttcaaattaacagcttagcattgcacctaaagcagctagaaaaacaagagcaaagcaactccaaagctagcagaagaaaataaataactaaaatcagagctgaactgatgaaattgaaatacacaaaaaaaaataaaagatcaacacactataagt

SEQ ID NO: 346625 - DNA, 475 bp, Homo sapiens
tctaaaatcaaccacaacatcagccataaaacaattctaaacaaattctttaaaactgaaattataccaaccgcattctcaatacaaatggaaatcaatactaagaagacctctcaaaaccatacaattacatgtaaattaaacaacctgctcctgaatgacttttgagtaaacaatgaaattaaggcagatatcaagaaattatttgaaactaatgaaaacaaagatacaacaaaccataatctctgggacacacctaaggcagtgttaaaaggaaaacttgtagaactaaacacccacatcaaaatgttgaaacaatttcaaattaacagcttagcattgcacctaaagcarctagaaaaacaagagcaaagcaactccaaagctagcagaagaaaataaataactaaaatcagagctgaactgatgaaattgaaatacacaaaaaaaaataaaagatcaacacactataagt

SEQ ID NO: 346626 - DNA, 450 bp, Homo sapiens
aaaaaaaaaaaaaagtcataaggaaaagaaaataaatttactgttcattaagtggacatggattatcaaaaaggtcttcattcttgtcttcatgttgagtaggctgaggaggaagaggaggggttggtcttgctgtctcatccatcccagagatggatgaaaatctattcataactacactcgcacagttcaaactcctgttgttcaagggtcaaccatacatgtttatttagattttgggtaagcttttttcttaatttcagatttttgtttatgaacatctctcctctaaggaattctttatcrtgtgtattatttttaaaatatggccaatttgaaggggaaataatcttgactctttttactgcatctttggtgttttggagatctttttatgtgatgggattaattcctcccaatagtgtagaattttattttattttttacatc

SEQ ID NO: 346627 - DNA, 570 bp, Homo sapiens
cttatttttttttacacacatattttactttttttttttcagtaaaacaaagattccaaaactttttagaatgttagaactagagagytggagtagaaatatatctatctggtaggttttcattagaagactaagattttctcttagaaattggaacagatactaggctgtttccatggttacctactgaagcctttctcctttaatggaaaggtatcatttctgtacacaccacatgtagcttcatgctttgtattggatcaaatcctttgaaagcagaataaaagaaatgaattgaaaaaggttctacaatctgcccctgcagagagccaaatcatgagtgaactcccattcacaactgctacaaagagaataaaatacctaggaatacaacttacaagggatgtgaaggacctcttcaaggagaactacaaaccactactcaaggaaataaaagaggacacaaacaaatggaaaaacattccatgctcatggataggaagaatcaatatcgtgaaaatggccatattgcccaaagtaattgatagattcaatgctatcctcatcacg

SEQ ID NO: 346628 - DNA, 600 bp, Homo sapiens
tgttcactatttgtgggatgggttcaatagaagcccaaacctcaccatcacacaatataacaattatataactataattgttaccgttatatccatgtgacaaacctgcatatgtacccactaagtcttaaaaaaaattctacctaatgagaagataaatacaaaggaataagttttttgtcaggtagggttgtgttttggtaacccataaaacgtaatagtgaagatatttttgccatcactccaaaaaccacttgtggctcatttgggcgtgacattgtccragttgagaatgcatatctagcttattcctattttgtttaaaattagaggacttagaatttttacctcagcccatgaaggagtagctgctaaaggacttgctttcctgccagaaataattagaacactggaaaaaaaaatgtaagaaaaaactattttgagtcattggacagtaggcagggcagggatatgatccatgagagaaagcaaacgaatgaggaaatacctatgaagaccccagcttattacttagagacaattttgaggctgcaatgcaaggagggaaaaccaaaatggaatctggcagtctccaaaaat

SEQ ID NO: 346629 - DNA, 524 bp, Homo sapiens
  misc_feature (1)...(524): n = A,T,C or G
aagcttatactagtaaaataacaaattcatggttgacagttttgtttttaagtccgaaaatgggaccccacttttttcttgcttacacagtttctgctgggaagtctgcttttagtctgttgggatttcctttataggtgtttagatgctattttcctcccaacactaggattttttccttcatattgactttagtctgatgactatttgtcttgtgaagtccttgcaatgtattttctagagttttccgagtctcttgtatctggatgtctgaatctctagcaagactagtgaagttttcctcaattttatcctcaaatagattttccaaactttttgctttttcttttccctcaggaatacctatgactcntaggttctggtgttttacataacttgatactyctcaaaggctttgttcatgttttaaattcttttatttatttttgtctgactggattaattcaaaagacatatcttcaagctctgagattctttcttctgcttggtctagtctgttttta

SEQ ID NO: 346630 - DNA, 589 bp, Homo sapiens
gtgacttctgctctttttttggtttctgtttgcatatctttctccatccctttcctttgcgcctacaggtgtcacaagaggtgagatggttctgttgaagacaacagatggttgagctttctctttttatccaccttgccactctgtgtcttttaagtggggttttagtgtatttacattcaaggttagtattgatatgtatgattttcatcttgtcatcatcttgttagctggttgttaggtagaactgattgcatagttgctttatagtacctgtgagctacgtacttaagtgtgtttttgtggtatcagatattgttcttacgattccatgtttagcactcccttaaagacttcttatatggctggtctagttgaaacaaatttcctcagcatttgcttaaaatctgatgaagattttatttctctttcacttatgaagcttagtttggtaagagatgaaattcttagctggaattccttttctctatggatgttgaaaataggmccccaatttcttctggctagtgaggtttctactgagaggtctgctgctaacctaatgaggttccctctgtatgtgacttga

SEQ ID NO: 346631 - DNA, 555 bp, Homo sapiens
tctctttcacttatgaagcttagtttggtaagagatgaaattcttagctggaattccttttctctatggatgttgaaaataggcccccaatttcttctggctagtgaggtttctactgagaggtctgctgctaacctaatgaggttccctctgtatgtgacttgacccttctttctagctgcctttaagattttttctttaatgttgaccttggtgaatctgatggctatgtgctttggtgacggttcctgtctatagtatctagctggygttctctgtatttattggattaacatgtcaacctctagcaagattagggaaattttcatggattatatcctcaagtatattttccaagttatttttctctctccttctctctcaggaatgccaatgagtcttagatttaatcactttacataatcccatatttctcagaggtttttttcagttttaaaaaattcttttttcttcgtttttgtctgagttgccttgaagaaacaatcttcaaagtctaagattctttcctcagtttgttctattctgctgttaata

SEQ ID NO: 346632 - DNA, 547 bp, Homo sapiens
aaaataggatgattagatctatgactattaattattttcaaggtagatttttaaggccaggtatggtggctcacgcctgtaatcccagcactttggaaggctgaggcaggacgatcgcttgaggtcagaagttcgagaccaacctggacaacacagggagacccagtctctacaaaaaatgttttaaaaaattagttgggcatggtgacacatgcctgtggtcccagctacttgggaggctgaggtgggaggattgcttgaggctgggagattgaggctgcagtgagccatggtcacaccattgtactctagyctgggtgacagagcgagaccctgtctcaaaaaaaaaaaaaagtagatgtatatatgtagctcttcactagtaaacagctatcttatattgtaaatgcaaacaaaagtttgcaactcatatacaatatttatttttcctttcatcttcttttaataagaacttagacttgtttacctttggaaaatatttttcacttttatattacattagaaatgccactctttaaaaatcaat

SEQ ID NO: 346633 - DNA, 484 bp, Homo sapiens
accatgagcaattagtgcctaccagacataaatcagcatattttcagagaaccgaggtgaggttggtaaattcactaaggaaataaagctctccttaaggcaaggtccaggctcaacagactgtwtatactccacagaatataacactgtgtcccatacataataagctttcagggaataattactgagagaattctttaaccatttaaactttttgttgaattatattttaagcaagtgtattagtccattttcacactgctgataaagacataccctagactgggcaatttacaaaagaaagaggtttattagacttacacttccatgtggctggggaggcctcacaatcatggcagaaggtgaaaggcaaggagcaagtcatgtcttacgtggatgacggcaggcaaagagtttgtgcagggaaactccagttttaaaaccatcagatcccataagacttattcactatcaggagaacact

SEQ ID NO: 346634 - DNA, 552 bp, Homo sapiens
tcatccatttatttcattatgcaatatataatgagcagtaataggcattggagcaattgttagatataagaactgtaaaacaaatataaagttccaaagggtatatagcacagtgaagtatatagcacagtgaagtgagttatcactgtgttacaagctaataggtatcacactatattaacagctaacatttattgagcattaagcagttacgtgtattaactcatttattccttgtaacaacccaaaaaggtggacctttttattatgatccttagcatacaaatatctgagtyatagagacaacaatgagcttaaagccacacaactaataaataccagagccagtatgtgagcccaggaagtctagctccaatgtcggtgctttaatccaatacataaggaataaaatgcacaggatgcagttagagcacagagaaaatccatgtcagatggctgttttggtgaaaagataagaagaaaaactctggggctgatggaaaccgcctgcataatagcatgaggaatacactctgtgtgtttgaggacagt

SEQ ID NO: 346635 - DNA, 552 bp, Homo sapiens
tcatccatttatttcattatgcaatatataatgagcagtaataggcattggagcaattgttagatataagaactgtaaaacaaatataaagttccaaagggtatatagcacagtgaagtatatagcacagtgaagtgagttatcactgtgttacaagctaataggtatcacactatattaacagctaacatttattgagcattaagcagttacgtgtattaactcatttattccttgtaacaacccaaaaaggtggacctttttattatgatccttagcatacaaatatctgagtcatagagacaacaatgagcttaaagccacacaactaataaataccagagccagtatgtgagcccaggaagtctagctccaatgtcggtgctttaatccaatacataaggaataaaatgcacaggatgcagttagagcacagagaaaatccatgtcagatggctgttttggtgaaragataagaagaaaaactctggggctgatggaaaccgcctgcataatagcatgaggaatacactctgtgtgtttgaggacagt

SEQ ID NO: 346636 - DNA, 552 bp, Homo sapiens
tcatccatttatttcattatgcaatatataatgagcagtaataggcattggagcaattgttagatataagaactgtaaaacaaatataaagttccaaagggtatatagcacagtgaagtatatagcacagtgaagtgagttatcactgtgttacaagctaataggtatcacactatattaacagctaacatttattgagcattaagcagttacgtgtattaactcatttattccttgtaacaacccaaaaaggtggacctttttattatgatccttagcatacaaatatctgagtcatagagacaacaatgagcttaaagccacacaactaataaataccagagccagtatgtgagcccaggaagtctagctccaatgtcggtgctttaatccaatacataaggaataaaatgcacaggatgcagttagagcacagagaaaatccatgtcagatggctgttttggtgaaaagataagaagaaaaactctggggctgatggaaaccgcctgcataatagcatgaggaatacastctgtgtgtttgaggacagt

SEQ ID NO: 346637 - DNA, 531 bp, Homo sapiens
taaaaaaaaaatgattacacctatcttaccacatcatacttgcatatatggtgctcaaaatgacactagaaagcatatacaaccattctggataagtttcctttcatttgtgactacttatctccactgggacctcagcagtactcctccctatcatatcatattggatatgattccaatatatatcctcaggaacttcactcaatcccaaagaggaaactcctcaaatttccagcccccacctctcctcctcacccttgggtgaaaacttcattcttaattcactgagcaatttgaagcagccaaaatagaattttcttctcatccttcatgtctgatatcatgtktgcagctatatctatgtgtgctaaatatctatcctgtgaaaatgggctgagaagttgctacattcacctaaggtgaacccatccacttacatgcatttcatcttcctctctatctcaaggatgatgttccttcagataactcctcactttcaggcataattttatttgttgtctctcattactg

SEQ ID NO: 346638 - DNA, 531 bp, Homo sapiens
taaaaaaaaaatgattacacctatcttaccacatcatacttgcatatatggtgctcaaaatgacactagaaagcatatacaaccattctggataagtttcctttcatttgtgactacttatctccactgggacctcagcagtactcctccctatcatatcatattggatatgattccaatatatatcctcaggaacttcactcaatcccaaagaggaaactcctcaaatttccagcccccacctctcctcctcacccttgggtgaaaacttcattcttaattcactgagcaatttgaagcagccaaaatagaattttcttctcatccttcatgtctgatatcatgtgtgcagctatatctatgtgtsctaaatatctatcctgtgaaaatgggctgagaagttgctacattcacctaaggtgaacccatccacttacatgcatttcatcttcctctctatctcaaggatgatgttccttcagataactcctcactttcaggcataattttatttgttgtctctcattactg

SEQ ID NO: 346639 - DNA, 531 bp, Homo sapiens
taaaaaaaaaatgattacacctatcttaccacatcatacttgcatatatggtgctcaaaatgacactagaaagcatatacaaccattctggataagtttcctttcatttgtgactacttatctccactgggacctcagcagtactcctccctatcatatcatattggatatgattccaatatatatcctcaggaacttcactcaatcccaaagaggaaactcctcaaatttccagcccccacctctcctcctcacccttgggtgaaaacttcattcttaattcactgagcaatttgaagcagccaaaatagaattttcttctcatccttcatgtctgatatcatgtgtgcagctatatctatgtgtgctaaatatctatcctgtkaaaatgggctgagaagttgctacattcacctaaggtgaacccatccacttacatgcatttcatcttcctctctatctcaaggatgatgttccttcagataactcctcactttcaggcataattttatttgttgtctctcattactg

SEQ ID NO: 346640 - DNA, 591 bp, Homo sapiens
tcaccctatggaaagtgcccacatatatcttgctgaattcttaaagtggtatttgccttaaaaagaataataaccatggcaaattgttgaatagaaaagacattcacaactagtggtgacaaatattctaaggaagaaggctttagcagttttctacattccactgatttactctgtgtgagtcttttgcaatctatcatatgagaaaaaaaattagtgtgcctgcttaaggcaggcagctctaaggtagcattcattcattgagcaaaatatacagtaaacactaactatgctagagagtaarggaagcaccagtgatgaagacatggtttctatattcctaaatcttaagagaaagactgtagaaatctaaaaaccacacacgcagcaaagtaatgtaattagtggatctggatttcagcctacctatgagtaataaacataagataaaatcctggtattttccataagttctgtccatccccctgcctatctcccactggttatgaggttgcaagctagataaatgaggactgatgatgtgtagtttaatattttaaaataagtttttaataaaaatgcattaatgtt

SEQ ID NO: 346641 - DNA, 531 bp, Homo sapiens
acaccacattttccttccacactgccccagcagaggttcttcaagagggccccacccctacagcaaacctttccctgggcatccaggcatttccatacawcttctgaaatcttggtggaggttcccaaacctcaattcttgacttctgtgcacctgcaggctcaacgccatgtggaagctgccaaggcttggggcttccaccctctgaagtcacagctgagttgtacatggacccctttcggccacgtctggagcaactgggacacaggacaccaagtccctaggctgcacacagcacgtggatcctgggcccagcatatgaaaccactttttcctcctgggcctctgaacctgtgatgggaggggctgccatgaaggtctctgacatggcctggagacattttccccatggtcttggggattaacattaggctgcttgctacctatgcaaatttctacagccagcttgaatttctcctcaaaaaattgttttgttctctactgcatcatcaggcttcaaatttcctgaac

SEQ ID NO: 346642 - DNA, 512 bp, Homo sapiens
taagcagttacgtgtattaactcatttattccgtgtaacaacccaaaaaggtggacctttttattatgctccttagcatacaaatatgtgagtcatagagacaacaatgagyttaaagccacacaactaataaataccagagccagtatgtgagcccaggaagtctagctccaatgtcggtgctttaatccaatacataaggaataaaatgcacaggatgcagttagagcacagagaaaatccatgtcagatggctgttttggtgaagagataagaagaaaaactctggggctgatggaaaccgcctgcataatagcatgaggaatacagtctgtgtgtttgaggacagtaagaagttctatggggttgattagaagtgttcatgtgggaaatagagctgggattttagggcaagcatcagagcatgatggactttaggtgttaatctaagaaatttgaactttattctggaagctgtggggaactattggaacattttaagggctttaaga

SEQ ID NO: 346643 - DNA, 568 bp, Homo sapiens
gctcttacagtctgcctgcccttccttaccatgtgggattctctaacatggcctttacttcctggcagtttgcttcatcaaagccagtgaagggaaatcactctagcatatcagctggcaagatggaatttacatatatcatacatcatgttcagggctctcagatagtcctggtaaatcagcttcctcagaggttatttttttcctttggtatgatttgtgtcaaaaatgagtcctagatgctgtctgatgttcaagcagtttattttggtagcactcttacaagtgagctggcgcaggccagcaacatgggtcaggggttagatgatcactaccaggaggatctccatccagagaccattctcagagtttgagggattgttccccctttcttgtaactgtattcagtttgggtcagttaccaggtgtctttcataagggagtttttaagtgattcttgtgaggatacattttgttttaatgttcycaaaaattgcatctgtgctgaggtggccttgtctcctggaaagccttgggccaggttacatcatattgtgaagagatatgt

SEQ ID NO: 346644 - DNA, 524 bp, Homo sapiens
atactgaccttgtgtaacacagaattccagacaaagattatatgtagtttatttttattgctaaaaatacacactaccataaatttttgtcttgtgtgataccaaacagcttcaaaatgtaacaactcatacacaaaaaggacaaatttaaaatttactaattatacaaactttaacaaaatttttaaacttttgctttaacaagtagaaaaaaagacacaagtgccctttacatattgctaaacaaaacacacagagaaggggatawtgtagagagtataataataataaaacaaggttttatgtcaaaaaaaataaaacattgccaacactcctgaaagtccccagctaattagggatacataattaactttatattatataaatagagaatatatataattttacagttttcactgaacatgagatttttttccataagttaatgggatgcaagtggtatttggttacataagttctttagtggggatttgtgagatttggtgcacccatcacccgagcag

SEQ ID NO: 346645 - DNA, 560 bp, Homo sapiens
ctggttttggtattagggtgatactggcttcatagaatgatttaaggagggttccttctttctctatcttgtggaatagtgtcaaaaggattggtaccaattcttctctgaatgtctggtaaaattctgctgtgaatctgtctggtcctggacttttttttgttgaaaaaattactttttgagatggagtccctatcttgttgttcaggctggagtgcaatggcatgatcttggctcactgcaacctccacctaccaggttccagttattctactgcctcaacctctaaagtagctgggattatacatgttcaccaccacacccagctcacccagctaacttttttttgtatttccagtagagacggggtttcaccatgttkcccaggctggtctcgaactcctgacctcaggtgttccacccaccttgacctcctaaagtgctgggattacaggcataagccactgcacctggccttgttgataattttttaattactgtttcaatctcactgcttgttattggtctgttcaaggtatcttattcttcctgatttaagc

SEQ ID NO: 346646 - DNA, 580 bp, Homo sapiens
tacaacattatatgcagaatccctgcttattgggcccatatcaataaatttagcctgatccaactttatgttctttctgccattatcccccacccttaatattaattcccatgcctgttctccagatttctgctaatgtaaattagaaaactctakcatgtcttttggagtgtagtacacctctttgtgggtcacactataaactcacctcttggggtttgccacaactttagtctagttatatgtctagaaacaaacacagatattaggggtgggtcctgaggagaatcggcattgtcttacctggcaactgcttcagaggaggctatcactgttgcctcaggcttgcagtgttaatatcctcagacaaaggtggaaaggctgatggcagcatgggtaggggaggagatgttgccagcactggggtggtggggggaggccattttttctggcaaaaaaggctcatcagaatttaggagttcagtacccccagcctcatcagggtcctcccacacgtccccattccaagttgcagggtcccattcttttccaataaatgtcctcactttaacagttgaga

SEQ ID NO: 346647 - DNA, 580 bp, Homo sapiens
tacaacattatatgcagaatccctgcttattgggcccatatcaataaatttagcctgatccaactttatgttctttctgccattatcccccacccttaatattaattcccatgcctgttctccagatttctgctaatgtaaattagaaaactctatcatgtcttttggagtgtagtacacctctttgtgggtcacactataaactcacctcttggggtttgccacaactttagtctagttatatgtctagaaacaaacacagatattaggggtgggtcctgaggagaatcggcattgtcttacctggcaactgcttcagaggaggctatcactgttgcctcaggcttgcagtgttaatatcctcagacaaaggtggaaaggctgatggcagcatgggtaggggaggagatgttgccagcactggggtggtggggggaggccattttttctggcaaaaaargctcatcagaatttaggagttcagtacccccagcctcatcagggtcctcccacacgtccccattccaagttgcagggtcccattcttttccaataaatgtcctcactttaacagttgaga

SEQ ID NO: 346648 - DNA, 537 bp, Homo sapiens
tctgaagtacaacacgaggtcagcaggaaatacagctgactgataaatgttgatggaattaaagcatactgtaccaaccaaatactatttttgcaacctactgatttttgaaaactatttgctgggtaattatgattaatccaaaagaaaatctggaaacctgtgcttttaattcaatttatgggtgattagggcattgagaaatgtaagataacagctcccttaatggggcagcttttaagcacgaaattaccttttgaatgcttgaagaaaaacatttaaagatttgaagaaccctgcggtgattattaaaacctctgaaaagcactctttattctctaataatcaaatgaaacaaaagtctttggcccactcaacttcaacccttyaacacaggtcagtcaatctacccacattctcacatcttcattttgtttttgtaatctccaactgattttcccctttctgaatataacttcctgtctttcctctttactagtccttcagtatcacagaatctgatcatcctcatccaca

SEQ ID NO: 346649 - DNA, 526 bp, Homo sapiens
ctgggtccctgccacaacaggtgggatttctgggagatataattcaagttgagatttgggtggggacacagccaaaccatatcacctattgagcatctatctatgttcttgattttacctgttggaaagctttggcctatgctgctgcattgctcaggtgagtgtggtctctcatgacctttattctgatgttgatgtattactgaataagttactggagacattcacggtgtttacaagagttgtaattctcttcagtgacactgtctgctttcatatttcagatcagtgaactgtttcttggagtagaagagtaccasaaaatatctagcaaggcaatgtaaaagacactacttgtgctttaaaaaagacactcagagaatagacaggtaggtgatctgttacattgaagaggcccaagttttaatctaccactgtgtagagtcaaagtgtagtctacacaacgtgtaccaaattgtagtctaccaatgtgtagagtgtgtgtgtattttgtgggtttgtatgg

SEQ ID NO: 346650 - DNA, 526 bp, Homo sapiens
ctgggtccctgccacaacaggtgggatttctgggagatataattcaagttgagatttgggtggggacacagccaaaccatatcacctattgagcatctatctatgttcttgattttacctgttggaaagctttggcctatgctgctgcattgctcaggtgagtgtggtctctcatgacctttattctgatgttgatgtattactgaataagttactggagacattcacggtgtttacaagagttgtaattctcttcagtgacactgtctgctttcatatttcagatcagtgaactgtttcttggagtagaagagtaccacaaaatatctagcaaggcaatgtaaaagacactacttgtgctttaaaaaagacamtcagagaatagacaggtaggtgatctgttacattgaagaggcccaagttttaatctaccactgtgtagagtcaaagtgtagtctacacaacgtgtaccaaattgtagtctaccaatgtgtagagtgtgtgtgtattttgtgggtttgtatgg

SEQ ID NO: 346651 - DNA, 526 bp, Homo sapiens
ctgggtccctgccacaacaggtgggatttctgggagatataattcaagttgagatttgggtggggacacagccaaaccatatcacctattgagcatctatctatgttcttgattttacctgttggaaagctttggcctatgctgctgcattgctcaggtgagtgtggtctctcatgacctttattctgatgttgatgtattactgaataagttactggagacattcacggtgtttacaagagttgtaattctcttcagtgacactgtctgctttcatatttcagatcagtgaactgtttcttggagtagaagagtaccacaaaatatctagcaaggcaatgtaaaagacactacttgtgctttaaaaaagacactcagagaatagacaggtaggtratctgttacattgaagaggcccaagttttaatctaccactgtgtagagtcaaagtgtagtctacacaacgtgtaccaaattgtagtctaccaatgtgtagagtgtgtgtgtattttgtgggtttgtatgg

SEQ ID NO: 346652 - DNA, 526 bp, Homo sapiens
ctgggtccctgccacaacaggtgggatttctgggagatataattcaagttgagatttgggtggggacacagccaaaccatatcacctattgagcatctatctatgttcttgattttacctgttggaaagctttggcctatgctgctgcattgctcaggtgagtgtggtctctcatgacctttattctgatgttgatgtattactgaataagttactggagacattcacggtgtttacaagagttgtaattctcttcagtgacactgtctgctttcatatttcagatcagtgaactgtttcttggagtagaagagtaccacaaaatatctagcaaggcaatgtaaaagacactacttgtgctttaaaaaagacactcagagaatagacaggtaggtgatctgttacattgaagaggcccaagttttaatctaccamtgtgtagagtcaaagtgtagtctacacaacgtgtaccaaattgtagtctaccaatgtgtagagtgtgtgtgtattttgtgggtttgtatgg

SEQ ID NO: 346653 - DNA, 578 bp, Homo sapiens
gtactcaattttgttattttcatcttctgtcgcaaatgtttaatttttgtagtaaaccatattctattggatgtattttcttatatagtaactttgaacttactattactgacctaggttgtgtttaagaataatcctccacatatttaaaacattatatttaatatgttttaaaaaaagagttgagattgtttcacaaatcatagcagtattttctaggtcaaaacctggcagaaaatggaacaaatgtktgtttttcatttcataattaaatctttagtgtgtgtgatttttcagttatgtgtgcaatccccgaaaaaaggcatctgtagtttttagccttagcacgaatagtctaaaatatcattccactttccaaaccaccatgacaactaattgatctagccaattactctgcccaattagaattcagaaattcacatttgtatttgccaataatttaccatttctttcctgccaactctccaatatttgtaatttgcttttatttcagtactttgatttcaagattgctctttcacatggcattttttttagcaactctcagtacaaagtga

SEQ ID NO: 346654 - DNA, 557 bp, Homo sapiens
tatgtaacattcacatttaaatttgaattattccaaagggttgtacctatactaccaatttttaacctaattaccttgtgtttcttttcagacatccaaagaaatgtcaacatttttaaagcctagagttatttttttatgtccaatcaaagctatttttaaggtttcacttaaaattttcattttgtgtctttaattggtttctccagtgtctcatttttctggcatcccaaaactgtacccaagtggagcaaaactgtcattctcttttaatcagatatattattttcatttattatgggcaatataggttttagaaagcaaataaaractggatattcctcctccctgaactataattgtctagttcagcattcttgggacttggcaactcttactgcagtgcctcctgttggtaacatgtttactcttcccctaccaccacacaggtcaagcttggagtgcactagctcccttccttataactattttgatttcaagaatttcaggcacaccctattctttgaacaactgtaagaaaaaccttccttaaagat

SEQ ID NO: 346655 - DNA, 499 bp, Homo sapiens
taaacctttcttttaatcaattgctcaagttaggggaggtgatattctgagttttcaagtttgggtcatgtcttagtccattctggaagctattataaaatgtgtggyttattttggttttaaacaacagaaatttatttctcacagttctagaggctgggaagtccaagatcaaggtgctggcagacttggtttctagtgagggctgctttctggttaatggatggtagcttctagctgtgtccttacttggcagcaaggacaagggagctcactgggtcctttgtaagggcactaatcccattcatgaggacttcacccttataacctgatcccctccgaaagcccccacctttgaatactgtcaccttaggggttaggatttcaacatacagaatttggggtttccatatattttgggatataaacgttcagatagcaagtcacatgcaatgcttgaagcatgggaatcagccccactaaaagaacatgaacctag

SEQ ID NO: 346656 - DNA, 547 bp, Homo sapiens
tttgggatataaacgttcagatagcaagtcacatgcaatgcttgaagcatgggaatcagccccactaaaagaacatgaacctaggagtggaagatggrtaaatggatattggataggtgcacacacacaaaagcatactattttatcatgatatatccttataaacttgtgtactttatgtgatacttaagttattagaatataaatgctagattaacatatatataggtagtctaaattttcctgtatattttcatattttctatattgatgtacaatgggtacctcagttttctgctgagattgtacacttgatgtccattccagatctcatttactaatcatttccaattaagtaggtaaaaaaatagaatcccattgtttcattagacattcctgtaatgactgtaaacatgtttacttttcttattctatttatatttttcacgggtatttttattcctttattgtgaactccctgcttatgattttctaattgtaccaaagcaaacaacataatgaagtgttaaatacatgaaatatttct

SEQ ID NO: 346657 - DNA, 547 bp, Homo sapiens
tttgggatataaacgttcagatagcaagtcacatgcaatgcttgaagcatgggaatcagccccactaaaagaacatgaacctaggagtggaagatgggtaaatggatattggataggtgcacacacacaaaagcatamtattttatcatgatatatccttataaacttgtgtactttatgtgatacttaagttattagaatataaatgctagattaacatatatataggtagtctaaattttcctgtatattttcatattttctatattgatgtacaatgggtacctcagttttctgctgagattgtacacttgatgtccattccagatctcatttactaatcatttccaattaagtaggtaaaaaaatagaatcccattgtttcattagacattcctgtaatgactgtaaacatgtttacttttcttattctatttatatttttcacgggtatttttattcctttattgtgaactccctgcttatgattttctaattgtaccaaagcaaacaacataatgaagtgttaaatacatgaaatatttct

SEQ ID NO: 346658 - DNA, 546 bp, Homo sapiens
tgttacataataaattccttacaaatgcatctatatttatcagtgaatggttaaaacccatggttaaggtaacgaattacattttttgtccacagtcaaagggaaaaatccagttagatgtgtctttaagtaggagctcttaaatccattcaaacatgatttgtttcataattatttattgtatatctaccatgttctggccattgtgtttgtcaatgttttcaatgacatttaaaaaaatcacacaaatatatcctgtttaataatgttcttagtcatctaggagacaaactgtaaacaaaaacaaaagcaaatttataaatgagtaataataaattgagaagtcttatgaagaaaattataacacttattgaacattgacaaaatggtgacagagtcagttctatgtgtttactcattttaatttttaatcttaataatttatgaggtagktgttattgttactggcactttcagaatgaggaaccagaaagcacaaataggtcaaatgagttttccagtatcatacagtaggaggagccaaaa

SEQ ID NO: 346659 - DNA, 591 bp, Homo sapiens
cacatagtaattgcctttggggactgacaggattggcgtgtttgctcttgtttaaaaaaaaacaaaggagttttctttctctaagaaatactctttcggtccttgcatttcttaagcacgtttcttctgcaagtgctctcataggttgctgacataggaggctcatcacagaaggtgttatcttggatcttgtattgactaaagtataaaattctaggcatatcatcttatgttagctataaaagctttgtagttcaaagcctgagaagtggmtaggaaataatttgattgtaaaggtaatctcaaagtaaatagtagtatttcttcaagcttatccctaataagggtttataatcttagtttcttaaattcaggttttattttttggaaaattgtgcatgttcaacacttattctaagaatcagtgcttattttcttccaccttttctctgtcatataaaggtttactttgattctgagtttgtaggtgagtgatacatcttcaaagatatgtttaactccttcatttcatactgaatctttacagtaatttttgatatgtacttatgctatctgaagagtatgttggtt

SEQ ID NO: 346660 - DNA, 451 bp, Homo sapiens
gaaaattagggcactagcaaaggtttacagggatgatggaagttagaaacaagtgtgtcttgatgaaatcatgagttgtgcttattaggcatggtggtttatattaaataagaaataaaataaattacaatgcccctctcatgggctaatcacatgaatatgtagatcacatttggtgtattcacctacataatatttcctttgcagaaagaaccgaaagcacacacaatagaatttccacaaacaraagagccactaccggaaatgctacattaaaattttaaaaaataaaattgtgattgttagaggtagaaatattcacaattagaaatcgccacctcaattcaatagcttatcttttatatgaagttataaaatataggtcataaatcaaataagtgtgtttcaaaagatttagtaaggctttgtatcataaaataaacacaaggta

SEQ ID NO: 346661 - DNA, 529 bp, Homo sapiens
tcttgtgaacaattgagtacaagggcattgtaaattacaatctcctctaaacactgcttgctcaagaatatattagggttayacaaataatttctgttgaataattgcttaaaatgttagtcaatcatttgttattcctagattgggtcttgctaaatacaatggacagtaaaaattctgagtaatctatcagtgtaggtttcatgtttgattaaaaaagtcattaaaatgcatttgagaggacgttatcccattctttctctagtgttcagcttcagccaagcagtggtaaagctaataacattctccctttatggaaaagcccagaatcattttattttctgtctcctaataagctccttacattaaggtatcaacggggaatgatggtgaaaaattttgcttaagtaaaagataatttccttttcttagactgctatgaaaaaaatatgggactctggattttgttttattttaaagttagtgaatatgaatgatactatgttgttataaaaggtggaaggatgaa

SEQ ID NO: 346662 - DNA, 529 bp, Homo sapiens
tcttgtgaacaattgagtacaagggcattgtaaattacaatctcctctaaacactgcttgctcaagaatatattagggttatacaaataatttctgttgaataattgcttaaaatgttagtcaatcatttgttattcctagattgggtcttgctaaatacaatggacagtaaaaattctgagtaatctatcagtgtaggtttcatgtttgattaaaaaagtcattaaaatgcatttgagaggacgttatcccattctttctctagtgttcagcttcagccaagcagtggtaaagctaataacattctccctttatggaaaagcccagaatcattttattttctgtctcctaataagctccttacattaaggtatcaacggggaatgatggtgaaaaattttgctyaagtaaaagataatttccttttcttagactgctatgaaaaaaatatgggactctggattttgttttattttaaagttagtgaatatgaatgatactatgttgttataaaaggtggaaggatgaa

SEQ ID NO: 346663 - DNA, 529 bp, Homo sapiens
tcttgtgaacaattgagtacaagggcattgtaaattacaatctcctctaaacactgcttgctcaagaatatattagggttatacaaataatttctgttgaataattgcttaaaatgttagtcaatcatttgttattcctagattgggtcttgctaaatacaatggacagtaaaaattctgagtaatctatcagtgtaggtttcatgtttgattaaaaaagtcattaaaatgcatttgagaggacgttatcccattctttctctagtgttcagcttcagccaagcagtggtaaagctaataacattctccctttatggaaaagcccagaatcattttattttctgtctcctaataagctccttacattaaggtatcaacggggaatgatggtgaaaaattttgcttaagtaaaagataatttccttttcttagactgctatgaaaaaaatatgggactytggattttgttttattttaaagttagtgaatatgaatgatactatgttgttataaaaggtggaaggatgaa

SEQ ID NO: 346664 - DNA, 512 bp, Homo sapiens
tgatctgcagatactgaggtagccaagcaccaaataatgtcacttaatttttgagcatctgctggtatcaatagcttcctcatttaagtctctgggaatcacaatacattatctcctattgtttctgagatttgaaattctgatttctccatcagcttaagtagctcatttctaggctatgaaaaaataccctaactttacttctaaaatccttttttggtttgtttcaaaagaggtttttacatttttttatttcaaaattactgtgatttaaaacatacacttttgaacatttaaactctcaatttactagctctgtcttaaagttcctgccmttcaagtcttgccaaatgtctttgtgtttgttatttttaaaatggatgctgtcttttctaatagtaccaaaaaatttgggggtggaggttgtgtttatttgttttgactttacctccccacttttccctaaatcaaatagttttataattttattgatatttacagtttagttcgtt

SEQ ID NO: 346665 - DNA, 504 bp, Homo sapiens
tgcctagggggaacaactctacttgaaggatttgcagtgtacaaagaaatgccaagtagagacttttctggatttgtatgcaagatggcctcagccatctcttagggattcactacagttggatgtggaataaactagagaggactgagagccctgctttggtgtrtggagggaacacacactgaacagagcttattactcataatcctgatattaaagtttgggcttgtgtggctaggaatatcagctacttaggcaattggcacatagttggtcattaagcacttacaaaaaaagaagaataatctttccaattaaattttggaaaagagttatcctagagatgaaagttaggtgaattgaagaaatagattataaaaccgagaaagtctgaaaatatagacatagggttggtaagtattgaaacacaacacaactttatattcatgtaattgagatgcacagacacattcttctcagtaatattgaacggtggaaaatttt

SEQ ID NO: 346666 - DNA, 504 bp, Homo sapiens
tgcctagggggaacaactctacttgaaggatttgcagtgtacaaagaaatgccaagtagagacttttctggatttgtatgcaagatggcctcagccatctcttagggattcactacagttggatgtggaataaactagagaggactgagagccctgctttggtgtgtggagggaacamacactgaacagagcttattactcataatcctgatattaaagtttgggcttgtgtggctaggaatatcagctacttaggcaattggcacatagttggtcattaagcacttacaaaaaaagaagaataatctttccaattaaattttggaaaagagttatcctagagatgaaagttaggtgaattgaagaaatagattataaaaccgagaaagtctgaaaatatagacatagggttggtaagtattgaaacacaacacaactttatattcatgtaattgagatgcacagacacattcttctcagtaatattgaacggtggaaaatttt

SEQ ID NO: 346667 - DNA, 504 bp, Homo sapiens
tgcctagggggaacaactctacttgaaggatttgcagtgtacaaagaaatgccaagtagagacttttctggatttgtatgcaagatggcctcagccatctcttagggattcactacagttggatgtggaataaactagagaggactgagagccctgctttggtgtgtggagggaacacacamtgaacagagcttattactcataatcctgatattaaagtttgggcttgtgtggctaggaatatcagctacttaggcaattggcacatagttggtcattaagcacttacaaaaaaagaagaataatctttccaattaaattttggaaaagagttatcctagagatgaaagttaggtgaattgaagaaatagattataaaaccgagaaagtctgaaaatatagacatagggttggtaagtattgaaacacaacacaactttatattcatgtaattgagatgcacagacacattcttctcagtaatattgaacggtggaaaatttt

SEQ ID NO: 346668 - DNA, 574 bp, Homo sapiens
actaggcagttagacaaagtagagaatagtggaaacagaacatttgtcagaagaaaatagatgcagcttaaattctgattagattttgggtaagagcaagagtgagaaaaaggatggccatgagtggattgtgacaaattattaactgaactaggaaggttagtgatggagctgtttaaagaaagcaatttaacaagtatgcgtgaagtagtaggatgtacagaacactatggtaagcacaagcacacaattaaggcaccactcttctcatgaagagcctatcaagttgaggatatatattctaaatatattttcatccttacatcagagattttttaatcaacaaattatacgaagaatctctgaggaaagacgaataaaacaaatggcttttaacagtgacaattaaacccaaagactgtkgaacagaatatataaatcattctatgttttaagaataacacgatgaataaggcgaagtcaacacttaccaatagaattcttacctacatggggaaaagggaggggctatatttatgatgatcatgatgataacattataaagatggccaac

SEQ ID NO: 346669 - DNA, 574 bp, Homo sapiens
actaggcagttagacaaagtagagaatagtggaaacagaacatttgtcagaagaaaatagatgcagcttaaattctgattagattttgggtaagagcaagagtgagaaaaaggatggccatgagtggattgtgacaaattattaactgaactaggaaggttagtgatggagctgtttaaagaaagcaatttaacaagtatgcgtgaagtagtaggatgtacagaacactatggtaagcacaagcacacaattaaggcaccactcttctcatgaagagcctatcaagttgaggatatatattctaaatatattttcatccttacatcagagattttttaatcaacaaattatacgaagaatctctgaggaaagacgaataaaacaaatggcttttaacagtgacaattaaacccaaagactgtggaacagaatatataaatcattctatgttttaagaataacamgatgaataaggcgaagtcaacacttaccaatagaattcttacctacatggggaaaagggaggggctatatttatgatgatcatgatgataacattataaagatggccaac

SEQ ID NO: 346670 - DNA, 484 bp, Homo sapiens
aggtaacgtattcagatttttaaatatcattttacaggtcaagtcagaagtagtwgttataagagggaagatattttgggaaggatatattaatgtacaaaggacttggaaaaggccaaggatggcaactggaaaggagaaaaaaaggacaataactccaactccagccaatctgaaaaaaaattaagcacattggactacatatatgaattcttccaaacatatttaggtctgatctggggaagggaggccttcctagacaatggttctttgatgcccttgactttgaattgcctagctagcttcaaagaaatggcctaaaattgttctcattctctctctattaatttaaagtttcccctgtggtttttataatgaacaatgcttttctttgtcttgccaaaatccttagaaacaataaacacaactagacatctctctcaaactcggacagaaacaaaataaactctttttagctgaatat

SEQ ID NO: 346671 - DNA, 484 bp, Homo sapiens
aggtaacgtattcagatttttaaatatcattttacaggtcaagtcagaagtagtagttataagagggaagatattttgggaaggatatattaatgtacaaaggacttggaaaaggccaaggatggcaactggaaaggagaaaaaaaggacaataactccaactccagccaatctgaaaaaaaattaagcacattggactacatatatgaattcttccaaacatatttaggtctgatctggggaagggaggccttcctagacaatggttctttgatgcccttgactttgaattgcctagctagcttcaaagaaatggcctaaaattgttctcattctctctctattaatttaaagtttcccctgtggtttttataatgaacaatgcttttctttgtcttgccaaaatccttagaaacaataaacacaactagacatctctctcaaactcrgacagaaacaaaataaactctttttagctgaatat

SEQ ID NO: 346672 - DNA, 531 bp, Homo sapiens
atatttatttattttttcccatcctggatgaggtttttttttattttttaatgaggcgtaaaaggagatacttctagtcccacacacagtgagaccaaaatcatagataaattgtttcattcaaacttcaattcagcttttaaaatatgttatctaaatggcatggataattttcagattatttatttgatatcctctctaatcaaataatataatttgtagtgtgatgacaacagttgacttacagttcctaacaccttgaacttcgcaagtcattctgaccactccccaatatggaaaatttatttattgattaagaggaagtatgcagggcacaagatgccaaaagtgtcatacaacttgctggagttatgttttattattaagaatgaaattctatagttacagaaatatttttaatagacatacrttaatattttcattaaaatataaagtataaacatggctgtagtagttcacaaacactattgacaaatccttcctaagttaacccagcaggatatcatgtct

SEQ ID NO: 346673 - DNA, 516 bp, Homo sapiens
ttagaatttcaacgtaagaattttggagagatacagacagacattcagttcactgcaaacagattatatttgacataatgacaacataaaacaggtacaaaaaatgtgggctcaagatgtaaatacagcctctcattttccctatgcaaaaataatatatgcaaccagtcagggatggcttcatgggtttatgatctgagcaatcacacagagtcccatgttcagaagggccacaacttggtttaatacttggttgtyaccttcttaaattcttaataattttttctttgaacttatcttttgcaaatgaaaattgctgggataatgcagcaggtaatgtgaacagaagtgtaatgcacaatattgccactgtctcaccactgttccttgtcaccccattagcatatagcatttgcaatactccgtgagcacagagttttggtgaactcacaatgtgtgggagttctgcaaggctcagagtgaatataagataaatgtgttatatctgtgaccgaa

SEQ ID NO: 346674 - DNA, 617 bp, Homo sapiens
tctctgaagatcgtgagtttcactatttagttttcttacagttaatgaactaggtcttaacttttgtaagatgtggagtctacaaagtctttgaaaagcaggatggccaaattttcttgccatttgtttcctaaaatatataagaagtaaagcctccatattttgtttataaaacactgcttgtaatttacttgtatttattataaagatcatttacaaaaaataatttgtcctccrtcagataaaattgtgagcttttggcagggacaggtaaaacagtgtgaacagaaattatgtcttgtttattttgcattctcagtactcagcatgttattttatgtaataggcacttaatgaatgtttgttgaataaatgaaatgatagaattgtaacctagatttcccccaaggggatcacatacacagtcatagctcaaatgtcactggcttgctgtatttacttgcatactgcaggaattccagcttactattttggtttgtggatacatgcagtggtgatttacatggccttataaaccgtgttgctgttgccctgtctataaaactatttgaaatgaaagcaatgcactattgggatgcatggataccattcacaat

SEQ ID NO: 346675 - DNA, 618 bp, Homo sapiens
aagtcccctgtattctcagaggtgcatcctgacctcagctacctgttgctagactatgatctgtgtatatgaggccgagaggtgaagggctttcttctgttctatgagtgggttctgagagaaagaagagagaccctcacttattggatgagaaatgttgacatactgcccctcttgagaagacagccttataactaggagctgtggagasagggagtttttatttctgctattagtttgcagtggaatgtccacctcacttagcttatgcaggtgatagagaacatggatgttggtacaaaaattaaactttcatgattcttactgcaaatagtgaagtagaggctcctcttcaaagagattttcctccccatctaattaagaataaatagtaacttctcttagaagcaaaatttattcaaagacctgtgataatattcttagatatctgctagctgtaataaagaaatcaacatactttgtgttcttagttcccacaatttactctaaatatttgctctggcatgcttatactggtccaagcaagcattaggtcatagcctgttcctcttccttatttggaggtgtttttacctttctcaggattccacaaattac

SEQ ID NO: 346676 - DNA, 505 bp, Homo sapiens
ttacaggctcattaagaattatttggcctgaagatgaattgctatgatctgaaatgaattgtgttacatttaagattccagtgaccatcttcatgccaaggttgattacatttaaaatgaaaactttgaaagaagttgaggaattttctctcagaataaagcaggggaggaacacactgcacaggagattgtaagtgaggaatttaaaatccaaactgactscgtcctactaaaaacaaaaaaaaaattagccgggcgtggtggcaggcacctgtagtcccagctgctcgggaggctgaggcaggagaatggcatgaaccccggagacagagcttgcagtgagccgagatcgtgctgctactccagcctgggccacagagtgagactctgtcacaaaaaaagaaaaaaaaaaaatccaaactgaccagggagatgcaggtaggagctaaaatgcagcctctgaaagaagccaaacagtaaaacatggaagaagacaaaaaggaga

SEQ ID NO: 346677 - DNA, 598 bp, Homo sapiens
tcttcactacttggtggaagtcactacctaactgtgtagcacagtgtcccaccccatctcctctgtgatgatatgtaattaccagcttctccaggccccactggaaccctgggcccctgttccaggagtagaaagcctgagcagtggcggtattagccttgagaaagatgaaaatgtgagcagccaaaggaatcatccagaaacccatgaagcctgcagtcgagccatgtgagtcagggaaggcagtgtggggaggggaggaggatggcaaatatsagacatctcagaaataccctcccttttagagggagagagaggaaatgaggaaaccagaccagaaaaacagatgtgttacaaatatacatctggactataatcttaagttcaggttctgtgcaaatatctgtcatccagtcaactaccagtgcattagttattatagttttgcctctatgatgttcatatccaattacataataatataatgatcaatatttcctttgttagataaatatttttaaatggcagcttttaaaatgacttctcaagtatatacccttgctccgtggtactggcacaagtatttgtgagaaggacc

SEQ ID NO: 346678 - DNA, 370 bp, Homo sapiens
cttttctttctcctcagccaggtccccacccctatatttccataccaaaaccagttacaacactttccatggtcttaaaactacttgtttacatctttcttccctatcagtcagggagcccttgyaggaaagatctagcaatcagggttcatttgtctttgtatctcaaagttgagtatagaacatagttcagagctcagcacctgtttaaataagggcataaacgcatgagtgaattgacagacacttgaccaaggttcagaaaatctgcaaccaaattccaaatcagcgtatgtaatttttacgatgcaataattttctgtacttgaattattttccaacacctttggattcttaggataaaacaaaa

SEQ ID NO: 346679 - DNA, 564 bp, Homo sapiens
caaatttgtggctgcagatttggaggaccagggcaaaatgagggaggaataggttagaaaagatgagaataggargaaaagttgagtttgctctgaaccttattaagtatggcctgagtggagaagttagaagctgactctgtgtagggcaattaaaaataaaagctggaacttctgtggttcaggcccacatgtgaactaaagagagggggaaggaagaggccaggtatctgatgaacaataaagcagtgggtgcatatgtggggtcaaaaaaggaaagcaatgagtcaaacctcaaacttatgcattcaggtgtcagtgggtaaatgcatagaataagaaatagctgatggtcactgatggaggtcatcaggggattagtggaaaccaaagaatacattttaaaaaatgaagtacaattaactaggaatgatcaaacaataagagagacaatccttctctaaaacatcctgactctcaccctgctctcctttgttatttctgggcctagaacaatttccactttcaattaacttgctttataaaaggaatgaagagtgactc

SEQ ID NO: 346680 - DNA, 396 bp, Homo sapiens
aaataaaattattgaattgaatataaaagcactgtgaacacctactatattcttttttaaaaatcggcttgtaatagtgactttgaattccctatttcctgtaatcattttaatacttatgattttattttttacatatctattttcatttgaaaaacaaatttaaacaactatgaagcaaaaatgtaaaaaacaaaaacattaccaagcaagtaaacaagyccactcattgattctagaggcattaagatagcatctctttaccttgtttagttttatttatttaatccattttattactctctgacaaagattaccaatattgggctggcatttcggttccctgatgcattgagtttattgccagtggtagcaatgttgttggtgtgaaaaagt

SEQ ID NO: 346681 - DNA, 629 bp, Homo sapiens
actgtttaagtcctgttcatgaatttttttttcttttgatattctgaggcctgatcttgtgacacacaggttttgttttgcaataacagaaaacattttttttaacttgtctcatcctgaagtgaaaaatcacaattgaactgtgtgtatggttttcatcttcccacagccccagacactaccctatatcctacttcctattcattcagaaatattgggatatcttcattaattatgataacagtgccttctatcttatcaggttagggtattggattaatagtgccttctactttattgtgtcagtatattgtactttttggggttagaaaataggatcttatttgcccttatgattgttactgttatttatcttttaatcccagcaaaacctagtaataatatcacaatacgatttaatatatctacttactgtataaagtggtaaaaggtggaaaaccaacatttgaacatacccacccatatctatgaatttagatggcacttcagcgaatgggaattagaaaactaaattttgaaattctaagatgtttatactgattgtttctatagcatartgaactcccaatattgttataaactctcgtttagaattgtcactcagaaaa

SEQ ID NO: 346682 - DNA, 467 bp, Homo sapiens
tgttgtttcatgctttctcattttcctttgatgaacagaatatcttattttaacctggttgatatggtttggctgcgtccccacctaaatcttatcttgacttgtagctctcataattctcacgtcgtgggagggactggtgggaggtaattgaataatgtggatgggtctttcccctgctgttctcatggtagtaagtctcacaagatctgatgtgcagttcccctccayatgctctcttgcctgccaccatgtaacaagcgcctttgctttccctttgacttctaccatgattgtgagacctccccagccatgtggaactgtgagtccattaaacctcttcctttataaataacctagtctgaggtatgtctttattagcagcgtgagaacagactaatacaatagtcaaatattaatttgtaatttgtattattttataatgaacactttcctgtgtgtcctgt

SEQ ID NO: 346683 - DNA, 467 bp, Homo sapiens
tgttgtttcatgctttctcattttcctttgatgaacagaatatcttattttaacctggttgatatggtttggctgcgtccccacctaaatcttatcttgacttgtagctctcataattctcacgtcgtgggagggactggtgggaggtaattgaataatgtggatgggtctttcccctgctgttctcatggtagtaagtctcacaagatctgatgtgcagttcccctccacatgctctcttgcctrccaccatgtaacaagcgcctttgctttccctttgacttctaccatgattgtgagacctccccagccatgtggaactgtgagtccattaaacctcttcctttataaataacctagtctgaggtatgtctttattagcagcgtgagaacagactaatacaatagtcaaatattaatttgtaatttgtattattttataatgaacactttcctgtgtgtcctgt

SEQ ID NO: 346684 - DNA, 467 bp, Homo sapiens
tgttgtttcatgctttctcattttcctttgatgaacagaatatcttattttaacctggttgatatggtttggctgcgtccccacctaaatcttatcttgacttgtagctctcataattctcacgtcgtgggagggactggtgggaggtaattgaataatgtggatgggtctttcccctgctgttctcatggtagtaagtctcacaagatctgatgtgcagttcccctccacatgctctcttgcctgccaccaygtaacaagcgcctttgctttccctttgacttctaccatgattgtgagacctccccagccatgtggaactgtgagtccattaaacctcttcctttataaataacctagtctgaggtatgtctttattagcagcgtgagaacagactaatacaatagtcaaatattaatttgtaatttgtattattttataatgaacactttcctgtgtgtcctgt

SEQ ID NO: 346685 - DNA, 248 bp, Homo sapiens
tttcccagttgctaattctcatcakcctcagctccaagaagacacatcttcttcctattacttcttttctttttgttttctaaattctgaattccttttcttccctaatgtttttcacatcaaatcaataatcccatcaaaaccaagataaacacaacataacaaaagctgtctgtgtgggttcaaaccctagcctgatcacgtattagccaaatgcaatatagtggtgataatgagtacttatccta

SEQ ID NO: 346686 - DNA, 620 bp, Homo sapiens
gggataaaaatgtctcccagaagacatctggccctgcatctaaagaattagtaggcattttctagacaagggagttacgggattactcaatgcttttgtggagagaatggattttcaaattcaagaaagaagattgcacaaatgagaaactgaaagaaatccagaggcagaatgtagagaggtgaagctgcagaggtcagtggagaccggaacatggcgagacttttaagctatttcaaaggctatttcaaaagctatttcaaagatttttttcttaaggacaatgggaagccaatgaaagtttataaactcgagagtaaatgaacaaaaaattttcagactatcattttgggtgcagaggaaggtaaaagtttgtgtatgaccaattggaattctatcacagttatccagggagagagattatgtacagtacttgaacaggggggtgaacattakgtatagaaaaagtgaagtaattggaaagacccagggctattcggaatatattcttttcttaagatgtctccatacatctgactcaaatgcctctggtaagcttaaccctttcataagccttgtataaccgttataagtagctttttggtgagaatcaaactgtc

SEQ ID NO: 346687 - DNA, 425 bp, Homo sapiens
cagagctaggagattaaaaattcctggatccagctatctgactttaaaaatgagtaagttgaggacaagagaagtgaaggagtttgctgaaagtggtatgacttaatcaaggctggtgaggattagcacgagagccagtctgaagtcactacattacatgccccaaatccttcaaaactatgcaaaactctgtcacttgtaaaataatctccatttatctgtacccaactaaaataatgctgatcacattcacattcctggktgttgagtctcatttactgagtgcgaaagagtaaaatttatggatcactttttaaatatggaatgcaccttaatggcttccatttcataaagagtgcatattttcctacacagatttagaagaaatacatgtgctgctttctccttggcacatattaagtcat

SEQ ID NO: 346688 - DNA, 425 bp, Homo sapiens
cagagctaggagattaaaaattcctggatccagctatctgactttaaaaatgagtaagttgaggacaagagaagtgaaggagtttgctgaaagtggtatgacttaatcaaggctggtgaggattagcacgagagccagtctgaagtcactacattacatgccccaaatccttcaaaactatgcaaaactctgtcacttgtaaaataatctccatttatctgtacccaactaaaataatgctgatcacattcacattcctgggtgttgagtctcatttactgagtgcraaagagtaaaatttatggatcactttttaaatatggaatgcaccttaatggcttccatttcataaagagtgcatattttcctacacagatttagaagaaatacatgtgctgctttctccttggcacatattaagtcat

SEQ ID NO: 346689 - DNA, 568 bp, Homo sapiens
tgcaatggtgctggacggtaatgaggaaatggttttgaacttgatggcatgagaaatgcatagatattcttttaaacatatgtttttccattacaatgagaaaatctggtttcaatttatgaaatctttgggcagaatgtgtttttatgtacctatcttaagagtgctttggtggctcataggcaccagcgggcaaaggagtcwtaacaaaatcttttacgtttctaagtgtcagactggcttccatttttctgcgttaccacaggacaacagggaccagatagtactaagaggaaggatgtatttacagtagtaatgtgattgtttatcttcccctttgtatatttatagagaacgtgcatgtgtcaaatcatttctatgatttagattcatcataataaattatcacttatacttttgttattgtcaatttcgttaaacctttggcaaaatgaacattatccttttcctatcctttgtaaatttttaagcaaaatggcatgcattgcattaatttacatttttattattagtgatgttaaatctttgtgatataaaataaaatgct

SEQ ID NO: 346690 - DNA, 582 bp, Homo sapiens
atatcattcaattcttctctgatattagttatttctgttcttcttctaactttgtggttggtttgttcttttttcccctggttcctctaggtgtagtattagattgttaatttgagatctttctaacttcttgatgaaggcgtttatttctataaactttccccttaatactcctttagctgcatcccaaaccttttggtaagatgtgtctctaatttttttaatttcatagaattttttaatctcggctttaattttgttgctcacccaagagttactcaggagcaagttgttaaatttccatgtatttgtgtagttttgagcgttcttcttggtatagatttctatttttattgcactgtggtccaagagagtgcttgatatggtttcaagttttttaatttcttgagactttctttatgacccagcatgtattcaatctttggacatgttctgggtgcagatgagaagaatatataatctgtgatttttgagtggygcattctgtagacatctgttaggtataattgctcaattgtggagtttaaatcaaaaacttgttagctttcttactggatgatt

SEQ ID NO: 346691 - DNA, 553 bp, Homo sapiens
agaaagataaatgatgaacamataagcaaaaaaatttttttaaaaaagtacttctactgtatatattatggaatccgcacagacttgtcccatcgctcatacttaattataaagtaatatacaataaaattcattatgaggcactttatgaatttgatgaactgtaaaccatcagatatttaaaatatgtgtagaatgaagtgctttctcttgtacttaagtttttgaaaaaattataatctattcaggaaaatattttaacactaagcattcttaaagaatttttggtaacaataaactctcacacatccgcggagtaggtgcatgtagatagtattaatggtaacacaggttattgaattgtgcattttgattaaaagatagattcaacacatctatttttatgttagtcatgaatcatgcgtgatgtcacaccctatggagacactgatgagtgagacagggagggtctctgctctcaaacacacatatcactggaactactgaaatccacttattactgctgtgccgccaacacagagaattgagaatt

SEQ ID NO: 346692 - DNA, 585 bp, Homo sapiens
  misc_feature (1)...(585): n = A,T,C or G
cacttacttacataaatgtttcctaaacattttacgtgcatcattattttttaactcttacttcaatcctatgtagaartagtaagaaccatttttaaagataaagaatctgaggtttgtaatcatccaaccagtaagttgtggaattggactttggaccaagatattcctgataccaaaatctgggttctgactacactactacattcttaagtaaattttactccattcctaaagaagcttactgtctggaaataacaataagtttatgcagaaagttacaaggattgtactaaattttctcttgttgccttgccttctggaaggctcanggctaaggaatgtgattgggttaatagtttcttttagtcttgagttcctgacacagttacctactctctgtttttcatcacttttggtttcctcttctatctttgtttaaatgtttgatttatcaagagtcttttacacagacatataaattaggccaaatccactgaagaggcaatagctggaaaccttaggaaagaaatccaaatatatagtaactatatgtatcaacatgaaactttcactcataatact

SEQ ID NO: 346693 - DNA, 549 bp, Homo sapiens
gagcttaaggagctaattttctttcttttaatccagggtaaaatagataatattaagtgctagctttaaaaaaagaaattacaatttgtcatgtaaagaaagaaagttttaaaaagtgaaaacccaagaagaaattaaaatgattaactcacaaacatttggatgtggagggaaagggagatgagggattgcataaaatccctaaatttttcatctttaaaggtggcaaataatggagatctaaagctgataatgatataataaaattttaagtgtcatatttgaaaacttaacctccagatgtcctaaagagtaaaagattaacactggttgactctgaggtagaggaggaggagtataagttttttttttttcctgttttttttttcacaatgtctttgaattatttctataataaacatttaaatataaatttaaaatattaactatgctatattcatacaatggaatatcatccmcccattaaaaataatattataaatctctatgtactgatagtgaaatatatccacaatcttttaaataaaa

SEQ ID NO: 346694 - DNA, 549 bp, Homo sapiens
gagcttaaggagctaattttctttcttttaatccagggtaaaatagataatattaagtgctagctttaaaaaaagaaattacaatttgtcatgtaaagaaagaaagttttaaaaagtgaaaacccaagaagaaattaaaatgattaactcacaaacatttggatgtggagggaaagggagatgagggattgcataaaatccctaaatttttcatctttaaaggtggcaaataatggagatctaaagctgataatgatataataaaattttaagtgtcatatttgaaaacttaacctccagatgtcctaaagagtaaaagattaacactggttgactctgaggtagaggaggaggagtataagttttttttttttcctgttttttttttcacaatgtctttgaattatttctataataaacatttaaatataaatttaaaatattaactatgctatattcatacaatggaatatcatcccmccattaaaaataatattataaatctctatgtactgatagtgaaatatatccacaatcttttaaataaaa

SEQ ID NO: 346695 - DNA, 561 bp, Homo sapiens
ctttagggatggtttttccaattagatttaaatattcaggttgttgacaaagacatcctctcctctagaccatatttgtattgacacagtcaagctattaattctgagatcctctcttttccatacttcattttatgactaactcttttttgatgggtacattctttcttttgatattttactgtcttcagttataataagtttagtcttaacaattgcagaagctaatctttctctttcagggaaatttgcatgtctctgatctgatgcatttacttcacagtttaactgtcagaaagtaattttgtttccactttttccaagttctcctggaactttccagcacagtcgtaaaacattgacaaataatgtgaacatggttttcgatcttaaagttgactaataaatattaaccataaaatttccttcaatgtktaatttttctttcaattgcccctgaggctgatgaatttttccttatagtattttaggaataaagattcttctgctcatgttctaatatcaatattggcttccccttggagacttttgataaacatg

SEQ ID NO: 346696 - DNA, 484 bp, Homo sapiens
ttgtgtggaacacatatcccttgtaatgtcattgcttcttcagttargttcacaaccttgtgttttttcatttgtttgttttagtcatggaatagatcaatgaatcttctatgttaaaagcatcttccatgttcaaggaagtttttcctatttttttcaacttatattactttatattttgggctatttttgcctttatgaacaataacagcaccaatgactatgattagacatgattgggtgcatgtgtatatgtctattttggtagctgtctgcatttttttgcattaatttttacttaaaactaggattctattttgtaccgtgtacttttaattcatggatttatattataagttgatttaatgaaagggaataattaaagcccacagtataataaaatctcagatctactcctgtatattttactaacctgaagggttagagcatgaattaccaagataatcacctctactatccactg

SEQ ID NO: 346697 - DNA, 484 bp, Homo sapiens
ttgtgtggaacacatatcccttgtaatgtcattgcttcttcagttaggttcacaacyttgtgttttttcatttgtttgttttagtcatggaatagatcaatgaatcttctatgttaaaagcatcttccatgttcaaggaagtttttcctatttttttcaacttatattactttatattttgggctatttttgcctttatgaacaataacagcaccaatgactatgattagacatgattgggtgcatgtgtatatgtctattttggtagctgtctgcatttttttgcattaatttttacttaaaactaggattctattttgtaccgtgtacttttaattcatggatttatattataagttgatttaatgaaagggaataattaaagcccacagtataataaaatctcagatctactcctgtatattttactaacctgaagggttagagcatgaattaccaagataatcacctctactatccactg

SEQ ID NO: 346698 - DNA, 587 bp, Homo sapiens
tttataatctgtcagttatgtagatgagaaaacaaaagccctgggagagtaagtawcttgcacggttggacacctaagtgtctaccgaatggggactggaacccagttttccttccccttgtactcctgtccttagctgccatggagtgatggtaaacttaatctctactgacagtcaataatgaaagaaagtccagagctctgcaattttaatagattaatggattttccaaaattacttatgggtagttaagactccataaaagctggaactattttccccactctgttcagccacatttattatttgtcaaagcttaaaagcaactctttggatggcactgataatttaggaacttgattctcatgatttttgctattgcagaatagttaatagttttgtgtttctaatggaaaatcatctaaaactatttatgttaaatagttacatgtgtaatgataactgtacattttatggatgtcctacatgtatagagtgcaaattgctttaagccagggaaagatacatgtggtagagccgttgggattggcgaagtgtatatgtcaatgatgtggtcatctagtac

SEQ ID NO: 346699 - DNA, 589 bp, Homo sapiens
ctctttatatcttttgatttttcagactccctgtcattctgatgcttgacttcaactgaacatagtctaatttgttaaacttaggtttcttctttttctcctttttaaatagtcagtggcaaagggaactagttgcctattaaaatctgtgttctttactaatagaaggccaattttattgcttacaaatttaataaaattttaccttccttagttctgtcagatggcagttggctaagctctggtccatcacattagacagaacatgttcaggactgagatcatgcatttttaacaatcttccaggttataccagtccattaattacactatgagtaatagggttatggatagctttatgatttggtcctccaaatttcaatttgtgaaaattgtatgtttgctttttaatttattttgacttcttttatcrgtgcagttggtaatgcatgaactaaggagactagaattcaagcaataccttttttgataaagaaatgtgaagatgtttaaattatattagaaaaagccccacaggctttggatctgagagacatatattttaatatccaccttactaaccatgtga

SEQ ID NO: 346700 - DNA, 593 bp, Homo sapiens
agccaccatgcctggccacagtctttaaaaataatgtaaactctctatatatatatgtatgaaaatataagattggatctcttactctcttatggattgggaacaatctccaagagcaaaaaatcaaggctggctttctgactttgttaggttttaaacagagctaatgtctacttcccaagccacaactattagtatacattactgtaagtagaaggcagtctagagaacagtctaattgtgtttccaacccagctccccacttcatgtagatacactgctagctcagcccttgaaggtttttgaatttttgatatttgcyttaagaatgtgaaaacagtagacctggacatttaatcaaatcccagactattgggctacaaagaattccttgatgcttgaaaaagcgtcagtttctgacaaatgccagtataattctcctttacacagagagacataaaacgttttaaattgtatggcttaaaatacaaagagtttcttgacaaattaagataagttgaaagaagctgcattctaaatcactgttaaatcaccgttcattgatgtttttggaagacattaaagtagaaaag

SEQ ID NO: 346701 - DNA, 580 bp, Homo sapiens
accaaaccagcttcctctcctaggccttctcccagccctttgactaatctttagcctttctttgcagtcttctcctcctctgtcaatcccttaaatatggtaccctgctcttttctcaatatccaagctcygctggccaatgcgtctattaagtcagcacctaactgatccctcacaaaattacactttagcccagatctctctcatatcctagcagataaatatctagagctgtgctgtctaatacaaaagccactagacacatatggctattcgataaatttaagttaattatacttaatataacttaaaacttaatttgaagtcctcactagccacatgtggctactggttaccatactggacagaacaaacataaaacatttccatcaatgccaaaagttctactggatagtgctgctctagaaccttctacaaacggcatcaaaataactcatttctaccttaaaatgcctcaaacttatcttatatgaatgtccaaacctgctctttcatatgcatcttctttcttgtctctactttaactctactgctactgccttagttcccataaactttg

SEQ ID NO: 346702 - DNA, 595 bp, Homo sapiens
cttaagaaagattgaattgtatttgtcaatgcaacatcaatcgggtcttatacttcgttgttgtatttggcacttcagtaaggtacttttgcacaattatgtcaacacactgagttagcctttgtcaagaaaggcaagcacttaaattcttgtcagcctatcatgtcattaaaaaaaggatctaagagtcaagaacaataagcaactattcttggcttcattagtgcctgtattttggtattttccttttgacactctttctcaggcacatctgggcaagtctagttacattaagcctagtttaaaggaaactgaaaattccacagtgaagttctccacttgactgacagatatttcactctcaggaagagtggaaattgagtatgattgtctttcactttgagatgcgtttgtaatacgaacaggtgcatccaagctaagttggggttartaatgaatggaagaatctgtagtgactgttggaaccaaaattaatgtgaataaagcagagaggctgccagagagatgagatcaagtacagattaagtaccacaagtctcattagttggtacctaggacaataaatagtagatgg

SEQ ID NO: 346703 - DNA, 579 bp, Homo sapiens
taataattaaactcaaggtgggtaacattcaagtactagtgtttcttagaaaaatcctattttgccaatctcaaccaaataacaaaaccaaaygaaaaaaaagagtactcttaggagatacacctttaatttctgtgataattggtgtttctgtgataattggtgatgaaactataagcctgtgcaataaggtaggagggaatagctaaatgtggcaatttaaatttaaattaactaacatgaaaggaagttaaaagttcagttcttcagtggcccaagccacatttcaaatgctcagtggccagcacagatatagaaactctccatcaccacagaaagttctattagacagcactaggataagctataaaaccatcgaaagcacagcctggtgtcataaccagatgtggagtgccatatatagataataatttcattttaaaggatccagcaatatttcaagactgcttttgtgtttgttaaatcttgttacaatgggacttatttgctctacagtccagggtcaagttttctttgatagtataaattgattttgcaaatagctaccagcagttttcc

SEQ ID NO: 346704 - DNA, 635 bp, Homo sapiens
tgtttggagaacctgaaagcattaatcctgcgggatagagcagggtattgctatgtctgtttctccttccagcccttttcacttgagtgctccctgcgttcttcttctgtatggagaatgaaggctccctgtgagcactgaaggtgagtctgtgcctgggaaccccagggtcaccccagcacattttacagagtagctcagtgatgtcatggcattgtggatgggaaggaattaggcaagttagcatgaatggaagaagcagggatgggagatgtaagaacaggggtgttgcctattttaaagcagagattattttgttgggtagcaaaaagggggaagagcctagagtggagcatggatgtgacacaaaagccacagcagcaaagtggtgagtgcatttgtaaactctctactccatggttgcatgaaattgtggagtaatgggataatctayatatgtagcaagctacaaatcacaacgtaaatagtactgactgaaaagaagatgtataaaagggggcatgaggaatggacatttcatgaaatcattgcatctgactttctaaaaaactgctttctggtaatagttgtcttggtttgggttctcttgaaaatagaatctgaaatgtgtcatt

SEQ ID NO: 346705 - DNA, 620 bp, Homo sapiens
caatggaaaattaccacaattgtctcttcctgctgcattgaatgtactactataaatgtttcgttctcccctcagatttctatgcttgtacagcaacgttagtaagaggtacctctaaacctcttttactttatcaacttctactcttcctcaaccttctttttagtggtttgaaaaatctttatgaatacattttggtatggygagattaataaaatcttgctttgctcatgcattatgtattagaaatataataaatttaaagttagttaggaccactagattccagctaaaggaaataatctaaagcagaatttctccatgtcttatgtaaatgctgagtctgctaaactgtggtgtgctggaaaatatttcacagttgtcactggagggtaggtcgtcttgatttgtagtgattgctgatttccgtagtgtaaatagtcccactatggctgatcttaagctaccaacctgatgtcactgaacacaaagttgggaggaattgtgcataggcagatctcacaagctgtacaagctggctccaacaccatggctgctagatggtaataggaattttgtgaagaaagcattcattctttaaaaagaagttgggaaacact

SEQ ID NO: 346706 - DNA, 580 bp, Homo sapiens
gttggtggtggctctgtatggtctatggcagtggtccccaacctttttggcaccagagactggtttcattgaagacaatttttccggggtggtgggatggtttcgggataaaactcttccacctcagattatcaggcattaggtagattctcataagaagaaagcaacctggatccgtcgcatgtgcagttcacaatagggttcatgctcctgtgagaatctcatgccacaggtgatctggcaggaggtggagctcagacagtaatgctggctcccccgctgcctacctcctgctgtgtggcctggttcctaacaggccatggacyggtaccagtcccctggggacccctggcctatggaagccacaagtcatggagtcatgaaaccactcatggtgtcactgagaagcctccacacctcaaagatccagataagagcgttcaaacccataatccatgcctcatggaaagtcaaaggcttttgtgtcatccttgttggttgtagttgggtccaagatgccatttcatctgaattaagtaaactgtccatgtgggtccctgttccacatcatgtcagccca

SEQ ID NO: 346707 - DNA, 580 bp, Homo sapiens
gttggtggtggctctgtatggtctatggcagtggtccccaacctttttggcaccagagactggtttcattgaagacaatttttccggggtggtgggatggtttcgggataaaactcttccacctcagattatcaggcattaggtagattctcataagaagaaagcaacctggatccgtcgcatgtgcagttcacaatagggttcatgctcctgtgagaatctcatgccacaggtgatctggcaggaggtggagctcagacagtaatgctggctcccccgctgcctacctcctgctgtgtggcctggttcctaacaggccatggaccggtaccagtcccctggggacccctggcctatggaagccacaagtcatggagtcatgaaaccactcatggtgtcactgagaagcctccacacctcaaagatccagataagagcgttcaaacccataatccatgcctcatggaaagtcaaaggcttttrtgtcatccttgttggttgtagttgggtccaagatgccatttcatctgaattaagtaaactgtccatgtgggtccctgttccacatcatgtcagccca

SEQ ID NO: 346708 - DNA, 588 bp, Homo sapiens
agtcaaaggcttttgtgtcatccttgttggttgtagttgggtccaagatgccatttcatctgaattaagtaaactgtccatgtgggtccctgttccacatcatgtcagcccagataggggactcattctcctccttgatagccataggttaattgctctcatatgatgttagtatttacaatagacttgactggaggtttgagaaatggaaggtggctcatataagaggaaactgcttcaaatgggattttagacatatatattgtatatatatatatttttcttttttcctttcttcttttcttttttattatacagagtctcgctgtcacccaggctggagtgcagtggtgccatctcggctcatggcaacttccacctcccagttcaagccattctcatgcctcagcctccctagtagctgggactacagrcatgcaccaccacacctggctaatttttgtatttttagtagagacgaggttttgccatgttgcccaggctagtcttgaattcctggcctcaagtgatctgcccaccttggcctcccaaagtgttgggattacaagagtgagccactgcacccag

SEQ ID NO: 346709 - DNA, 607 bp, Homo sapiens
gaatcactccagcccctgggtaaagaaagcacattttcaggagaagaaattaaaaccaacctatacagagaagcagagatcagaaacagacaattctgatagtatttggacccctggttcttttttctgagaccactcccaaagcttccttgctttccaaagcatatttgttagagcatcttctggttcttattggataaggtccaaactcttgagtctgacaatctygcatttccagcaccagtcagccttattttgcttctagcttcccagtcaagagttgccttctaccagatgccacgctcattttcagttgtgtggttttcttgaatgacttcttgcctcctctctctgtaatactaattattgcctttcttcagggtctagttcaacatctatctgctctattaaagcccttcttgattgatcttttccttctctgaactatggtagcctttttattcccagcttttctacatggtctgaaacatatttatctttctgccttggtttcttttgctatgtattttgtgtgtaagattttttttcgtgtgtttatttacttaaaaacttgtaccagttatcagttatcttgggacatagtact

SEQ ID NO: 346710 - DNA, 607 bp, Homo sapiens
gaatcactccagcccctgggtaaagaaagcacattttcaggagaagaaattaaaaccaacctatacagagaagcagagatcagaaacagacaattctgatagtatttggacccctggttcttttttctgagaccactcccaaagcttccttgctttccaaagcatatttgttagagcatcttctggttcttattggataaggtccaaactcttgagtctgacaatcttrcatttccagcaccagtcagccttattttgcttctagcttcccagtcaagagttgccttctaccagatgccacgctcattttcagttgtgtggttttcttgaatgacttcttgcctcctctctctgtaatactaattattgcctttcttcagggtctagttcaacatctatctgctctattaaagcccttcttgattgatcttttccttctctgaactatggtagcctttttattcccagcttttctacatggtctgaaacatatttatctttctgccttggtttcttttgctatgtattttgtgtgtaagattttttttcgtgtgtttatttacttaaaaacttgtaccagttatcagttatcttgggacatagtact

SEQ ID NO: 346711 - DNA, 607 bp, Homo sapiens
gaatcactccagcccctgggtaaagaaagcacattttcaggagaagaaattaaaaccaacctatacagagaagcagagatcagaaacagacaattctgatagtatttggacccctggttcttttttctgagaccactcccaaagcttccttgctttccaaagcatatttgttagagcatcttctggttcttattggataaggtccaaactcttgagtctgacaatcttgcatttccagcaccagtcagccttattttgcttctagcttcccagtcaagagttgccttctaccagatgccacgctcattttcrgttgtgtggttttcttgaatgacttcttgcctcctctctctgtaatactaattattgcctttcttcagggtctagttcaacatctatctgctctattaaagcccttcttgattgatcttttccttctctgaactatggtagcctttttattcccagcttttctacatggtctgaaacatatttatctttctgccttggtttcttttgctatgtattttgtgtgtaagattttttttcgtgtgtttatttacttaaaaacttgtaccagttatcagttatcttgggacatagtact

SEQ ID NO: 346712 - DNA, 549 bp, Homo sapiens
tgttcccaatacctcaggaaattaaagcaaactcataaagtgcttggagaacatgcatattttatggaaactgataatagagttttgacttgtcaagggggaaaactgaggagacacacatgaatgcaggtgctgtaggcagagtggccatgaaagatagctgtccttggggatctgcagaaagcatgaggagagtttcaagacttaactgtctggatttggaggttcaagccaaacggcagcatgtctcaacaatcatctgggttataagtgtttattcatttggtagtaggcaaattacttttgccttcccatgttgatgataagtcccatgagtagagtccatgttgtctctcctgtctcaaagtctctcacactgggtcaagctcaaagtaactgtttatataccttgtctctccactttccattgcttctctatatcaatgttgggccgataactggtacaattttgcttttatcaagtyggtttccagatctatagaagaaaaagaagcaaaaagaggagaggggaagaggagggccctgtaa

SEQ ID NO: 346713 - DNA, 549 bp, Homo sapiens
tgttcccaatacctcaggaaattaaagcaaactcataaagtgcttggagaacatgcatattttatggaaactgataatagagttttgacttgtcaagggggaaaactgaggagacacacatgaatgcaggtgctgtaggcagagtggccatgaaagatagctgtccttggggatctgcagaaagcatgaggagagtttcaagacttaactgtctggatttggaggttcaagccaaacggcagcatgtctcaacaatcatctgggttataagtgtttattcatttggtagtaggcaaattacttttgccttcccatgttgatgataagtcccatgagtagagtccatgttgtctctcctgtctcaaagtctctcacactgggtcaagctcaaagtaactgtttatataccttgtctctccactttccattgcttctctatatcaatgttgggccgataactggtacaattttgcttttatcaagtcggtttccagatctatagaagaaraagaagcaaaaagaggagaggggaagaggagggccctgtaa

SEQ ID NO: 346714 - DNA, 632 bp, Homo sapiens
tactatttcagactttttcatctctcccttgactctattacaattcctttgttgaatttttcagccttttagataatttcaaatgccactacctagctccttcagtgtggtrtcagtcagtcttaaagcacagcacttatttcaaatcacatttgtgccaaatttagtccatttatactgaaagagaaaacagggtagccatgtagatgcataacctgctccttcatgtccacactcccttgagtgtatcacaatacagaaaacatgggacttgggcatgtatatagcaaaatggaatctctctggagaggtaccattttcataaatggaaatgttcaatatcataaagatatcaataatcctcaaattcatatataaaaatctgttgcaagtccaatcaaaatcccaacagataattttgtttagtgaaaattaatagattgattccaaaattcacttggaacagaagattgtgaaaagccaagacagttttaaagaagaatgaaggaaaggcaatttggtttttcagataccaggatttattgtgaagtcatattaattaattcaaagtgatgttagtgcaaggatagcaagcatactaattaaacagagcagagggcccaacatacatt

SEQ ID NO: 346715 - DNA, 512 bp, Homo sapiens
gcttcccattgcctccatcacctacacagttttggcacgactcggttcttagctggctcaaggtaacaatttggcctctagtaaaacaaccttttggcttttcttatttgtaggaaaggcttctaggttcatatttactgcattcttaaggtatatcttaagatggtgatcaagaaaatatttacgtatcagatattttgaaaaataacattcagtgagttttaaaaagaaccatttggaagtgtactgatgtctgcaaactaatttggaagtgcgtgcatcaaaaataaaatgcagcaacattggtggattgataaaatggacagaaggatggatagatatgtgataaarcatgttgataatgcaatattaatagtagaatataagtgctaagtatacaggtgttcactgtaaagttccttcagcttttttgtgtgtttgaaatttttcataacacaatgttggataaaaagaacccccccacttaaggtaacctatataatgtaaattgt

SEQ ID NO: 346716 - DNA, 545 bp, Homo sapiens
cttatttacagtatcagcttatcttaccccttgggagagatgttaggggatcttgcaattattaataggcaaagctttatttgttttttgrtatctgagtctttaaacatttgcccaaatatttgaatgattaagtttcccctgggtaaaccacttttatattttcctctgctgagagacaaaaggtggtcctgtgacaccctgaaaagtgaacaactttgggataagatctgagtctccctcatctgaagagaaggtggcactggttttgcttggaatcaccccacaagtgatgcctcagagggatctcttcaaagaagatgggtttttagaagcttaggaatactcttcattccaatgcccattcatagagagcccgatcaactcagaaatatgtgtgcctagtaaatgtcaatatttagttgttttctgagatgtcccttaacaaagtttgttgctttcgtctttttatgtaagtgtattttttccttgcaaaaggatagaaattttttcaagaaaaataaaagggagaattatcgtacgga

SEQ ID NO: 346717 - DNA, 511 bp, Homo sapiens
tcaaagcataataccaaagtgtaaattatccctggatgcaaggatggttcaacacatgcaaattaatatatgtgacacaacacattcacagaatgaaggacaaaaaccatatgatcatctcaatagatgcagaaaaagcatttgacaaaactcagcatcctttcagtataaaaactctcaataaattaagtatagaatgaatgcacctgaacacaataaaggccttatatgayaaggccacagctagcatcatactcagtggtgaaaagttgaaggctttttctttaaagtcaggaacaagataaggttgctcactcttgccacttcttttcaccgtagtgctggaagtccttgccacagtaactaggcaagagaaaaaaaataagtcatccaaatctgaaatgaagaagttaatttgtctgtttgcagacatgatgttatatacagaaaaccctaaagtctccaagttacaattaataaatgaattcggtaaagttgcaggaaaaaaagc

SEQ ID NO: 346718 - DNA, 511 bp, Homo sapiens
tcaaagcataataccaaagtgtaaattatccctggatgcaaggatggttcaacacatgcaaattaatatatgtgacacaacacattcacagaatgaaggacaaaaaccatatgatcatctcaatagatgcagaaaaagcatttgacaaaactcagcatcctttcagtataaaaactctcaataaattaagtatagaatgaatgcacctgaacacaataaaggccttatatgacaaggccacagctagcatyatactcagtggtgaaaagttgaaggctttttctttaaagtcaggaacaagataaggttgctcactcttgccacttcttttcaccgtagtgctggaagtccttgccacagtaactaggcaagagaaaaaaaataagtcatccaaatctgaaatgaagaagttaatttgtctgtttgcagacatgatgttatatacagaaaaccctaaagtctccaagttacaattaataaatgaattcggtaaagttgcaggaaaaaaagc

SEQ ID NO: 346719 - DNA, 622 bp, Homo sapiens
tgggttgcatgctccttatgagaatctaatgcctgatgatctgtcactgtctcccatcacccccagataggactgtctagttgtatgaaaacaagctcagggctcccactgattctacattatggtgagttgtataattatttcattatatattgcaatgtactaataatataaataaaatgcacaataaacatagtgcacttgaatcgtgtcaaaaccatcctcccccaccccagtctgtggaaaaattgtcttccattaaaccggtccctggtgccaaaaatgttggggaccactggcttacacctaacagctacttgaatattatggtctcttttatctgtttttgtatcagtttcttctgatgcagcctgaatccttccttgcattgtctgttgcctggacttttccaatagtctaatacttgcctccttctcacaccagcttccctcttcaagttattttccacagggtaccagagtttaccttctaatggatagttttgtttatgtcactccccagttttaaagccttttcctggattctgctgcctatagggtaaagtctaaattmtttaacttggcacacaagcctcttcataatctttccacaactcaatttt

SEQ ID NO: 346720 - DNA, 559 bp, Homo sapiens
ttttcacatctaaagttctatgtatgctttctcttctgtctaaggtgactttgctttcttttcttccaatttaaaccttaattcaatgtccrtctctgctaccagagcttctggaaagcctttcctaagatattccattgtgtttacatggcacttacattcctctcctgcacatgtgactcagggacccaggctccttccaccttgtggctctgctgtctcctggaactcttagagagttttactagattttctgcatctggttggaagatgaggaaggtaaatggaggatcacacacgggaaagtgttatggcatatatcactgctgctgacaacccagggactagaactcagtcatgcggccgtagctaactgcaatggagggtgaaaagagtagtctagctgtgcctaggagggagagggaaatggtttagtgaacagctaataaaggttttctacactggcacatgggagttggttagtatatgtttgtgaattgaatgaatacattattatagaataggcattagctgaggtaattctgtatcagtgttctag

SEQ ID NO: 346721 - DNA, 583 bp, Homo sapiens
atacatgaaagtgttaaatactgtgtcttagtctgctagggttgccataataaagtaccacagactgggtggcttaatccacagaaatgtattttctcacggttctaggggctagaagtccaagatcaaggtgtcagcaggtttggtttctcctaacgcttctctccttgcaaatgaccakcttctcactctgtcctcacatggccttttctctgggcaagtgaatctctggtgtttcttcctcctcttacaatgacagttcatactgaattggggctctacccttagggccttctgtaacctaaattccctctttgaaggccctgtctccaaatacagtcacaatggggatgggggcttcaatacatgaatttgggaagggggctgtgggagatgaaatttagtacgtaacactttgaaaaaagacatcttcaatatcataaatataagtaatctcactgaaagaaactcctctaaatatttctgagcattccttccaaacctctgagaaagtaaattaggcaaagtatacagtacagctgtcatggattttattttacatctcaggtttaaaaaaatgcca

SEQ ID NO: 346722 - DNA, 600 bp, Homo sapiens
tggtgtagtcctaatctccaagctagcaggcttgagacccaggggagctgatgtctcagttcaagtctaaaggcaggaaaaaatctaatgtccggctagaaaatcggcaggaggagttctcctttcttctcagatgatcagcttttttgttctagttaggccttcaattgattggatgatgcccactcrcattggagagggcaatttgctttactcaatcaactgatctgaatgttaattttatccagaaacaccctcacagacacacccagaatcatatctgaccctggtgtccagtcaagtcgacatgcaaaattaaccatcacagatggtgtttaatgttttaatttatagctaaataaatgctaatttttttcaaaataaaaatatctttttttactataaaagtaatatatggccttccttggtacttccagtcacaagcatttgcccagcccagcccagctgagtctctggttgtttatagtgccattgtggttgtgggacccgaggtatagtgcatgtgcaaatttttgtcccccaggactgtgacacaaccacagccaaggccagtgttctagggcctacctgggatggcag

SEQ ID NO: 346723 - DNA, 600 bp, Homo sapiens
tggtgtagtcctaatctccaagctagcaggcttgagacccaggggagctgatgtctcagttcaagtctaaaggcaggaaaaaatctaatgtccggctagaaaatcggcaggaggagttctcctttcttctcagatgatcagcttttttgttctagttaggccttcaattgattggatgatgcccactcacattggagagggcaatttgctttactcaatcaactgatctgaatgttaattttatccagaaacaccctcacagacacayccagaatcatatctgaccctggtgtccagtcaagtcgacatgcaaaattaaccatcacagatggtgtttaatgttttaatttatagctaaataaatgctaatttttttcaaaataaaaatatctttttttactataaaagtaatatatggccttccttggtacttccagtcacaagcatttgcccagcccagcccagctgagtctctggttgtttatagtgccattgtggttgtgggacccgaggtatagtgcatgtgcaaatttttgtcccccaggactgtgacacaaccacagccaaggccagtgttctagggcctacctgggatggcag

SEQ ID NO: 346724 - DNA, 565 bp, Homo sapiens
cctggcttaggcccacatcacagacccttcatcctaggttgattgcactacgtgattattgacctgcatctctgtggtgtggagccccaggagacaagaaaaagatgcttggccacaaccactactaargtcccttcctctgctgcctccaagttggggaaggaatataaacactaagattgctccagagctgtagtgggtagccaggagtgccaaaccatgatctacagctagcactcaagggagagaggaacccacactttcagagcattgagagggaatgcagctgcagctgtaaggaaacgtaggagaaccacacaacagagctggagtctaccaactgaccaataagcctaaatgccaccgactggatcacaccccaaagcttcaacactaaaaatacctcactaacatacccacctctgaaaccagagacaagaagtcagtttcacataaagacctgtacaaagcctcagtctggtgaaaacatctagaaaagaagtctattgactgtactcaatctacactgcagttaaaggaacacccacatgcagagatgagaaag

SEQ ID NO: 346725 - DNA, 563 bp, Homo sapiens
tgcttgtcaccagacagggaatgcctggcttaggcccacatcacagacccttcatcctaggttgattgcactacgtgattattgacctgcatctctgtggtgtggagccccaggagacaagaaaaagatgcttggccacaaccactactaaggtcccttcctctgctgcctccaagttggggaaggaatataaacactaagattgctccagagctgtagtgggtagccaggagtgccaaaccatgatctacagctagcactcaagggagagaggaacccacaytttcagagcattgagagggaatgcagctgcagctgtaaggaaacgtaggagaaccacacaacagagctggagtctaccaactgaccaataagcctaaatgccaccgactggatcacaccccaaagcttcaacactaaaaatacctcactaacatacccacctctgaaaccagagacaagaagtcagtttcacataaagacctgtacaaagcctcagtctggtgaaaacatctagaaaagaagtctattgactgtactcaatctacactgcagttaaagga

SEQ ID NO: 346726 - DNA, 582 bp, Homo sapiens
ggtctggagtagacctccagcaaactccagcagacctggggcagaggggcctgtcagaaggaaaactaacaaacagaaaggaatagcatcaacatcaacaaaaaggacgtccacacagaaaccccaccttaaagtcaccaacatcaaagaccaaaggtagataaatccaaaaagatgaggaaaaaccagcacaaaaamgttgaaaattccaaaaaccagaatgcctcttctccttcaaaggatcacaactcctggccagcaagggaacaaaactggacagagaatgagtctgacaaattgacagaagtaggcttcagaaagtgggtaataacaaactcctccaagctaaagtagcatgttctaacccgatgcaagaaagctaagaaccttgaaaaaaggttagaggaattgctaactagaatcacccagtttggagaagaacataaatgacccgacggagctgaaaaacacagcactagaacttcgtgaagcatatgcaagtatcaatagccaaatcaatcaagcggaagaaagaatatcagagattggagatcaaattaatgaaataaagcatgaagacaa

SEQ ID NO: 346727 - DNA, 536 bp, Homo sapiens
cagacatttcatttctacccccattattacacaactagtagttatctgcttgaygtggtgagcaaacatgatattccaggaatgacatccctaaaataaacattgtctacaattgatactttaaccagaaatgtatggcagacagctgggatttgagagccgcttaaacatctactagtgggtcagtacaacttgcaagctcattgttttttgttttgtaagtttttttcttttgctttgcagtgaatgcagcaggactcactgtttttgtatccaaggagtttgatccttttgagctgtggtagtataaaaattgcagaaacatgagaaactacaaaggtgtgaattttacaataagacattagaactttccaaccaaagattgaaagaactttcaaatctttccaacgtagatttgaacaaaatctacgttgtcatttgtctccaccagttggctccacccaaaaaaagaccacatcactctttgcaaatccactataatgaattagtttaacagtgtatcttcacttagccca

SEQ ID NO: 346728 - DNA, 603 bp, Homo sapiens
ataggcaaatggaggagacagaaatcagcaaataaacattccaaatatctataattacatttttattacattaagaagttatataattgtgacaagtgctagtgaggaaataacagttgcaatgagagtaacaattcctgttttgctctctaaataacattcaagtggccaatctttcccatggtttcatgtattttacacaattgagggagtcaagtgttaattaaataagcatacaaataaataccccatgaaaaacygtgataagagggagtaattgtaatgggacaattcagattgagagaggtagggcaaggataggaaagaccactttgatgaagtaacatgcatgttgagacctgcagggcaagtaaagttagcaagacaatgaaggagttatgggaaaagggtttgaggtaaaccctgtctagaaagatagccaaacttggccgggcgcggtggctcacacctgtaatctcagcactttgggaggccgaggtgggtggatcacgaggtcaggagatcgagaccatcctggctaagatggtgaaaccccgtctccactaaaaatacaacaaattagccgggtgtagtggcacatgc

SEQ ID NO: 346729 - DNA, 603 bp, Homo sapiens
ataggcaaatggaggagacagaaatcagcaaataaacattccaaatatctataattacatttttattacattaagaagttatataattgtgacaagtgctagtgaggaaataacagttgcaatgagagtaacaattcctgttttgctctctaaataacattcaagtggccaatctttcccatggtttcatgtattttacacaattgagggagtcaagtgttaattaaataagcatacaaataaataccccatgaaaaactgtgataagagggagtaattgtaatgggacaattcagattgagagaggtagggcaaggataggaaagaccactttgatgaagtaacatgcatgttgagacctgcagggcaagtaaagttagcaagacaatgaaggagttatgggaaaagggtttgaggtaaaccctgtctagaaagatagccaaacttggccgggcrcggtggctcacacctgtaatctcagcactttgggaggccgaggtgggtggatcacgaggtcaggagatcgagaccatcctggctaagatggtgaaaccccgtctccactaaaaatacaacaaattagccgggtgtagtggcacatgc

SEQ ID NO: 346730 - DNA, 606 bp, Homo sapiens
cagcacttccacaaaacccacaatgacgatcagctcctcaacagtacctatctcttcaacaccagagcctgccacctccatatcagcagcaacccccgcagcatctactgaaaatactactcaaattctcgccaaccgtcctcacacagtattgctcaatgccactgtccaagttacgacttccaaccaaactatattaagcagcccagcctttaaaagtttttggcaaaaactctttgccatttttggttgaacatgcaataaatgatattttccaaactgctctgatatcttagaagaaataaactgcaatgattttgatggaaccaaccctgatctaaccagcacactaaataaataaagtatttgagcaataatatgcacctattgctatcattatgactaccactctatcctatattttctcatctaccaacagttgatgagacaggttcccagaagaaaacagagaccctttatgggaaaaaaaattaataaagggtttatttaaagagagtggacaggatttaaaaaaaaatacagggmtgagacattcagggtctcccagtagagctggtcatgggcctatgtttgatgaagcaaagg

SEQ ID NO: 346731 - DNA, 583 bp, Homo sapiens
aacgtttctcctgccaccactcccctgacaactatacttgcacatctgcacttactaataccagcccccaccacagttgctstctctgcctcacctggaggtactaccagccactcccgctgtcaccctttaccaccactgtggcctacactgccctttctcccataggcacagcttcccctacaaggtccaaccttactaccacttctacttccattttcccagaggctgccacagctactctctgcaacaccagctgccactactgtttctggaacaagagcttcttctaccacatctggatcatctctgatattgtttggatttgtatccccacccaaatctcacatcaattgtaatcctcaatgttgggagagggacatagtgggaggtgattggatcatgggcacggatttcccccttgctgttcttataatagtgtgtccttacaagatccccttgtttaaaagtgcatagcacctcccccctttgctctcttcctcctgctccagccatgtaggatatgccagcttccccttcaccttccgccatgattgtaagtttcctgaggcctccccaacca

SEQ ID NO: 346732 - DNA, 433 bp, Homo sapiens
ttatatttatttcacaatgggtattaaaatratataaacaatcacttaccagatgcagatctggccccagtgtgagcatctgtgttaatggtatcagacttaaagaaggaaagacctgcaggggattgaaagtgatgtatgagacaagaggttgtctgcttcccttactctgtcagtggtggatatcctcatgtaattgacagtcctgtcagaggtgggtttaccatgaaggtaaataaagatgaagcctcggggcctctcactagcattgctccctttgtggccctgggaggtgccctagcaatgtctcaagcttacggtacttatcagcttaagaaaatttgtgatttactcttatttcttatcacattataaatatttatttcagtacttaattttacatatcgaattttgtattctttttcttaaagaa

SEQ ID NO: 346733 - DNA, 594 bp, Homo sapiens
accactctctgcaacaccagctgccactactgtttctggaacaagagctttttctaccacatctggatcatctctgatatggtttggatttatgtccccacccaaatctcatttcgaattgtaatcctcagtgttggaggatggacctagtgggaggtgattggatcatggagctggtaattctaatatttaccactttatgtcaatcatggggttgacaggcagacatacagataattactgaaagacctaacctgacaccaaaagctttgtaatgattatttcttctaagaaatgtgttatattgtatataaattaaatatatgtttatttgatgttataaggaaatacaatcactatgctgatgctayggattggtggggaaaaaatttaaggaaagtataggaagaatcaatatcattaaaatggccatactgcccaaagcaacttataaatttaatgctattcctatcaaactaccaatgacattcttcacagaactagaaagaactattttaaaatttatatggaacaacaaagagcctgaatagccaaggcaatcctgagcaaaaagaacgaagctggggcatcaca

SEQ ID NO: 346734 - DNA, 433 bp, Homo sapiens
ttatatttatttcacaatgggtattaaaataatataaacaatcacttaccagatgcagatctggccccagtgtgagcatctgtgttaatggtatcagacttaaagaaggaaagacctgcaggggattgaaagtgatgtatgagacaagaggttgtctgcttcccttactctgtcagtggtggatatcctcatgtaattgacastcctgtcagaggtgggtttaccatgaaggtaaataaagatgaagcctcggggcctctcactagcattgctccctttgtggccctgggaggtgccctagcaatgtctcaagcttacggtacttatcagcttaagaaaatttgtgatttactcttatttcttatcacattataaatatttatttcagtacttaattttacatatcgaattttgtattctttttcttaaagaa

SEQ ID NO: 346735 - DNA, 532 bp, Homo sapiens
attgagtagagaagcagacagattatatccctacctccatatatctttcagtccagttacctttttaatattacatatgttgtctataaatgtrgtcaacattcttgtttaagaactttattattatataaatatcttatcacatagggatgataatgctaatgaaagaaggcctataatatgcacatgagtacaaccattaaatgacccaaaatgttaggatgaaaatactggaattgataactccactatatcggaaatacttataactcatgcagggagtttcataatgaaaagagagtatctttaaaatagtgtatcagcaataatgagaaaaatcaatgggtgaagaaagattggtggcagcatctatatatggagggagaggttttaataaaaactatgatggtgaatattctgtctttctctcaaacaaaaaaatggttaatcccttagcttatatttgcaaagaagtgtgaaatatagaaaagttaagatgcttctgaaaggcattgagaaggatggatttgca

SEQ ID NO: 346736 - DNA, 569 bp, Homo sapiens
attgctgtgcatctatgctgcttcctctccccaaaatatcaaacacatctttaaaggttatgttggtcyttcttcatcattttacataacaagtgttaaaatgttttaaaaaattttttctgaaaaacactgttgatcgatttggctaactgtggataatctttggcctgtttgtaggagcaactttaaagaatgaaattaactttcttcttgggcctgttggctcttatttcatgtttcacagtaagttccctcaattctaaatttacttgttatatttattgttaatcatgatttcaaagaaagttttgataccaagaattttgtcctgtatataaaaatacagtgtcaggctgttgatcattatggacttgctcttactttccttttcctttctcatttatgactaaccatctagtcagcggttgctaagcatgaagggacagtggactgcaggaagaggacacagggcaggtagtatctaggagagctagctcttatctagagatatctcttcctttttatttctttttcaaaaggactactatcaaattgtcagaaaaatataa

SEQ ID NO: 346737 - DNA, 569 bp, Homo sapiens
attgctgtgcatctatgctgcttcctctccccaaaatatcaaacacatctttaaaggttatgttggtccttcttcatcattttacataacaagtgttaaaatgttttaaaaaattttttctgaaaaacactgttgatcgatttggctaactgtggataatctttggcctgtttgtaggagcaactttaaagaatgaaattaactttcttcttgggcctgttggctcttatttcatgtttcacagtaagttccctcaattctaaatttacttgttatatttattgttaatcatgatttcaaagaaagttttgataccaagaattttgtcctgtatataaaaatacagtgtcaggctgttgatmattatggacttgctcttactttccttttcctttctcatttatgactaaccatctagtcagcggttgctaagcatgaagggacagtggactgcaggaagaggacacagggcaggtagtatctaggagagctagctcttatctagagatatctcttcctttttatttctttttcaaaaggactactatcaaattgtcagaaaaatataa

SEQ ID NO: 346738 - DNA, 591 bp, Homo sapiens
tatctgggccagaatgcgccattcctcatggcacagtccctcatggcttcccttggctaggggagggagtttccaatcccttgcacttcccagcaaggtgacgccccaccctgctttggctcacccactgtgggctgcacccactatctaaccagtcccaatgagatgagccaggtatctcagttggaaatgcagaaatcacccaccttccgtgttgatctcactgggagctgcagactggagctgttcctatttggctattttcggatgactatctcattccattatttttaactttacgaatgtaaaatgctgccattacttgcatagaacagtcatctcagttatggagtttgagaagtccaagatcaagatctggccgacttggtgtttggcgaggacacagtctaattcatagaatggtaccttcttgttgtgtccttgcatagcrggagggctattttaatgttcttacggtgttaaagccacttggggttttagaaactgatgatggtatacgccaattacacaaaaatttaaaattaacatgttgaaatgactgacatgtggactacaaatcaccattatgac

SEQ ID NO: 346739 - DNA, 561 bp, Homo sapiens
ttctggggctagttgtataaattatttcatcacccaggtagtgagcacagtactcaacaggtagttttttgatcctcaccctcctcctgctctacaccatcaagtaggccctggtgtctattgttcccttctgtatgttcccgtatactcaatgtttagctctcatttctaaattagaacttgcagtatttggttttctctccttgaattcgtttgcttargataatggcttccacctgcatgcacgttgctgcaaaagaacacaagaattaaaaaactccccaagttattgcaaagtgaagctttgtttgggaaccactgttgttaaaggctatagatactggagttttaatgtgtctatacatatgtatcagaactgacatatatatatgtatagtaagagttggtttatttgagaagaagcttatttgggaagaaggaatttaaagaatggaaaaaggaggcagttgaaataaattctttgtcttaattttggaaataacagaagatatctagtggtgggagataattaggaaatagaatccttctagtttcttattt

SEQ ID NO: 346740 - DNA, 536 bp, Homo sapiens
tagtaagtgttagcctttcagtgggaatgtccttcttccatcatgcaatttttaaaatattctgggtatgatgaatctctagtaaaggggtaaaacatattcaaatttaaaacgtgacttmaaagcttttggtagtgaatggggaattaagttggaattgatcttaagctacctagttttctttgcctctgtctttgttgatgataagttgacaattagaactcttgtctccttttttagtatgctcattatagacagttttgttttctgtacccttctatgactcaggaaatcctttaagttaatatctaatacttcctgaattgttaccttctctagtaacatgctcattttgtgaaaaagatgaacaacttctctttttggttggtgttgtaaattgttttgatgcccagtatattttcagccaagtgttttaagtacaaggtgtgatttgttgttataatggatcattggatatgaaggacttaagaatgaacattgtcaaaattaaaataatttctgcatgacttatagtc

SEQ ID NO: 346741 - DNA, 536 bp, Homo sapiens
tagtaagtgttagcctttcagtgggaatgtccttcttccatcatgcaatttttaaaatattctgggtatgatgaatctctagtaaaggggtaaaacatattcaaatttaaaacgtgacttcaaagcttttggtagtgaatggggaattaagttggaattgatcttaarctacctagttttctttgcctctgtctttgttgatgataagttgacaattagaactcttgtctccttttttagtatgctcattatagacagttttgttttctgtacccttctatgactcaggaaatcctttaagttaatatctaatacttcctgaattgttaccttctctagtaacatgctcattttgtgaaaaagatgaacaacttctctttttggttggtgttgtaaattgttttgatgcccagtatattttcagccaagtgttttaagtacaaggtgtgatttgttgttataatggatcattggatatgaaggacttaagaatgaacattgtcaaaattaaaataatttctgcatgacttatagtc

SEQ ID NO: 346742 - DNA, 621 bp, Homo sapiens
gctcatgcatatgaagttcattcttcttaccacataccccatcacagagaatcatctaatctgataaaacagtgtaatgaccactgaagactttatgataccagttgagagtatataccctgcaagaatgaggttctrttttacaggatgcagtacatgctttcaatcagtgagcaacatatgcatccagctttcccagggccagaattcatgggaacagaaattaaggctcttcttattattacaactaatagcccactcacagaatctttgctttctgtctttgtaactttgagttatgctagtttggaggtcttggttcataaaggaggaattaggacattttgatctcctcatgtcactgaacaaaaataaataagagttactctactggttagcaggattgttcctgattaccgagggggaaattgggttgctgctaacaaagaggaacacagaggactgtctggaattcaggagattctctgggacaccatttagtatgttcatgtccaaaagtgaaaattaaggggaaactactacaaccaagaaaatgtataaccactgaggattgagatacttcaggaatgaaggtctgagtcaagcatttggaaaggaacc

SEQ ID NO: 346743 - DNA, 621 bp, Homo sapiens
gctcatgcatatgaagttcattcttcttaccacataccccatcacagagaatcatctaatctgataaaacagtgtaatgaccactgaagactttatgataccagttgagagtatataccctgcaagaatgaggttctattttacaggatgcagtacatgctttcaatcagtgagcaacatatgcatccagctttcccagggccagaattcatgggaacagaaattaaggctcttcttattattacaactaatagcccactcacagaatctttgctttctgtctttgtaactttgagttatgctagtttggaggtcttggttcataaaggaggaattaggacattttgatctcctcatgtcactgaacaaaaataaataagagttactctactggttakcaggattgttcctgattaccgagggggaaattgggttgctgctaacaaagaggaacacagaggactgtctggaattcaggagattctctgggacaccatttagtatgttcatgtccaaaagtgaaaattaaggggaaactactacaaccaagaaaatgtataaccactgaggattgagatacttcaggaatgaaggtctgagtcaagcatttggaaaggaacc

SEQ ID NO: 346744 - DNA, 603 bp, Homo sapiens
catgtcagaatttgaatccaggtcagtctgacttcaaaatccatgtatgctctgccttatcacatcctgcccctaggtaggaaactggatttgaatggattatatcaatacacattttttattttgagattttgacatgccttaaatatattgtgaatattaatttgtaataattgttagaaggaagcccagaggcatgactsaattactttcattttgactatgggctctctactttgatttttttttttttttaaacaaaacaagatgaatttgtttctaccattctaaagcctggagttgtaagttatgtggaagtgctctgcagtgtgtatgttgtgttatgatgctgctttttcagatacaatctccttgttcttttcttagttgaacttcattacttgtaccaatcctttaaaacaacaaaacttactgatttggtttagaagggctggtcagaaatggcagtctctgattaaagacctaagccaacttggagaaaattatactgtattcaatctacatttttgcttgataggcaatgtctgaaggtgtgcatggggtaattacccacagaaaagataggctggaaaaacacaaaaa

SEQ ID NO: 346745 - DNA, 553 bp, Homo sapiens
tggtattttatttaaccttcatcacagacttaaaagtaagtctagttgtcccatctttagagatgataacatacgctcagagaagctaaggaactagccaagatacgtattcgaccagcatgtcagaatttgaatccaggtcagtctgacttcaaaatccatgtatgctctgccttatcacatcctgcccctaggtaggaaactggatttgaatggattatatcaatacacattttttattttgagattttgacatgccttaaatatattgtgaatattaatttgtaataattgttagaaggaagcccagaggcatgactcaattactttcattttgactatgggctctstactttgatttttttttttttttaaacaaaacaagatgaatttgtttctaccattctaaagcctggagttgtaagttatgtggaagtgctctgcagtgtgtatgttgtgttatgatgctgctttttcagatacaatctccttgttcttttcttagttgaacttcattacttgtaccaatcctttaaaacaacaaaacttactg

SEQ ID NO: 346746 - DNA, 669 bp, Homo sapiens
tagcacaatagtctaggcagagagctggaccacctgtaatacggcaagggggttggttgagatttcctttattcagttattcgaaatgtatctattgagctatttattagtccctgggtactgtgggtgttcctgcgtattcaaccaccttgtcgacgctgcaggatgcggccccattacccaggacccaaagaacttccaaaaatgaatcccgaggaacagctgtttctctactggagaagtgggcagccaggcggaaacacgcagggaaatagttctctttgggacagaaggcatcaacctcgtaagacccagcgatcagcagagctcccggagagtgtttcttaatctaaaggtcatgagtcgggctgcaaagttgtcttgtcgtgcgtaaaataccaatggacttatacctgtttcatcgagaaggaatacaatgcgaacacaaagactgtaatggaacgtatttctctaaagtgtccttttcagatagaaatacgagagcgttttcctgagttttctaaaaatggggtggggtagggatcaaatactcacttctgggaaacatgggcgaattcagtgggaatcgtgctrgaagttacgagcagaggagcctgggtggggacttatactggccttgacggcccgtggaaaggaactggcggcaat

SEQ ID NO: 346747 - DNA, 488 bp, Homo sapiens
acaatttttgctttcaatcatgaaacataccttaaggaactcaagagaagaataatagtctgtaatgtctacccagacattttctatttcggctttcgttccttcactgatggtgtcctgtctcyttctggtatcatttttctcatcttaaatcgttgctaattcttgtccagcagttctaccagcaatgaattctctcagtttaccttcctgtgagaatgtatttatttacctttagtctgaaagatatttttgctctacatagcattctgggttgacaggtcttttcttttggtatttagtaaatgtttccttgggcccctatggtttctgatgagaagtccacagtcattcaagtggcagtttcccttttattttcatttggctgccttcaagatttttatggttttccttagttttcagcagtttgattatgatgtgtctgggtatggatttctttgggtttaacctacttgacatttattgaa

SEQ ID NO: 346748 - DNA, 529 bp, Homo sapiens
caagtcaactttgacttattgtcttccttcaaacactacattyaaggatttgtcaaataatgaacattattcttgcccaattcttttgaatctataaattactttctactcatttaatacatattcactggggagatgctctgtgccagacactgtaggtaattcagaggaagtatagacaccctagacctcaaaaaaagacaaaataaatatggacaagggaagatccacctccagattcaccattttcagtctttctgtcatttccagctaaataactctttcaaaaaatgtctcaaaataactaaataactcttccaataatagcactcttctatatgctggactactcttaatttcctggttataacatgatcttttcttttaacttttgtctttgccttctacctaaatttttattttgcattatgaagttaataggtccattactggatggtatggtttaattctccaatatgtttgctgatttgttttctactaagtctaccaattaccgagagaggagtgt

SEQ ID NO: 346749 - DNA, 529 bp, Homo sapiens
caagtcaactttgacttattgtcttccttcaaacactacatttaaggatttgtcaaataatgaacattattcttgcccarttcttttgaatctataaattactttctactcatttaatacatattcactggggagatgctctgtgccagacactgtaggtaattcagaggaagtatagacaccctagacctcaaaaaaagacaaaataaatatggacaagggaagatccacctccagattcaccattttcagtctttctgtcatttccagctaaataactctttcaaaaaatgtctcaaaataactaaataactcttccaataatagcactcttctatatgctggactactcttaatttcctggttataacatgatcttttcttttaacttttgtctttgccttctacctaaatttttattttgcattatgaagttaataggtccattactggatggtatggtttaattctccaatatgtttgctgatttgttttctactaagtctaccaattaccgagagaggagtgt

SEQ ID NO: 346750 - DNA, 481 bp, Homo sapiens
tgagaggccgaagtgggcagattacttgaggtcagtagtttgagaccaacctggacagcgtagcgaaacccagtatccactaaaaattcaaatattagccaggcatggtggcatgcacctgtagtcccagctacttgggaggctgaggcaggagaatagcttgaatccaggaggtggaggttgcagtgagccgagaycacgccactgcactccagactgggaaacagagcaagactccgtctcaaaaataaataaataaataaataacgttttttaaatttaagaatagatgtttgaggaatcttctcaaagaggaaaaaaagaggacctgccttatattggggattgtttcattatgggacacctttagaagcagcctggagtgcagcctggagtgcatataaatatatgtctttttccttcccgttgcaatttgcttattatatcagtctgcttattatttcaatttgcttactatatc

SEQ ID NO: 346751 - DNA, 304 bp, Homo sapiens
caccattttcagtctttctgtcatttccagctaaataacgtcttcaaaaatgtttcaaaataactaagtcactatttcaaactctttcaataatagcacccttctatacgctggactactcttaattttctcattataacatgatcttgcttttcttttaatttttgtctttgctttctacctgaatttttattttgcattatgaaattgataggtccattactggatggcatggttcaattctccagtatgtctgttgatttgtgttcyactaaatcttccaattactgagagaggagtgtta

SEQ ID NO: 346752 - DNA, 596 bp, Homo sapiens
taattttctcattataacatgatcttgcttttcttttaatttttgtctttgctttctacctgaatttttattttgcattatgaaattgataggtccattactggatggcatggttcaattctccagtatgtctgttgatttgtgttctactaaatcttccaattactgagagaggagtgttaatgactgcaactataactggatttttctatttttacttggcgtatccaattttgtttatgagttttgaagctctgtgtcctcatatacatttgggacaatattctcctgaaaaattgacaatcataattatttaggaggcctcattattcctgaaaagtttctctgctttcaaatctactttgtctgattttatatatatacaccacagctgtctttgattaatgcttgcatgaggtatcttttcccactcttttctttcaakctgctctataacttttattcttatttataagtgtattgcaggtggctttctttagtcagcatatttatttttaacacattctgatgatctctagtttttacttaatgcatttagataatttacatataatgttattatagataagttttta

SEQ ID NO: 346753 - DNA, 596 bp, Homo sapiens
taattttctcattataacatgatcttgcttttcttttaatttttgtctttgctttctacctgaatttttattttgcattatgaaattgataggtccattactggatggcatggttcaattctccagtatgtctgttgatttgtgttctactaaatcttccaattactgagagaggagtgttaatgactgcaactataactggatttttctatttttacttggcgtatccaattttgtttatgagttttgaagctctgtgtcctcatatacatttgggacaatattctcctgaaaaattgacaatcataattatttaggaggcctcattattcctgaaaagtttctctgctttcaaatctactttgtctgattttatatatatacaccacagctgtctttgattaatgcttgcatgaggtatcttttcccactcttttctttcaatctgctmtataacttttattcttatttataagtgtattgcaggtggctttctttagtcagcatatttatttttaacacattctgatgatctctagtttttacttaatgcatttagataatttacatataatgttattatagataagttttta

SEQ ID NO: 346754 - DNA, 596 bp, Homo sapiens
taattttctcattataacatgatcttgcttttcttttaatttttgtctttgctttctacctgaatttttattttgcattatgaaattgataggtccattactggatggcatggttcaattctccagtatgtctgttgatttgtgttctactaaatcttccaattactgagagaggagtgttaatgactgcaactataactggatttttctatttttacttggcgtatccaattttgtttatgagttttgaagctctgtgtcctcatatacatttgggacaatattctcctgaaaaattgacaatcataattatttaggaggcctcattattcctgaaaagtttctctgctttcaaatctactttgtctgattttatatatatacaccacagctgtctttgattaatgcttgcatgaggtatcttttcccactcttttctttcaatctgctctataacttttattcttatttataagtgtattgcaggtggctttctttagtcagcatatttatttttaacacattctgatgatctctagtttttacttaatgcatttagataatttacrtataatgttattatagataagttttta

SEQ ID NO: 346755 - DNA, 587 bp, Homo sapiens
gcagagaaagagtggacatagggtggagaaaacctagggtaggtatagggtggaatgtttgtaggaattcctgtgtaaagaaatatgcctgttcaatttaagtggagtgtgtgtgtgtgtgtgtgtgtgtgtgtgtgtgtgtgtaaaatatacacrgagggaagtagtgattgaaaagcctggatgcttggagatatgttgggagaatattataaaagctaaagactcattgaaaaaattccaggtagaaaagcagcattttagggaaaggtttttagttttaaatgtcaaagaacttgaaaatggaaaaactggatctggggagaaagagaaagaagtcataaagatattaaaggattgagatttatccacattgactgtgtcagttcctgaggtgaacagcatgagtctttctgcagcttcaatccccttcacacttcatggtgaagaaaacatcctccatgaacatcatagcatggataaagaaggaggtgagtaaaacagaagaaaaagattctgcagagtttatgcaggaaggatctacagtatttgtcaagacattgggtggagagatttgagggagagga

SEQ ID NO: 346756 - DNA, 587 bp, Homo sapiens
gcagagaaagagtggacatagggtggagaaaacctagggtaggtatagggtggaatgtttgtaggaattcctgtgtaaagaaatatgcctgttcaatttaagtggagtgtgtgtgtgtgtgtgtgtgtgtgtgtgtgtgtgtgtaaaatatacacggagggaagtagtgattgaaaagcctggatgcttggagatatgttgggagaatattataaaagctaaagactcattgaaaaaattccaggtagaaaagcagcattttagggaaaggtttttagttttaaatgtyaaagaacttgaaaatggaaaaactggatctggggagaaagagaaagaagtcataaagatattaaaggattgagatttatccacattgactgtgtcagttcctgaggtgaacagcatgagtctttctgcagcttcaatccccttcacacttcatggtgaagaaaacatcctccatgaacatcatagcatggataaagaaggaggtgagtaaaacagaagaaaaagattctgcagagtttatgcaggaaggatctacagtatttgtcaagacattgggtggagagatttgagggagagga

SEQ ID NO: 346757 - DNA, 587 bp, Homo sapiens
gcagagaaagagtggacatagggtggagaaaacctagggtaggtatagggtggaatgtttgtaggaattcctgtgtaaagaaatatgcctgttcaatttaagtggagtgtgtgtgtgtgtgtgtgtgtgtgtgtgtgtgtgtgtaaaatatacacggagggaagtagtgattgaaaagcctggatgcttggagatatgttgggagaatattataaaagctaaagactcattgaaaaaattccaggtagaaaagcagcattttagggaaaggtttttagttttaaatgtcaaagaacttgaaaayggaaaaactggatctggggagaaagagaaagaagtcataaagatattaaaggattgagatttatccacattgactgtgtcagttcctgaggtgaacagcatgagtctttctgcagcttcaatccccttcacacttcatggtgaagaaaacatcctccatgaacatcatagcatggataaagaaggaggtgagtaaaacagaagaaaaagattctgcagagtttatgcaggaaggatctacagtatttgtcaagacattgggtggagagatttgagggagagga

SEQ ID NO: 346758 - DNA, 519 bp, Homo sapiens
tttgggctttcccacttagcagctttgacaccttagaaagaacacttaacttacctgagcttctattacttctaaaaagtgcataaagtgcaggctaagacatagtttttttggcaaaattcagtcagactacatcaagtaaactccctaagtctcctagtataattcatggcacaaaaactggggaaaaaacagggaggatatgtttataagttcagtttgggttttttgttgagtgaatgtctccagtcatagagatgcaagtgtagatacacmgtaagagtagtatgaacaggagacaccttggaaggctatttcttccttcattcattcagttggtcactcaatgaactatcatgaattgagcactacctctgtttcttatcaacaaaggagactacggaaaagaagagtgactaagatctctgaagaagggaaaagctagatgactgggccacaagaggaaaaaaagcagcaagacaggtacaattgtttctggtccctcaagccagaaggtcc

SEQ ID NO: 346759 - DNA, 635 bp, Homo sapiens
ctcaatccctgaggtctcaagctccargaggggcgccgccgcagggactcagggaatgagaggggccaagggcctctccccgcccgtcccctcctctcccgagaggcagttccctggaaggccgctaccacgccgctgtctggcgctcaccgtcagaatttctcgggtagtctcggaaaggccgcgccgagcatttgacctggagaggggggctcggaattcgggaaagggaagtagcgccgcccgcaaagacagagaaagaggaaggggaggcggtcagcgctcctacgcttcttcccgacccctcccagcaaattctcagcctgtggccttcgacccgcaccagggcccggtgtgggtggaaaggtaaaccgactctcttcaagctgaaccttgaagccgggatcagggagcgcgagccccctgtacccaagctctgtccgccccgagggaccactgccccacagtccccagacagcgcggcgctcctgggctagcgcgctgcaattcccaaagagccaatgtctgttatccgcagctgcaggaagaggggctaaagccctgtcgctgggtcctcaaactagagagtaaaacatcagcatcgattaaacacaccgtccggcggcacgaaaaca

SEQ ID NO: 346760 - DNA, 539 bp, Homo sapiens
ttggagcctatttgtaaaggaaatgatattaaagctcaccgaatacagcaaattagtaagtgtaatggaccagaacacaaaggaacatgtgcactcagagaaaacaggaagtcaaaaggatccaaaacacatggtactaacatggttacctctgggtaatgagatgatacataacattctgtttcatcaatttgttaacaacagttttctaatttccattcagcaatttgtatgctttccttgcgaaaggcacagaggctgctacttttactcaattttattgtagtaagtaaaagttatttataaatataaaaagatataccaagatttcaaatgtcaactcagaactgttctaaaacttaaagggataggagaaagaactgaatgaggtgggagtagtgcaatttcttcagagtcaaaacacagatccacaagaaatgtagtattgtgaccacygcgggacataatgggagaaaaatgcactgcaaggctagtaagaatagggaagtcaaaactgaagtagacaagctaaacaaaac

SEQ ID NO: 346761 - DNA, 538 bp, Homo sapiens
ttcctttgttccgagacgcaagaaatggtgggtagtcgcgcacatctactcctgaataaaggaaagggcagaaagttttgcggtaggtgacgagtgagcgcaagtggtagagtactcgcttagcatgtgagaggtagtgggatcgatgttgtcacttggggccgcatgtccatacagtacaacgtggagaacggcttcattagtcacctgtcgaagaaaacgaggaagtaccagccatcttgaatgcttcactggtaaaagacctatgggcataaagaaacagtgctrataatagcccctaaaacgttcagtggacagtacccattttctaagttgttttctctttattcagaggaaagaggagatcccaagagggtgggatatacccaattgttccttttctctccttcctgcagcttgacccaaaatgccaaaatgcagcacagctctggaaaatgcagggcagagcaggatgagtaaaaccccagctttctttctggtcagggcgctgtaaagtggagttccgagtcaccgggaa

SEQ ID NO: 346762 - DNA, 594 bp, Homo sapiens
atctactcctgaataaaggaaagggcagaaagttttgcggtaggtgacgagtgagcgcaagtggtagagtactcgcttagcatgtgagaggtagtgggatcgatgttgtcacttggggccgcatgtccatacagtacaacgtggagaacggcttcattagtcacctgtcgaagaaaacgaggaagtaccagccatcttgaatgcttcactggtaaaagacctatgggcataaagaaacagtgctaataatagcccctaaaacgttcagtggacagtacccattttctaagttgttttctctttattcagaggaaagaggagatcccaagagggtgggatatacccaattgttccttttctctccttcctgcagcttgacccaaaatgccaaaatgcagcacagctctggaaaatgcagggcagagcaggatgagtaaaaccccagctttctttctggtcagggcgctgtaaagtggagttccgagtcaccggraagtcctgctgagagtgtggaaagcaaacccacaagtggtttgtcaactcaccgagtgcacccctgagttgcgaatatgtagctgtaaagagcaaaaccaa

SEQ ID NO: 346763 - DNA, 569 bp, Homo sapiens
aataatatcactaagaagacttcttaacactcatttcaacatggctctcagctggaatatgcaatagaaaaatgttcaattcggaaaaaaaccgaggtggtttaagaaaaatctgatgtgatgtttaaatatttaacacgttcatttttaagcttaactttcatttcatattatgtatagaaagacatcaagtgcaatgtaaaattttgtgatttagatacagtcattgtatcttctatcacaaatttttttttgatgaagcaaaatctaaaatgtgtaaagtttatattttacacttgttcaccttcctttcttcttcrtattctgtacttaccatatgtatgtttcccctccctcagaaattgagtggtcttatgctgcctgaatcagtcagggtcagtctgagtcttgacaatcaaaacataatatattaccagagataaatgaagacatttcacaagtggactattaagagcagtgtggacagagttaaaagaatagtaaaggatgatgaagcaagaatcaccagggactagcaatagtgagaagttgttgccacccttaggtct

SEQ ID NO: 346764 - DNA, 611 bp, Homo sapiens
agagaaactttctatattttatttctaaatttctatatccaatactaaaattcccccaaagataatagttgggaaaaaatatgtaccactacttaaatatttgcaactgtattaaatagcatgcccatacatataattttagccttaactacaaattagcagaaaagcatgatttcattctgaggaaaataatgtatgyttgttgcctgtatgtatgtgttgtttgtgtgactcaagctgaaacaagccctaatgactccatcattaactcagagagctaagcagactgggggaagaaattgggaaaatagaaataagggaaagtccagagctccctatcatttgattgaactgagtttccattggcagaacagtgttcttgatagggccacatatatcagaatatcaagtagtgtaataatagaggcttgcatagattcaaagccttagcagacactttagttccaataatttgatagtcaattaaaaataataatttactattgtgtgaaatattataatggagactagtgcaggtatctaaatcatctcaattactgttcattatataatttaatgcaagacagctgggcgtagtggcaagtacctgt

SEQ ID NO: 346765 - DNA, 530 bp, Homo sapiens
aaaatccagaaaaatccctattcaaagttaaaatgcacatatagatgtacatacactctgaaaataaatattataaattttaaaaacagataatatgtttttgctcttctaagtgagtgcatgtttctttaaaaaactacacagaaaaaagacagtaaaagcacttacacagttgatagaaaktttggaaactaattccctcaaatgatgactatattactgtagctaactttcaaagagtgaccttgttgaagaaaattgtcttttattgccattatcataattacacagtggtaatattttgtaaattttaattacagtgataaaaaatccttataattggggtgatttattttttattatttgaatgctattaagctttaacactatttcaagttttttatatactgatataaaatattccagaatatcagtatagcttcttttaactttattagctattaaaatgtttgagaattaattatataaaagctgtcaaaatgaaaattcttatgttttaagaatgcgac

SEQ ID NO: 346766 - DNA, 530 bp, Homo sapiens
aaaatccagaaaaatccctattcaaagttaaaatgcacatatagatgtacatacactctgaaaataaatattataaattttaaaaacagataatatgtttttgctcttctaagtgagtgcatgtttctttaaaaaactacacagaaaaaagacagtaaaagcacttacacagttgatagaaattttggaaactaattccctcaaatgatgactatattactgtagctaactttcaaagagtgaccttgttgaagaaaattgtcttttattgccattatcataattacacagtggtaatattttgtaaattttaattacagtgataaaaamtccttataattggggtgatttattttttattatttgaatgctattaagctttaacactatttcaagttttttatatactgatataaaatattccagaatatcagtatagcttcttttaactttattagctattaaaatgtttgagaattaattatataaaagctgtcaaaatgaaaattcttatgttttaagaatgcgac

SEQ ID NO: 346767 - DNA, 530 bp, Homo sapiens
aaaatccagaaaaatccctattcaaagttaaaatgcacatatagatgtacatacactctgaaaataaatattataaattttaaaaacagataatatgtttttgctcttctaagtgagtgcatgtttctttaaaaaactacacagaaaaaagacagtaaaagcacttacacagttgatagaaattttggaaactaattccctcaaatgatgactatattactgtagctaactttcaaagagtgaccttgttgaagaaaattgtcttttattgccattatcataattacacagtggtaatattttgtaaattttaattacagtgataaaaaatccttataattggggtgatttattttttattatttgaatgctattaagctttaacactatttcaagttttttatatactgatataaaatattccaraatatcagtatagcttcttttaactttattagctattaaaatgtttgagaattaattatataaaagctgtcaaaatgaaaattcttatgttttaagaatgcgac

SEQ ID NO: 346768 - DNA, 609 bp, Homo sapiens
tgtcttaccgggcttgagctttcatgattctttccatgtttgctgtccagccatatgtgcttgtgacaatacagcatggggatgtcaccagtttgacacaaccacctttttgacttttttctccaacatgtctttcatgattttgcagaggttctcaaactttgtttttttctcttcctgtttctttttttcttcttcatcttctggaagttccaaaccctctttggcaactgacactacagtcttactctcaagttccttcagctgctggacacagtacttatcaatcaactcgatcatatagatcacttctaagccatgcttctgaagacattccacaaaggctgagttagctacttggtccttggtctcacctgtaatgtaatagatatgtttctggtttgccttcattctggaaaacacaatgagataaaccatctcatcacgagaggcagatgtgcactatttcaacagctctgaaagcttcttctgattttgaragtctatatattcaaagatttatgttttcagataacttctcgtggaactttttgtagttctttttatcctctgccagttcagcaaagagttctaagtatgttttgacca

SEQ ID NO: 346769 - DNA, 609 bp, Homo sapiens
tgtcttaccgggcttgagctttcatgattctttccatgtttgctgtccagccatatgtgcttgtgacaatacagcatggggatgtcaccagtttgacacaaccacctttttgacttttttctccaacatgtctttcatgattttgcagaggttctcaaactttgtttttttctcttcctgtttctttttttcttcttcatcttctggaagttccaaaccctctttggcaactgacactacagtcttactctcaagttccttcagctgctggacacagtacttatcaatcaactcgatcatatagatcacttctaagccatgcttctgaagacattccacaaaggctgagttagctacttggtccttggtctcacctgtaatgtaatagatatgtttctggtttgccttcattctggaaaacacaatgagataaaccatctcatcacgagaggcagatgtgcactatttcaacagctctgaaagcttcttctgattttgagagtctatatattcaaagatttrtgttttcagataacttctcgtggaactttttgtagttctttttatcctctgccagttcagcaaagagttctaagtatgttttgacca

SEQ ID NO: 346770 - DNA, 597 bp, Homo sapiens
attgcagtccatgtatacttytaagcagaatgacagagatacttctctgacctcactgctaagcaaaaggaaagttctggctagactaatatgtctcctccacatgcaaagacagaagtttaaccttaactttgtggtccactcgtaaaacctttgcaatttattctgtcttttcacttatttttttcatgtgtgtgtgtgtctcgttggccgaaatatctgttaattacctgttataacttaaaacccactacacaacatgctaatgtaaaatgttttcatgaaaactttttatggaacgtataaagcaactttgttaagaaatgaatggtaaaccagaatgcacaaattaatacttctttcgaaagagccagtgacaatgataaagtgtgctaagtacctattcaaatctgctatagagaatggtctgtacggataaacattatgttttcatacatgctgagggcagattaatgactagtttgagctatataaggcttcagtttgcagagttttgaatccaagtgaataccactaattaattatgtaaactgataacaactctgcctccatctactctttggtgaattagagcta

SEQ ID NO: 346771 - DNA, 533 bp, Homo sapiens
tctagtcataactgtagtgtgattttttagtagagtttgtcaaaatgactctaaaatttatattgaatrgaaatatgtaagattctgaataagaacaagataaaatttgggcaactgcaacatacaataaatctaaacctattaaaacaatatgatggtgcaaaaaagaacaaagagagcagttaggcaaaataaaaaaaatctctaaaatatgggcatttgcattaggataaagatatcatttcaaatccacaaaaattaaaacctttaaataagtaggattgaaataattggcacttattaaagttaaagaaaattagacctttacttcattctaaacataaaaattgatcagagaaggaagggttgaagagacagatgtaaaacaaaaacaatctcttaagaaaaatagaatatttcaaaatcttcagacagggaagccctatgtgagacagaaccagaaagctataaaaggaatgccttgacatatatattaaaaacctctgaatgataaccaccacaaagcttaaaaa

SEQ ID NO: 346772 - DNA, 571 bp, Homo sapiens
ggcctactatggccttctcttagctattattttccttgaaatctgaagcactaattcttaaaacatgtcttctatgacactgcttatacccagtttgccttctgttttttatcacaatatgtcatttttttctcttaatgtcatttcttcgttgatttcaatggatatttgttgagcgcctgttacaagcactgaagtgcaagtcataaaacagaataaacaaatagaaaacaattatacgattctgttttctatttttcttactaaagccttaraacttttctcttggcagactctcccactctaattcccaatttatctattcaatcgtaactttccactcaattttattcctgtggttgaacttgccctctgttccttgggttctatacctgttcctcaaacagcacatttacaaacagatgttattatattcacctcaccagcactttcttctaaattctgtatatctgctaatgtcatcatccactctagctttaaaatacaaacttatctttccatttcttaaacctatctctgatttttatcattgttatcatttgtttctggt

SEQ ID NO: 346773 - DNA, 575 bp, Homo sapiens
gttaacatacagcaaatagattcaatggattcagctattctgaaggtgtccctaatggaaagagctgattaaagtaaatttcaaaccctgctggaacaaatctgtaaaaatattttctgagggaaattattcttcaaaaaatttatttttatatatagtttctgttgtgttaagtatagagagagagtttgtcataacatagttaactcttgccttgtattttatctttcaatttatttgggggtacagatagaattatactactaaaatatgacctggacccagatgtagtttatttaaatttcaaaatgaaaagcttactaagaacagataagatwgagtgctctctctgtcttagcatatttgtgtgtcaggtgaacatcaatttactctaaaggacactcctaagtagcagaatgcgtcatatataattcatcactcacacctactaggaacatgatttgctccagcacattcaatggaataaaagatttttcagcatactcgtgtctgctctaagaaaagtaataatcttccttttctaagagaacattcttagatactatactccatac

SEQ ID NO: 346774 - DNA, 575 bp, Homo sapiens
gttaacatacagcaaatagattcaatggattcagctattctgaaggtgtccctaatggaaagagctgattaaagtaaatttcaaaccctgctggaacaaatctgtaaaaatattttctgagggaaattattcttcaaaaaatttatttttatatatagtttctgttgtgttaagtatagagagagagtttgtcataacatagttaactcttgccttgtattttatctttcaatttatttgggggtacagatagaattatactactaaaatatgacctggacccagatgtagtttatttaaatttcaaaatgaaaagcttactaagaacagataagatagagtgctctctctgtcttagcatatttgtgtgtcaggtgaacatcaatttactctaaaggacactcctaagtagcagaatgcrtcatatataattcatcactcacacctactaggaacatgatttgctccagcacattcaatggaataaaagatttttcagcatactcgtgtctgctctaagaaaagtaataatcttccttttctaagagaacattcttagatactatactccatac

SEQ ID NO: 346775 - DNA, 575 bp, Homo sapiens
gttaacatacagcaaatagattcaatggattcagctattctgaaggtgtccctaatggaaagagctgattaaagtaaatttcaaaccctgctggaacaaatctgtaaaaatattttctgagggaaattattcttcaaaaaatttatttttatatatagtttctgttgtgttaagtatagagagagagtttgtcataacatagttaactcttgccttgtattttatctttcaatttatttgggggtacagatagaattatactactaaaatatgacctggacccagatgtagtttatttaaatttcaaaatgaaaagcttactaagaacagataagatagagtgctctctctgtcttagcatatttgtgtgtcaggtgaacatcaatttactctaaaggacactcctaagtagcagaatgcgtcatatataattcatcamtcacacctactaggaacatgatttgctccagcacattcaatggaataaaagatttttcagcatactcgtgtctgctctaagaaaagtaataatcttccttttctaagagaacattcttagatactatactccatac

SEQ ID NO: 346776 - DNA, 560 bp, Homo sapiens
ttgacttccctcccccaactccacgaagaccatcattggcacatgctattgagtactgttcaccrgctgcagggatacagtgagccagcctgataccagcaaacgacaacaattactcaaagcagaccaacagaaaacctgtaactgtatgttgtttcaaaaatcagctgatcataaatgggcacatgcctgtaatccaagctactgggaaggctgaggcaggaggatcacttgagcccaggagctctagaccagcatgggcaacatagcaagactccatctcaagaaaaagaaaaagaaaagaagtgagcttgtcactgtgctgggctccctggtgatttccctggaacgttttcccttctggtgtcctgtagctgtttagaagagctttccctgcaatgtgagaacttcttattgatactttatttactctttcataaattttggatcaacttagagataatttttgagtagtactattaaatctgttctgttgtaagactccctttctctagaactgctcatcagaaaaccattattttaataggttaatcctgatt

SEQ ID NO: 346777 - DNA, 527 bp, Homo sapiens
ttaaaataaatgaactgcttagaaaacctcttkcttgaactaagcttagttcacagaatttggtcccagataaatagttgactcaggcttttttgttctctgtaaatctgcttatcagcaaaaggtttatttctgaaactcatggctcaatatagtgaaaagtagtcatttgaatcaagaactaaagaacgattcatggttcaggtcataaaaattgcctatatgtctctcactggtgaatcatttatgatgtcctcagaacagtttgaattttcaaaaggttaactttggatgtgcatttttagaatgtgtgtttgcttacaatatgtcaacctacaaaagggcgttttcataaaataccactgtttaatttctacaaaatccatgtgagtgaaaaaaagcatactcaaatcacagattggaaacatggcttgaacttcaaatagttagctgcaattaccatgagactattccttgatatttgggtttcctaaaatcaggctataacctaagcacttcaaacaagc

SEQ ID NO: 346778 - DNA, 623 bp, Homo sapiens
taatctaaatgcattaacgactttatattctaatttaaaatgcagaaataatcatacacttgtattccttttcctaacactttggtctttttcatgacattttacttttttaaaaaattatattactagccatgcatagaggcacatagtcaatagttattttttcaaagtatcttaatttttacataagtatgcttttttgaaggtgatgtgatttaatttttttctttgcagtataattgggatctcccccattactgcctatagtaattttcatagtgtgatagtattgttcgcataaaaatacactgctttcagacacttgtgtgtcttctatcaaaagatatatgcctattgattagttgtagaatagctctattttaatagcccaactgtatattacagtacaagtgctcagtgaatatagattcacatgggcatctaagaacaacgcttattaaacttataataataagcattattatttgctaaactggaattttgttggttgagtagccaaaaaaatttgcagattccaaaatatttgtamtaagacacagtgagtatgttatactgacagattgtgtataaaactcattgcaatcattgccaaccactacaaa

SEQ ID NO: 346779 - DNA, 552 bp, Homo sapiens
acaaaaagcaactctcattaattaattattaaaatgaataggaaaacagattaaaaaacaaagaccccattggaaaatgggcaatggatataaatagaaaattcaaaaagtaagcaacccaaacggcaataaatacatgaaaaacatttaatctcattaacaaacaaataagtataaattaaaacaataagaaagcatttcctagccactgaccagacaaaattttgagaatttagcaataataagcacagatgaggatgtgagaaaacaggatgttctcaaactctctggtgggagtgtgtacataggtacaaatgctttggggaagaaaatgttatgctaaaataaatgttaagattagtttatttgtgcatttaacaaacaattattgagtgcctgctgtgtaaggcactttgatagggtctgaaaatgatgcasagaacaaaccaaataaagctttcatgcactttatattctatacaaaagaggcagttagtaaacaaagaaacaacaataatatcaaatacccattattgctttgaaaataaataa

SEQ ID NO: 346780 - DNA, 561 bp, Homo sapiens
ttgaattgcatttataagacattcatatcctttattgacacctgagagtgtgtgtttactctttacatttttcatatgtgcatatagagtttttgtgttatataatatatagtaaaataaaggggtgtaaaactaaactacacatgggggtaaatgatacctcacctactttcaaacatgacaatacttttgaaatataagtttaacatggggtaagatattcatgtgaaaaaaaaatagaagtgttaaataattttttctataggtcagtaatttaaatgtgacactagacatgatgggaataattactgatgcttcagggatttgctttaataataacatttattttatgttatgtaagaaactttaatgtgaatacaactttcatttttatatacatttatgaagcttaacttatggcaagaagattaatttcactaacacattatattggcttcaatgactttaaatgtgttcatatttaggtaaatagtaaaaatagaaataaaaatgtgttaatgtkaataatgtggataattcatgtgtataaaactaatttgt

SEQ ID NO: 346781 - DNA, 561 bp, Homo sapiens
ttgaattgcatttataagacattcatatcctttattgacacctgagagtgtgtgtttactctttacatttttcatatgtgcatatagagtttttgtgttatataatatatagtaaaataaaggggtgtaaaactaaactacacatgggggtaaatgatacctcacctactttcaaacatgacaatacttttgaaatataagtttaacatggggtaagatattcatgtgaaaaaaaaatagaagtgttaaataattttttctataggtcagtaatttaaatgtgacactagacatgatgggaataattactgatgcttcagggatttgctttaataataacatttattttatgttatgtaagaaactttaatgtgaatacaactttcatttttatatacatttatgaagcttaacttatggcaagaagattaatttcactaacacattatattggcttcaatgactttaaatgtgttcatatttaggtaaatagtaaaaatagaaataaaaatgtgttaatgtgaataatgtkgataattcatgtgtataaaactaatttgt

SEQ ID NO: 346782 - DNA, 597 bp, Homo sapiens
caagctattttaggtgctccaacttcttagaaaagaattccttaaaattctaattgccactagatattaattaaatatattatagtaaactcccttatggattcctttactgcatctaatccactagtactaaaattgcattgtktttcacaacttaatctgcatatatatatagacactttactgaatattatttttactgattgagatgcacacactttatctgcattctgaccatctgttactatagacacaatttgtcagataaatttgtgtggaaaattaagcaaattatcagtactttaaggttatgtttaaacaatgttcaataaaagatacagacaggaaatataattaataaactaaatgaattaaattatttgtcccaatatttgattatttatactgaccaaattaaatcataacatttcatccagttgtttaacatcctgcaaattagaaatgcaaaagttaacaaacaatggaattattgcaaatatatttaactgtgtattttgatgctggtctagtatttggaaaatctccaattaatgcaatcgatagagatattttcaacatatatttatattttagttg

SEQ ID NO: 346783 - DNA, 439 bp, Homo sapiens
gtacacaaaaatgagcttatcatttaatttgagaatcagactcatagttgggcrtcatggtctcttaactaagtattccaattaaccaagagagacccaatatttttagagaacaactgttaatgaaatagatcagttctttgtctcttcctcaaatctgtcattaaatatctggggcatatttttaaacctatattgaaagcttggaagtatttgttaaagagtttacatgagttgttgttcatgaactactgtctaaagagtcaatatagattttgctattataaattgttttattaccagaccgattgtatggagtccttattagtatagcatagtatctccacatagtttgccctccaaaatgtttttttttcattaagtataggatatagttttaaaattaagaactgtaaacatattattttgattttccata

SEQ ID NO: 346784 - DNA, 595 bp, Homo sapiens
tattattggtttgtgctcataaaattctgatagcctgaaggtaatgacaggcacaaagccatagggattattagtagcaacaacatactcaataacttgtgttccaatgtggtgttatgtggtaacatgtstatgcaggatttttagttgaaaactgcaggcttacatttgtgagagagtgttttgtcccttacatgtaggttttcagataagtaaaaagtcagaaaatcatagaggagcagagacagtatgtcaaagttaattttctttctgaagagataatattgtgtttttatccagatggcagctgaatcatactcaatctaaaatgaatgaccatagaagcttttgctcaaatgtctcctagttttgcttaaaatgctgtgcagttttagatatgctatcgggaaaaaggttaataacttgaaaataatttgatgtgttcaatgtcatatgataataatgttatcattactaattttttaattattggatttgacttaattggcatttaatttattaatgacctaactataatggaaaattaatgagcatgttatagagaaagaaatatttaagtttgagaaaagatttg

SEQ ID NO: 346785 - DNA, 613 bp, Homo sapiens
  misc_feature (1)...(613): n = A,T,C or G
nnnnnnnnnnnnnnatattaccaggtaatatttatttttccaaaaaattgagcaaatttaaccaactcttgcctgaacaaattgattatgtaacatacctcaaaagtggcgcaaaaagaaaaggaraacaaagaaaaaactcaaatggtttatagttagtaactaacagagctaacatcagtgatcctatctatgaatatagttagaatcaacattttattcaacattttgtttacatagaatcagtcacctttattcatatttgattgcctaactttacagctaagtttctacattgctttttatatttgaaaattgtagagaaaactttacttgataaacttcaaggagtagatagttttgccacatatcttctttatattaaatgaaatgccaattttttgcatgtttgatttatattattgatcagcaaactgggaatttaaatgcttaccttctgcaattttcttttttgaatacaaaccaatgtcccagctcaaagtccagtatcttcaagtgaggcatagatctctatatcaagtctggaaacctatgcgttaacaagttggttgtcccttatacaaccaagtctaagtagtggggcatggaataa

SEQ ID NO: 346786 - DNA, 446 bp, Homo sapiens
acctttttgcactttcaacttctactggccataaaaactttctcttctaaccaagctccttcatttcatgaaccttcactctaacaaagctaggggtgagggtgagggtaagttattaataattggagtgtaaagaagagagggaaaaatctagatcttgggaaaagagtgctgtgtgaaattgtctaggttgtggcatattggttttctcctttgactgtgtaagagttctttcactttaacttcttatgatggtcatgccagtaagagayaaaaaggagagaaaatttacctcttaatagaatgatgtttatgattacaggtgaaataaggcattttaaaaatcagtataaaggcaaccttaagcttatacaatatcttctctatcgtgaatactgacatcttttcttcactcactattaataacaaatgcattttctgataga

SEQ ID NO: 346787 - DNA, 570 bp, Homo sapiens
tcattaataaaatagatgagcaaaaatacaaatgtcactctaataaaattttctcattctgctattttttaaccttcaaaaaatgcttaatttaaaaaaatggttatgtttaagttttatagtatctttggcaagtgctcctgttttcaaaagctatgacattattgccataatttaatttggtttaaggaatatttattgagtgcctattttgtgctaggttctgcattagtctgtggggataaaaagatgggtggagcatatttcattttctgaaggagttaaggccagtgagttagataatgctatgagaaaatcatgactaatgtcttgataattattacgaatagaggtgttttcaaagtgttagttgaacccagaaaataggtgcctaagtcaagtttgggatcaggctttctgraagagaaggagcagaaggaggaggggctgtctgagatcttttctgtgtgcaccttttcacattactaattgtgttaggccattcttgtaatgccataaagaaatatgtgagactgtgtaatttataagaaaagaggtttaattggctca

SEQ ID NO: 346788 - DNA, 570 bp, Homo sapiens
tcattaataaaatagatgagcaaaaatacaaatgtcactctaataaaattttctcattctgctattttttaaccttcaaaaaatgcttaatttaaaaaaatggttatgtttaagttttatagtatctttggcaagtgctcctgttttcaaaagctatgacattattgccataatttaatttggtttaaggaatatttattgagtgcctattttgtgctaggttctgcattagtctgtggggataaaaagatgggtggagcatatttcattttctgaaggagttaaggccagtgagttagataatgctatgagaaaatcatgactaatgtcttgataattattacgaatagaggtgttttcaaagtgttagttgaacccagaaaataggtgcctaagtcaagtttgggatcaggctttctgaaagagaaggagcagaaggaggaggggctgtctgagatcttttctstgtgcaccttttcacattactaattgtgttaggccattcttgtaatgccataaagaaatatgtgagactgtgtaatttataagaaaagaggtttaattggctca

SEQ ID NO: 346789 - DNA, 591 bp, Homo sapiens
cggttctcagttcaaaagcccctgctttggaagctttgtttaagacaaaaactgttgctttttaaaatgtttttgttgttgtcactctgtctgccccccagtctatagaaccttctgcactttatttcagttttaatctttctctccaacattcttgtctgcttttaaaacataaaaattaaatatacatgtctttcaygccatatctactgttcataagaacaacaaaagcctaactgatgtactaaatagaatttagtgttctttagtttttattttgtataagttgtaggcaatagtttaatttcttactacgggttgccaagataatgtagaagtgtcttccttcattttgcttaacccattagggttgtattatgcaagcaacagaaacaaattctggttaaatcaggcagaaaggaaattatctgaaggatataggtagcccattgaatcattgggaaggatgaagaaccaggcttacaaaatagaataagaactaaagtagactcagaaatcaagagatgtagccaaggttatgccacaggagtgaaggtttagctgttcccattagagtggctaccacaggac

SEQ ID NO: 346790 - DNA, 577 bp, Homo sapiens
tcttgcagctggtgttctgagtgatttctccaatgaaggctcactttattttcaggctgctatagactctgcttccttagcttagctccaggccagctgcaaagactctctaagctggaggcaggaggggtgattctgtcctgtgtaatctttttaagtgacttctttggaaaaggctttgcatgcattaaacactgggttsgcagagtcttaggcatctttcagagacagtgtcaggcagctgctgccaatagggaccacgcgaggctgggtgaaagatggatgagggattatctcctctctgtggagccaaggagggacagagccgagggctgctaccgcacagtcctcagagtgaccaggcccctcatggtttccagaaaacactgagtgttcctccttctccctcaggcacagtgtggccttgcagtcaggaacacagatttgatacctaaatgcctcagcaacaaccctaccaccttctcctattagctgtgtgaccctgagcaggttctgttccctctctgtgcctctgtcctcttctctgtgagttgaaacactgacggtgcttcagact

SEQ ID NO: 346791 - DNA, 436 bp, Homo sapiens
gcctgaatggaactgcaagacctcatctctaataagcataaaagtcaatgtaaaaaaagtgtacataggccaggtgcagtggctcatgcctgtaatcccagcaccttgggaggtcaaggcaggcagatcacctgaggtcaggagtttgagaccagcatggccaagatggtgaaacccatctctactaaaaaaaaaaaaaaaaaaaatttgccagtcatggtggtgcattcttgtaatcccagctacttgggaggctgaggcaggagaatcacttgaacctgggaggcggaggttgcagtgagccaacattgtgccactgaactccagcctgggtgacagagcaagactccatctcaaaaaaaaaaaaaaagtgtacatagtaaagcaaataggatatgaaagatatgagtgasagtcacaaaaataagatgagaga

SEQ ID NO: 346792 - DNA, 447 bp, Homo sapiens
tttcctggggtctccaggttgtgatcatggacagaggctggcaaggggaaggtatgatgacagaactcaagttgtgcaaggggagacatgagagtaccctcagttcttatgctcctgccattccagaactccatgacattggagcagtatcgccctgaatgggcaattgagcatagtggtcaaagccgtggaccccagagccaggcttcctgggcttcaagtctcagcatgccatttactagctgtgtgacctcaggcaagttactgacccactctgtgcatcagtgttcccacctaaagaatgaaaatatgccagtacctccctcaagggttgctgtgaagattamatgaacaaaatgtatatacaaatatataggcatgcatatttataattagactggagatcattctttgtgcctggcacaattgtaagtgaagtataagtgt

SEQ ID NO: 346793 - DNA, 552 bp, Homo sapiens
caagtcccactgtgtctacataatgtttgcaaacatgctattggccaaagcaagtcacttggagtccagagtcagagtgagagggcactgaaagttacatggcaggggttgtgggtaccaaggggagaaatccaaggttccaaagtacctggtaaagcccatatattgctcagaatgtgtttggatacaagtaactgaactctgcccaattcagctaaagagagagagagaggaaggaaggaaggaaggaaggaaggaaggaaggaaggmaggcaggcaggcaggcaggcaggcaggcaggcaggcaggcattttactggcttgcatgactgaaggtccagggtggaaggagctttaggggtggctgggtgctgagtctcaaacaatgccggcactgctggcatctccctaggcctggaagctgcccagggcacctccaagccaggcctgcacggggcttcctcccagtgaagacatggctgccctgagccttaattggagagatgatgcagtgagcccgggagattttaaagtgtgtatttacaatctgct

SEQ ID NO: 346794 - DNA, 552 bp, Homo sapiens
caagtcccactgtgtctacataatgtttgcaaacatgctattggccaaagcaagtcacttggagtccagagtcagagtgagagggcactgaaagttacatggcaggggttgtgggtaccaaggggagaaatccaaggttccaaagtacctggtaaagcccatatattgctcagaatgtgtttggatacaagtaactgaactctgcccaattcagctaaagagagagagagaggaaggaaggaaggaaggaaggaaggaaggaaggaaggcaggcaggcaggcaggcaggcaggcaggcaggcaggcaggcattttactggcttgcatgactgaaggtccagggtggaaggagctttaggggtggctgggtgctgagtctcaaacaatgccggcactgctggcatctccctaggcctggaagctgcccagggcacctccaagccaggcctgcayggggcttcctcccagtgaagacatggctgccctgagccttaattggagagatgatgcagtgagcccgggagattttaaagtgtgtatttacaatctgct

SEQ ID NO: 346795 - DNA, 609 bp, Homo sapiens
ggatgggcacagtgacgcacacctgtaaacccagtactttgggaggctgaggcaggtggatacctgaggtcaggagtttgagaccagcttaggcaacatggtaaaacgccatctctactaaaaatacaaaagttagctgggtgtgatggcacacagctgtaatcctatctacgaggctgaggcaggagaatcacttgaacctgggaggcggaggttgcagtgagccaagattgtgccactgcactccagcctgggtgacagagtgagactccgtctcaaaaaaaaaaaaaaaaaagaaaagaaaagaaaagaaaagaaaagaaaagaaaaaagaactatctgaagtttcaggcatgcactgagggtcttggaacatattctcctggataagggggcactgctgtattaattgtacacacctgtgtgtgaggcattgttctaagggtttacccatagtctcttctttaatcttcacagtatagcaactattattacattttacagatgaggaaactgaggcccaggaaagcagaataacttgmccaaggttacatacctagtacttttaaaatcagctttggtgaggtatagctttcatataataaaatg

SEQ ID NO: 346796 - DNA, 536 bp, Homo sapiens
tggtctcctcactcctctcgttctgtggattttctcgttctgttttgttttcstttttgttttgccacgctatatttcataatacttagcagttagatttataatctctgacgttttagtcagggttcaaaggccaaggaatttccacctggaaaatgcaggagggctcaaaaatcagtctgagcttgcttctgcaaaaatttgtttttaactttgaaaagagaggcctccacaagggagttatgccattcatttgaaattttaaaaattgctctacccattgcaagtcagtatatacttaaagttctttaaaaagaaaaaagacccatcactcctccaccagggactcccagaagacactgctcttttaacctctgcaaacccacacaaatccagtcccctttccttcttagattgccccatcactgtatcatggtcagaaattttactaaatggcaaggcaaatgcctatgggtgctttcttagctgtgacctttcgaagtctgggctctaatttagaaaatctgtcactcact

SEQ ID NO: 346797 - DNA, 602 bp, Homo sapiens
aacataaaagtctccttgcccaagcaccaagatggatttaggtatgaaaaaagtgggcctggatttgaatttgggggatgcatgaaaagaacagaattactctgtacaacagacagcaagagcatcctggagctggagcttgaaggagggtagaatgcagtgcaggagggatgatgtgaggagtagaaccgggagatggatgagaagattggcaggcatatggctgctgtgtggggtaaagcagacagtgagaaggccctggttggggtgggggggtgctggcaaatggactcataacaggaatgtgccctctgtcatttgaagtttattgctgtgctctcccatgacccaaaaactctcagttcaagtttttgcaatatattatcagcttggtttttatgattgctttgtgtgtggtgtaggggagggagaatagatgagaaagagttgtttcccaagcttgagtttatgccaagacagagataaaggaacagctacaagatgcacagtacattagaaagcaggaagtcagrgcagagctgactgtgaatgcaacagaaatcttgggagcagcctttgggcttcgaaaggacatgaaatgg

SEQ ID NO: 346798 - DNA, 409 bp, Homo sapiens
gaagacgcagagatgcaaagatttaggaaaagtatgtttcaacccaaagtgagaacataaggctctgagaggtgggcaagcttagcatgtctgaagaatgaaataaaagccagcgtgtctggacagaggtgaatgagaggaaaagccrgagatgaggcagcagaacaaggcagatctcagctcctgtggaatctgtaggctggggtttctcatcctcggcactagtgacatctcattctctgttgcggggggatattctgtgcagtataagatgttcagcagcattcctggactctactcactagaggccagtaggttctccctagtagtgacaagcaaaattgtcttcagaagacattgccaagtgtccctggaggggtggggggggggcggtaaaatagcccccagt

SEQ ID NO: 346799 - DNA, 538 bp, Homo sapiens
atcataactgataagatttttctctaaaaaagcaaaaggcattttaattgggaaataattttgcttaagggctattagctccacttcaaatagcagtcacataattataactgaatacaatacaaaacatgttagttttctgtactgataatcatkactctcataataaattaagtgcttaccatgtgccaggtaccaacatttttctctacaaaaacttcccacatgctggatgcagtggctcactggaagcaacttgagagcctgaggtgagaggatgtcttgagcccgggaggttaaggctgcaatgagctatgataacaccactgctctctagccggggtgatagagcaagaccctgtctcaaaaaaacaaaaacccaaaaaactcccacaaggtcaaaagattgtttattttaaacaagatcaacattctttgtttattatgaaaattacttgtttctccatagaaactgacgaagtctgaactttttatatatactattcactttttctaccgtgggaatctaaatgaatga

SEQ ID NO: 346800 - DNA, 538 bp, Homo sapiens
atcataactgataagatttttctctaaaaaagcaaaaggcattttaattgggaaataattttgcttaagggctattagctccacttcaaatagcagtcacataattataactgaatacaatacaaaacatgttagttttctgtactgataatcattactctcataataaattaagtgcttaccatgtgccaggtaccaacatttttctctacaaaaacttcccacatgctggatgcagtggctcactggaagcaacttgagagcctgaggtgagaggatgtcttgagccygggaggttaaggctgcaatgagctatgataacaccactgctctctagccggggtgatagagcaagaccctgtctcaaaaaaacaaaaacccaaaaaactcccacaaggtcaaaagattgtttattttaaacaagatcaacattctttgtttattatgaaaattacttgtttctccatagaaactgacgaagtctgaactttttatatatactattcactttttctaccgtgggaatctaaatgaatga

SEQ ID NO: 346801 - DNA, 538 bp, Homo sapiens
atcataactgataagatttttctctaaaaaagcaaaaggcattttaattgggaaataattttgcttaagggctattagctccacttcaaatagcagtcacataattataactgaatacaatacaaaacatgttagttttctgtactgataatcattactctcataataaattaagtgcttaccatgtgccaggtaccaacatttttctctacaaaaacttcccacatgctggatgcagtggctcactggaagcaacttgagagcctgaggtgagaggatgtcttgagcccgggaggttaaggctgcaatgagctatgatarcaccactgctctctagccggggtgatagagcaagaccctgtctcaaaaaaacaaaaacccaaaaaactcccacaaggtcaaaagattgtttattttaaacaagatcaacattctttgtttattatgaaaattacttgtttctccatagaaactgacgaagtctgaactttttatatatactattcactttttctaccgtgggaatctaaatgaatga

SEQ ID NO: 346802 - DNA, 538 bp, Homo sapiens
atcataactgataagatttttctctaaaaaagcaaaaggcattttaattgggaaataattttgcttaagggctattagctccacttcaaatagcagtcacataattataactgaatacaatacaaaacatgttagttttctgtactgataatcattactctcataataaattaagtgcttaccatgtgccaggtaccaacatttttctctacaaaaacttcccacatgctggatgcagtggctcactggaagcaacttgagagcctgaggtgagaggatgtcttgagcccgggaggttaaggctgcaatgagctatgataacaccactgctctctagccggggtgatagagcaagaccctgtctcaaaaaaacaaaaacccaaaaaactcccacaaggtcaaaagattgtttatttyaaacaagatcaacattctttgtttattatgaaaattacttgtttctccatagaaactgacgaagtctgaactttttatatatactattcactttttctaccgtgggaatctaaatgaatga

SEQ ID NO: 346803 - DNA, 652 bp, Homo sapiens
cgaataagtcatcaaataattcaagaaaatttcttataattgaaggcaagcattgctggatataaagggcctatacaatagaggaaaatatactcaaatcaatagcctagaatgctatacccagataaattatcaattaggtgggagggtagaataaagatggtatcaaatatacccagtcttaaaaaattcagctctcatcacttgttcttaggaagcaaatggaggaagggaaccacaaaaaagaggaagaaaaaccaaagaaatagggaatccaacttgagagagaaaagagaaatccccaggatgattaagaagagactccaggaagatagctgtgcacctggcagagagtcaccaacttaaattagaggagggtagaagactccaggaaagatggctacaaaaccaatgacattggcccagcacagtggctcacagcactttgggaggccgaggccrgtggatcacaaggtcaggagatcgagaccagcctggccaacatggtgaaaccccatctctactaacaatacaaaaattagccaggcgtggtggtaagcacctgtagtcccaactacttgggaggctgaggcaggagaattgcttgaactggggaggcagaggttgcagtgagctgagatcacgccgttgc

SEQ ID NO: 346804 - DNA, 596 bp, Homo sapiens
aggagataattaccattgaaaagatagtttgctactcacagttcccaagggtagggccacacaggacagcccagggaaacaccagggtcagtcagaagcagaagcagagagcagaaggcatgggcaagagcctgtattgtggtttctacaggaaggaatgcgccaagcaaggggwgtagctgaataggcttaggatttgataatttaaataattttggcaggttctgggttataagaatggtccccaactgtctggtacctggtgctagggtgactaggacagaggaatattgcttcttggagtgtcagagccaggtagaggaggcagtgggaatgtggactcagggttggttggcttacttatgaaaatgtgctcacaggcaagtggactatctctaggaatcacctaagccttggaaggccagtctctccttggttagtgaggtcccacatgccagagcataagaatacagaaaataatattgttaaaacagggttttatagttaataaaaggttgagtctcagaaattcagatccataaactcgattggttgtgaaaaaggagaaagctatccaaatgtcatgaagaaatata

SEQ ID NO: 346805 - DNA, 596 bp, Homo sapiens
aggagataattaccattgaaaagatagtttgctactcacagttcccaagggtagggccacacaggacagcccagggaaacaccagggtcagtcagaagcagaagcagagagcagaaggcatgggcaagagcctgtattgtggtttctacaggaaggaatgcgccaagcaaggggagtagctgaataggcttaggatttgataatttaaataattttggcaggttctgggttataagaatggtccccaactgtctggtacctggtgctagggtgactaggacagaggaatattgcttcttggagtgtcagagccaggtagaggaggcagtgggaatgtggactcagggttggttggcttacttatgaaaatgtgctcacaggcaagtggactatctctaggaatcacctaagccttggaaggccagtctctccttggttagtgaggtcccacatgccagagcataagaatacagaaaataatattgttaaaacagggttttatagttaatamaaggttgagtctcagaaattcagatccataaactcgattggttgtgaaaaaggagaaagctatccaaatgtcatgaagaaatata

SEQ ID NO: 346806 - DNA, 302 bp, Homo sapiens
attggagcttccaatatcaaagaaaaaaaaaaaaaaacatgtggaggtaggagagctgtacccaacagtgtttttctgtaattgacacacatattcatacctaatttcttccatgcatttttccatgtttcctacccccaaaacatttgcatatcctattytttctcccccaaatactcttttccaagtgcaccaattttttgacttttcataaacttcaccaggaactggggtggcatgccattgaactctcactaccatcacgtattgaggcttttctccagttgtttttgaagtaataa

SEQ ID NO: 346807 - DNA, 302 bp, Homo sapiens
attggagcttccaatatcaaagaaaaaaaaaaaaaaacatgtggaggtaggagagctgtacccaacagtgtttttctgtaattgacacacatattcatacctaatttcttccatgcatttttccatgtttcctacccccaaaacatttgcatatcctattttttctcccccaaatactcttytccaagtgcaccaattttttgacttttcataaacttcaccaggaactggggtggcatgccattgaactctcactaccatcacgtattgaggcttttctccagttgtttttgaagtaataa

SEQ ID NO: 346808 - DNA, 302 bp, Homo sapiens
attggagcttccaatatcaaagaaaaaaaaaaaaaaacatgtggaggtaggagagctgtacccaacagtgtttttctgtaattgacacacatattcatacctaatttcttccatgcatttttccatgtttcctacccccaaaacatttgcatatcctattttttctcccccaaatactcttttccaagtgcaccaattttttgacttttcataaacttcaccaggaactgkggtggcatgccattgaactctcactaccatcacgtattgaggcttttctccagttgtttttgaagtaataa

SEQ ID NO: 346809 - DNA, 302 bp, Homo sapiens
attggagcttccaatatcaaagaaaaaaaaaaaaaaacatgtggaggtaggagagctgtacccaacagtgtttttctgtaattgacacacatattcatacctaatttcttccatgcatttttccatgtttcctacccccaaaacatttgcatatcctattttttctcccccaaatactcttttccaagtgcaccaattttttgacttttcataaacttcaccaggaactggkgtggcatgccattgaactctcactaccatcacgtattgaggcttttctccagttgtttttgaagtaataa

SEQ ID NO: 346810 - DNA, 466 bp, Homo sapiens
acatgctttccacaccggaatatatgaacaggtactctttaaaataataataaatacatatatgtactatgggagcagctcacttctcttttatttcatttctccatctgccaacatttattaaacataacattttgggaaataaaccaaacaataacctccagataggctttarttctccacctgtttaatcatttttttattctgggattttttgacaagttccaaataattaactaatagtcactggcacatattccttctcttcaccattaggatcacgggaacatgcaaaagatacagaacatatatttgccttcttatttagttgggtagaccacttttatttttggctcacattttaagcaaattttaccaggccatttgctaatttcacttttcagatgagccttacctgaccattctatttcaagttgccactcttccattccatttcctgtacctt

SEQ ID NO: 346811 - DNA, 528 bp, Homo sapiens
cagtggttcaaacatgtaatcccagtactttgggaggccgaggcaggtggatcacttgaggccaggagtttgagaacaatttggacaagatggcgaaaccccatctctactaaaaattaaaaaaaaaaaaatgccaggcgcggtgacatatgcctgtaattgcagctactcaggtggctgagrcattagaatcgcttgaacctaggaggcggaggttgcaatgagctgagatggcgccgctgcactccagccagggcgacagagtgagactctgtctcaaaaaaattattaattaaacaaattaaaaaatgagtggatacccctataatgcttataaccgtctagaacattgcaaacacttattaatgtatttgctcaatataatcataattttttacttctgcatttgagttcatgtcctttgtagggacatggatgaagctggaaaccatcattctcagcaaactatcgcaaggacaaaaaaccaaacaccacatgttctaactcataggtgggaattgaacaatg

SEQ ID NO: 346812 - DNA, 641 bp, Homo sapiens
  misc_feature (1)...(641): n = A,T,C or G
cacgtgtgataagctaagctatggaatgatctaaatatgtaagtatataaaacaaacaaaaaataacaatgataagagccatccaagcccatattttagttaaaaccactaaaatgatttacaataaaatcgtatgtatgaatgtgtatggggtgaggagtttaaaaagagtatgttcgttgttcaaattagactttccgggtattttatttagagttttgagatgttaagcaagatatcaaatttttgcatctttattattggccgatgatcctcatwcaaagctaatcaataaatacaaacagaagtttgatttatctgctctgcttcagtcaaacatgcattttccttcatgtatacgtgcatcttctttacctcccatcaacccttcatcctactccaattagtcttctaaatctattgctttaataaaattgctttggctaagaaagtaaacatcactggtgctatttttaatagacacttttaaatccccatctgacttgatgcctgagaaacagagtgggtgacagtttacaatgtattatcttagagagaacatcttcagtcatttttagtctatgtggagttaaattgaggggcaccccnnnnnnnnnnnnnnnnnnnnnnnnnnnnnnnnn

SEQ ID NO: 346813 - DNA, 641 bp, Homo sapiens
  misc_feature (1)...(641): n = A,T,C or G
cacgtgtgataagctaagctatggaatgatctaaatatgtaagtatataaaacaaacaaaaaataacaatgataagagccatccaagcccatattttagttaaaaccactaaaatgatttacaataaaatcgtatgtatgaatgtgtatggggtgaggagtttaaaaagagtatgttcgttgttcaaattagactttccgggtattttatttagagttttgagatgttaagcaagatatcaaatttttgcatctttattattggccgatgatcctcatamaaagctaatcaataaatacaaacagaagtttgatttatctgctctgcttcagtcaaacatgcattttccttcatgtatacgtgcatcttctttacctcccatcaacccttcatcctactccaattagtcttctaaatctattgctttaataaaattgctttggctaagaaagtaaacatcactggtgctatttttaatagacacttttaaatccccatctgacttgatgcctgagaaacagagtgggtgacagtttacaatgtattatcttagagagaacatcttcagtcatttttagtctatgtggagttaaattgaggggcaccccnnnnnnnnnnnnnnnnnnnnnnnnnnnnnnnnn

SEQ ID NO: 346814 - DNA, 153 bp, Homo sapiens
atacgtgcatcttctttacctcccatcaacccttcatcctactccaattagtcttctaaatctattgctttaataaaattgctttggctaagaaagtaaacatcactggtgctawttttaatagacacttttaaatccccatctgacttgatg

SEQ ID NO: 346815 - DNA, 153 bp, Homo sapiens
atacgtgcatcttctttacctcccatcaacccttcatcctactccaattagtcttctaaatctattgctttaataaaattgctttggctaagaaagtaaacatcactggtgctatwtttaatagacacttttaaatccccatctgacttgatg

SEQ ID NO: 346816 - DNA, 153 bp, Homo sapiens
atacgtgcatcttctttacctcccatcaacccttcatcctactccaattagtcttctaaatctattgctttaataaaattgctttggctaagaaagtaaacatcactggtgctatttttaatagacasttttaaatccccatctgacttgatg

SEQ ID NO: 346817 - DNA, 540 bp, Homo sapiens
aaaaactacccaacctcactcttcctcctatcttgtctcttgctgggccacaccatggccaaacccagctggaaatgataaatcaggggagttccttgtttggtttatagatcagcctctaargtggaggagagggcagaaattgaaaaatagatctagaggcataaccagaagatatgctcacagtctgcgttctctgactctgtttcagacttggtaaacaagaactgggaacataatataaatcattataactatcagctatggtacaactgttttttttcttcagaaagacaaaaccaaggaataactgcagtgaccggagttgcatgtaattttacctaatgttagtcaagaagtggttggcaaaataaaagatactactttcaagaatacattttataattattttccaagtataaaaagttgcatcataagtccttcttattttaggaaaggactatgaattacttatgataatgtggtttaagatgttcaagtaagtataaatgaaatattcataagttggctactgttaaa

SEQ ID NO: 346818 - DNA, 619 bp, Homo sapiens
gctgctaaattctaaagtaatttgttacatagcaatagataactaccccaaggctcaattcattaaaagaacaacagccctgaaggtgtatacaacttataagagcgtctcaaaataaatgaagtaaatgttatggaactaaaagaaaaatagacaaagtgacaattattatataagatttcaatagctctctctcaatagtagacagaataactatttagaaaattagtaataatacataagatttgacctacgtgacctaattgacatttatagagcaatccactccaaaatagcagaatgcgcatttgtataaagtgaaaatagaatatttaataagatatatcatatcctttgtcataaaataattcttaataattcaaaacatacaaaaatattttatgccccaaatatrattaaattaacaaaatcaaagtgttttgctccatggagttctaaatattgagactttttaaagcttttagtttaaaaagtctcaatatttagaagctagaaaatacacttttaagtaactgatagtttaaagaaaacattaagaggaaaattaacaagtatttggaagtaagtgaaaatgaaaacacaaatgaaaatttgtgca

SEQ ID NO: 346819 - DNA, 619 bp, Homo sapiens
gctgctaaattctaaagtaatttgttacatagcaatagataactaccccaaggctcaattcattaaaagaacaacagccctgaaggtgtatacaacttataagagcgtctcaaaataaatgaagtaaatgttatggaactaaaagaaaaatagacaaagtgacaattattatataagatttcaatagctctctctcaatagtagacagaataactatttagaaaattagtaataatacataagatttgacctacgtgacctaattgacatttatagagcaatccactccaaaatagcagaatgcgcatttgtataaagtgaaaatagaatatttaataagatatatcatatcctttgtcataaaataattcttaataattcaaaacatacaaaaatattttatgccccaaatataattaaattaacaaaatcaaagtgttttgctccatggagttctaaatattgagactttttaaagcttttagtttaaaaagtctcaatatttagaagctagaaaatacacttttaagtaactgatagtttaaagaaaacattaagaggaaaattaacaagtatttggaagtaagtraaaatgaaaacacaaatgaaaatttgtgca

SEQ ID NO: 346820 - DNA, 497 bp, Homo sapiens
tccattcttttccagctctctgagagcttcctgaagatgggatttgtaacatctagcatgtcttaccaaatttcaagactgcaaggagcacagcaagatggcagaatccagcaaaggtctccacacagaaatatcaatgtgaacaactctttatgcatgaaaayaccttcacaaagaaaatcaggtgaaacgccacagtacttggttataatacagttataagaaaatatgttttaaaggacagttttacattacccacaccacacttccccaaaccccaggcagcacagtctagagagatacgccatgcacttggggaaacagagtgaagtaagcataggactttgccttggacctcaacattgggcccaccacaataaaactcaccactgagaagaaccccataaccccatattccaggttgttacccatgacctgaatcactagatattccccaacacaaggcagaaccacacagacccaggcttcagacttgc

SEQ ID NO: 346821 - DNA, 375 bp, Homo sapiens
ccttgaattcaggtgagctccagtaccatgccagctgtaatatcccccagcttatggtctgctccagcatcatgtgtgctgtagcaggtcccagacttctggcagtaccacgtcagtcacatctgctctggacttctgcctgccttttgctacacctatcacaagaattttccagataaagccagtctggaaatattgaaataagtgcctgctgcttcaaataagcagtcatcaatgcacaaccacgtggtcaagaacaattaggaaaacatgacataaccaaatgaacaaaataaggtgtcagagaytctaatcctaaataaattgagacgtaaaaagtgccagacaaagaattcaaaataactgttttaagga

SEQ ID NO: 346822 - DNA, 533 bp, Homo sapiens
taaaaaaaaaacaaagaaaaaatctcttggcatatttaagacaataatgatagttacagtaatttattaagacatgtgcaatgatccaaagatgtaaattgtgacatcaaaaattcaaaatatgaaggtaaaattgagtaaaaartatagagaatttttatttttgcaatcaaagttaagtgatgaaagaaactgaacaaaacacaagcgaatggaaagatatcttgtgtttgtcaattggaaaaatgagtattattataatgtccacactactcaaagcaatctaaagagtcaatgcaatctctttcaaaataccagtgacattattcacacaaatagagaaagagcgatcataaattcatatagaactacacaaatatcagaaagccaaagcaatctttggcaaaaacaaagaaacctggaaacatcacactacctgacttcaaaatatactataaagctagagtaatctaacagcatggtactggcaaaaaccagatacatagaccaatggaacagaacacagagcccag

SEQ ID NO: 346823 - DNA, 554 bp, Homo sapiens
tatatacacaatggaatacggttcagccacaaaaaagagggaaattccatcacatgcaacaacatggaagaacctagaagacattctgttaaatgaaagaagtcaggcacagaaggacaaataccacgtaatctcactcatatgtggaagctgaaattgtcataacatacaagtagagagtggaatgatggtaatcaggggccgggtagttggagagggggattggggagatgttggttaaacaataaaaattttcatttagataggaaaaataaattcaagagatcagctatacagcatggtgactacaattaataatatattgtattcttgaaatatgctgatagtggatatgaagtgttctcactaaaaaaaaactatgtgatataatgcagatgttaattaggtagatttrgttattccacaatgtacgtatatttcaaaatatcattttgtgcagggtaaacaaataattttatctgtacatataaaatataaaaatattatttgtattaaaaagtaaatgaaataaaactaaatttcatgactgtcag

SEQ ID NO: 346824 - DNA, 521 bp, Homo sapiens
ctgtcatgctcggatagggcactgtkttatttcgttcatttagagagatcatatttttctccatggggctgatactcgtggatgtacatcagtgtctggccattgaagaattaagtgttggttgtagtcttcacagtttgtgcttgtttgtacccatctggggaggggggggccaagcacccctgtggccaccaccactggaactgtgctgcatcagacccgaagccatcacagctctgggtctcacccaaggcccgtggtgaccaccacctgtgtattgccaatgttcactcaatgctcaggggctctttaatcagcaggtggagaattcagccagccttgtgtcctatctttcagggtggtaagctcccctctggcccacggcaggtcccagaatgctgtctgggagtagggcctggagtcaggaaccttaggaatctacttgttgctctattctaccacagctgagctggcactcatgctacaagataaagttattcccattcttctctctattttcc

SEQ ID NO: 346825 - DNA, 521 bp, Homo sapiens
ctgtcatgctcggatagggcactgtgttatttcgttcatttagwgagatcatatttttctccatggggctgatactcgtggatgtacatcagtgtctggccattgaagaattaagtgttggttgtagtcttcacagtttgtgcttgtttgtacccatctggggaggggggggccaagcacccctgtggccaccaccactggaactgtgctgcatcagacccgaagccatcacagctctgggtctcacccaaggcccgtggtgaccaccacctgtgtattgccaatgttcactcaatgctcaggggctctttaatcagcaggtggagaattcagccagccttgtgtcctatctttcagggtggtaagctcccctctggcccacggcaggtcccagaatgctgtctgggagtagggcctggagtcaggaaccttaggaatctacttgttgctctattctaccacagctgagctggcactcatgctacaagataaagttattcccattcttctctctattttcc

SEQ ID NO: 346826 - DNA, 521 bp, Homo sapiens
ctgtcatgctcggatagggcactgtgttatttcgttcatttagagagatcatatttttctccatggkgctgatactcgtggatgtacatcagtgtctggccattgaagaattaagtgttggttgtagtcttcacagtttgtgcttgtttgtacccatctggggaggggggggccaagcacccctgtggccaccaccactggaactgtgctgcatcagacccgaagccatcacagctctgggtctcacccaaggcccgtggtgaccaccacctgtgtattgccaatgttcactcaatgctcaggggctctttaatcagcaggtggagaattcagccagccttgtgtcctatctttcagggtggtaagctcccctctggcccacggcaggtcccagaatgctgtctgggagtagggcctggagtcaggaaccttaggaatctacttgttgctctattctaccacagctgagctggcactcatgctacaagataaagttattcccattcttctctctattttcc

SEQ ID NO: 346827 - DNA, 556 bp, Homo sapiens
gcaagctggagaccaaggagagtgaatggcttaatttctctgagtcttaaggtccctacaaatcaggagagtagatggtgtagttcctatttggaggctggtaggctcagggcccaggaagagcttgtattagtccattctcacgttgctgcaaagatactacccaagacaggataatttataaaggaaagaggtttaattgactcatagttctacatggctcaggaggcctcacaatcatggtggaaggtgaaggaggagcatgccttacatggtggcaggcaagagaacatgttcaggatacctccctttcataaaaccatcggatgtcatgagacttattcactatcatgagaacagcatgagaaagacttgccccaatgattctattacctcccaccaattcttcaccatgacatgtgggacttatgggtgctacaawtcaagatgagatttgggcgaggacacagccaaaccatataatttcaccctggatccctcccaaatctcatgtcctcacaattcaaaacacaatcttgcccatccaactgtcccc

SEQ ID NO: 346828 - DNA, 571 bp, Homo sapiens
agtggagtgcctctcatcgtttttgttcaccccacatacctgaccctgagaagctatggttttcaaagaatgatatttcaaattacctgcacttttcagtttcttcaccatctgtgccctgctctcttgggacttccttctgtgttttcccacttacagtagacatgttttctacctgtggtgttatgttaaccatagacctattgttagcttcatcttctcttaatttttcttggcctatatttgttctatataaagatatgtgataagatagtgtctgagtggttgctacatgaaatttagtgtgattattttttctactttttaatcatcattattttgaagtttatgcattctttgtccttacattaygtggatggcatatttgtatatgtgtgtgtatgttttacttgttcttctttctgttctgttttattttggacaaaatatttgcagaggtgaacctgagagctgccattgcctacagctacccagacatccactatatcttgacttccaattttaatgtgtcacagaagtattggaatctaattaatgatttctactcagt

SEQ ID NO: 346829 - DNA, 571 bp, Homo sapiens
agtggagtgcctctcatcgtttttgttcaccccacatacctgaccctgagaagctatggttttcaaagaatgatatttcaaattacctgcacttttcagtttcttcaccatctgtgccctgctctcttgggacttccttctgtgttttcccacttacagtagacatgttttctacctgtggtgttatgttaaccatagacctattgttagcttcatcttctcttaatttttcttggcctatatttgttctatataaagatatgtgataagatagtgtctgagtggttgctacatgaaatttagtgtgattattttttctactttttaatcatcattattttgaagtttatgcattctttgtccttacattacgtggatggcatatttgtatatgtgtgtgtatgttttacttgttcttctttctgttctgttttattttggacaaaatatttgcagaggtgaacctgrgagctgccattgcctacagctacccagacatccactatatcttgacttccaattttaatgtgtcacagaagtattggaatctaattaatgatttctactcagt

SEQ ID NO: 346830 - DNA, 542 bp, Homo sapiens
ctgtagtgccagctactcgggaggctgaggcaggagaatcgcttgaacccgggaggcaaaggttgcagtgagccaagatcaggccactgcactccagcctgggtgacagagtgagattccatctcaaaaaaaaaaaaaaaaaaaaaaggtggatcgaataacaaaatgcattcaaaatttttttttaataaaaatctaagctggaagatgggacagtaggaagcattcataagaatttccagagaagtttccccaactggttattgtcatcctgagtgtggtttctaatgttattttgaggaatggacattttaatcgtattgtgcatttgcagagaaaatacagacaatatttgccaacaaatagttctttcatatgataaaattttcaaaataataatttgaattatgccaatagtattttgtscctgtagaatttgtgtctcctttcaacaggattacctttatgttgtgtgttttagagtataaagaacacatggttgatacatgaaggaaattattccattcacttgaacttatata

SEQ ID NO: 346831 - DNA, 549 bp, Homo sapiens
tgagtggccttgtatatctcaagtctaattttgaatgaagatgatgccagatttatagtctttttaggcattggcagaaacaaatataaattctctcagaaagaagatgacatccatcattcggggactcaatagttttgtaaaataatgactttttgattcaaagtctagaacataatcrgcaataatctagacatatgatgatatataatgacataaatgagaatcagagtaaataacagcagaaagattatattctctccagataatggaatcattatatacaggccaaaaaaactaatggatataaaattataaactttctattttagcaagaaaatagaaagtacattgaagtcaaagagaattggatagaagtagaacttaaaaaatacaaaaagaaatattatttattttactgatggtttgagaacatattagagacaactaagaagaagaatgaactggaatatagatcaggaaaaacatccaaattaacaaaggaaaatgaaatgagtaaaacacagaagataagaaagatttacagag

SEQ ID NO: 346832 - DNA, 549 bp, Homo sapiens
tgagtggccttgtatatctcaagtctaattttgaatgaagatgatgccagatttatagtctttttaggcattggcagaaacaaatataaattctctcagaaagaagatgacatccatcattcggggactcaatagttttgtaaaataatgactttttgattcaaagtctagaacataatcagcaataatctagacatatgatgatatataatgacataaatgagaatcagagtaaataacagcagaaagattatattctctccagataatggaatcattatatacaggccaaaaaaactaatggatataaaattwtaaactttctattttagcaagaaaatagaaagtacattgaagtcaaagagaattggatagaagtagaacttaaaaaatacaaaaagaaatattatttattttactgatggtttgagaacatattagagacaactaagaagaagaatgaactggaatatagatcaggaaaaacatccaaattaacaaaggaaaatgaaatgagtaaaacacagaagataagaaagatttacagag

SEQ ID NO: 346833 - DNA, 517 bp, Homo sapiens
agataaatcaagtaggtgaaaaataaaaagtagatagaagacctaatcattatagtcaacacagtagattttgtggatatatatcaaacttttatcccctggtaattgaaaatatacctcctccctaatttctcaagtgtcagttacaaattttatcatatattaagtcacaaaaaatcattaaattccayaaatttggttattaaaataagctctaatcataatataacagaacaagaaattactaatataagtgtgagttattgactaaaccaaaacaaaaaggaaattaagagccttctaataaaaagctccacaacattaaaagctccacaataaaacaccacagtaggaattgttttttggccacagtcatcaacggacacaactgtgtgtgttaagcagaatattgtgaaattaaataattcaaatttaaaataattcaacttaaagctgttagaactttaaattattctgtaccttgagacaaatgtggctatgcagcttgagtcacatg

SEQ ID NO: 346834 - DNA, 517 bp, Homo sapiens
agataaatcaagtaggtgaaaaataaaaagtagatagaagacctaatcattatagtcaacacagtagattttgtggatatatatcaaacttttatcccctggtaattgaaaatatacctcctccctaatttctcaagtgtcagttacaaattttatcatatattaagtcacaaaaaatcattaaattccacaaatttggttattaaaataagctctaatcataatataacagaacaagaaattactaatataagtgtgagttattgactaaaccaaaacaaaaaggaaattaagagccttctaataaaaagctccacaayattaaaagctccacaataaaacaccacagtaggaattgttttttggccacagtcatcaacggacacaactgtgtgtgttaagcagaatattgtgaaattaaataattcaaatttaaaataattcaacttaaagctgttagaactttaaattattctgtaccttgagacaaatgtggctatgcagcttgagtcacatg

SEQ ID NO: 346835 - DNA, 612 bp, Homo sapiens
tgatgtgggatatccagcgctccaggtaaaggtgaagagctattttgcggggaaaagcagaagcagccaaacccaatacccttcagagagggagagtcctgagaccatatgcctacaccattaacattgtagggctcttrctattggaaatgaagcaggaatctctcgcccacataagacacaccacagatacaacacaatttgttggccatgaggaagagaggcaggcaccttgagaaattctcacatacaaagcccaggcacacagggcttgcctaagactggcacaagaccaagataacagaaagccctccaccacaagcctagtgagattgaagcaacaagtaatagcagtctacaactggggacagtgcaattgtgggatgagcaacttcctttgtagcacaggtgtgcagagatggctgagaaatgcaaggaaactgtcagtgcagggaaactgacagtgaatcagggctattgaaatacacacatgcacacacacacaaacacacacacacacaaacacacacacacaaaccagcacaccaggcccatccttaagggcaaggcaattatagaaggatttgaagcatttgtgcactactggcgacc

SEQ ID NO: 346836 - DNA, 612 bp, Homo sapiens
tgatgtgggatatccagcgctccaggtaaaggtgaagagctattttgcggggaaaagcagaagcagccaaacccaatacccttcagagagggagagtcctgagaccatatgcctacaccattaacattgtagggctcttactattggaaatgaagcaggaatctctcgcccacataagacacaccacagatacaacacaatttgttggccatgaggaagagaggcaggcaccttgagaaattctcacatacaaagcccaggcacacagggcttgcctaagactggcacaagaccaagataacagaaagccctccaccacaagcctagtgagattgaagcaacaagtaatagcagtctacaactggggacagtgcaattgtgggatgagcaacttcctttgtagcacaggtgtgcagagatggctgagaaatgcaaggaaactgtcagtgcagggaaactgacagtgaatcagggctattgaaatacacacaygcacacacacacaaacacacacacacacaaacacacacacacaaaccagcacaccaggcccatccttaagggcaaggcaattatagaaggatttgaagcatttgtgcactactggcgacc

SEQ ID NO: 346837 - DNA, 612 bp, Homo sapiens
tgatgtgggatatccagcgctccaggtaaaggtgaagagctattttgcggggaaaagcagaagcagccaaacccaatacccttcagagagggagagtcctgagaccatatgcctacaccattaacattgtagggctcttactattggaaatgaagcaggaatctctcgcccacataagacacaccacagatacaacacaatttgttggccatgaggaagagaggcaggcaccttgagaaattctcacatacaaagcccaggcacacagggcttgcctaagactggcacaagaccaagataacagaaagccctccaccacaagcctagtgagattgaagcaacaagtaatagcagtctacaactggggacagtgcaattgtgggatgagcaacttcctttgtagcacaggtgtgcagagatggctgagaaatgcaaggaaactgtcagtgcagggaaactgacagtgaatcagggctattgaaatacacacatrcacacacacacaaacacacacacacacaaacacacacacacaaaccagcacaccaggcccatccttaagggcaaggcaattatagaaggatttgaagcatttgtgcactactggcgacc

SEQ ID NO: 346838 - DNA, 537 bp, Homo sapiens
tgttgtcatggcagggagcacaaaagatcagaaatkcagacagtaaattataaccataaatgcttccttgaaatttttctgtgtatcttgagtacaacagaaggtgaaataattcatatatatatattttttaaatcaaaggtggaaatattgatgtttaactggttagttaaatttcatttatctacttataaacatatgtgtgtgtgtatatatatatatataatcttttgtgtgtctgaaatatcataatgaaaaatgataatgaaataaaaaagagccatgtctgtttagggactcttaaaaagataccactgtaattgtggattgacaataaccacaataaaaagagatagctatgattgattgggtgctttttatagtgtcaggtgctgataattttacatatagtttacataaattttacatacacagtcaaatacatgttgggtagctcatctctcttgtctaagaagtagagctttgactagctagattccatcaaaccacaaacaaaatttaaggattaagaaatac

SEQ ID NO: 346839 - DNA, 537 bp, Homo sapiens
tgttgtcatggcagggagcacaaaagatcagaaatgcagacagtaaattataaccataaatgcttccttgaaatttttctgtgtatcttgagtacaacagaaggtgaaataattcatatatatatattttttaaatcaaaggtggaaatattgatgtttaactggttagttaaatttcatttatctacttataaacatatgtgtgtgtgtatatatatatatataatcttttgtgtgtctgaaatatcataatgaaaaatgataatgaaataaaaaagagccatgtctgtttagggactcttaaaaagataccactgtaatkgtggattgacaataaccacaataaaaagagatagctatgattgattgggtgctttttatagtgtcaggtgctgataattttacatatagtttacataaattttacatacacagtcaaatacatgttgggtagctcatctctcttgtctaagaagtagagctttgactagctagattccatcaaaccacaaacaaaatttaaggattaagaaatac

SEQ ID NO: 346840 - DNA, 537 bp, Homo sapiens
tgttgtcatggcagggagcacaaaagatcagaaatgcagacagtaaattataaccataaatgcttccttgaaatttttctgtgtatcttgagtacaacagaaggtgaaataattcatatatatatattttttaaatcaaaggtggaaatattgatgtttaactggttagttaaatttcatttatctacttataaacatatgtgtgtgtgtatatatatatatataatcttttgtgtgtctgaaatatcataatgaaaaatgataatgaaataaaaaagagccatgtctgtttagggactcttaaaaagataccactgtaattgtggattgacaataaccacaataaaaagagatagctatgattgattgggtgctttttatagtgtcaggtgctgataattttacatatagtttacataaattttacatacacagtcaaatacatgttgggtagctcatctctcttgtctaagaagtagagctttgactagctagaytccatcaaaccacaaacaaaatttaaggattaagaaatac

SEQ ID NO: 346841 - DNA, 533 bp, Homo sapiens
ttggttttatgaaagaaaaaataataatcatggagaagtcatgatgacttttgaagtttctacctgttacttgtactggtatttcatcaactaaagcaagttacatgcctaaggctaacataaatgtgatggggaagtataactctattccaacttgggacaattaatctgtagaaaaaataataccttctatcacaatatattaagacattttatattgytgaacaagtcttacagtcttctaatattcatttcactcatgttaatattaatacattactggacaatgtgctattattttctggatgattttttatctatgtccctaagtgaaactgccctgtatttttaattttggagaagttctgttttctgttttgaagatcaggatcaaactagcctactaaaattcactgaaattttctggtttctaggaaggtttctataaaatttgaatgattgcttctttgaagaaaagtaatgggggctaacgttttcttttgtaaagaatttgaatttcattacctaggtat

SEQ ID NO: 346842 - DNA, 533 bp, Homo sapiens
ttggttttatgaaagaaaaaataataatcatggagaagtcatgatgacttttgaagtttctacctgttacttgtactggtatttcatcaactaaagcaagttacatgcctaaggctaacataaatgtgatggggaagtataactctattccaacttgggacaattaatctgtagaaaaaataataccttctatcacaatatattaagacattttatattgctgaacaagtcttacagtcttctaatattcatttcactcatgttaatattaatacattactggacaatgtgctattattttctggatgattttttatctatgtccctaagtgaaactgycctgtatttttaattttggagaagttctgttttctgttttgaagatcaggatcaaactagcctactaaaattcactgaaattttctggtttctaggaaggtttctataaaatttgaatgattgcttctttgaagaaaagtaatgggggctaacgttttcttttgtaaagaatttgaatttcattacctaggtat

SEQ ID NO: 346843 - DNA, 544 bp, Homo sapiens
tttacatttttggatgtatcttcagttcattagctcartgtaattttaccctttatccttttctgccatttacatctatatattttttcaatttctaatttacctgcattacaaagtgtaatatgctggtagtcatcatttgtggtattgctaaaacattttaattaaaatatttcaattaaaaatgataaagaagtcatatgacttcttatttgacctatatattattgtatttttatagttctgaatatattgaaacttcagttttgttgttgttattgatacaaaatgtaattatattgtgatcataatcaatcatttctataatacaaattctcctatactttagttcatgtaactttggaaaaagttttgtatacgctgaagaaaagtgtgttatttaattggtatatgtgtttatacctatgtctagtaaatcaagcttatcaattatacttataatttgtgtatgatgttttagtcctttgttggtcttttgactttttaactatgacagttgtgttagaatttttcaatataatga

SEQ ID NO: 346844 - DNA, 563 bp, Homo sapiens
ctttcctcttactgattcctttatggtttggtattgattcattaacaattgcaagaattatcttaattcttcctaagcatgtaaaataactacccacaatcattcattcgtctgttcaatattgaatactaaggataagaatattgaatattgttcaatattgaactactaaggataagaatctattcaaaaacaagttctccaggagcttgcatataactaagccaagcaattatttctttttctttttcaatactagtcagaagacatttttctccagccaatattttttgctataaaaattttgttgggaacaattttagacattgtacaaacattccgagaagcaaagctgtgaggacaaaataattaggtcaaaaggtctgctttactacagagcatttgtttagccagagcttgtgataccacagaactttttcatttccaaggcggtataagttcactcagggttccctccccagccatctcacaatgagcagttgttcacagtcaattcctgcccagttmcacttgtagaggcttctgcctctatcacacagtca

SEQ ID NO: 346845 - DNA, 610 bp, Homo sapiens
tctaaatacctagttacacaagaagaaaatgtcttctggatgaattctgaaaatgtgactgcttccagaacattrttaagagttccggctcacggaacaacagatgctcctccatagaggtgtctttttttttttttttttttttttggtaaaaaatattcttcttggtaacttgttatttttgaaccagtttatttcccagaaaatgcctttttcttttgtgcttcttagaaggagaaattgctacacatcggtaggtatgcgtagatctgcatcaaactttattcagattatctcaggctaaacaactttcctttatcctacttctccttaattttccttcaattgtctttaattttgggctaaaatgtttaagtatagaaggatctagatacatttttgacaatgtgaactaaaatcaaacctaaaatttcagcttgtagtgacacatcaagaccaaatataatttaacccactgaagaaagtgacctgacctcaaagattttggtcctaatttcgagtgacctggcctgcaaaagagcatgactttaaatactttctttgtctctgttaatcttaactattgcctggagtttataggagaccaaac

SEQ ID NO: 346846 - DNA, 610 bp, Homo sapiens
tctaaatacctagttacacaagaagaaaatgtcttctggatgaattctgaaaatgtgactgcttccagaacattgttaagagttcckgctcacggaacaacagatgctcctccatagaggtgtctttttttttttttttttttttttggtaaaaaatattcttcttggtaacttgttatttttgaaccagtttatttcccagaaaatgcctttttcttttgtgcttcttagaaggagaaattgctacacatcggtaggtatgcgtagatctgcatcaaactttattcagattatctcaggctaaacaactttcctttatcctacttctccttaattttccttcaattgtctttaattttgggctaaaatgtttaagtatagaaggatctagatacatttttgacaatgtgaactaaaatcaaacctaaaatttcagcttgtagtgacacatcaagaccaaatataatttaacccactgaagaaagtgacctgacctcaaagattttggtcctaatttcgagtgacctggcctgcaaaagagcatgactttaaatactttctttgtctctgttaatcttaactattgcctggagtttataggagaccaaac

SEQ ID NO: 346847 - DNA, 560 bp, Homo sapiens
taattctaggcttagtactggccagatagttgtagcagaaagacatgaatccaagggtattaagagagatttgggtgatctatcatgggtttcaggatgagtggtgatgtaacgtaagacagaagtaaactagtagttcttggagacaaaacccagagttgaaccaaaggtaagggatttttaggatgataagagagcaagaggtatakatgagtcaggtgccagcaccttctataactttgacaagaaacagggagttcaaggttgtataaacagacatcataaacctcataggggaagcgtttagccacaaagattgatgagtaatggcgcattacttttatattgatggtgttacaaatcacagatacttagaggcttgaaacaacacaaacttattatgtgtagtcaaaagttcaaagtcaatttctataggctaaagtgaaggtcttatcagaactgcactccttcttgaggctctaggggaaaatctgtttccttgccttttccactttgtagaggccacctgcatttcttggcccaagggcctttctaccatt

SEQ ID NO: 346848 - DNA, 542 bp, Homo sapiens
ggctaactttttgtattttagtagagacagggtttcaccatgttggccaggatggtcttgatctcctgaccttgtgatccacccgcctcagtcttccaaggtgctgcgattacaggcatgagccactacgcccagccaagaatttttttaaasaagttttgtttgtgaaacagcaatagagaaggctaattttggagtagtaaattgcccaattgtgtgtcagggtcagcatcttactttctctcccactaatttgactgtttggattgtgatgatgtatttgtatcctcccaaattagagggaaaggcctttttttattcttcttccaggacaaaaacttgatttgcaccttgtgccagaatctgggtttctattccaaggggtctgggacctagtgatgaagagacagcatcttttaactcacttctctcttaaaagtcattcttgtatttgaagaatgacttttaaataactaatctattttgattaaattcttaaaactacatttattagcaacaacaggagaacttactattcaatg

SEQ ID NO: 346849 - DNA, 590 bp, Homo sapiens
tcttttaactcacttctctcttaaaagtcattcttgtatttgaagaatgacttttaaataactaatctattttgattaaattcttaaaactacatttattagcaacaacaggagaacttactattcaatgaaatatatcattgttattaaatgactaaatatattgctctttatttatataaatatttgcattgtgtgttaatcttgaggttgagaaaagagttgctagagaaaacagactggcaataggacacagaaagttatagggacaatttcatgttgtgtatagctcacaagtgtattccaacgatgtctctggggtgttgtctgcagttttcatytcatacctagataggaattttaacaagatggatcctgtttattcagtgtcaattcatgatactcattcctcatgcagtctactcagagtttacctgtacaaagaaaataccattgaaatattttcccaagaaaccccaatgtgttaaagtaatcatatgtttaaaatttattttaaacatatgattttacagtgcacacacatacatgcaaacttacctactgcctctgaaacgaaatgccagggaaca

SEQ ID NO: 346850 - DNA, 642 bp, Homo sapiens
ggaaaccataattctcagcaaactaacacaggaacagaaaaccaaacaccatatgttctcactcataagtgggagttgaacaatgagaacacatggacacagggaggggaacatcacacactggggaacatcacacactactcctacaaatacctaatgtagatgacagagtgatgggtgcagcaaaccaccatggcacgtgtatacatatgtaacaaacctgcacgttctccacatgyattctagaacttaaagtataataataataaaaatctatgctatagctaatctatttgaagattaaatgagaaaatttatataaaatgcctgcctggcatatgagacaagctccaaaatatataatcgttcaaaaacaacagaaaattatttctcatttatctaacaatctgagatggtgtagctggttagcaaagataattctccccaactcaattactcagggaactgaattccttccattttgaagctctgcgacccccagggccttatcattgtcatgcattaggttggtgcaaaagtaattgcagatttgccattacttttaatggttaatttttcaacctaatacagccacctgctaaaggaggaaagggaggaaaaagcataattacttattcttag

SEQ ID NO: 346851 - DNA, 603 bp, Homo sapiens
tctatcttttgacagatagatcagcccatacatggaatgtaactgatccctttcaaatgaaaaatcacatttgcaaatttggccactatgacatgtctcagtataggattattgaattaaaaaatgataaagttctcaaargcaaattagtgaaagtatgattaacacaactgaataccatttagcaaataagaaattttataaaaataaaattttttaaaattctaaaattctgaaaaatttctaaccttagtttttttaattgcaaataaaatcatttaaacatgagaatttttctctgctaatttgcaaatgtttttgtccctttcaaaagtgccaagttatatatttgaggctcagagtagtttttgacattgaaaggacttaaaaatctcacaaacattagtaaccacagagtccattcatttactcatcgtccattgactcttcactacgcccttcaaatctcatcccttcacctcaatgatcccaggaattgcctaattctctgtcctgacacatgcctacctcctacgcccagactcacccctaacatgctggcaggaattatgatactagtagggaatctcacagagtcattag

SEQ ID NO: 346852 - DNA, 582 bp, Homo sapiens
attatttctagccctatgtggatatcagtcactattgcattcctctaatcttttcagatgctttctttttctggcttcaagtcattttcttatatacatgtgctgctagttctctgctagagtttctagaaggactctctgccgatctcaggagttctgtctgtgccacactctcctctccttctctgtgtsctgtcccataagatgtagctgcctgatcccccttagactgtcaactctgtcttctcagcagggagcgcaccacgctctgcttgagtttcctccctgatcagtggcctggacactggctcatggcagtgctgggagcagtcattgaaatggcttcatttgcctcactctggacttactgtgcttcatttcctcttgtctcatgtcttgaaaacttttataaatataaattttacctcttggatatttttgttgtttgagataaaagggtaaacccagtgctcattgttttatcttggcaggaagtggaaattgtgtaacacttgttgacttatttccttaggaaagtttgataaatattatagtcagtatacttgcctacattttgtccag

SEQ ID NO: 346853 - DNA, 582 bp, Homo sapiens
attatttctagccctatgtggatatcagtcactattgcattcctctaatcttttcagatgctttctttttctggcttcaagtcattttcttatatacatgtgctgctagttctctgctagagtttctagaaggactctctgccgatctcaggagttctgtctgtgccacactctcctctccttctctgtgtgctgtcccataagatgtagctgcctgatcccccttagactgtcaactctgtcttctcagcagggagcgcaccasgctctgcttgagtttcctccctgatcagtggcctggacactggctcatggcagtgctgggagcagtcattgaaatggcttcatttgcctcactctggacttactgtgcttcatttcctcttgtctcatgtcttgaaaacttttataaatataaattttacctcttggatatttttgttgtttgagataaaagggtaaacccagtgctcattgttttatcttggcaggaagtggaaattgtgtaacacttgttgacttatttccttaggaaagtttgataaatattatagtcagtatacttgcctacattttgtccag

SEQ ID NO: 346854 - DNA, 582 bp, Homo sapiens
attatttctagccctatgtggatatcagtcactattgcattcctctaatcttttcagatgctttctttttctggcttcaagtcattttcttatatacatgtgctgctagttctctgctagagtttctagaaggactctctgccgatctcaggagttctgtctgtgccacactctcctctccttctctgtgtgctgtcccataagatgtagctgcctgatcccccttagactgtcaactctgtcttctcagcagggagcgcaccacgctctgcttgagtttcctccctgatcagtggcctggacactggctcatggcagtgctgggagcagtcattgaaatggcttcatttgcctcactctggacttactgtscttcatttcctcttgtctcatgtcttgaaaacttttataaatataaattttacctcttggatatttttgttgtttgagataaaagggtaaacccagtgctcattgttttatcttggcaggaagtggaaattgtgtaacacttgttgacttatttccttaggaaagtttgataaatattatagtcagtatacttgcctacattttgtccag

SEQ ID NO: 346855 - DNA, 362 bp, Homo sapiens
tgccttttggtacaaggtcctccccaaaaatgtggctgccacagccttattatgtgataactgatctcaaggttgggggaaaaatgttcattcaaatgcaagtcatttaatatctactaagtgtgagaaaaaagacaactgataaaatcttccaaacttccaaaggtttaaattatgggatccaaagtcrggtttggggctgaaattaattttttatggttgttataacaacaaaaataatatttcttatgtggtcactgtgtactataaagtatagtgaattttcaacatgcattatcttgatagttcttcataggacccccgaagcaggtatttttattatttccatgtgatactgcagg

SEQ ID NO: 346856 - DNA, 609 bp, Homo sapiens
aaatggcaaactattgaaataaggtgggtattattttgatattgcattgctttgtatcaattagccacatctttatgataaaggacactgtgaatgtaaaatgttcagaatatttatggtattcatttttaccagtgctgattatacattaggtacagaggtaggtgctgtaattcagcatcatgtcagttttttacttatcctcagtgtctcccccattgaactcaaaatgaacttcaaactctcacaacaatacccggggcstgcatgacacagtggcctgtgcttctccccatctttacctctaccacaatccctcttacttgctgctttccacccaccccagctctcttccagtggctcaaacattccaagatttctgcctgtggtcctctctacctgctgattcttctgcccagaatactagcttcctgtctttttatgagtggttccattacattcctcaatctcagcttaatgtcacatcctcagaaagaccttccctgagtcttctttttaaaatagccacctgtcatctaccctgacgtcacctaccctgatgccacagcatctttttatgtccttcatagaatgtgttatagtgtgttt

SEQ ID NO: 346857 - DNA, 568 bp, Homo sapiens
ggcaagagaatgtaaagacaagccagagactgggataaaatatttgataaaggactcttatccaaaacatacaaagaattctcaaaactcaaaaataagtaaacttaacaacctaatttttaaaaggccgaaagatcttaaaagactcttcaccaaagaagatacacaggtagccaagtaattacatgaaaatatgttccaacttatatatcaccagggaaatgcgaattaaaacaacagtgagatatcctacacacctattaaaatgaccaaaatctataacattgataatatcaaatggkgacacggatgtggagcaacacgtactctcatttactgacagtagaaatgcgaaatgacatatccacttttgaagacagtgtgggagtttcttacaagatatattaatatacctttacctataacccaacaattgtgctttttggtattcacccaaaggagttgaaagctcatgtgtatacacaagccaacacatgaatgtgtatgccaaccagcattttttaatataataaaatagaaatatctataaatgtgtaaaatagtaaaa

SEQ ID NO: 346858 - DNA, 568 bp, Homo sapiens
ggcaagagaatgtaaagacaagccagagactgggataaaatatttgataaaggactcttatccaaaacatacaaagaattctcaaaactcaaaaataagtaaacttaacaacctaatttttaaaaggccgaaagatcttaaaagactcttcaccaaagaagatacacaggtagccaagtaattacatgaaaatatgttccaacttatatatcaccagggaaatgcgaattaaaacaacagtgagatatcctacacacctattaaaatgaccaaaatctataacattgataatatcaaatggggacacggatgtggagcaacacgtactctcatttactgacagtagaaatgcgaaatgacatakccacttttgaagacagtgtgggagtttcttacaagatatattaatatacctttacctataacccaacaattgtgctttttggtattcacccaaaggagttgaaagctcatgtgtatacacaagccaacacatgaatgtgtatgccaaccagcattttttaatataataaaatagaaatatctataaatgtgtaaaatagtaaaa

SEQ ID NO: 346859 - DNA, 568 bp, Homo sapiens
ggcaagagaatgtaaagacaagccagagactgggataaaatatttgataaaggactcttatccaaaacatacaaagaattctcaaaactcaaaaataagtaaacttaacaacctaatttttaaaaggccgaaagatcttaaaagactcttcaccaaagaagatacacaggtagccaagtaattacatgaaaatatgttccaacttatatatcaccagggaaatgcgaattaaaacaacagtgagatatcctacacacctattaaaatgaccaaaatctataacattgataatatcaaatggggacacggatgtggagcaacacgtactctcatttactgacagtagaaatgcgaaatgacatatccacttttgaagacagtgtgggagtttcttacaagatatattaatatacctttacctataacccaacaattgtgctttttggtattcacccaaaggagttgaaagctcatgtstatacacaagccaacacatgaatgtgtatgccaaccagcattttttaatataataaaatagaaatatctataaatgtgtaaaatagtaaaa

SEQ ID NO: 346860 - DNA, 568 bp, Homo sapiens
ggcaagagaatgtaaagacaagccagagactgggataaaatatttgataaaggactcttatccaaaacatacaaagaattctcaaaactcaaaaataagtaaacttaacaacctaatttttaaaaggccgaaagatcttaaaagactcttcaccaaagaagatacacaggtagccaagtaattacatgaaaatatgttccaacttatatatcaccagggaaatgcgaattaaaacaacagtgagatatcctacacacctattaaaatgaccaaaatctataacattgataatatcaaatggggacacggatgtggagcaacacgtactctcatttactgacagtagaaatgcgaaatgacatatccacttttgaagacagtgtgggagtttcttacaagatatattaatatacctttacctataacccaacaattgtgctttttggtattcacccaaaggagttgaaagctcatgtgtatacacaagccaacacatgaatgtktatgccaaccagcattttttaatataataaaatagaaatatctataaatgtgtaaaatagtaaaa

SEQ ID NO: 346861 - DNA, 640 bp, Homo sapiens
atgcataggcattatagtttgcattcatcttttcacaaataattaaaaattattgtgaaaagctcctggcaatgttgtcctgattcacttttgtaaatagacagagaaaattcccttaatgcctagaaagaacttttaagaatgccagacactttcttattgagctttcttgagatataattcatatactatacaactcacctacttaaagtatcagtttcacggttttagtatattatcagagttgtacaaacatcatcacaatctagttttagaacattttyttcacactccccaacctcacccctcactccatccccagcgaaaagaaacccttacttattggcagtcaagaggggtaaattttagcagtgtcctctctttccttaaaaaaaaaaaaaaatcattgaaaggattaagaattacttagctgtttagacacaggagctgaatgtacttttgagggagtagcttgagattgccatctggtgcccaaagcagtcccctgtacagtgtgtttgtccataagggtctctgaaccatcaatcagtgctcacagtcatgaacacgaacatatttactacgtgcctggcactgtaagtggttgcatgtatataactcacttaattcacctgacaac

SEQ ID NO: 346862 - DNA, 517 bp, Homo sapiens
ctcatttgtgagagctaaaaattaaaacaattgaactcatagagagtagaatgatcgttaccagttgctggggagggtaatgaacaggttacaggggatgtaagaaatggtaatgggttaaaaaaatagttacaatgaataaataagacctagtatttgatagcacaataggataactatagccaataacaatttaatcgtgcatgtgaaaataactaaaagaacataatattgtttataatacaaaggataaatccttgaggttatggataccccatttactctgatatgcttgttacagttgggcctatataaaatatcccatataccgcataaatatatacacctactatgtactcacaattttttaaaaagacatgaatgayctttcacagaaaacagaaaaaacaaaaagaatctcaattttatcattattcatggaaataaacattaagtccaaaatgaagaatcatttctatcctcaagtctgcagaaattaaaatttcaaccatattaa

SEQ ID NO: 346863 - DNA, 521 bp, Homo sapiens
tgggggtgataatagtaaatgtcacattgtaaaaaaagaaaaaacaacaacaacaacaamaaaacacaatagaaacaaaaaacttttaagtatgtcttctaagtaatactagttacttggaagagaaagtgttttaatttgatttatgactaattttttggaaaattaatgtaaatattaaagcatcgtttccgtaataaataatgatgaaaagtacacaactagactgatatttatgctcacagggggtgattttgtacataaaagtacagaatgttaatgctcaactctgacattttggagcacagcttccaaatgttgtgtgaggcatgtcttatctttagattaatgtgtgatatgaaaggaggggcagaaatgtctctcaagtgtgaaagtcagaatcctttcctggtacgtagtgctctgccatactgtgagaataaaatcctttttatgtgatatataatacgatttttaaaataagacattgggtataggcaaaaagacacaaagggttttta

SEQ ID NO: 346864 - DNA, 521 bp, Homo sapiens
tgggggtgataatagtaaatgtcacattgtaaaaaaagaaaaaacaacaacaacaacaacaaaacacaatagaaacaaaaaacttttaagtatgtcttctaagtaatactagttacttggaagagaaagtgttttaatttgatttatgactaattttttggaaaattaatgtaaatattaaagcatcrtttccgtaataaataatgatgaaaagtacacaactagactgatatttatgctcacagggggtgattttgtacataaaagtacagaatgttaatgctcaactctgacattttggagcacagcttccaaatgttgtgtgaggcatgtcttatctttagattaatgtgtgatatgaaaggaggggcagaaatgtctctcaagtgtgaaagtcagaatcctttcctggtacgtagtgctctgccatactgtgagaataaaatcctttttatgtgatatataatacgatttttaaaataagacattgggtataggcaaaaagacacaaagggttttta

SEQ ID NO: 346865 - DNA, 601 bp, Homo sapiens
cctggtatgaaacccacttgattgtaggtagtggattatctttttgatatattgttggatttggtaagctagtattttcttaaggattttagcatctatattcatcaaggatattggtctgtacttttcttttttggttatgtcctttcctggttttggtttagcgtgatgctggcttcacagaatgaattatggaaggttccttccttctctgtcttgtggaatagtgtcaaaaggattggtaccaattcttctttgaatgtctgatagaattctgctgtgaatctttctggtcctgsacattttttggttggtaatttttaaattaccctttcaatctcactgcttgttattgctgtatttggggtgtctaattcttcctgatttaagctaggagggttgtatttttccaggaatttatccgtctcgtctaggttttctagtttatgtgcataaaggtgttcattgtagccttgaatggtcttttgtatttcagtggtatcagttgtaatatcttctatttcatttgttagtgaggttatttggattatctctcttcttttcttggttaatcttactaatggtctatcaattttattta

SEQ ID NO: 346866 - DNA, 575 bp, Homo sapiens
caactgccatgctatcagtccccaggagagcagcttctcctgctgacaattagtagtttttctacataggcactctgccttgtaacattagctcatctattctcttggacttaaacaggaggacctgcctctgtgcgacatcagttcagaagcagatgctagtgtttctgatgtatttgcaaggaaaatgagtgagattcatcagaatgtcagatgatgcactaaagaktgttatatagctgtcactgctattagtgtaaaggtgtgccttcccatttcttaataatggtagtttatgaaaggaataaagaaatactgcactttttatctacccccctgaaagacattaggtacttagacacatggaggaattattaaaataaaatggttctaattatatagcaacctgtaattacatattgcaattatgcaggggcagttcaggtgtgactcattatttcactaatgcttctgtgttattttttctattgatggtgggaactcttccaatagtggcaagaaaagtgggggagagaagaaatctctgacaactttttttttaatgaaacaattta

SEQ ID NO: 346867 - DNA, 535 bp, Homo sapiens
gtagagggagcctactttaggagggctttagtgccacacagaaatacaagcatcttccttaaaggaatttgatctcatttatctttttatactcattaacacattccgtcttctcagagataatctaggagttactggaggatttgtagtaaagacatgatcttgctaattacatatgaattgatttaataaccactaactcagagggaaagtcagagcacagaagatgactattagctttatatttaacagggcgataagtataggcaagaaaaactccagggtaaggtctccagggcaacttagtttgattatatgtcaagtagaagttcattaaaaagtaattgtccaaaggcatcttagacatcctgagacagatgtttacaaattctgagtcccttcaattataggaagacgagtacacattgacaatactttatttctaacatcatttacagggataagtatttyaataaaatgagacatttttgccagaatacatattgactacatctcttacagcacttaccatttt

SEQ ID NO: 346868 - DNA, 599 bp, Homo sapiens
gtgggaagagactcactctgccccttcattgtcagttgatagtcctgaagctgcaatctcctgtttgccttttgttcagtgaattatagatttttttgttaattaaaacggtgaaaagtggcttcattaagatgtgctatccacagacttctctgtccaatttgaagaagaaagcaggattttaatggatatttattgcctgaaaaataataaaactagaatcataaagaaagcaaagaagaaagaactggaaggaacatgggattggagcttatggcttcatctctgacatttagtcttgtgtggcccagaggttgccataaaatgtcaccaaagatcaagttgggattaaaatgagtgaggcaggcctggtggggaagactgtgaaaaattcagtattctaagataacttgatttttcaaggaaagccaaaaatatagatttatgcaaaagtgcccaatttttgaaygttgaagactaaatttaactaaaactaaaatgcattaaaggcaaaacaaaacatatctgcagctgcattctgcccataggcccctaggataggactgatagtattttcaggcttcattttcttagcaatt

SEQ ID NO: 346869 - DNA, 247 bp, Homo sapiens
tgactattatctcttacctggactatcacaatagtttcttattctttatgcttgccttcaaccttgccccacctccaattcattcaccacactgcagcaagcctgtgcattctgttagcaatggaaagactagggagggaaggatgtagttattactcctcacataattacttttytagaacgtgaatatactcaactttacatctgtcatgcacatctattttcctatgagggtagaaatgatctc

SEQ ID NO: 346870 - DNA, 521 bp, Homo sapiens
gtattgttttgtccaggacttttaatggtaatcagtagaaaggatagagtagagtatgctcactctttcttaacaactagaacatctattgcatgttcttttattcaaatcaaaatgaaacattatataacaaacttgctctgttcataattgattcataaacaacaacaaagaactcaaaaagtttattggttttttaaaggccaaaaagccccaatattgttgtaaatatgctcatacaytgaatgtaatgtattagaatactatttcctctgtatcatccttcatgttttgtaccatatattcttttcaaagttaaatatccaatttttttagctcagaaaaatattttgatttggttagtataaaaaatgtggaataagttatatatatctaacaaaattaaaactttggttgatagtaccaaagcctcacattagacagtgcttgaaggatacttattattactccacttctgcttgttattaagcaaagagtgttttagtaaaaaagttgttaaa

SEQ ID NO: 346871 - DNA, 566 bp, Homo sapiens
agttcaaaacttctttacatgaattaggctattttaaatgatttctttctaaatgcaacttttacataaaaagcaattacacaatttaaaaaaatgtactggcaaggcaatttaagtataataaggagaaagttggcactgtaagaaatacatgcaggatatataggacccacatttctaagaatttctaatttctgtattgttatgttttttatgtaatcattgggggaaattcatgatatggggtatgctgtagagtggtttttgtagtacaaagcaaacaccttggtgcacaattgaaaatggttgagtgaagtcatgggaaattaggggattactgcttctatgatttcacctttcatattgacaacgcagcaggttatactaacaggaatagaattatgcaacacttattaggcaagcaaagtggggaacatcaagcttaataagaaaaaacaaatatttagctttctgaaygaaggcattttgacacaactttgcaattacagagtgctaagagtggacacttagtctcttcctttcaatttgagactttacagtagttc

SEQ ID NO: 346872 - DNA, 559 bp, Homo sapiens
atatcacacaccggggcctgttgrggggtgggaggctagggaagggatagcattaggagaaatacctaatgtagatgatgggttgatcggttcagcaaaccaccatgtcacgtgtatacccatgtagcaaacctgcacactctgcacatgtacccaagaacttaaagtataataataaaaaaatacaaatctcactcaattgttatttaacaggaaagacaaaataggtgccgagaccagctcggtcggggagaccctaacccagcggcactagaggaatgacagacacacatacagaaatatagaggtgtgaagtgggaaatcaggggtctcacagccttcagagctgagagcccggaacagagatttacccacgtatttattaacagcaagccagtcattagcattgtttctatagatatttgattaactaaaattatcctttatgggaaacgaaaggatgggccaaaacaaaggggtgggtcttgctagttatctgcagcaggaacatgccattaaggcacagatcgctcatgctattgtttgtggtttaagaact

SEQ ID NO: 346873 - DNA, 559 bp, Homo sapiens
atatcacacaccggggcctgttgaggggtgggaggctagggaagggatagcattaggagaaatacctaatgtagatgatgggttgatcggttcagcaaaccaccatgtcacgtgtatacccatgtagcaaacctgcacactctgcacatgtacccaagaacttaaagtataataataaaaaaatacaaatctcactcaattgttatttaacaggaaagacaaaataggtgcygagaccagctcggtcggggagaccctaacccagcggcactagaggaatgacagacacacatacagaaatatagaggtgtgaagtgggaaatcaggggtctcacagccttcagagctgagagcccggaacagagatttacccacgtatttattaacagcaagccagtcattagcattgtttctatagatatttgattaactaaaattatcctttatgggaaacgaaaggatgggccaaaacaaaggggtgggtcttgctagttatctgcagcaggaacatgccattaaggcacagatcgctcatgctattgtttgtggtttaagaact

SEQ ID NO: 346874 - DNA, 559 bp, Homo sapiens
atatcacacaccggggcctgttgaggggtgggaggctagggaagggatagcattaggagaaatacctaatgtagatgatgggttgatcggttcagcaaaccaccatgtcacgtgtatacccatgtagcaaacctgcacactctgcacatgtacccaagaacttaaagtataataataaaaaaatacaaatctcactcaattgttatttaacaggaaagacaaaataggtgccgagaccagctcggtcggggagaccctaacccagcggcactagaggaatgacagacacacatacagaaatatagaggtgtgaagtgggaaatcaggggtctcacagccttcagagctgagagcccggaacagagatttacccacgtatttattaacagcaagccagtcattagcattgtttctatagatatttgattaactaaaattatcctttatgggaaacgaaaggatgggccaaaacaaaggggtgggtctkgctagttatctgcagcaggaacatgccattaaggcacagatcgctcatgctattgtttgtggtttaagaact

SEQ ID NO: 346875 - DNA, 567 bp, Homo sapiens
gtttatatgtaccaggtaggtattgaggatgctgtggcgatcaaaatagacattttaaaaatcctcaaaaaacttactgttcagaagtagatctacacacgccagacttccaacaaacaatgtctctcagtcagtccattggcctggttcatgatccaagcaaaatggctttgtgcttgatctgggtgcaaaaatactccaattttaccttgaactacaaagtttctggactttgtacattcaaatgtaatttccggcctaagcaaagtaacagaattgcaggtgtttagcagctgggtgcccaagtgtgcactgtttcagcttgactttttattatacaagtgcatgcacaatatttgctacttctgtacaagcgggcagggttcaccaggtgttatattaaattattgattcctagtctaggtatrcagcactgggtttactttcctaaagtccgcacgtcattaagcctcacaagaggaaagtatgttgaaatcaaatttagaggcatatggcttgccacaggcttcagtattaccctctctgcctggtcccattgcgacactg

SEQ ID NO: 346876 - DNA, 567 bp, Homo sapiens
gtttatatgtaccaggtaggtattgaggatgctgtggcgatcaaaatagacattttaaaaatcctcaaaaaacttactgttcagaagtagatctacacacgccagacttccaacaaacaatgtctctcagtcagtccattggcctggttcatgatccaagcaaaatggctttgtgcttgatctgggtgcaaaaatactccaattttaccttgaactacaaagtttctggactttgtacattcaaatgtaatttccggcctaagcaaagtaacagaattgcaggtgtttagcagctgggtgcccaagtgtgcactgtttcagcttgactttttattatacaagtgcatgcacaatatttgctacttctgtacaagcgggcagggttcaccaggtgttatattaaattattgattcctagtctaggtatgcagcactgggtttactttcytaaagtccgcacgtcattaagcctcacaagaggaaagtatgttgaaatcaaatttagaggcatatggcttgccacaggcttcagtattaccctctctgcctggtcccattgcgacactg

SEQ ID NO: 346877 - DNA, 567 bp, Homo sapiens
gtttatatgtaccaggtaggtattgaggatgctgtggcgatcaaaatagacattttaaaaatcctcaaaaaacttactgttcagaagtagatctacacacgccagacttccaacaaacaatgtctctcagtcagtccattggcctggttcatgatccaagcaaaatggctttgtgcttgatctgggtgcaaaaatactccaattttaccttgaactacaaagtttctggactttgtacattcaaatgtaatttccggcctaagcaaagtaacagaattgcaggtgtttagcagctgggtgcccaagtgtgcactgtttcagcttgactttttattatacaagtgcatgcacaatatttgctacttctgtacaagcgggcagggttcaccaggtgttatattaaattattgattcctagtctaggtatgcagcactgggtttactttcctaaagtccgcacgtcattaagcctcacaagaggaaagtatgttgaaatcaaatttagaggmatatggcttgccacaggcttcagtattaccctctctgcctggtcccattgcgacactg

SEQ ID NO: 346878 - DNA, 360 bp, Homo sapiens
aacgatgacaccatgttctataccacaagcccaagagagtctggaagctattttttttttttaaagagaatcttctctatacaaaaacatggagctgaatggggaaatggagattaaaagtatttaatagatttaagtgggtctaaatatgctacaagggaaatcaagacaaactaactaaaactcagggaaaattcaaataatgatcattgaaaacaaacaatgatagcatgataaatagccatagatttgaaagggtgtgtgrgtgggagggagagattaaaaatgttgatgtataggtacaaacctataggtagatagaggaaataaataatagtgatcaatagcagactacagtga

SEQ ID NO: 346879 - DNA, 620 bp, Homo sapiens
cttcttacatgagtactaatttcattatgatggccccaccttcataaccccatccaaccataatcaaaggcccaaactccaaataccatcacattgtgtgttgtagtttcaatgtatgcattttaggggaacacaagcattcagttcacaatgagacttgtatgaggataggagtatcactattccaggaaaataaacatgcattagaaatcatccctttccttatggatcctgtaactaacataagcttatgaacaaacacatgaaataaaaaataaaataagattttaaaygatgctaaaatagcagattgcaaaacatagtcattcaaacagtgaatgaatgaatggataaattttgaaggtatatatatataatgtttattaatttataaatctataataatcagtaaaatacatgtattttatgataaacatgaaatatatagaatatggtaaatatatatatttatttactttgattttatagaaaacatatgtgctatatgactttgtggaagaaataagagatacattgagtcttacatcacgaagagtagaattaatgctagtttagaatccaaatcagttttattaccaatatgtatcacaagtagagac

SEQ ID NO: 346880 - DNA, 620 bp, Homo sapiens
cttcttacatgagtactaatttcattatgatggccccaccttcataaccccatccaaccataatcaaaggcccaaactccaaataccatcacattgtgtgttgtagtttcaatgtatgcattttaggggaacacaagcattcagttcacaatgagacttgtatgaggataggagtatcactattccaggaaaataaacatgcattagaaatcatccctttccttatggatcctgtaactaacataagcttatgaacaaacacatgaaataaaaaataaaataagattttaaacgatgctaaaatagcagattgcaaaacatagtcattcaaacagtgaatgaatgaatggataaattttgaaggtatatatatataaygtttattaatttataaatctataataatcagtaaaatacatgtattttatgataaacatgaaatatatagaatatggtaaatatatatatttatttactttgattttatagaaaacatatgtgctatatgactttgtggaagaaataagagatacattgagtcttacatcacgaagagtagaattaatgctagtttagaatccaaatcagttttattaccaatatgtatcacaagtagagac

SEQ ID NO: 346881 - DNA, 497 bp, Homo sapiens
gaaagagtgaaggaaagagatatatgctttgagatgagkgagcaagagaaaatgtagatgatggatattagtggcctccctaggaaatggcaggatctgtgacatatgtgaagtggaatttgtggtggaagttgtggctagggtgtgtggcatgtttttagctgagcttgtatattcaatcatgggaatgtaactactgagcttagtagcagtaagtactaagttctaaaagcctcctaaaattttccttctgtttaagaacaatgttacttttgcaccaaagaaagtagactgggatgattgagactgtctacagtctaaccaaataaaattcaagctaaatctagcctagttgaaataaaataatacaatttttcttgaatgctggtgtgtcaacaagtgacgttgtgcaacatataaaatgccccaaataaatgaccaaccaaaagtatttgacttaaactgaattaaacttgaatggaattgaatgtgttcag

SEQ ID NO: 346882 - DNA, 604 bp, Homo sapiens
agtttgtgaaaattcatcaaactgtatatctatgccatttgcagtttgagatttgtatggtttacttcatttccaagtaagaaaaaaaaaagaaatttaaattagttgcctaaaataaattaagtcatctgaatcctagttgaattttctttacagtgcacaattctgtttttgtattgtatattataaacctatatctgtaaaataatagaaataacttaaayatggcaaagctttagacaaaatgaagttctaatcaaatatattttcaaataattttatatattgccccgaagtcagtcctttcttgatactaatttcaaaagttataaatgatataatgaaaataaatattgtaacctgaaaagttaatatttctttttgcgtaatctcattagctctgtccaggtagaataatggggaatctcaaaacacaatggagtgtgtattaaatgcaaaattccatctaggggccaaattaggcacctataataaaccaattgcctacatctagcctactctatacaaatatcataattctctagatatttatgtgaaattacagacaatatatcaaatgacaagcaataaacgcatataatta

SEQ ID NO: 346883 - DNA, 604 bp, Homo sapiens
agtttgtgaaaattcatcaaactgtatatctatgccatttgcagtttgagatttgtatggtttacttcatttccaagtaagaaaaaaaaaagaaatttaaattagttgcctaaaataaattaagtcatctgaatcctagttgaattttctttacagtgcacaattctgtttttgtattgtatattataaacctatatctgtaaaataatagaaataacttaaatatggcaaagctttagacaaaatgaagttctaatcaaatatattttcaaataattttatatattgccccgaagtcagtcctttcttgatactaatttcaaaagttataaatgatataatgaaaataaatattgtaacctgaaaagttaatatttctttttgcgtaatctcattagctctgtccaggtagaataatggggaatctcaaaacacaatggagtgtgtattaaatgcaaaattccatytaggggccaaattaggcacctataataaaccaattgcctacatctagcctactctatacaaatatcataattctctagatatttatgtgaaattacagacaatatatcaaatgacaagcaataaacgcatataatta

SEQ ID NO: 346884 - DNA, 559 bp, Homo sapiens
agaattagacatatatatgtaaaggagaagtaaaccaaactttaaaaaacctttctatgttaattttggaaataatttgtgcatacatgttatgctgtttaatgtgattaactgtttaaaggaatctagcatattagacttgctaactccaatttaaatttaaaatgtattattgataatttgaatatagacttgaggaagtatgctaaaagattaaatgtacatttattaatcctataaaaagcttaaaatgtgtataataagtttgactttatatgtttagctcattaaattaacaaaatagtttatttgaaaaagttttgtttctattggggtagatataactaaaagtgatgcaggatkttttgctccttaatacagctaaaatctgggatcttgtctcacgacctggaaaaattaggcacacaaacacattgaaaggtgaacagggcacagtattaaaagaaagctttcagcaaaaaaagggggggccctgccaacaggctcccatctcatggattgaatacgaggccacaccacaagagctgaagaggccagg

SEQ ID NO: 346885 - DNA, 628 bp, Homo sapiens
gattttgaaagtaggaatattcaattgtctttatgtattacaaaagtacttgagtaaaatttgtacaagttttaattttgaacggatttagcctgccgaaagaaagttaactcaaatgtacgctctcaccccgccaacagacaaattgtttgacaagttgagtttagttatttggtatattccatctacaacgacagtcttccaaatttataccttttgttttgggcatagatcataacaaattattttaattttttcccgatagtaactatacagtggtttttgtatattttgtatatttcggaccatcactgtgctatgggattaaaactatggcatcaacgtagaagaaaatgatcatcttattccagtcttcctcagtcaccttcttccacaatactttgtgaaaactcggtatgccagacccagatgcagcacagataaggctaatcacataaacgagaaaataaaacctattccctcttatcctagttcctaatgaattgacaaaagaagaaaaagcaagagtaacatgtgcctcacygcccccacaacactcctcaagttgaaagcccaggaaagggtagaattcagtgtgggaagcaacgaaagaagggcttttaagaat

SEQ ID NO: 346886 - DNA, 533 bp, Homo sapiens
ccagactgtacttctggcagcctttgaatagagccaacggctctctctaaggcctaaacccactcaatgtttgcccgtggtcacatctgagctctcaggggacatcgggccagggcagaggaaactgagtcttgagaaggatcacaccatcattcaatgagtcatgagactttcarccagtattcacagttggctgttaagcaggataataaagaggggaaaatattttggataaagacataccgctcaacttcttggaaggaaatggactccaaggtcatagtaagtagtcattacgggaccacacttatttactaaagggagcttttacctgtaggatagtgttcttaaatactgtatattagtgtgtgtttctcatttgcacttatgcatatttcatattttttctaatcaaaatgaggcatccttccacttcagtgggaattttcactgttacaacagaaatgcaaaaagaaagaataagctaatattaatcatcaccaaaactagattaatgcagagaagataagcat

SEQ ID NO: 346887 - DNA, 533 bp, Homo sapiens
ccagactgtacttctggcagcctttgaatagagccaacggctctctctaaggcctaaacccactcaatgtttgcccgtggtcacatctgagctctcaggggacatcgggccagggcagaggaaactgagtcttgagaaggatcacaccatcattcaatgagtcatgagactttcaaccagtatkcacagttggctgttaagcaggataataaagaggggaaaatattttggataaagacataccgctcaacttcttggaaggaaatggactccaaggtcatagtaagtagtcattacgggaccacacttatttactaaagggagcttttacctgtaggatagtgttcttaaatactgtatattagtgtgtgtttctcatttgcacttatgcatatttcatattttttctaatcaaaatgaggcatccttccacttcagtgggaattttcactgttacaacagaaatgcaaaaagaaagaataagctaatattaatcatcaccaaaactagattaatgcagagaagataagcat

SEQ ID NO: 346888 - DNA, 524 bp, Homo sapiens
atccttaattcatattgcttaacaaatatcttaagttttgctccacttaaaagaaaataaaaccagaaatagctggttactcaatcagaagacttgttaattctttggcaccttaagaaaagactgaatgaatgaacacttatattttaacataacatacaatattaacagcatgcacattacatcttttactatacctccatgaacagatgattttttagttgacagaatactggttatattcataaaagaatttaaccaagcacacaagcaaggagaagtcaagttttaatatttcttatgagttttatacatatatatacctcaataaagagtacartatgcttgctctctgcttagccattccactttgatgcaaatttcttctataagctgatcctaatggtgacaaaaatatgtaaagataaatagtggcaaaatagctaacactactttctttttaatttgcatttgttttaagctttcaaaatgtagtctttcaagtctaagaaagagacaggatt

SEQ ID NO: 346889 - DNA, 524 bp, Homo sapiens
atccttaattcatattgcttaacaaatatcttaagttttgctccacttaaaagaaaataaaaccagaaatagctggttactcaatcagaagacttgttaattctttggcaccttaagaaaagactgaatgaatgaacacttatattttaacataacatacaatattaacagcatgcacattacatcttttactatacctccatgaacagatgattttttagttgacagaatactggttatattcataaaagaatttaaccaagcacacaagcaaggagaagtcaagttttaatatttcttatgagttttatacatatatatacctcaataaagagtacagtatgcttgctctctgcttagccattccactttgatgcaaatttcytctataagctgatcctaatggtgacaaaaatatgtaaagataaatagtggcaaaatagctaacactactttctttttaatttgcatttgttttaagctttcaaaatgtagtctttcaagtctaagaaagagacaggatt

SEQ ID NO: 346890 - DNA, 702 bp, Homo sapiens
acatcttttactatacctccatgaacagatgattttttagttgacagaatactggttatattcataaaagaatttaaccaagcacacaagcaaggagaagtcaagttttaatatttcttatgagttttatacatatatatacctcaataaagagtacagtatgcttgctctctgcttagccattccactttgatgcaaatttcttctataagctgatcctaatggtgacaaaaatatgtaaagataaatagtggcaaaatagctaacactactttctttttaatttgcatttgttttaagctttcaaaatgtagtctttcaagtctaagaaagagacaggattaaaacagcaagtaaaagaragtgaatgatattctaaatatgtggaagtgctagagttaaaactttaaattcctgcattcttttgagaattttcagctattatgtatatgtttgtgggaataagagagacttgtatatatgaacaacacattgtgtagtccccagatttttctagtaagcttacatctaagaaaagaaaaagaagctgtagcacacacaaaaaatgagatcagtattctcaatgctaattatataggaatgaagaattcttatgcttcttatataggaatgcttcttatataggaatgaagaattcttatgcagaaacagtctatggagcctatgtttcttagccaaaag

SEQ ID NO: 346891 - DNA, 630 bp, Homo sapiens
tataatagcatggcatgatattacatgtaatataaataaaaataaatgctctagtttgaaatgagctgtcatagggatgtaagtcacatggtaataaaagtactcaaaagactggatggctatctgttaggaattctgtagaaggaatacttttgcctaggacctattatttcctaataatagcaatgataatttattgagtgcttaccatattagttttttgcatttataaatatattattttctccattttacatttagataactgagactcagagaagtttaagtcacttgctctaggtcacagaaccaaatrtgtagtaattatttattaaatgaatgaatgccttggatactttacagactaaaaatcctgtaaaatatttaccaattcttagaatccaatctgtactgataattatcatatttgcgacagaacatgatttttcaaataggctttctagctttacaaaaatttatactttatatgaagaaaacttcctcaatctaaaaggtacaactcattttttcatgtctcatttcagttagtagcatattctccactaattttgtccatgtgacctttggattttgtaatgaagaaagcaaggagaaaatgttttgatggca

SEQ ID NO: 346892 - DNA, 630 bp, Homo sapiens
tataatagcatggcatgatattacatgtaatataaataaaaataaatgctctagtttgaaatgagctgtcatagggatgtaagtcacatggtaataaaagtactcaaaagactggatggctatctgttaggaattctgtagaaggaatacttttgcctaggacctattatttcctaataatagcaatgataatttattgagtgcttaccatattagttttttgcatttataaatatattattttctccattttacatttagataactgagactcagagaagtttaagtcacttgctctaggtcacagaaccaaatatgtagtaattatttattaaatgaatgaatgccttggmtactttacagactaaaaatcctgtaaaatatttaccaattcttagaatccaatctgtactgataattatcatatttgcgacagaacatgatttttcaaataggctttctagctttacaaaaatttatactttatatgaagaaaacttcctcaatctaaaaggtacaactcattttttcatgtctcatttcagttagtagcatattctccactaattttgtccatgtgacctttggattttgtaatgaagaaagcaaggagaaaatgttttgatggca

SEQ ID NO: 346893 - DNA, 630 bp, Homo sapiens
tataatagcatggcatgatattacatgtaatataaataaaaataaatgctctagtttgaaatgagctgtcatagggatgtaagtcacatggtaataaaagtactcaaaagactggatggctatctgttaggaattctgtagaaggaatacttttgcctaggacctattatttcctaataatagcaatgataatttattgagtgcttaccatattagttttttgcatttataaatatattattttctccattttacatttagataactgagactcagagaagtttaagtcacttgctctaggtcacagaaccaaatatgtagtaattatttattaaatgaatgaatgccttggatactttacagactaaaaatcctgtaaaatatttaccaattcttagaatccaatctgtactgataattatcatatttgcgacrgaacatgatttttcaaataggctttctagctttacaaaaatttatactttatatgaagaaaacttcctcaatctaaaaggtacaactcattttttcatgtctcatttcagttagtagcatattctccactaattttgtccatgtgacctttggattttgtaatgaagaaagcaaggagaaaatgttttgatggca

SEQ ID NO: 346894 - DNA, 585 bp, Homo sapiens
ttaaggttacatagctagtaaatttctaaactgggatcacaagtgccatatatcttttgccaaaactcatgctattttcagtacaacatgagtccacttaataaaataaaaacttttaaaaagcatttggaacacataacactataagttttaattattaagaaaattaatttatgtggaaaatttcttttctcattagtgttgctatttgacacaagttttcaactagtctttgagtagtttcttactgcatcaataagcttaggtagttgaaacaatttctgaaatatttttatttgtataatcctaaaaatacataacatattataatgctcaagtatatttacctatccagaatattcaatttcctgcctatattaaatagtacattattttcttttttttttcttttagaggaagggtcttgctctgttgcccaggctggagtgcagtggtgagattatagctcaagtgatccatctgccscagctccctgagtagctgtgacaacagagatgcaccaccacacctggctaatttttaaaagttttttttttttttggtagggatgggatcttgctatgt

SEQ ID NO: 346895 - DNA, 568 bp, Homo sapiens
gaaataataataggtagttagtaaatgagaatttctttccccttctgtgctcttgcaaagttagtttttaaattaatatcctatgaatttttgattcctggtcattcctgtgacccatgattttataatattaaatcatsaaccataactttaaaaaaacagaaaagagaattacacatccaaattcttcttatgaagtttcaaaatctaaaccttattcagtgcactaaggatttttctattactgattttaatgattacccacaggatgtataagatgcaagatgcaatgtagtggaaggtctttccacaaaacactttctaggagatttgaatggcatgaaactacatttaaggtgctgccttgttccctgagataaaattcagcattgccatttcctggtctttggccaacagtggcagagttaggtgatagaaaccatatattgggtgggggaataggaaaggagaggaggcttgtatgctatctttcatttggagctttgagaggaggagtgctccatgaccacgtggagtgatgctattagatagaaacagtgacattgtg

SEQ ID NO: 346896 - DNA, 550 bp, Homo sapiens
ctatttacaggacaaaaaaatatggatttcatggaggaatggcaaggaataatttagtgttataatagatttaaaatatttgcatgtcacttaatctatggtcatgaatctatttccaagtgcttatttatagccataaatattktagttcattatcaaactgacacttcgctgagattcttcggacatgtggctgaattcatgtattttatcattttaatatgatatttaatattaattcatgtactttatcattttaacacaactggattaaagatagtgatttaaaatatggaatataaaactaagttccattgtttgtttacttctccccttttttcttcgctattaagaaattgatttgatttgggaacatattgtcatgttcagccttgacttatattcaggaaaaaagatccttagcctgaacaactcaaatattttcttgtctgccttgcatggaccctggcacttagacaatagcaaaattcgattgtgtaaagtataaatttgggaaaaacatcaaactctagagactctcctagaagta

SEQ ID NO: 346897 - DNA, 550 bp, Homo sapiens
ctatttacaggacaaaaaaatatggatttcatggaggaatggcaaggaataatttagtgttataatagatttaaaatatttgcatgtcacttaatctatggtcatgaatctatttccaagtgcttatttatagccataaatattttagytcattatcaaactgacacttcgctgagattcttcggacatgtggctgaattcatgtattttatcattttaatatgatatttaatattaattcatgtactttatcattttaacacaactggattaaagatagtgatttaaaatatggaatataaaactaagttccattgtttgtttacttctccccttttttcttcgctattaagaaattgatttgatttgggaacatattgtcatgttcagccttgacttatattcaggaaaaaagatccttagcctgaacaactcaaatattttcttgtctgccttgcatggaccctggcacttagacaatagcaaaattcgattgtgtaaagtataaatttgggaaaaacatcaaactctagagactctcctagaagta

SEQ ID NO: 346898 - DNA, 550 bp, Homo sapiens
ctatttacaggacaaaaaaatatggatttcatggaggaatggcaaggaataatttagtgttataatagatttaaaatatttgcatgtcacttaatctatggtcatgaatctatttccaagtgcttatttatagccataaatattttagttcattatcaaactgacacttcgctgagattcttcggacatgtggctgaattcatgtattttatcattttaatatgatatttaatatkaattcatgtactttatcattttaacacaactggattaaagatagtgatttaaaatatggaatataaaactaagttccattgtttgtttacttctccccttttttcttcgctattaagaaattgatttgatttgggaacatattgtcatgttcagccttgacttatattcaggaaaaaagatccttagcctgaacaactcaaatattttcttgtctgccttgcatggaccctggcacttagacaatagcaaaattcgattgtgtaaagtataaatttgggaaaaacatcaaactctagagactctcctagaagta

SEQ ID NO: 346899 - DNA, 631 bp, Homo sapiens
tgaatggttgttgccagaggcagagaggaagtataaaagcagagttgttcaatgggtatagtgtttcagtcatgcaagatgaaaagttccagagagctattgcacaaaattgttcatatggttaacactactgtattgtacacttaaaaatagttaagatagtaaattgtatgtttttaccaccatagaaaaaagctctgaacttgccttttggaataaaaatgtgaaattctatatgaaatgcctttactatagtaagaaacacaaaataactcctctgaattattttacctctgcctgcttttcaagtatacagtatttcctgagatattattgaaggtcaatgggaaagaataatacagagaaaaataaagtttgtcttgcttcaaaactgtggagtgaagattaattagaaaaaaaatcaaagggtcatagaagaaatacatatgttatggaatattttttcagttctctggagcccagctaaaaatttatttcttctaggacatgccaggagaacaaaaagaaaataattgaaatggaaacaatcaaatagatcctatagggactgagatttatatttaatgatgttaactsttggtctctttcttatctaaaagcattgtaggga

SEQ ID NO: 346900 - DNA, 605 bp, Homo sapiens
ggtgttttttaaaattaaaatattgttttatggtttaactgacactttttaactcaagaagaaagtaaaaagaaaatctggtcttttttacttttctgaagcaagaggtgaaagatatcctctctaaatgagatattaacttttccttcagaataccttatcagtgtaccataatgctacgcagtatactatagatatagcaattttagctaaactatttctaactaacatttcttttaaaaatttagaaactatcaaccaaacttagtaattagtagaacttccaaccagatgyattgattctatatttcaaaaatagagctaagtaacagaagttatctgtgataattaaaattaatatttatcattatgttgtcagaatatgatgtattctgatatcatactcaggtatgtaacatattcatacagaatatgatgtataacttagaagcaagtttctttactcctactgaaaattatctgttaacctcattatttaacaaatataaaacttaagggacatatgggttttacatatatttcatattgacccagaatcataattacagaatatttaataaaatatattctgatctggagggata

SEQ ID NO: 346901 - DNA, 552 bp, Homo sapiens
aataacacttcatatgctaccaattcatttcacatccattactacatttattccttacaatagccctgtgaggtattatcagcccaatttgaaaaattggggaaactttggtttaaaagtgcatagatgacttgcccaaggtcacaaggctgacacgcaataaagatggaacaaagacgtggctcttctaggagtccagggctttcacagatggcaacagctgttactttccgtaggtgaaaagttaatcaacaataaattcaggctgggcgtggtggctcaagcctgtaatcccagcactttgcaaggctgaggagggtggaacactkgagcccaggagttcaagaccagcaacatagtgggactccatccctacaaaaaattaaaaaattggctgggtgtagtgatgcatacctgtggtcccagctactcaggaggctgaggcgggaggatcacttgaacccaggaggtcgaggctgcaataagccatgttcacaccactgcactccagcctgggcaacagagtgagaccctgtctcgagaaaacaaaag

SEQ ID NO: 346902 - DNA, 559 bp, Homo sapiens
aaaacaaatacacacccacctagtcccttctacagaggccagttgagataaatacactgagatgcctaagaagactatattgtttctgctcctagatattaggcattttcctatatctgctccctgattttatagactaaaactcccaagtgaacatgaacttgtctatttctagacagagagcttccagaagctagtttccaagccagagtggatggaaatgtcacrttgtggatgtttcaaaactcatgagcctgactgacccctctgttggagtggtcatgattttccagagagcagctgttagcccatccatttcatggttattacagactccttggatgacaggatcctttgccattcctctgtgaatatctcatactgattacacagtttctgagccctcaggacttttctgcaaatttgcacttattagtaaatttttaatcagggaagatgtgcaaaatactgcattaaactcaaggataatcattctggagtatcatagtgggaaggaattcccattggtcctctaaattgccatgtgcacctacagtcc

SEQ ID NO: 346903 - DNA, 559 bp, Homo sapiens
aaaacaaatacacacccacctagtcccttctacagaggccagttgagataaatacactgagatgcctaagaagactatattgtttctgctcctagatattaggcattttcctatatctgctccctgattttatagactaaaactcccaagtgaacatgaacttgtctatttctagacagagagcttccagaagctagtttccaagccagagtggatggaaatgtcacattgtggatgtttcaaaactcatgagcctgactgacccctctgttggagtggtcatgattttccagagagcagctgttagcccatccatttcatggttattacagactccttggatgacaggatcctttgccattcctctgtgaatatctcatactgattacacagtttctgagccctcaggacttttctgcaaatttgcacttattagtaaatttttaatcagggaagatgtgcaaaatactgcattaaactcaaggataatcattctggartatcatagtgggaaggaattcccattggtcctctaaattgccatgtgcacctacagtcc

SEQ ID NO: 346904 - DNA, 530 bp, Homo sapiens
gtgtggcaccgtgctcacatgcacaatctgggtcctggggtgactgctgggggccagggcactgcattctcttactggcttggccgtctcagccttctctgcctgatgctttttggttctacggtccttgcttttactcttccagtgctgttgggcactttctatgtagggcacttgacttggacatcttttttttaaattttaatttaatttttaattgacaaataataattgcatctatttatggagtacaatgtggttttttttttttttgagttggggtcttgctctgtcacccaggctggagcgcagtggtacctttgtggcccactacagcctgaaactcctgggctcaagtgatcctcctgcctcaggctcccgagtagctaggacgccaggtgcacaccactgtgctggccagtgtgatgttttgatacacgatacattgtggaatgaccaactgatcatctagatgtcaatatgycccacccgcccctaagattatgcacactcaccccctacaccaaatg

SEQ ID NO: 346905 - DNA, 588 bp, Homo sapiens
ggggatgctcgtgtgtaggaaggagagagaccagagagtaaaagcatggaaaaacggagttagcatgcttgggttagttttttaactattttcttctctcacctgtcttccatttggtagaaaagaagtgagttgttctagacagtggtgagaaactttgagaagcagatagcagcagcttccaaggaaaatgaggaactcaagaagttgttgattatgctaaacagctaaacagggttgcagctgaactcttgagccgcccttcaacagacctactgtgaattgttatgtggtygaaacaggattaaacctcaggccaggctcctgccacacaaacaggtctttttcaactcttcatgagagtagctggtgatgttttcttttctccaggaacttaccctgcttagcaggagacagctaggtaacaatctacattctaaaggttgtctacttcggtcctccaaaactgcaggcttgatgaattttctttattgagagcaggcccaattttccctcctcttttaccaaccagagagcccagggggccaaatctgtggactgtggtgtcttgtggaagcactagagttg

SEQ ID NO: 346906 - DNA, 607 bp, Homo sapiens
tttgggagtttgcttttaagaagattggtttcttggagattttatagacaccctaccattttcaaagacttgttggtaatataaattccartcattttactataaaccagatactagcttctttatgaatcattttctattggtttttgttgttgttgtttgtttgttgttttattgttctttaccatcttgctctcataaagctcagggtaatgagagagtctgaagtaaacagactgataaagctgacatgtgctttctctgtgttccctgtatgtgtatctaccagatcttaactgagaatgtaagagaggtgggagtaaaggcttcctgtagaataactaagctgattgttgaagaaactgtagactttagtgttaaaagagggagtgactgtgagtgctctaggtagacagagcaatatttgacaagtgcagtgacttggatgtgagaataatcatggtggcctctataaactgtcagcaagtattggagccagagcgagtgtgatgggctaaggaggcccagtgaaaaaaggattagtgctttcatggtggccaaatgagaaaaagattagggcattttacttctataatcctaatagatc

SEQ ID NO: 346907 - DNA, 634 bp, Homo sapiens
tgctcactaaaatctctcgaatacttaaaaaaatagtgtgaatggaaaaaccccataaatatatcaaataagtaagtttttttgcttcttgcaactaaagataacccatatctgttatgtgacatttttagagaattgctgttttagatatttttagtatcttattatttaaaaacaaaatgtaaatactctatgattccatttatataaaactgcaaaatcaatccaaattataatgacagaaagcaggtcagtggtttccaaggatcaggggtgggggcgggtaatagcaaaatactacaagggacattttttggctgatggagatgttctgtatcttggttattgaggtggttacattgttaaattcaacaaactacatttgcaatggttgcattataccaaatgtaaataggatcacaacatagtagattaaagataggcawaaatttcatacaacagctcactatattttaaaagtatatttaattagacaattctgcgtattagatcacagacgcagatttttgtctctaagaatcaggacaagagtgaggcacgtgagagactcaggttgcaaaatttaaggcaggccctcactgtcaggttcctgagagccccagccctgcacttg

SEQ ID NO: 346908 - DNA, 567 bp, Homo sapiens
gtggattcctatactccaacctcagttgtcattgtttaatcactataccctgcttaatttttattcataatgtttattattacctgaaatcatgtatgaatttagtctttactttctgccgtcgttactgagagcttaaactccaagagctcatggatttatcaccagcacagaaattagtatttggcatactaggcgctctataaatatttgaataaatgaaaaggctttatgatgtgatgatgtgaaaaaagacttttttttttttttgagacttagtcttgctctggtcacccaggctggagtgcaatggtgtgaactaggctsactgtaacctctggctcccgggttcaagtgattctcctgcctcagcctcccgagtagctgggactacaggcgcctgccaccatgcctggctaatttttgtatttttaatagagatggggtttcactttgttggccaggctgttctcaaactcctgacctcagatgatccgcctgcctcggcctcccaaagtgctgggattacaggcgtaagtcaccatgccgtgctgtgaaaaaaagact

SEQ ID NO: 346909 - DNA, 541 bp, Homo sapiens
gttgatgggtcttgttttttttatccaccttgccactgtatgtcttttaactgggaattttgcccatgtacatttaaggttggtattgttatgtgtggttttgatactgtcatcatgattctagctggttattttgtagacttgtttatgtggttgcttcagagtatcactggtctgtgtacttcagtgttttgtagtggctggtaatgatttttcattttcatatttagtgcttcctccaggagctcttgaaaggcaggtctggtggtaaataattccctcagcattttyttgtctgaaaaggatcttatttttccttcatctatgaagcttagtttggccagatatgaagttctgggttggaatttgtttcctctaagaattttgaattttggccctcaatatcttctgggtgtagggtttccactgaggtccaatgttagtgttagggcttcctttgtaggtgacctggcctttctctctggctgcccttaacatttttactttaattttaaccttagagaatttgatgattatgttt

SEQ ID NO: 346910 - DNA, 556 bp, Homo sapiens
aaaactgctattggatactgtgctcactaccctggtgcaatatacccatggaacaaacctacacatgtacccctagtatctaaaataaaagtggaaattaaaaagagaactataaagttggggtagttcaaaattctgagacatatattcatgtatcttagagtccttgctattgctattgttctaattggagcttagttatggggaaaagaggaaaacatggtataaacttggaaagcaggcagtttcacttaggaatgtcagtaaattgagagttcctgctatcagaaaataggaattaattacataggagttgtttagtaaaaggtctggtaagcaagaaatacttgtcccagtagctaagtatagcatggcatggttaggaaacacatggttaatgtacatgacagagggacaacctagcaatcaattaaggkacatttggtatcatataggagaaattcagctattgaaactaaattggagtaagatgttacagaaagtactttaaggggtaagtcagaagcccagttctaaatgaaatgcaacaggctga

SEQ ID NO: 346911 - DNA, 614 bp, Homo sapiens
aaactgtacttgtagccacctacttttccattttcctgatgactcaaatctttgcgccagattaattttttgtcctattacataggatgtgccatcacatgtaatattacattgtgacatgttgtcatgtcattacagagacattaagaccatttgtttccaatgattttgccaaatttattttgactagtaatgtagcattgaattactgttgattttcttcttctctaacttgatcatgatagtgggaatctatgcattccaaatcatattttactctatttgaaaaaagtcatcactatgactatgctatgagaactgttctctctcatagcatcctacaattttgcttcaaagctcttgtcagagtatgmgcttactaatttattatgttttataatgtgcttctcactgagtagtttataaataggcacattaaaggcagaagtttatctctttggctgctactgtattgcctagcatcttgcatagaacctggcatatatcaggtaccagaaaatattttttggaattacagaataagtttgctgaactttttcatactgagtatgttcaggttttgtcattttctgacaaaaatggtgggaagaagt

SEQ ID NO: 346912 - DNA, 553 bp, Homo sapiens
ttattccctatgtggtaaaccagtttatcagactaaggggagcacagaccctcagcatggaatatttcatatgtgtaagagagtctggacttggagcagtggktgatggggtggtaataagggaaatgtggtggaaatgagccagaagagtgaattaacatgcgtatttgagttgaagctgctcctggcaaactataaattatgagagtcatttataagagagtccataattgctagaggaatttctgtgttaatcatcagaagacagatccagtaagaataaacaaaacagtgccagcttaagaaaggttccccctcccttcccaaatcaattattggctattctgttatgattaaggaatgatagaaacttaattagctatttttccatttaagaaaatcatattgctttgattcaagcacacctatgcgagctatccagaaagtctgtagctacaatgcagattttaaataattccaaagctggtccctgtggtttaaataaaatgataatataaaatgtaattttagcttatttaagaactttaattct

SEQ ID NO: 346913 - DNA, 562 bp, Homo sapiens
tggaaacagccttgttgatatatgttgtttccttggtaggttaggtatggttattattggrggctgtggtgaagttgtgctgagaactaggatgctgggtacttcagtcttcagccccaattggtggcagcaataagctgagcatgcctatctttatgccccagggcagcataagttggcacctatgctggtagttactggcaagctgattcttggacccctaatggcatgctcagatactggaaatggcagcagtggatgggatgggcaggtgggttcttatgcctgggaggctggcatggcatgggcaacaacagttgcagtggtgagacaattctctagatcccaagttgtatgtgttgacactgatggtggtggtgatgggctgggtgggccagtctccaagcccacagttatcacttgcaggaaagtgccagctgagatgttagcagccaggaggttaggcccaaactcaggctcccaggaggagtgctcaggtgcctgtcgtggtgaattgatttgatttgaagatctatgtgctctgtctttgaggaggagcaaa

SEQ ID NO: 346914 - DNA, 562 bp, Homo sapiens
ggccaatgcctcattcatttaactattcctcacgcagatctccttaccctcctggtttctccccactgaattcctgagatgtctatgtctttttctaaactcatgctctgcagagtaaaaatgatactttaaatgaagttcaaccaamactaaggagaaaagaacaattgtcgcttcatttttgatattttatctttataaatgctgattttctattgtgttttttcatatccaagtcctattcttcactgattgctgatgttctctattaacctcaagaccttcttacaggtactatagctaagccaatggcccagccctatgcttataaattgattttgtttgtttttacatgatgttagtaccgttcaactcattgtcagagtggcttagatatggcaaaagaaaagcccatagaaccaaaccctacgcaaaattcactgaagaaaatgtaatacagttgtacaggaagttcatatgattatttaaatatcgaagggatatttacaaaatgactcttttgtcttcacagaaaacttctaaaatcatcaggagatatcac

SEQ ID NO: 346915 - DNA, 560 bp, Homo sapiens
aacataccctatgtcccaatcctctccctcattagtatttacagaacaagttgtgtgcaccttccacataacagcctctcaaatatttgaaaatggtgactggatactctagttaattcactcttgcaggccaatgcctcattcatttaactattcctcacgcagatctccttaccctcctggtttctccccactgaattcctgagatgtctatgtctttttctaaactcatgctctgcagagtaaaaatgatactttaaatgaagttcaaccaacactaaggagaaaagaacaattgtcgcttcatttttgatattttatctttataaatgctgattttctattgtgttttttcatatccaagtcctattcttcactgattgctgatgttctctattaacctcaagaccttcttacaggtactatagctaagccaatggcccagccctatgcttataaattgattttgtttgtttttacatsatgttagtaccgttcaactcattgtcagagtggcttagatatggcaaaagaaaagcccatagaaccaaaccctacgc

SEQ ID NO: 346916 - DNA, 578 bp, Homo sapiens
tttacaaaatgactcttttgtcttcacagaaaacttctaaaatcatcaggagatatcactgaaaaggtttcaaaacaaagccataatctctagaaatgtgtccttgatgggttggtcttcatttgcctgaaggtgagtaactggtgtttttagcatgccaaaacttcaggatccatgggtacctttttctacttttcatcaggaggcaaaattcatactgcatttcacatgtagaaaggaatttggccagatgaatagaagaatggaagtttctccaagcagggccaagctttcatgacctcagacagcatctcaaattgtttgaatgaataggcagaaccagcctgtgaaatcatgggggaacagggttgcttaaccaactatccaagtagaaagagaggccaaaartaaagtacggtaagaaaaaggggaagtagcaatttcaggtgagaaaaataatagctgcagaatgataaagttacagagtcaagagatttaggaagagatagtagtaggaagaagagaggatgatttacaaaaggggtggggtaaatcacagaaaattgctagagaagaat

SEQ ID NO: 346917 - DNA, 474 bp, Homo sapiens
ctctcctcaagcaaaaggaaggggtctcttttggagccatgagctgtgcagcctggggttagagaaggggtgatgccagcactcctttggctgcctcagctagtgtctcagtatgttgtgtgacccctcaggccattgtctctgagtctagctcagagttgccgtccttatggcctagactgcctttcaagtttatctggagactgagaatacttaagaccttagtggcgaagtttgctagcactgaagtttggactactgggattgtgggttcgtctctggctaggggtgatttaaatgytccctctgtgggcaggtgtcagctgtgtttgttctggttttccttcctgctctaacagaacagcactcacaatttctgtgttctccctcccccagggtccagagatgctgccacaccacaccactgctgccccagtcagggagggttggtgttagcaattccacgctgttttt

SEQ ID NO: 346918 - DNA, 570 bp, Homo sapiens
gtcagtttttagttcttaaatgtgttygtcaattgtacttgttactataatttcaaaatttaagtattaattatgttcacagatgaactgtaaaagagtgtggaagaactgtttctatgaacattaagtaggttataaaactaacgaggctttaaacaatactgaggccctaaaaagcctcaataaaggtgaatcactacaaaaatttggtgtagataacataatttaaatgattttttttaaaagaaccctaaaaatctgtcaggaattttaagttacaaggagcttaaggattacagaatctttattttctatcctgtgttatgttagagtatatataaaatctatatggaatctatattaaaaggggctcagccctatatccaaaaatgggtgaatatacatttaaatgttttaaattaaatgtttatgttactgttacttaattcctcttaatcaatcaattagtgatcatgatgaataaggaggctttcactttctaagaaattatatggtagttattagattttaaagaaactgcatagatttacatgctgaaaaattgcgttt

SEQ ID NO: 346919 - DNA, 570 bp, Homo sapiens
gtcagtttttagttcttaaatgtgtttgtcaattgtacttgttactataatttcaaaatttaagtattaattatgttcacagatgaactgtaaaagagtgtggaagaactgtttctrtgaacattaagtaggttataaaactaacgaggctttaaacaatactgaggccctaaaaagcctcaataaaggtgaatcactacaaaaatttggtgtagataacataatttaaatgattttttttaaaagaaccctaaaaatctgtcaggaattttaagttacaaggagcttaaggattacagaatctttattttctatcctgtgttatgttagagtatatataaaatctatatggaatctatattaaaaggggctcagccctatatccaaaaatgggtgaatatacatttaaatgttttaaattaaatgtttatgttactgttacttaattcctcttaatcaatcaattagtgatcatgatgaataaggaggctttcactttctaagaaattatatggtagttattagattttaaagaaactgcatagatttacatgctgaaaaattgcgttt

SEQ ID NO: 346920 - DNA, 570 bp, Homo sapiens
gtcagtttttagttcttaaatgtgtttgtcaattgtacttgttactataatttcaaaatttaagtattaattatgttcacagatgaactgtaaaagagtgtggaagaactgtttctatgaacattaagtaggttataaaactaacgaggctttaaacaatactgaggccctaaaaagcctcaataaaggtgaatcactacaaaaatttggtgtagataacataatttaaatgattttttttaaaagaaccctaaaaatctgtcaggaattttaagttacaaggagcttaaggattacagaatctttattttctatcctgtgttatgttagagtrtatataaaatctatatggaatctatattaaaaggggctcagccctatatccaaaaatgggtgaatatacatttaaatgttttaaattaaatgtttatgttactgttacttaattcctcttaatcaatcaattagtgatcatgatgaataaggaggctttcactttctaagaaattatatggtagttattagattttaaagaaactgcatagatttacatgctgaaaaattgcgttt

SEQ ID NO: 346921 - DNA, 614 bp, Homo sapiens
aatttgcaaaattagtctgatcatgaaattccttcattttccaagacgtaggagctatagacacatagatggaaatatatatttttcagccttgttgattcacttagatcttctgaaacagaatttaaataataaaataatgtttttaaatatgtaagttagtaaaaagcacttttttaaccatgctatatatacatattcacataagaaacttcccaagtgaaacgaatattgtacaggtatcaggaggtacattttaaaataaagattctcatcttcaccttgtttttgaattctccattaaaagcaaactggttttctggttttccatctggtaccttatataatctaaaccaattaagagtagcttccaggtaacccggtttgaacttcttaacatcatcaatatctgtaaagaaaaaaacaaaaagatgttttgttaagaaccaaaattaattccctttagtggcagagcattggactgagsgagccaggaaacatggggcccagtctaaccagaagcacaattgattatgatacctagagcagcatcatcattgatatgtatatcaccttcagacttttgtgttttcatatgtataatactattcctg

SEQ ID NO: 346922 - DNA, 614 bp, Homo sapiens
aatttgcaaaattagtctgatcatgaaattccttcattttccaagacgtaggagctatagacacatagatggaaatatatatttttcagccttgttgattcacttagatcttctgaaacagaatttaaataataaaataatgtttttaaatatgtaagttagtaaaaagcacttttttaaccatgctatatatacatattcacataagaaacttcccaagtgaaacgaatattgtacaggtatcaggaggtacattttaaaataaagattctcatcttcaccttgtttttgaattctccattaaaagcaaactggttttctggttttccatctggtaccttatataatctaaaccaattaagagtagcttccaggtaacccggtttgaacttcttaacatcatcaatatctgtaaagaaaaaaacaaaaagatgttttgttaagaaccaaaattaattccctttagtggcagagcattggactgagcgagccaggaaacatggggcccagtctaaccagaagcacaattgattrtgatacctagagcagcatcatcattgatatgtatatcaccttcagacttttgtgttttcatatgtataatactattcctg

SEQ ID NO: 346923 - DNA, 590 bp, Homo sapiens
ctgcctcaaaaaaaaactaccaaacttattttataaaatctagatataggagaagagtactttaagtactaactaatgagaacaatatacaaatatccttaaaataaacaattttcattttccccatacactttactcattcttttaggagttcaaaaacatattatgaataagaattgttgtatttttcatgatgaaaataatacatgtattcacttttaatacaatgataaatgtattggtgttctaaaacaataacatcttgttttaactactcaagttcaataatttcttctcaacccaaatcagcaactggctttagtgtttctgcatatctcttcataaaagcaaatatgaaaggaatttagaaaggtgtccaaagtgcaaagtcatctccattctgagtaygcaacagaaataaaatgaatagagttaaaactttttattctaacacttacgaaactcaaggagtcatgctaggcttatgtgatctagtttcaatacctctagttacaaatatataaattactagaatcaaggatgaattgcttggtataatgggctatatattgctcatttatagatgggct

SEQ ID NO: 346924 - DNA, 571 bp, Homo sapiens
gtccttttaaactataaattggatcgtgtcattcttcagattaaaaaagcttattggattgtttcccattcatgtaggagaaaatccaaatattatgtaggcctcaattagactgtctaatttcatttccagttgcttactgttctagttttaattgctgaataacaaatcacttccagcacttagttgcttaaaacaatgcttatcattgtattagctctcacagtttctgtgggccaggaatttgggaaaggctcagctaagtagttctaactcagatctttcatgtggttgttggcagatattggctgaagctaaaatggcaagtagctaggacagctatgggttgatcaggcatcctcctctcttgatagtttcagggcctttccttttgatctctccatgggacctagtttggktttctttccctgcatagcagcttgagggaagtcagacattgatatggtagctcaagtttccaaagggttttcctatgagagccaggcagaaaatctatcatctttatgacctattctatgaagtcacatagcattacttccactgttgttgc

SEQ ID NO: 346925 - DNA, 617 bp, Homo sapiens
gatttagtgagagactataaaaggcaaaaaaaaaagagaaacagctcagagactctgaactgagactatgtccaccccaaaagaagactttatgcaggggaattctggaagcagacttttaaataggctaatatgtaatcaagtcctgggcagactatagggtagcaagtttaacctattgctgggaaaaggagctggatataaaaaaaaggaatcttgacccctctgtgaccaaagtttaagaaagaaacatttagcrtattattagggtgagatatatgactgtgtgtgtcttgagtgcagagaaaggaggcagggatactcaagggttgacagaaaaatgggtgtagcaacacgtgtgatgggatagaaaaagtcacaggaaagccatatgcgattgcaactttgagataaggtgagtaaacccacatgtgtctgtactcatgtcttaccgcttttactgatactcattttcatttcagtttcaagaaatcatttaagtccttttttctctgaaggtaaatcaaagtgaaagaagtcattaagtcaggtaacaaatacttatcaagtgcctgttgtttgctggacatagcaggagtgctcccaggcaaggaata

SEQ ID NO: 346926 - DNA, 617 bp, Homo sapiens
gatttagtgagagactataaaaggcaaaaaaaaaagagaaacagctcagagactctgaactgagactatgtccaccccaaaagaagactttatgcaggggaattctggaagcagacttttaaataggctaatatgtaatcaagtcctgggcagactatagggtagcaagtttaacctattgctgggaaaaggagctggatataaaaaaaaggaatcttgacccctctgtgaccaaagtttaagaaagaaacatttagcgtattattagggtgagatatatgactgtgtgtgtcttgagtgcagagaaaggaggcagggatactcaagggttgacagaaaaatgggtgtagcaacacgtgtgatgggatagaaaaagtcacaggaaagccatatgcgattgcaactttgagataaggtgagtaaacccacatgtgtctgtactyatgtcttaccgcttttactgatactcattttcatttcagtttcaagaaatcatttaagtccttttttctctgaaggtaaatcaaagtgaaagaagtcattaagtcaggtaacaaatacttatcaagtgcctgttgtttgctggacatagcaggagtgctcccaggcaaggaata

SEQ ID NO: 346927 - DNA, 590 bp, Homo sapiens
acacaatcctgactaaaaaatcaaagttgagcaccttccactcaattggtgccaaaaccatggcacccagatcaactgcagacaagagtggagctttccatgaatattttaaacaactgggatcaagatcctgtagcatttctcaaagaatagtaacaagagatgaaacatagctttaccagtatgatcctgaagacaaagcacaatcaaagcaatggctaccaagaggtggagtggtccagtcaaagcaaaagcagaccagtcaaaagcaagggtcatggcaacagtgttttgggatgcccaaggcactttgtttgctgacttgctggaaggccaaaaaacgatcacatctgcttattatgagagtgttctgagaaagttagccagagctttagtaraaaaatgcctgggaaagctccaccaaagagtccttctctaccatgacaatgctcctgctcattcatctcatcaaacaagaggaaatttgtgacagtttcaatgggaaatcaataggcatccaccttatagtcctgatttggctccttttaacctgtttttgtttcttagtctttttttaaaaaaatctttaa

SEQ ID NO: 346928 - DNA, 583 bp, Homo sapiens
tgaaacatagctttaccagtatgatcctgaagacaaagcacaatcaaagcaatggctaccaagaggtggagtggtccagtcaaagcaaaagcagaccagtcaaaagcaagggtcatggcaacagtgttttgggatgcccaaggcactttgtttgctgacttgctggaaggccaaaaaacgatcacatctgcttattatgagagtgttctgagaaagttagccagagctttagtagaaaaatgcctgggaaagctccaccaaagagtccttctctaccatgacaatgctcctgctcattcatctcatcaaacaagaggaaatttgtgacagtttcaatgggaaatcaataggcatccaccttatagtcctgatttggctccttttaacctgtttttgtttcttagtctttttttaaaaaaatctttaaagggcaatcatttttcttcggtaaataatgtagagtgcattgacatggttaaaaagactgcattgacatggttaaattaccagaaytctcagtacattaggtatggattaaatggctgatatatcactttctcatcaatttcaagacatttttgtt

SEQ ID NO: 346929 - DNA, 583 bp, Homo sapiens
atgactgaagtgcctctttgtacctgatagtttcccaatgtgtttttataattttaggttctaagcttatttttaatatgtatgtgtttctcctgtagaaaatcttggttgataatttgtccttttgctacttctaggcttcccaggatatcccaatttcagagcactttttatgttaatttctcacttagaggttggcaaacctcacatatattacctatttcaattataagcccccaaatttatgtgaggggaggcatggttacaaactcatagggaagacattttcctctttacttagagcccaarccaagacattcatttatgcaataaaagcttactaagttactgtgctaaagactagggatgtcataagaaacaggcaaaatctctgctctcatgaaagttatattttggaagaatatccttgtgctgatggggaaattttctagtcctccagcaggaatctcagttttcactccctgactccattaggctcatggcctcatttcatattcttttatggttattataacccatttccatgattaccaaggctggcaatattctttcctccaccatc

SEQ ID NO: 346930 - DNA, 583 bp, Homo sapiens
atgactgaagtgcctctttgtacctgatagtttcccaatgtgtttttataattttaggttctaagcttatttttaatatgtatgtgtttctcctgtagaaaatcttggttgataatttgtccttttgctacttctaggcttcccaggatatcccaatttcagagcactttttatgttaatttctcacttagaggttggcaaacctcacatatattacctatttcaattataagcccccaaatttatgtgaggggaggcatggttacaaactcatagggaagacattttcctctttacttagagcccaaaccaagacattcatttatgcaataaaagcttactaagttactgtgctaaagactagggatgtcataagaaacaggcaaartctctgctctcatgaaagttatattttggaagaatatccttgtgctgatggggaaattttctagtcctccagcaggaatctcagttttcactccctgactccattaggctcatggcctcatttcatattcttttatggttattataacccatttccatgattaccaaggctggcaatattctttcctccaccatc

SEQ ID NO: 346931 - DNA, 491 bp, Homo sapiens
aaaagtaaatatacaatttcttttcatcatttctatgggtttggtggcacagggagttacaatatctggtctaccacattgcaggaactagatttccccagatgactaactcttcagtcaaaagtcttcttttttccccgcctcaaacacwttagatttacttatgccactgtggaaaattatttccactgtccttgaagtcccctttcccaggttttccctctgctgtttttttctaatctttcacggtgtgctcaaatgttacctcttcaaagaggctttcctggaaaacctcaccttgagcactctatctcactcactaatttctttgttttttttcttatttataactttatcagtattttgaattattatacttatttatttacttacttgttgatcatgcctctattccactgtaatgcaacttccatgacagcatgatcttttttgtcttgtttatcattatttctctagggtcagtctaccac

SEQ ID NO: 346932 - DNA, 444 bp, Homo sapiens
aagtgcaatttggatggtttgaagatattaaatctttcagcccagatttaagaatacctgtttgagagaaattacaagagcttttaatgcttgctacagaaaggtaatgtcttatcttttctgtttagtattttgcattccaaaaaatgagaaaagttattccataagttgataattgaataaaagaatcaaaacatgcatggaggtttttaaatgtttcattttaaatttgatggcaaagatgctatgaaaatgtattaatagctaacatttattgaacagaaggcactccaagtggtgctcatagattatggcacttaatcctcacaagaactttatgagatatgtattgtatyagtctgttcttgcattgctataaaggaatacctgagactgggtaattaataaagagatttaattgtctcatggttctgcaggttgtcc

SEQ ID NO: 346933 - DNA, 617 bp, Homo sapiens
tacttttcttatttatgtttctaaaatgtaataccatatatgtttgtwttcataaaaaatatgtctattgcttttaaaaaaatacataaatggtacatactatatgtgtcctgctttttcacccagtctcttatcaatagacatgtaattcagtttctaatttttccatttctgatcataaacacatgtatagtgtctctgtaagatgtgtacctagaagggtaatttctgagtagtgaattataggcatcaagtttactagaaattacttaatgttcttcaaagtagttgtagccatctatactcctattataccatcaagtctgaaagcttccctttcttcacttgcctaaaaactcttggtattaacagacttttaaacttttggtaatctacaactgtaaaattgtattgtgttttattttgatcccactgattacaagtaagataaagcaaattatgatgtttagtggtcattgtatgtttcctcttttgtgagccgtctattcatgttgtttacacaatttttttctactgggttatctttttcttgtgagtttgaataagttattattttagatgccagtccttttatcatttacatgaaaatatctcct

SEQ ID NO: 346934 - DNA, 438 bp, Homo sapiens
gtggtcctgcagttgaactattacatacagggtcctgttgccagggtccacatgctgtagcccactcagagcactctctctcccttttatggttccctagtgtgttgggatcaaatgaacaaaacttgtttatgatacagtcatgctttttgtgatcatgtatagttcaaacatctatatttgtaaacaaagcccaataatcattttgatcatttaaattctccttctgaaatctttgcagatctttcagatctatccttctaaagatctctaacctaagaatgataaattacttctgtagatattttctattttgtttctaagatggttcttaataataatcatcaattkgttagtttatattttatttttcttggatttcctgactgatttgtacatattgttggatgactaacaatttgtttcgtctcaatgtta

SEQ ID NO: 346935 - DNA, 534 bp, Homo sapiens
aattctgattcaaatacttcaatgtgattctgaagaaaggaaatgagacaaaatacttttatgacaaagaatttcattataacaaattaaacactatatgagaaaggtgttaactaatctgggctctaagaatccsaaatcattcatgagggtgctaatggggtaattctttgacttacaaatattgaatgatgaaaactggcatacatgaagttccactgagctagtgaagaggtactggtttctctaatttgtgaatttctgatgcagtattctcagtgaaaaattattcagtagagtatcttcttcattattataaagctcaaccaagttaccaagccaggtaattaaagctgtatgttaacctttctgaattctaatcttattcctctaatctaactagatcacatatatgtcctccaattatttttttgttttgccactaatgtgacagaaagcaatgaaaaaacaggatctaatatagaaactttgagcctctcgctaattttaagacaagtatctactatattattt

SEQ ID NO: 346936 - DNA, 534 bp, Homo sapiens
aattctgattcaaatacttcaatgtgattctgaagaaaggaaatgagacaaaatacttttatgacaaagaatttcattataacaaattaaacactatatgagaaaggtgttaactaatctgggctctaagaatcccaaatcattcatgagggtgctaatggggtaattctttgacttacaaatattgaatgatgaaaactggcatacatgaagttccactgagctagtgaagaggyactggtttctctaatttgtgaatttctgatgcagtattctcagtgaaaaattattcagtagagtatcttcttcattattataaagctcaaccaagttaccaagccaggtaattaaagctgtatgttaacctttctgaattctaatcttattcctctaatctaactagatcacatatatgtcctccaattatttttttgttttgccactaatgtgacagaaagcaatgaaaaaacaggatctaatatagaaactttgagcctctcgctaattttaagacaagtatctactatattattt

SEQ ID NO: 346937 - DNA, 615 bp, Homo sapiens
tctgggctctaagaatcccaaatcattcatgagggtgctaatggggtaattctttgacttacaaatattgaatgatgaaaactggcatacatgaagttccactgagctagtgaagaggtactggtttctctaatttgtgaatttctgatgcagtattctcagtgaaaaattattcagtagagtatcttcttcattattataaagctcaaccaagttaccaagccaggtaattaaagctgtatgttaacctttctgaattctaatcttattcctctaatctaactagatcacatatatgtcctccaattatttttttgttttgccactaatgtgacagaaagcaatgaaaaaacaggatctaatatagaaactttgagcctctcgctaattttaagacaagtatctactatattatttatgaatctaaaactgaaatacatggaatagacttaatctgagattagtgagacagactgcttgtacaaagatgaaaagtttttgwtttccttcattttcatccttaaataagtaatgaaaaccaaattctgaatataatctacatagatacaaaactgataacttggagaaaataatgtggcctgcattattgtgaca

SEQ ID NO: 346938 - DNA, 586 bp, Homo sapiens
acacttaaaaatgcttaacatggcaaattttatattatggatattttatcacaataaaagaaaactgaaaaaatacatctttacttacattttttaaatgtaaataaaacttttgggcaatgttactatgcagtatagaagaaaaagcagaagtcatggaattagaagtcttgtatttatataatactagttctatcatgagtgagttggatagattttggcaagscttttaaactatcttagctgtagttttcttatgttgaatataaacatacttgtttttaactctcaggaatttcgtgaggaacaagtttaagttttatatatatctatgtatgcttttcataaactacaaataagtttatacactttagctggaactttttataatttcagaggggttattgaactgactgttggcattggatataagaatttggcttcaggcatttgctattaaggttttaaaaatgtttaaatatcttactgtaatttttttgttttgttatttgggacaatgcagctgttttctcctagggtataattagttgagaatggaaaagtttagcttatatttggagagtta

SEQ ID NO: 346939 - DNA, 586 bp, Homo sapiens
acacttaaaaatgcttaacatggcaaattttatattatggatattttatcacaataaaagaaaactgaaaaaatacatctttacttacattttttaaatgtaaataaaacttttgggcaatgttactatgcagtatagaagaaaaagcagaagtcatggaattagaagtcttgtatttatataatactagttctatcatgagtgagttggatagattttggcaaggcttttaaactatcttagctgtagttttcttatgttgaatataaacatacttgtttttaactctcaggaatttcgtgaggaacaagtttaagttttatatatatctatgtatgcttttcataaactacaaataagtttatacactttagctggaactttttataatttcagaggggttattgaactgactgttggcattggatataagaatttggcttcaggcatttgctattraggttttaaaaatgtttaaatatcttactgtaatttttttgttttgttatttgggacaatgcagctgttttctcctagggtataattagttgagaatggaaaagtttagcttatatttggagagtta

SEQ ID NO: 346940 - DNA, 599 bp, Homo sapiens
gtgaagccagctgcttccattggtgggtcctttttgctgtcaccagcaacgttgccacgacgaacatccttgacagacacattcttgacattgaagcccacattgtccccaggaagaacttcactcaaagcttcatggtgcatttcaacagattttacttctgttgcaacgttgactggagcaaaggtgaccaccataccaggtttgagaacaccagtctccactcagccaacaggaacagtaccaataccaccaattttgtagacatcctggagaggcaggcacaagggcttgtcagttggacgagttggtggtaggatgcagtcaagagcctcaagcagcgtggttccactggcattrccatccttacgggtgactttccatcccttgaaccaaggcatgttagcacttggctccagcgtgttgtcaccattccaaccagaaactggcacaaatgctactgtgtcggtgttgtggccaattttcttaatgtaagtgctgacttccttaacaatttcctcatatctcttatggctgtagggtggctcagtggaatccattttgttaacaccaacaattagttgtttcacacccagtgt

SEQ ID NO: 346941 - DNA, 575 bp, Homo sapiens
atttgtatacctttatttctttttcttgcctgattgccctggccagaacttccaatactatgttgaataggagtggtgaaagagggcatccttgtcttgtgtgagttttcaaggggaatgcttccagcttttgcccattcagtatgatattggctgtgggtttgtcataggtagctcttattattttgaggtatgttccttcaatatctagtttattgacagtttttaacatgaggggatgttgaattttaggttacaaatttctattaaagcagaatattaagtaatatagaaaaatatttgtaagtattgggaagtgacttttggggctaatttctgttcacacacctcatcagttctccctagcctactgtcatgatttaaatgaattaagcattctttaaaacagtcaattaaaaaaaaaaggataagggccccatgtattgggyggtcagcaaaacaaaacaaaacaaacaaacaaacaaaaaacatggaaaagaatattaattcttcctcctatgaagttccactctttatcccaagttagaagattcttaccatatcctgccaggtgc

SEQ ID NO: 346942 - DNA, 575 bp, Homo sapiens
atttgtatacctttatttctttttcttgcctgattgccctggccagaacttccaatactatgttgaataggagtggtgaaagagggcatccttgtcttgtgtgagttttcaaggggaatgcttccagcttttgcccattcagtatgatattggctgtgggtttgtcataggtagctcttattattttgaggtatgttccttcaatatctagtttattgacagtttttaacatgaggggatgttgaattttaggttacaaatttctattaaagcagaatattaagtaatatagaaaaatatttgtaagtattgggaagtgacttttggggctaatttctgttcacacacctcatcagttctccctagcctactgtcatgatttaaatgaattaagcattctttaaaacagtcaattaaaaaaaaaaggataagggccccatgtattgggcggtcagcaaaacaaaacaaaacaaacaaacaaacaaaaaacayggaaaagaatattaattcttcctcctatgaagttccactctttatcccaagttagaagattcttaccatatcctgccaggtgc

SEQ ID NO: 346943 - DNA, 640 bp, Homo sapiens
taaggacttgaatgctgttaggacttactctgtgcctcttgctgtttctgcttttctttgttgcacaggtttcctcatattgtggagggcagggaatggctgctggtacttctagactcacatctttactacttactgctccagttttaamaatcccaggaaggacactgattggcctagtatcttagtccgtttgggctgctataacaaagtaccataaactgggtggcttatgaagagtagaaatatgtttctcacagttttggagtctgggaagtccaagatcaaagtgccagcatattcagtgtctggtgagggcttgcttcccggctcacagatggtatcttctggctgtgtcctcacatggtaaaaggaacaaacaagctcacttggccctattttataagggcactaatcccattcatgaaggctctgccctcatgacctaatcaactctcaaaaggccttaactcctaataccatcaccttgggagttaggatttcaatacaggaattttgggaagacacaaatactcagaccatagcacctagcttgagttatgagcccatgttcatcctcccccagccctggagacaagagcatatagtttgcattggaccatatgctagaatggaaatg

SEQ ID NO: 346944 - DNA, 640 bp, Homo sapiens
taaggacttgaatgctgttaggacttactctgtgcctcttgctgtttctgcttttctttgttgcacaggtttcctcatattgtggagggcagggaatggctgctggtacttctagactcacatctttactacttactgctccagttttaaaaatcccaggaaggacactgattggcctagtatcttagtccgtttgggctgctataacaaagtaccataaactgggtggcttatgaagagtagaaatatgtttctcacagttttggagtctgggaagtccaagatcaaagtgccagcatattcagtgtctggtgagggcttgcttcccggctcacagatggtatcttctggctgtgtcctcacatggtaaaaggaacaaacaagctcacttggccctattttataagggcactaatcccattcatgaaggctctgccctcatgacctaatcaactctcaaaaggccttaactcctaataccatcaccttgggagttaggatttcaatacaggaattttgggaagacacaaatactcagamcatagcacctagcttgagttatgagcccatgttcatcctcccccagccctggagacaagagcatatagtttgcattggaccatatgctagaatggaaatg

SEQ ID NO: 346945 - DNA, 634 bp, Homo sapiens
tatgctagaatggaaatggggataaaagaatcagcaaccccattcaaagataaggagcaccagagactgatgactggggaatcactgtgagccaggcaatcacaccaattaatgtctaccatatcaatttccctaagaagtaatgaaggaaagtagtagacaaataaggtggagatttatggggcttatttaagcatgtttccttcattactcattattgcctgagagcacagggggaggaacaatgatcaggatataaacccaggcattcaagccagcaacagctacccyctttgggtcccctccctttgtatgggagctctgttttaactctatttaatcttgcaactgaaagaaaaaaaaaaactctttatattgtctgtaggtcttccagcaaaagtgatgccttccaatccccagctaggcttagggattcttagtgagcctagaaatccagctagtcctgtctctcagtgccccctctcaacaggaaaacccaggtgctgttggggaggttggccgacgaccgctctaactgcttcctgctgaattggggcatagtaggggttgtgcagttgagatttcctcaggagcggtgcctttgatgtcatcaacatcggagcataggctagca

SEQ ID NO: 346946 - DNA, 634 bp, Homo sapiens
tatgctagaatggaaatggggataaaagaatcagcaaccccattcaaagataaggagcaccagagactgatgactggggaatcactgtgagccaggcaatcacaccaattaatgtctaccatatcaatttccctaagaagtaatgaaggaaagtagtagacaaataaggtggagatttatggggcttatttaagcatgtttccttcattactcattattgcctgagagcacagggggaggaacaatgatcaggatataaacccaggcattcaagccagcaacagctaccccctttgggtcccctccctttgtatgggagctctgttttaactctatttaatcttgcaactgaaagaaaaaaaaaaactctttatattgtctgtaggtcttccagcaaaagtgatgccttccaatccccagctaggcttagggattcttagtgagcctagaaatccagctagtcctstctctcagtgccccctctcaacaggaaaacccaggtgctgttggggaggttggccgacgaccgctctaactgcttcctgctgaattggggcatagtaggggttgtgcagttgagatttcctcaggagcggtgcctttgatgtcatcaacatcggagcataggctagca

SEQ ID NO: 346947 - DNA, 634 bp, Homo sapiens
tatgctagaatggaaatggggataaaagaatcagcaaccccattcaaagataaggagcaccagagactgatgactggggaatcactgtgagccaggcaatcacaccaattaatgtctaccatatcaatttccctaagaagtaatgaaggaaagtagtagacaaataaggtggagatttatggggcttatttaagcatgtttccttcattactcattattgcctgagagcacagggggaggaacaatgatcaggatataaacccaggcattcaagccagcaacagctaccccctttgggtcccctccctttgtatgggagctctgttttaactctatttaatcttgcaactgaaagaaaaaaaaaaactctttatattgtctgtaggtcttccagcaaaagtgatgccttccaatccccagctaggcttagggattcttagtgagcctagaaatccagctagtcctgtctctcagtgccccctctcaacaggaaaacccaggtgctgttsgggaggttggccgacgaccgctctaactgcttcctgctgaattggggcatagtaggggttgtgcagttgagatttcctcaggagcggtgcctttgatgtcatcaacatcggagcataggctagca

SEQ ID NO: 346948 - DNA, 634 bp, Homo sapiens
tatgctagaatggaaatggggataaaagaatcagcaaccccattcaaagataaggagcaccagagactgatgactggggaatcactgtgagccaggcaatcacaccaattaatgtctaccatatcaatttccctaagaagtaatgaaggaaagtagtagacaaataaggtggagatttatggggcttatttaagcatgtttccttcattactcattattgcctgagagcacagggggaggaacaatgatcaggatataaacccaggcattcaagccagcaacagctaccccctttgggtcccctccctttgtatgggagctctgttttaactctatttaatcttgcaactgaaagaaaaaaaaaaactctttatattgtctgtaggtcttccagcaaaagtgatgccttccaatccccagctaggcttagggattcttagtgagcctagaaatccagctagtcctgtctctcagtgccccctctcaacaggaaaacccaggtgctgttggggaggttggcygacgaccgctctaactgcttcctgctgaattggggcatagtaggggttgtgcagttgagatttcctcaggagcggtgcctttgatgtcatcaacatcggagcataggctagca

SEQ ID NO: 346949 - DNA, 561 bp, Homo sapiens
agggtttccagaccccaaggctggagaggcccgaggtgaccagaggaagatccagtaccagctctgaggccagttctaaaaggcccctcctggcacagtgcagcagggctttcatgaagagtgcccgcttcatccagatcctctgaaatgctggaagacacacctgccgacaagcagcctcagaaggcagcagcccctgggtgctggtgtgtgaagtctgcctgggtgtgaagtcctgccygagtcaagggcctggccaggtagaaggggtgggaagggtggttatggggtcctccttggggttccctcccatgcttaatcttggtggttttctcagtttctgttgcagcgggatactttttcaaatcttacttggaaccccaacatagaaaccaagggtctgttattgtaattctttttcataagttcaagtttttaacaatgaataggatgccaattaatgagattgtcatggtggatagaagtcttgaaaattgggagttacggattgcagtgctgcccgaagagcctgctgaggggcaatgattttgtgaagtagta

SEQ ID NO: 346950 - DNA, 610 bp, Homo sapiens
cattcatgagtcctcactcacaggagcctagggtttctgaggaatgcagtttgaacaccctacgtcatctcacatagtcgggcttttgataagagctatctgtcaggtatacatatttgtaagtcttttttaccaataatttaatcagacgtttgcagaaccctgtgccacacacagtaggggaggtggaaaatggctcctkttcattttttgttctgtagagggagagaagccacaggcggggcatgtaagaagcagtttaaggggtaaatagcttttggatcttaaattcctgggttgtattttgtcccttgccttctattttacaagaacggaaatgaagttaacaatgtaaatggtgaaagaagcaagcttcagcagaccccgcgatctgccactgcattatatgtgatatcattaatcctcccaaccgccgtgcaagaccaggatcatcagccccattttacaggcaggaaaactgaggctttgagacatcacatggcagaggaggcaaacagacagtccgaaatcccagagcaggccccacaaggcacacacaaggacccagcggtgctttcccctggcaagcgttgcccccgccttaggaaat

SEQ ID NO: 346951 - DNA, 526 bp, Homo sapiens
ggctaggcatcgagtaaaacactggtgagtgaagcagacatggtccctgtcctcaaatgtgaactcatgcacaatcacaaactgtgatccccacagcaggggctctcagcccttctctctacacagcagactgattattccacaaaagactgtgcccttctcctkcccaaaaaccttcagtggctccctcttgccattggcaacgtggccccagacaactcacaaacctttcttcctactcaaaatttggtcttattaaatccttaccaaatactcctgccctctgggaatgcctggatgagatactggaatgactgacggatggcaggacggaagggagcagccacttcctgaactgcctgggccaagctttccctcaggccctggcccaggcagggggaagtgaggcgggtgggggacatcaggggaggagaaacagccttagggaatagctgagctaggagcctatcctggagctcctcaagtatctttcataggagccagaactgcaggtacccaaccccag

SEQ ID NO: 346952 - DNA, 526 bp, Homo sapiens
ggctaggcatcgagtaaaacactggtgagtgaagcagacatggtccctgtcctcaaatgtgaactcatgcacaatcacaaactgtgatccccacagcaggggctctcagcccttctctctacacagcagactgattattccacaaaagactgtgcccttctccttcccaaaaaccttcagtggctccctcttgccattggcaacgtggcyccagacaactcacaaacctttcttcctactcaaaatttggtcttattaaatccttaccaaatactcctgccctctgggaatgcctggatgagatactggaatgactgacggatggcaggacggaagggagcagccacttcctgaactgcctgggccaagctttccctcaggccctggcccaggcagggggaagtgaggcgggtgggggacatcaggggaggagaaacagccttagggaatagctgagctaggagcctatcctggagctcctcaagtatctttcataggagccagaactgcaggtacccaaccccag

SEQ ID NO: 346953 - DNA, 526 bp, Homo sapiens
ggctaggcatcgagtaaaacactggtgagtgaagcagacatggtccctgtcctcaaatgtgaactcatgcacaatcacaaactgtgatccccacagcaggggctctcagcccttctctctacacagcagactgattattccacaaaagactgtgcccttctccttcccaaaaaccttcagtggctccctcttgccattggcaacgtggccccagacaactcacaaacctttcttcctactcaaaatttggtcttattaaatccttaccaaatactcctgccctctgggaatgcctggatgagatactggaatgactgacggatggcaggacggaagggagcagccacttcctgaactgcctgggccaagctttccctcaggccctggcccaggcagggggaagtgaggcgggtgggggacatcaggggaggagaaacagccttrgggaatagctgagctaggagcctatcctggagctcctcaagtatctttcataggagccagaactgcaggtacccaaccccag

SEQ ID NO: 346954 - DNA, 583 bp, Homo sapiens
gctgtcccctggcttaacttcttcaggggcattccagggctgctgggatttggccccaagagctcagcctgtccagcaagcctgcgggacctggggagggcaaggtgggcaccctcagctcctgctgctgctgctgctgtggtctccccagcatcagacgctgctgggcatcacagaacctgggggctctgcctcaagccaagcagsgggtggtttccatgagtcagagccatgggtgatacgggggagagggctcacggaagccaaacccctggaaaggggaaggagatagctcgaggtcacgcggcaaatctgagctgacatacactgcctctgaaggtgcctctctccatgcttggtcccttttagagacctgaaagcagatgcagttgggcctgtcactgcagtgatatgtggagttgggtcttgggtgggcctttgcttttgttgttattttacttctgaaagtcagtggagtgcggagatgagagctcatgctcttgagttaggcttcctgggttcagattctggcttggctgtttgttggctgtgtttaacctctccaagcctcagcagtgctcag

SEQ ID NO: 346955 - DNA, 517 bp, Homo sapiens
tgtgcagcaatcacccagtctatgtggagcacttgtggtgccctcggctctgggagatgccacagaagaagctaatggggtcccaactttggggaacttaacagttgagttggagaatgaaaaagcaattcatgtgatgatctttaaactttatattcatattttatgtacttctctgaatgttgtatgtcacactttaaaaaaataaaccaaggttkcacatgagatggaagggttatggaatttaactgaaaaatggcaagatctttaaatttggagaagaggctttatttcttataaggggttacagcctgtaaggtggctgttctcatgggctgggaagtatagcctctggctaaagcctttagcaggtgctcaaagcaggtactcaaagcacctgtttgagggagggaggggtaagacaggaatttatgcttgcaggggtggacaagtttacatattcagcaaattataggaggagctgtggatattcataaaagaaggcagtgtgcacgtg

SEQ ID NO: 346956 - DNA, 517 bp, Homo sapiens
tgtgcagcaatcacccagtctatgtggagcacttgtggtgccctcggctctgggagatgccacagaagaagctaatggggtcccaactttggggaacttaacagttgagttggagaatgaaaaagcaattcatgtgatgatctttaaactttatattcatattttatgtacttctctgaatgttgtatgtcacactttaaaaaaataaaccaaggttgcacatgagatggaagggttatggaatttaactgaaaaatggcaagatctttaaatttggagaagagrctttatttcttataaggggttacagcctgtaaggtggctgttctcatgggctgggaagtatagcctctggctaaagcctttagcaggtgctcaaagcaggtactcaaagcacctgtttgagggagggaggggtaagacaggaatttatgcttgcaggggtggacaagtttacatattcagcaaattataggaggagctgtggatattcataaaagaaggcagtgtgcacgtg

SEQ ID NO: 346957 - DNA, 563 bp, Homo sapiens
gtcaaaagatgaagcaggggcggcatgaaggcactcagtgcacagcctcctcaaaccagccagagccagtccatggtgggtggtctcttattaggagaaagtcatagaaatcagtctcttgtccagtcaatccaatcaaagctgtagcttggctggtagaacagggggcttagttagtcagtgtctgatggtggctgagctgcaattgtttcracattgcttatcttgagcacagtgcttgtttagctgctggtgaaaaagaaaaacctcatggcagtgagaacagaattcattctttaagtgtggggtgcatggcttaacccttgcctggcacagccttaggtcttgtttataatttggcatcgtattgccacagattccgttctgtcaagtcttatgatctctattttaacattagtgctggtcagatgttgtgtctaaactgaaagagggaaggagtataatgatgtgtgtccaacctcccatcacatcatgactgggagctcaatctttaaggtttttctggggtccccttgatcaagagggggcttgttcagtcagtt

SEQ ID NO: 346958 - DNA, 563 bp, Homo sapiens
gtcaaaagatgaagcaggggcggcatgaaggcactcagtgcacagcctcctcaaaccagccagagccagtccatggtgggtggtctcttattaggagaaagtcatagaaatcagtctcttgtccagtcaatccaatcaaagctgtagcttggctggtagaacagggggcttagttagtcagtgtctgatggtggctgagctgcaattgtttcaacattgcttatcttgagcacagtgcttgtttagctgctggtgaaaaagaaaaacctcatggcagtgagaacagaattcattctttaagtgtggggtgcatggcttaacccttgcctggcacagccttaggtcttgtttataatttggcatcgtattgccacagattccrttctgtcaagtcttatgatctctattttaacattagtgctggtcagatgttgtgtctaaactgaaagagggaaggagtataatgatgtgtgtccaacctcccatcacatcatgactgggagctcaatctttaaggtttttctggggtccccttgatcaagagggggcttgttcagtcagtt

SEQ ID NO: 346959 - DNA, 563 bp, Homo sapiens
gtcaaaagatgaagcaggggcggcatgaaggcactcagtgcacagcctcctcaaaccagccagagccagtccatggtgggtggtctcttattaggagaaagtcatagaaatcagtctcttgtccagtcaatccaatcaaagctgtagcttggctggtagaacagggggcttagttagtcagtgtctgatggtggctgagctgcaattgtttcaacattgcttatcttgagcacagtgcttgtttagctgctggtgaaaaagaaaaacctcatggcagtgagaacagaattcattctttaagtgtggggtgcatggcttaacccttgcctggcacagccttaggtcttgtttataatttggcatcgtattgccacagattccgttctgtcaagtcttatgatctctattttaacattagtgctggtcagatgttgtgtctaaactgaaagagggaaggagtrtaatgatgtgtgtccaacctcccatcacatcatgactgggagctcaatctttaaggtttttctggggtccccttgatcaagagggggcttgttcagtcagtt

SEQ ID NO: 346960 - DNA, 563 bp, Homo sapiens
gtcaaaagatgaagcaggggcggcatgaaggcactcagtgcacagcctcctcaaaccagccagagccagtccatggtgggtggtctcttattaggagaaagtcatagaaatcagtctcttgtccagtcaatccaatcaaagctgtagcttggctggtagaacagggggcttagttagtcagtgtctgatggtggctgagctgcaattgtttcaacattgcttatcttgagcacagtgcttgtttagctgctggtgaaaaagaaaaacctcatggcagtgagaacagaattcattctttaagtgtggggtgcatggcttaacccttgcctggcacagccttaggtcttgtttataatttggcatcgtattgccacagattccgttctgtcaagtcttatgatctctattttaacattagtgctggtcagatgttgtgtctaaactgaaagagggaaggagtataatgatgtgtgtccaacctcccatcacatcatgactgggarctcaatctttaaggtttttctggggtccccttgatcaagagggggcttgttcagtcagtt

SEQ ID NO: 346961 - DNA, 621 bp, Homo sapiens
aataaatttaactaagaaggtgaaagacttctacaagaaaaaacataaaacactgatgaaaaaaatcaaagaggataccaacaaatagacattccatgctcatggatcagaagaattactattgtaaaaatgacaatacttacccaaagcaatttacagattcaacataatccccatcaaaatactaatgacattcttcacagaaacagaaattaaaattctaaaatttacatggagccacaaaagacccaaatagccaaagcaatcctgagccaaaagaataaagctgggggcaccacattaccagacttcaaaatatactacaaagctatagtaaccaaaaaagcatggcactggaataaaaacagacacacagaacaagggaacaaaatagagaacccagaaattaatccatatatatacagacaactaatgttttgacraaagtgccaagaacattcattggagaaaggacagtctaaatgggtctgggaaaactgaatatccatatgtagaggaatgaaaatagatccttacctctcatgctataaaaaaaatcaacctcaaaagggatgaaagacctaaatgtaagacccaaaactataaaaatagtagaagaaa

SEQ ID NO: 346962 - DNA, 621 bp, Homo sapiens
aataaatttaactaagaaggtgaaagacttctacaagaaaaaacataaaacactgatgaaaaaaatcaaagaggataccaacaaatagacattccatgctcatggatcagaagaattactattgtaaaaatgacaatacttacccaaagcaatttacagattcaacataatccccatcaaaatactaatgacattcttcacagaaacagaaattaaaattctaaaatttacatggagccacaaaagacccaaatagccaaagcaatcctgagccaaaagaataaagctgggggcaccacattaccagacttcaaaatatactacaaagctatagtaaccaaaaaagcatggcactggaataaaaacagacacacagaacaagggaacaaaatagagaacccagaaattaatccatatatatacagacaactaatgttttgacgaaagtgccaagaacattcaytggagaaaggacagtctaaatgggtctgggaaaactgaatatccatatgtagaggaatgaaaatagatccttacctctcatgctataaaaaaaatcaacctcaaaagggatgaaagacctaaatgtaagacccaaaactataaaaatagtagaagaaa

SEQ ID NO: 346963 - DNA, 396 bp, Homo sapiens
tgtctatttatgtccatcttcttacagtttcctgcagcagccaggatgttccacatcctatccattagcctattctcaggctaactccctttcaattaacagcatttttattcattcatttttccaggttccatccaggttctatccctggcattatcccaaacttctctctacttgcataccagctacttaatccctttatggttatggccactcayatttttatcttactatcacagcactttagaacatcatactaaaatttttacttttgcttaactacagacatagtactgtattaataataaaagcctaattcattgtttgacatctgataggtgttaaataggtattttttgaacagatgtaaaacaattgtcttttacaattcacaaa

SEQ ID NO: 346964 - DNA, 506 bp, Homo sapiens
gttggtgaaatagagttgctaccctgactagaggaagaggatgttcaaacagggggttgtggtagtggccaagcatggagtggtagagtctaagaaaggggcagagggtgttcacactagatattktcagcaacagatttttacatacataagagctgagtctatttacattgacaaatattgagcagacatatttctcactgttagaaaggaaagctataaatataaaaagaaaaaacctatgatattgattggaattagagttatcagtgtgaactcatggttttacatacacgcacgtacacatgcacacacaaacacacacatattttctgtcccctaaactggaagggtctgggagaagtgacaccccaatagcaatgagctcatttagtacctggatcttggcttctaaatattaatataattgtcattaacaagaagcaagttttcttgaggaaatcactaactttaggagtaggacagtaaaagatgagcctcgaaca

SEQ ID NO: 346965 - DNA, 506 bp, Homo sapiens
gttggtgaaatagagttgctaccctgactagaggaagaggatgttcaaacagggggttgtggtagtggccaagcatggagtggtagagtctaagaaaggggcagagggtgttcacactagatattttcagcaacagatttttacatacataagagctgagtctatttacattgacaaatattgagcagacatatttctcactgttagaaaggaaagctataaatataaaaagaaaaaacctatgatattgattggaattagagttatcagtgtgaactcatggttttacatacacgcacgtacacatgcacacacaaacacacacatattttctgtcccctaaactggaagggtctgggagaagtgacaccccaatagcaatgagctcatttagtacctggatcttggcttctaaatattaatataattgtcattaacaagaagcaagktttcttgaggaaatcactaactttaggagtaggacagtaaaagatgagcctcgaaca

SEQ ID NO: 346966 - DNA, 564 bp, Homo sapiens
taaaaaaatttcctaagcattagcacgacagttgcattttaatattattaatgccagtcattgaaacaggtttatttttaaatatatatagaaaaatacaaagcacagaatcattatattctaattgtaaaagtgaaatattgggaatgaagtttcaattgtgtgtgtttgcaatcaaaataaygcaaaatcgtaataatcactgaaatgcagggttggaagggctactacttaaaagagaggcatactgaataataagaacttacacaatgtacaattttttaatactatattggtatgttatctttattcatagcatattagcaattttaaaaaggttttgtttctagaataaaaaaattcaaaagcaaactgaagtttctatgaaaatgttagcgttagcaaattaactgaagcttaataataaatcattgtgtggacttgctgagcacttgctaagcaccatagactgatgaacttatttaatctttacaacaattatatgagctatggactattatgatcctaattttacagattaaaaaaatctgagatatgaaaata

SEQ ID NO: 346967 - DNA, 574 bp, Homo sapiens
ctaagcaccatagactgatgaacttatttaatctttacaacaattatatgagctatggactattatgatcctaattttacagattaaaaaaatctgagatatgaaaatatgtatcttayccaaagtcatacccacatagtaagtgtcagagtaggaatttgaatcccagaaatctggcaatagaatttgtgctcttaaccaccatgctatatgcatttgctcctccgagcctagaaacagtggggaccatatttgccagtgcaagctgccagaagccagtagccaagtggcagagagtgtacaggagcatcagctgttgagaggctcagaagtattcaagctgctactaccttatagtacaagggagtagaaatgagagacaggaagctgaatgccaatctaagaggcctctacctcactagagttacactgccagaaaaataaatgtgcagaatttaatgaagttgccaaataaattcatttctactgagatcaaaataggttttctaatactgagtgatcaaaacaaacctttcccctgaaatagctatactgtttgctgttagagggcatt

SEQ ID NO: 346968 - DNA, 586 bp, Homo sapiens
ttctcttcatatattcttcaagctctatgaacacagttaaatgtaattattttaatatgtgtttccttagttacagtcaagtccagtcatgcctccctaaaagcattcttaagtcaccttgatcaaattacaggtgcatgaagaatgtctcttaaatcaaatgatttaagtaaatgtgccaatgattacacttattctaaatgttgaagctccctaattaattgatcacagggtatcttttactcagtacaggaagaatgttgtacatgcttctgtaatgcttatgaatagtgattaggttctcctttatggtcatgttggatgtcagtcatccagaggatagacaggaccttcagaaaagccagaaaataacaatatttctctaggttccctttttacatgtcaaggaaagatatttaggcatgtattcatgggaaaaaagtactaaatarcaccagttagatgacagtcttctgagaaagagcattgtctatcaatttggtattgcattttgttactagcaacagacatgaaaaaaaaaaaactcagtgaaataaactaaaatgtgaaaaagtaaataatgtag

SEQ ID NO: 346969 - DNA, 604 bp, Homo sapiens
aggccacacatttgatcttcatactgagcagtgtgcttgagtcccagggaactaggtccaggccaggggatttatcctctggcccttcagtgacaagtggtgatgtgatggggggtgaactgctcccggattaccaatgaaacactcatatggggcaatrgaggctatcctgttggccccaccctgtgggaacagccataaagtcagtcttgagagggaccaacaggcaagggggtgcattgtttggaagcatcttggtcccacagcaatggtggtgggacctgacttgtcttagtcatatgaacatgcctgagcatttctctctcctgccaggcagaagcagaaactgcagctgttcattgcaggatggagagtcttgtggggtgggcacctaaaaagggttccatttttctgcagctgcccagcacagcaagccttctgggctccatgtgggttcaagcaatgcaactgtgtattctctaggcagcttccctgccagtccaaagtcttttgtggggtatgtgggagggcttgtgagagcttctgtagctaggatctcagaggcctgtggcaagaatgtggtgccccaaggttgctccactca

SEQ ID NO: 346970 - DNA, 604 bp, Homo sapiens
aggccacacatttgatcttcatactgagcagtgtgcttgagtcccagggaactaggtccaggccaggggatttatcctctggcccttcagtgacaagtggtgatgtgatggggggtgaactgctcccggattaccaatgaaacactcatatggggcaatggaggctatcctgttggccccaccctgtgggaacagccataaagtcagycttgagagggaccaacaggcaagggggtgcattgtttggaagcatcttggtcccacagcaatggtggtgggacctgacttgtcttagtcatatgaacatgcctgagcatttctctctcctgccaggcagaagcagaaactgcagctgttcattgcaggatggagagtcttgtggggtgggcacctaaaaagggttccatttttctgcagctgcccagcacagcaagccttctgggctccatgtgggttcaagcaatgcaactgtgtattctctaggcagcttccctgccagtccaaagtcttttgtggggtatgtgggagggcttgtgagagcttctgtagctaggatctcagaggcctgtggcaagaatgtggtgccccaaggttgctccactca

SEQ ID NO: 346971 - DNA, 588 bp, Homo sapiens
ccttcaataatggtcaggaaacagtaaagtggaaaatatagcgatagaaataatgaaaaataaaacagaaaaacataagatgtaaaagagcaccattgaactgttgaacaactaaaggggcctaatataaatgtaactggagttgccaaaggagaagactaatacaaggagacaaaatgtatgaagaaataatattaagttaaaaatttgatgaacaattatatacacctatccagtaatctcaacaaaatacaagttcaaaaacatgaagaataactaaaaaggcacattatcatcaaattgcataaaacatttaagaatttttgaaagttaacagcagacagagaaaaagttcaccctatacacaaagaaacaagaattacctgagctttcacattgcaaacaatgtaagctagaagacagttgagcagtatctttaaaatactgaaggaaattatcaacctgaaattttatacccagtgaaaatagcttttattatgaagaggaaatacagatattttcaaatacaaaaagctgaaaatatttatgmccagtataactgaagtaaaagaaatgttcaatgaaatc

SEQ ID NO: 346972 - DNA, 568 bp, Homo sapiens
gcaaaaggactgccgaaaggctatattttattacattaccttattcttaaaccctttgcataaaggcctaagatctaaaaattttttatcttagcataatagtattataccatcagaactataataaaaaattagattacttcttctattatgacacccatttttcatagtttaatgatgctgtgatcaaaatacccttggcaatttgatatgcatgttaagacaggttataaattacaatcaaaggtgaaatggctttatgaaattatgtatctataaagaaaaatgcaagcaagccatttttttataaagtrgaactcaatctcatcacacttacaaacaaaatttgctttcttgctcattttgaaaggaaagtagtttctactcttttgaaaaaacattgtttacataagtaaacaagccagggctgctgtgaaagttattatggaagatacaatttatatattttctggaaaatatatcgcctcatatatacagacaaaacctttgctttaacatgtttgtgcaactaattacttactttccaatgagtacaatttcccactag

SEQ ID NO: 346973 - DNA, 568 bp, Homo sapiens
gcaaaaggactgccgaaaggctatattttattacattaccttattcttaaaccctttgcataaaggcctaagatctaaaaattttttatcttagcataatagtattataccatcagaactataataaaaaattagattacttcttctattatgacacccatttttcatagtttaatgatgctgtgatcaaaatacccttggcaatttgatatgcatgttaagacaggttataaattacaatcaaaggtgaaatggctttatgaaattatgtatctataaagaaaaatgcaagcaagccatttttttataaagtagaactcaatctcatcacacttacaaacaaaatttgctttcttgytcattttgaaaggaaagtagtttctactcttttgaaaaaacattgtttacataagtaaacaagccagggctgctgtgaaagttattatggaagatacaatttatatattttctggaaaatatatcgcctcatatatacagacaaaacctttgctttaacatgtttgtgcaactaattacttactttccaatgagtacaatttcccactag

SEQ ID NO: 346974 - DNA, 568 bp, Homo sapiens
gcaaaaggactgccgaaaggctatattttattacattaccttattcttaaaccctttgcataaaggcctaagatctaaaaattttttatcttagcataatagtattataccatcagaactataataaaaaattagattacttcttctattatgacacccatttttcatagtttaatgatgctgtgatcaaaatacccttggcaatttgatatgcatgttaagacaggttataaattacaatcaaaggtgaaatggctttatgaaattatgtatctataaagaaaaatgcaagcaagccatttttttataaagtagaactcaatctcatcacacttacaaacaaaatttgctttcttgctcattttgaaaggaaagtagtttctactcttttgaaaaaacattgtttacataagtaaacaagccagggctgctgtgaaagttattatggaagatacaatttatatattttctggaaaatatatcgcctcatatatayagacaaaacctttgctttaacatgtttgtgcaactaattacttactttccaatgagtacaatttcccactag

SEQ ID NO: 346975 - DNA, 577 bp, Homo sapiens
aattctgtgtttactttatatttccatttttaagaaaattggtaaaggcagtgatcagtgataatctttactccactttgtgactatttttccgtatataatgaaaaggaaaacaaataacatgtgacatttcaatgagccacattaaaaataatatccaacacagtggtacatgacaccaaaatatgacataaacatatatttggcatttgaaaatayagaggttatcctcacagttctaaaaagcaaaggggcaaaatcattcattcagtattttgttgatattgtaattgtttaccaggcaaaagtgtgacaccaattataaaaaatgcattataattattacagttcatttgttctctcagcaaattataagagatctcagaataacagaaacccagagctgacaagtgcaactttactggaaaagaaaacaaaaccccatattcttcaagatcacttgaaaatttatttgtgtttaaataattatttcagatgatgcttgtgctcctaataatcaattaatggggaaaaatgtcttttcattacccatttgaaagcaattgttatttagtgc

SEQ ID NO: 346976 - DNA, 303 bp, Homo sapiens
cttttctttttctggaaaaatctttatttttccttcatgtttgaaggatatttttgccagatatattattctagggtaaaagttgttttgtttttatttccttaaacacttcaaatatgtcgtgccactgtctcctagcctgtaagatcgccactaaaaagtctgtcatcagatgtattacagctccattgtgtattatgtgtttcttttttttcttttttttttttttttttkgcttcttttagtatcctttttaaatacttgatctttgggagtttgattattaaatgccacaaagtctct

SEQ ID NO: 346977 - DNA, 592 bp, Homo sapiens
tgtgccatgtcctgtgagtatttctaagatcaataaggcagaagccagaccctttagatgtaactggaaaggttggggtgttgaacattccatttccttctatcctcctcataaaactaatatgggtgtttatgtcccaatctctctatgctaatctactaaactaatttaaagagatgatctgtgactaatrtctgtgcttgagttaaggcttcaccctctgattctggggagatagctgctggaagcaggcccactgtatgcccatctttttggttttctggggtttagggctactcaggaatggaaagcaccattaactcccagatttacactattgaggagacagactttggggtgggatctttaaaagttgtggcagtgggtgcataaacaaactttttccaggaagaatgggtagacctggatttatcactggggcaagctggaagaaaagtttaggaagtgctgagctctggctcaagctgccatgtggctactgtttgtatgtcccacttagctccccaatgaaagtttgttagaagccagtccatcaagtaggtactgtattccattgtcttttctgcattgc

SEQ ID NO: 346978 - DNA, 577 bp, Homo sapiens
tggggtgttgggctcctctttcctggttgtatagctctttgtctggagcaaggtctgtgtctgagggtgacagatttttctacccatctggtgtagatttttttagttgtcctgtgagtaggagtctcccaactggttttttactttttctcagagagagatgatttatgaatagaaggctatttgatgaattcatggatagagagacaggggcctcctattctatcatgtcactgagttcaacccctttaaaaggataacttatgacagtcataaatgagaagcacatattgctrtatggcataaaatattcagaaataaatataactactcttgcactcttttggtttccatttacatgggtactttttttatttcttcactttatgagtgtcttttcaggcaaagtaagtctaataggcagcataattctttttttaaaaatctattcttttgctctatgtagttacagatatgcaaagacttactagtaccattttgttgttttctgattgttttgtagattattacttgcttcctttctctctgggttagtattcatcatcaagcatattta

SEQ ID NO: 346979 - DNA, 577 bp, Homo sapiens
tggggtgttgggctcctctttcctggttgtatagctctttgtctggagcaaggtctgtgtctgagggtgacagatttttctacccatctggtgtagatttttttagttgtcctgtgagtaggagtctcccaactggttttttactttttctcagagagagatgatttatgaatagaaggctatttgatgaattcatggatagagagacaggggcctcctattctatcatgtcactgagttcaacccctttaaaaggataacttatgacagtcataaatgagaagcacatattgctgtatggcataaaatattcagaaataaatataactactcttgcactcttttggtttccatttacatgggtactttttttatttcttcactttatgagtgtcttttcaggcaaagtaagtctaataggcagcataattctttttttaaaaatctattcttttgctctatgtagttacwgatatgcaaagacttactagtaccattttgttgttttctgattgttttgtagattattacttgcttcctttctctctgggttagtattcatcatcaagcatattta

SEQ ID NO: 346980 - DNA, 565 bp, Homo sapiens
gaatctaaaaaagtcaaattcttaaaagtagaatataaaayggtggttactggaggctgaggatgtggggaaaggggtcactggtcaaggggtacaaagttttggttagatagaaggaatacattatggtggtttattgcagagtatggtgactgcagtcaataattatgtattgtattcttcaaaatagctaaaagagaggagtttaaatattctcagcacaaagatgataaatatttgaggtgatggatatgttaattaacttgatttgaccatttcatagtgtatacatataccgaaacaccatattttaccccataaatatatgtaatttatcacttaaaactttaaaatgatatatttttacagtattctttaagttaatatgctgattcatatttgtgaatacaaaatatttatttccccatttcaattttcagtatttttgacattttgaataatgctatagtgaacatctttgtatattaaaattattgcctaattatgatagtttccttaggataaaatcctagagcacaatagcttgataaaatgattcatatgt

SEQ ID NO: 346981 - DNA, 565 bp, Homo sapiens
gaatctaaaaaagtcaaattcttaaaagtagaatataaaatggtggttactggaggctgaggatgtggggaaaggggtcactggtcaaggggtacaaagttttggttagatagaaggaatacattatggtggtttattgcagagtatggtgactgcagtcaataattatgtattgtattcttcaaaatagctaaaagagaggagtttaaatattctcagcacaaagatgataaatatttgaggtgatggatatgttaattaacttgatttgaccatttcatagtgtatacatatacygaaacaccatattttaccccataaatatatgtaatttatcacttaaaactttaaaatgatatatttttacagtattctttaagttaatatgctgattcatatttgtgaatacaaaatatttatttccccatttcaattttcagtatttttgacattttgaataatgctatagtgaacatctttgtatattaaaattattgcctaattatgatagtttccttaggataaaatcctagagcacaatagcttgataaaatgattcatatgt

SEQ ID NO: 346982 - DNA, 370 bp, Homo sapiens
aatctttttcaggatcagctgtcatatttgtcaatatctttttttcttaaagaaatttattttccttattttcatcttttctacctggctgttcattctagattatttgctggccctctttgtctgattgacctccaaatattggaagagttaaaggttcagtttttggccttttttgttaaacttccaataatttctctttaggtccagtcccatctctagtgctatagtatttcctaaactttggaytctcatacagagcttccagtagacctttcctgaggattacaaactgagcaggttcataccataacaattaagattcaatctttcccattttacctaatgtcaacacttctgcgaagtttcc

SEQ ID NO: 346983 - DNA, 489 bp, Homo sapiens
tgatattaagatagccatgagctttctcttgcttatgatttgkatgatatatcttttacattctcttactttcaacctatctctgcctttatatttaatgtagagttgttgtaaatagtatgtagttttgtgttgtttttctatcccatctaacaatgaaccttctaattggagtttttagttcatttaatttaattaatttaggaacataactggtattaatatattgtaacaatacatttaatttattcactttttaatgatatctttttgtatttttaaatgtttgctgaaagtattgtaatacatactcatgaattactacattcatcttagcattattattataactctttacataagatgtaaaaaaattacattatattttttgaaatagggtctcaatctgtagctcaggctggaatgcagtggcatgaacacagctcactgcagctttgacttcttggactcaagctattctcctgcctt

SEQ ID NO: 346984 - DNA, 489 bp, Homo sapiens
tgatattaagatagccatgagctttctcttgcttatgatttggatgatatatcttttacattctcttactttcaacctatctctgcctttatatttratgtagagttgttgtaaatagtatgtagttttgtgttgtttttctatcccatctaacaatgaaccttctaattggagtttttagttcatttaatttaattaatttaggaacataactggtattaatatattgtaacaatacatttaatttattcactttttaatgatatctttttgtatttttaaatgtttgctgaaagtattgtaatacatactcatgaattactacattcatcttagcattattattataactctttacataagatgtaaaaaaattacattatattttttgaaatagggtctcaatctgtagctcaggctggaatgcagtggcatgaacacagctcactgcagctttgacttcttggactcaagctattctcctgcctt

SEQ ID NO: 346985 - DNA, 627 bp, Homo sapiens
aaattttgtcactctgtttattccgcataacttcacacttcagccaaatttgtttccatgtgttttatgtcctctgagcctagttttctagttcaaactgggctacatgacttcactgtaatttctaactactatcctatttaaaaaaaagttcatgttctaccttctctataagaaaggctaatactcctttgaattttcaatatataatatagcaaactatctttctggtaaagggaaggacgaaaggaggaaactgtgggcaatgagttactcaaggcagcttgctataagatttttgtttattttttaatattttcttttytaaaataatttcaacttttgtattagattcaggcagtacctgtggagctttgttacatgagtatattgtgtgaagggtgagaatgtaaattagttcagatactgtaaattatttttcattattgaatactttatctttttacagcagttttgggttcatggcaaaattaagaggaagttaaagagatttcacatatgcaccttacccctatacatgtgaatcctcctccatcatcaacattctccaccatagtagtacattcattataattgatgatcttacattgacacatcataatcacc

SEQ ID NO: 346986 - DNA, 627 bp, Homo sapiens
aaattttgtcactctgtttattccgcataacttcacacttcagccaaatttgtttccatgtgttttatgtcctctgagcctagttttctagttcaaactgggctacatgacttcactgtaatttctaactactatcctatttaaaaaaaagttcatgttctaccttctctataagaaaggctaatactcctttgaattttcaatatataatatagcaaactatctttctggtaaagggaaggacgaaaggaggaaactgtgggcaatgagttactcaaggcagcttgctataagatttttgtttattttttaatattttcttttctaaaataatttcaacttttgtattagattcaggcagtacctgtggagctttgttacatgagtatattgtgtgaagggtgagaatgtaaattagttcagatactgtaaattatttttcattattgaatactttatctttttacagcagttttgggttcatggcaaaattaagaggaagttaaagakatttcacatatgcaccttacccctatacatgtgaatcctcctccatcatcaacattctccaccatagtagtacattcattataattgatgatcttacattgacacatcataatcacc

SEQ ID NO: 346987 - DNA, 627 bp, Homo sapiens
aaattttgtcactctgtttattccgcataacttcacacttcagccaaatttgtttccatgtgttttatgtcctctgagcctagttttctagttcaaactgggctacatgacttcactgtaatttctaactactatcctatttaaaaaaaagttcatgttctaccttctctataagaaaggctaatactcctttgaattttcaatatataatatagcaaactatctttctggtaaagggaaggacgaaaggaggaaactgtgggcaatgagttactcaaggcagcttgctataagatttttgtttattttttaatattttcttttctaaaataatttcaacttttgtattagattcaggcagtacctgtggagctttgttacatgagtatattgtgtgaagggtgagaatgtaaattagttcagatactgtaaattatttttcattattgaatactttatctttttacagcagttttgggttcatggcaaaattaagaggaagttaaagagatttcacatatgcaccttacccctatacatgtgaatcctcctccatcatcaacattctccaccatagtagtacattcattataaytgatgatcttacattgacacatcataatcacc

SEQ ID NO: 346988 - DNA, 586 bp, Homo sapiens
tcccattacccctccatttgtaccagtagttctcaagtctgcctgtacattagaatatagtgggaagtcttcwaaaatatattttcatggcaaacatcagactatttaaattagaaattctgagaaggagttctgagactatgtgtttttaaaaagttgcctaggtgattttacaggtcaaccaaaactgagaaacactgatctaaaatgtagaaaaccttgtcatcagtcctggactaaactctcttaaaatgcagccactcaccttcagcctgagagccaaagaagtacagaaaatatcaactaataagttaatattttcttattagggagtaaaatatttggtgaaaccctttggctagtctttgctggtgtcctgaaatttacagccactgtcatcaataaaaggatcaaaatatcatctggtctagtaaggggagccacctctaatttcctataacaactttcttagtgtaatgtctggtacacaatatgcctgtaataaatggtagtagttattagtagttccacagaaaatttatcttaagtttatgaaccttctgctattaaattatgatgtttataa

SEQ ID NO: 346989 - DNA, 586 bp, Homo sapiens
tcccattacccctccatttgtaccagtagttctcaagtctgcctgtacattagaatatagtgggaagtcttctaaaatatattttcatggcaaacatcagactatttaaattagaaattctgagaaggagttctgagactatgtgtttttaaaaagttgcctaggtgattttacaggtcaaccaaaactgagaaacactgrtctaaaatgtagaaaaccttgtcatcagtcctggactaaactctcttaaaatgcagccactcaccttcagcctgagagccaaagaagtacagaaaatatcaactaataagttaatattttcttattagggagtaaaatatttggtgaaaccctttggctagtctttgctggtgtcctgaaatttacagccactgtcatcaataaaaggatcaaaatatcatctggtctagtaaggggagccacctctaatttcctataacaactttcttagtgtaatgtctggtacacaatatgcctgtaataaatggtagtagttattagtagttccacagaaaatttatcttaagtttatgaaccttctgctattaaattatgatgtttataa

SEQ ID NO: 346990 - DNA, 586 bp, Homo sapiens
tcccattacccctccatttgtaccagtagttctcaagtctgcctgtacattagaatatagtgggaagtcttctaaaatatattttcatggcaaacatcagactatttaaattagaaattctgagaaggagttctgagactatgtgtttttaaaaagttgcctaggtgattttacaggtcaaccaaaactgagaaacactgatctaaaatgtagaaaaccttgtcatcagtcctggactaaactctcttaaaatgcagccactcaccttcagcctgagagccaaagaagtacagaaaatatcaactaataagttaatattttcttattagggagtaaaatatttggtgaaaccctttggctagtctttgctggtgtcctgaaatttacagccactgtcatcaataaaaggatcaaaatatcatctggtctagtaaggggagccacctctaatttcctataacaactttcttagtgtaatgtctggtacacaatatgcctgtaataaatggtagtagttattagtagttccacagaaaatttatcttaagtttatgaaccttytgctattaaattatgatgtttataa

SEQ ID NO: 346991 - DNA, 554 bp, Homo sapiens
aactctcttaaaatgcagccactcaccttcagcctgagagccaaagaagtacagaaaatatcaactaataagttaatattttcttattagggagtaaaatatttggtgaaaccctttggctagtctttgctggtgtcctgaaatttacagccactgtcatcaataaaaggatcaaaatatcatctggtctagtaaggggagccacctctaatttcctataacaactttcttagtgtaatgtctggtacacaatatgcctgtaataaatggtagtagttattagtagttccacagaaaatttatcttaagtttatgaaccttctgctattaaattatgatgtttataatgcattcataattttttatgkcttatttcccagctaagtcagagggaaattttaatgagctagttaaatctagattctttgttcattgtatgatgttttcattttgtacatatgtgcttgcttgcttatatcatggttgattttgaaatcaaactatactgactgaaaatgaatacataaataactctttaagactacaccatcaaa

SEQ ID NO: 346992 - DNA, 633 bp, Homo sapiens
aaattagaacaagcaaagtttgtctttctgtgtctgtcacaacataatgatctctagttccatctatattgttgcaaatgacagtatttcattccctttttatggctgaatagtaagtactccattgcgtatatgtaccacattttgtctattcatctgttgacatacatttagggggcttccagatcttggctattgtgaacaggtgtgcaaccaacatgggagtatagatatcccttcagtatacagatttcctttcttttgggtatgtacctagcagtgggatcgctggatcatatagtagctctatttttagttctttgaggaacccccaaaactgttctccacagtggttgtactaataccaatatacattcccatgatatggtttggctgtgtccccacccaaatctcatcttgaattatagctttcacaattcccacatgtcgtgggagggacctagtaagaggtaattgactcatgggtgagatttttttcccgtgagatttttttgtgatagtaagtttcatgagatccgatggttttayaaaggagaatttccttgtacaagttctcttctcttgcctgccaccatccatgtaagacgtgactttgctgctcttttgacttct

SEQ ID NO: 346993 - DNA, 549 bp, Homo sapiens
ggcacagtgtctttgggtcccttccaggccaaacctgagagcactaaagagggttgggggaatggcatcttaatatacttcaattaactattgtcctgaacttggtgtcttcaatcaaataaaggtgagtacagcaagggaataaacaaccagattagtcaagcaacctagatactgtctttgccgctgactatgagacacagaaacctctgtgtattgtgggtgaaatcaatcagagtctggtggcattgtcagctggagtcagctctgtgtccaaacttggactgtatgtctagaatctgtgtcttaatgtraattggcttatggctccgtctccctcgggcataagcttccatcgtccacatggcagggtgaccccggtggaaataaacatatggtaggctatatctgtcgctcacagaggaagaataagtacactgtttgtaagagccaattaaacaggagtcagtgccacaaacagtggacatctctaacaatagattaacaggaaagtaaaactttgcggtaagggctattgataactgggga

SEQ ID NO: 346994 - DNA, 549 bp, Homo sapiens
ggcacagtgtctttgggtcccttccaggccaaacctgagagcactaaagagggttgggggaatggcatcttaatatacttcaattaactattgtcctgaacttggtgtcttcaatcaaataaaggtgagtacagcaagggaataaacaaccagattagtcaagcaacctagatactgtctttgccgctgactatgagacacagaaacctctgtgtattgtgggtgaaatcaatcagagtctggtggcattgtcagctggagtcagctctgtgtccaaacttggactgtatgtctagaatctgtgtcttaatgtgaattggcttatggctccgtctccctcgggcataagcttccatcgtccasatggcagggtgaccccggtggaaataaacatatggtaggctatatctgtcgctcacagaggaagaataagtacactgtttgtaagagccaattaaacaggagtcagtgccacaaacagtggacatctctaacaatagattaacaggaaagtaaaactttgcggtaagggctattgataactgggga

SEQ ID NO: 346995 - DNA, 348 bp, Homo sapiens
ctgaagacaaaaaaaaaaaaaaaacccactctattgtaactacttaaagagttgttgactagggataaagcactcaagtagaacaatatcaggaatcatccaaacacaaaatacactggggtatttttcttggcctttctgatatcacaccctctatgtatatttttttcttccccctggccttgaggagaaattgctgggagaaagttgccaccaaaatctctggccaaaaatctatcttttttttattccacagtagtctaggggtatagcatttggcatcctcagcttttcatctctttgaggggccttaraagctactgtgtacttagattacttattaagggt

SEQ ID NO: 346996 - DNA, 603 bp, Homo sapiens
gccagggttgatttcattctgaggcctctctccttggcttrtagatggccctcttctccccgtgtcttcatatggtcttccctctgtgcgtgcctgcatccaaattccctcttcttataaggatatcagttatacagactggggcctacccaaagaatctccattaacataattacctctttcaagaccctatctccaaatgcagtcatattctgaggtactaggtttaggactttaacatgtgaatttggaggagacacactcagcccatgacacagtcattcctcctttagattacctgcttgatcccaaaggcatttgaatctgcaactgtgacaaacagcaaaccttggtttgttcttgaacaactcaaaccttcatgtcttctttcatcaattaaacagctcctctatgaagtaccttaataatgaaacccgaagtacacttagaagagacataaaattttaaagacaggaagaacctcagagactatctcctccaggggttttcaaaccattttaagtcatggaaacttctaacaaaagttaacaaggaattgataagtaaaatagctaaactccactcctgtttgccaaaatagct

SEQ ID NO: 346997 - DNA, 585 bp, Homo sapiens
cttcaacatatttgaatatagtgcatgtgtgttaaaagtaggagcactgactcagacagatcttacgtgttttaaagcacagcatcaggtgcccacgtctatggaaaacatgacaacaccgccttcgtcattctgctaatgttccctcttctctcttcttttggctgtcaaagccagctttaatgaaagaatctcaaaccaatcatttatgcctcataatagacttaagtcaaagcattatctctgaccataagtcattattcttattgtaaatactttatactcaaagcctgtttgatttatactcaaattctgtttgattttcctcactaggaacgccttccttaaaactttccattattgtgtgatacgcttttaatacctcaccccaggaccaaaggcctccctcttggcctatgcttaggtgattggtatgaacagctctggtgctagattacccaagttcaaatcctgacttccccatgkgtagtcatatggctttgtcaatactttttaatctgagtctcagttttcttgtctgcaaaatgaggatgataataacatcaccttctttatgagattatc

SEQ ID NO: 346998 - DNA, 509 bp, Homo sapiens
ttcctgtgagtgtaaaagtggatccagatgaacattctcttccaaagtcttcgtggagcttccccagtgggaatttggtgtcttctccctgtgtcactgcagacacgtttccctaagtttagtcttgtcacacgatagtgcctgcttttaaagttgcccatatgtgaaccgcacgctcactctctccctcctcatggtgttaaaatgtgggcgtgtgaaacactcctccccggttgaaatccttgtcgtgttagaactatgtgtccattctgtcccccsagggaaatggaggtctctggattttggctaaagccccaaagcagaatgcggtgggcagtaagtgtctgcatattataaagaaatacatcccctccagagggaggccaaacaggccctttgccctttaccctgcccactatcccatgaagtccacattatcaggagacacacacccctatcaaggggaatcactgactggtgagctcagggcttttggggacggggctgtg

SEQ ID NO: 346999 - DNA, 509 bp, Homo sapiens
ttcctgtgagtgtaaaagtggatccagatgaacattctcttccaaagtcttcgtggagcttccccagtgggaatttggtgtcttctccctgtgtcactgcagacacgtttccctaagtttagtcttgtcacacgatagtgcctgcttttaaagttgcccatatgtgaaccgcacgctcactctctccctcctcatggtgttaaaatgtgggcgtgtgaaacactcctccccggttgaaatccttgtcgtgttagaactatgtgtccattctgtccccccagggaaatggaggtctctggattttggctaaagccccaaagcagaatgcggtgggcagtaagtgtctgcatattataaagaaatacatcccctccagagggaggccaaacaggccctttgcccttyaccctgcccactatcccatgaagtccacattatcaggagacacacacccctatcaaggggaatcactgactggtgagctcagggcttttggggacggggctgtg

SEQ ID NO: 347000 - DNA, 526 bp, Homo sapiens
agactttcatcagatacgtaactgattctcattgacaccattgcccctacatctgttgttctgcttttaaatgaagtgtgatatttctttccaatatccatttcctgcaaaaatatcaagtgacaggcatggtcgttctgaacaggagccaaggtgtgttgattacaaattctctgtcctcttgttgaaacttgtttatatttcacagagtcaaacatcataccagcaggaaggaccctttatggaacaccastcaggactagtggggggagctttttaataaagaggacacttaggacacgtatttgaagtcattaatgtgtatcattaatgtgtaaatttctaccaaattttttttttaatctgaaagagaaaaatggcagaatagtgtggctagggcaaagagcacttgttctggagtccacaggctgtgggttttgaccacgtcataccattaataatctgtgtaatcttgggttaatcttgggtgaaacgacttcttgggtccagagtagattacattttt

SEQ ID NO: 347001 - DNA, 526 bp, Homo sapiens
agactttcatcagatacgtaactgattctcattgacaccattgcccctacatctgttgttctgcttttaaatgaagtgtgatatttctttccaatatccatttcctgcaaaaatatcaagtgacaggcatggtcgttctgaacaggagccaaggtgtgttgattacaaattctctgtcctcttgttgaaacttgtttatatttcacagagtcaaacatcataccagcaggaaggaccctttatggaacaccactcaggactagtggggggagctttttaataaagaggacamttaggacacgtatttgaagtcattaatgtgtatcattaatgtgtaaatttctaccaaattttttttttaatctgaaagagaaaaatggcagaatagtgtggctagggcaaagagcacttgttctggagtccacaggctgtgggttttgaccacgtcataccattaataatctgtgtaatcttgggttaatcttgggtgaaacgacttcttgggtccagagtagattacattttt

SEQ ID NO: 347002 - DNA, 569 bp, Homo sapiens
atttcatcccgtacattctcatggtgaagacagcctccctctttttcaaagaagccatagacatttaaaaatttataaaataaagaagtattaaaaaaagaacacaagtgtgttcaggctgcaactcttgtcttgcaactactgatttgccagagttggcttagtggatggagatggggagctgcccactctctctgtcaccaggctaacaacagctctcaaaaatgcatactaggttgaaagaatggtcatcttggatagaggaaggcatttcaataaagaaaattagaataacatggggggcatataccccaaaaattgagagcagggacttggcaggtatctgtacacccatgttcatagcaggattattcacaacaaccaaaggtggaaacaatccaaatgtccatcagcagacacagayaacaatgtttaaatggagaaacaaaatgtaatgcaataaaatattactcatccttaaaaaggaatcaaattttgatacacactacattgtggattaaacttgaagatattatgctaactaaagttagccagacatgaagagacaa

SEQ ID NO: 347003 - DNA, 586 bp, Homo sapiens
ggcggggggtgctggtggtagtcactgaatagaggaagggcagagaaggaaaactggtagaactcagttttgctttgactgatgtgagcaattaaatgttgcccccagccctgaaaaccctactctacaaatccaaaatcctttagttagcagaatctgttctcctatgaagacaacagagagacatatgttgttatttgaacatgctctcagagggctgtgcagtcccacccatgagggaaaatacagttttcttggttattttgtttttagygattttaagagctcctgtggtatcatatgttgacaccaaggaaaggtgttttattgacccactctttaccagggcccacattctgtgtgagccaagagaagtggacaaacagcggcttcccctaccccctacttcctctgccccctccctgggttggggggagcaggaagcaatagacagcatgtctgggcggtggggagaggtgaagggatcagggaggtctgtaagagacagggtcacacagtgtggcctacagcagagcagaaaagacttgatctgggagaaattgatctgagagggaggttgcagctc

SEQ ID NO: 347004 - DNA, 487 bp, Homo sapiens
caggtgaggtcatgcctttgaccttgttttctgggcaatctgtggccgycctcttcatttcttatagcttcttctaggtgctctgcttgcctggctataaaatggctctagaccagaaggatactcaggaattggcaagaaaaaatgagcacaactctctccaatattcgttagaattcacagctgtaccaagagacacctttgattggactaaaggtcacccaggacaaatgtagaacactgcaaatgaactttgagttcccatggtagttgatcctgggagaatattgcaggcatagtatgattaactgaagttcccatgagtctagcactaggttcaaataaatgggaagaaaaaactacactcagagttcctcctttttcctacgaaaagtttttttatggatgcattaattggacttcacccacatgcaaagcttataaacttaagagtatggcaaacattggttgatttcctgaacatgca

SEQ ID NO: 347005 - DNA, 487 bp, Homo sapiens
caggtgaggtcatgcctttgaccttgttttctgggcaatctgtggccgccctcttcatttcttatwgcttcttctaggtgctctgcttgcctggctataaaatggctctagaccagaaggatactcaggaattggcaagaaaaaatgagcacaactctctccaatattcgttagaattcacagctgtaccaagagacacctttgattggactaaaggtcacccaggacaaatgtagaacactgcaaatgaactttgagttcccatggtagttgatcctgggagaatattgcaggcatagtatgattaactgaagttcccatgagtctagcactaggttcaaataaatgggaagaaaaaactacactcagagttcctcctttttcctacgaaaagtttttttatggatgcattaattggacttcacccacatgcaaagcttataaacttaagagtatggcaaacattggttgatttcctgaacatgca

SEQ ID NO: 347006 - DNA, 625 bp, Homo sapiens
ttgctttaagtattatctatggctgcttttgccctaagtcggcagagttgagttgttacaagaaagactatgtggccataaagcttaaaatgttgacracctggctttttacagaagaagattactgatccctggcttaggctattgtgtaaagtttctcaagaattaagatctttgagcaaaaaggagtcttaggaatcatcttgtctcatttcacagatgaggaaatggatactcacattctccccgctagctttaatctgtatttttaaaagacacaaggaaaaaattggagggaatttggaggaaaaaaaccccaagaattagatgtcctttgagaaaaaccaaactctaatgatagaagttaggaaactaaagatgtgacaataattacttccaagttattagagaagcaagctgaactgttattctccatttccacataggaaaggtttttccaactttaaatgggtcagatgttggaattatatttccaagggagtccagggcctggatatctttaaaacagatatgaacagctgctcaaaatgacttaggctaagattgatgatatttcccaggcagcaccctaacttgccattcattccttcactaccaaacagta

SEQ ID NO: 347007 - DNA, 487 bp, Homo sapiens
caggtgaggtcatgcctttgaccttgttttctgggcaatctgtggccgccctcttcatttcttatagcttcttctaggtgctctgcttgcctggctataaaatggctctagaccagaaggatactcaggaattggcaagaaaaaatgagcacaactctctccaatattcgttagaattcacagctgtaccaagagacacctttgattggactaaaggtcacccaggacaaatgtagaacactgcaaatgaactttgagttcccatggtagttgatcctgggagaatattgcaggcatagtatgattaactgaagttcccatgagtctagcamtaggttcaaataaatgggaagaaaaaactacactcagagttcctcctttttcctacgaaaagtttttttatggatgcattaattggacttcacccacatgcaaagcttataaacttaagagtatggcaaacattggttgatttcctgaacatgca

SEQ ID NO: 347008 - DNA, 597 bp, Homo sapiens
gttgtaagtacttttttccatcatgattgcttgatttctaatttgggatgcagtgtttctgattaattaaatgttagatttgactgcatgaaaagctattattttcttttattactgcttttccctgtgttttcatgttaaaaaatacctcgtgatactctcaatatcagaaaatgtgtcacctatatttcaaccacattactgtatggtttatttaaaaatcctttatccagaaatttattttggagtatgtgatgtgatatatacatatacaataaacatatactgtaaacatgtatttggctcgtatacatgaagtaggaaccagcatgtccaratttttatttgggctaaaatttgtataaatcagaaaggattcttttactgttttatggttcaatatggtagctagtagccacacttggttactaagtgcttgaaatgtggctgtattacaatgcacatggaggtatattgtaagtataaaatacacaggggatttcaaaacttaatttgaaaacaaagtatgtaaaatatctcaataatgtcttccatcgattacatgttgaaataataagatttgggatatattcttta

SEQ ID NO: 347009 - DNA, 597 bp, Homo sapiens
gttgtaagtacttttttccatcatgattgcttgatttctaatttgggatgcagtgtttctgattaattaaatgttagatttgactgcatgaaaagctattattttcttttattactgcttttccctgtgttttcatgttaaaaaatacctcgtgatactctcaatatcagaaaatgtgtcacctatatttcaaccacattactgtatggtttatttaaaaatcctttatccagaaatttattttggagtatgtgatgtgatatatacatatacaataaacatatactgtaaacatgtatttggctcgtatacatgaagtaggaaccagcatgtccagatttttatttgggctaaaatttgtataaatcagaaaggattcttttactgttttatggttcaatatggtagctagtagccacacttggttactaagtgcttgaaatrtggctgtattacaatgcacatggaggtatattgtaagtataaaatacacaggggatttcaaaacttaatttgaaaacaaagtatgtaaaatatctcaataatgtcttccatcgattacatgttgaaataataagatttgggatatattcttta

SEQ ID NO: 347010 - DNA, 555 bp, Homo sapiens
ttgtatataatatatcaaatatatagtcaacatataataggaagtatgttggggaaggagaaaaactgtgaggggtatcctcaggaatattgatgagtgtccttcaatagttaaagatgtatgaagcagagttacagttttaaacagtacagctgatatgcacacaaaattagttgatttcttgatgcttgatctaatattttttatgagccccactcagtattttgtttatcaaaggcagaatatcctctctttgtactcctgctataataatcctaatgctatccgcagcaaatggatgtgttttgtagaataggtggaaggtcttatctacagataggcaacagaagagtattartatagttccaaaatattaaccctttacatttataaacaaagtacaacagttcagaacagtgttatgcaaaatcatcataaaaaatcataagtggcttccagggccgagccttgacagaggtgttaaaacaccaacagggaatgtgtaaatcaaaaggaaattggtgagtaatggaagcccaggcagtcaatgaaggc

SEQ ID NO: 347011 - DNA, 563 bp, Homo sapiens
tttgaaaataaaggttaaaattgcaggcgtatttggggagaaaataacgctggcagctataaaatgttattaaataatttatatcaaggctattccaacactggtaggtggatttacaatcttttaaaaccactagaatttgggaatttgaaagcaaaaaaygaacaaacgaggaaaaataatcttctggtgtctaaaatatgatctggcagtttgtaatgagttcatgttccaagcaaagcatcagccagcttgaaatgtcaatcaatattttatgatgttgtcattatttttcacaggggcccaagaaaccctgctgacccaggtgtggattaattacatctagtcagcttcaacagcttccttaactgtcatcctttccttttgcctctttcctgttacacctgcaacttttagttcgcctctcaatttagacttatgcccttcacacgttatatttgctcttcaaagagaggtcccaacctattgcttcagatgtcttgacatgtacacctacctggatatttatggataccacatgcttatattatttccagaagtat

SEQ ID NO: 347012 - DNA, 579 bp, Homo sapiens
gttttacaacattgtaagcactcgtctggacttcttaataactcactccctgcctgtctcaagtggacagcctcttcttaacaatccacccctcaagagttcctttcaatctcttgctgccttcttggtcaagacagagagggaattccactctgcagacacccagagattttcctccagttctcatgtttggcctgaaagattccattttygctcacataactgtgaaaaagattaacttcaacctctatacaagagctccatcctccaccctacactaagtctgatgttgtgagctgcatttgcagcttttatcttataaccagatcttattctgtactaagtataactccagcattgagacctgaattacatgtggtaacatgaagagtattctttcatactccctcaaatacaagtactatgttcattcatcaattcatttatttatccaaacaacaacattcattaattcaataacattgattgaattcaacaacatctaaccaacaaatacttattgaatatctattacatgccaggaactgttcttggtgctggggacagcaacaagcaaaa

SEQ ID NO: 347013 - DNA, 579 bp, Homo sapiens
gttttacaacattgtaagcactcgtctggacttcttaataactcactccctgcctgtctcaagtggacagcctcttcttaacaatccacccctcaagagttcctttcaatctcttgctgccttcttggtcaagacagagagggaattccactctgcagacacccagagattttcctccagttctcatgtttggcctgaaagattccattttcgctcacataactgtgaaaaagattaacttcaacctctatacaagakctccatcctccaccctacactaagtctgatgttgtgagctgcatttgcagcttttatcttataaccagatcttattctgtactaagtataactccagcattgagacctgaattacatgtggtaacatgaagagtattctttcatactccctcaaatacaagtactatgttcattcatcaattcatttatttatccaaacaacaacattcattaattcaataacattgattgaattcaacaacatctaaccaacaaatacttattgaatatctattacatgccaggaactgttcttggtgctggggacagcaacaagcaaaa

SEQ ID NO: 347014 - DNA, 579 bp, Homo sapiens
gttttacaacattgtaagcactcgtctggacttcttaataactcactccctgcctgtctcaagtggacagcctcttcttaacaatccacccctcaagagttcctttcaatctcttgctgccttcttggtcaagacagagagggaattccactctgcagacacccagagattttcctccagttctcatgtttggcctgaaagattccattttcgctcacataactgtgaaaaagattaacttcaacctctatacaagagctccatcctccaccctacactaagtctgatgttgtgagctgcatttgcagcttttatcttataaccagatcttattctgtactaagtataactccagcattgagacctgaattacatgtggtaacatgaagagtattctttcatactccctcaaatacaagtmctatgttcattcatcaattcatttatttatccaaacaacaacattcattaattcaataacattgattgaattcaacaacatctaaccaacaaatacttattgaatatctattacatgccaggaactgttcttggtgctggggacagcaacaagcaaaa

SEQ ID NO: 347015 - DNA, 579 bp, Homo sapiens
gttttacaacattgtaagcactcgtctggacttcttaataactcactccctgcctgtctcaagtggacagcctcttcttaacaatccacccctcaagagttcctttcaatctcttgctgccttcttggtcaagacagagagggaattccactctgcagacacccagagattttcctccagttctcatgtttggcctgaaagattccattttcgctcacataactgtgaaaaagattaacttcaacctctatacaagagctccatcctccaccctacactaagtctgatgttgtgagctgcatttgcagcttttatcttataaccagatcttattctgtactaagtataactccagcattgagacctgaattacatgtggtaacatgaagagtattctttcatactccctcaaatacaagtactatgttcattcatyaattcatttatttatccaaacaacaacattcattaattcaataacattgattgaattcaacaacatctaaccaacaaatacttattgaatatctattacatgccaggaactgttcttggtgctggggacagcaacaagcaaaa

SEQ ID NO: 347016 - DNA, 567 bp, Homo sapiens
tgcagtgagccaagatcataccactgcactccaacctgggagacagagtaaggctccttatcaaaaatttttaaagaagactataccttaactttgctccctcacttttcaactttttgttgtttctatcttattgtactgtcttgactatgtcttraaaagttgttgtagttattatttttggttggttcattgtttagtctttctacttagaacaagaatagtttacacaccacagttacagtgttataatattctgtgtttttctgtgtactattaccagtgagttttgtaccttaagatgatttcttattactcattaatgtccttttctttctgattgaaatactccccataggatttcttgtaagacaggtctggtgttgatgaaatccctcagcttttgtttgtatggaaaagtctttatttctccttcatatttgaatgatattttcactgagtatggtattctaggataaaagcttatttcttccagaactttaaatatgtcatgccaccctctcttttcctgtaaggtttccactgaaaagtctacttccagatgta

SEQ ID NO: 347017 - DNA, 567 bp, Homo sapiens
tgcagtgagccaagatcataccactgcactccaacctgggagacagagtaaggctccttatcaaaaatttttaaagaagactataccttaactttgctccctcacttttcaactttttgttgtttctatcttattgtactgtcttgactatgtcttgaaaagttgttgtagttattatttttggttggttcattgtttagtctttctacttagaacaagaatagtttacacaccacagttacagtrttataatattctgtgtttttctgtgtactattaccagtgagttttgtaccttaagatgatttcttattactcattaatgtccttttctttctgattgaaatactccccataggatttcttgtaagacaggtctggtgttgatgaaatccctcagcttttgtttgtatggaaaagtctttatttctccttcatatttgaatgatattttcactgagtatggtattctaggataaaagcttatttcttccagaactttaaatatgtcatgccaccctctcttttcctgtaaggtttccactgaaaagtctacttccagatgta

SEQ ID NO: 347018 - DNA, 497 bp, Homo sapiens
tttttgcaggacatgattcaacccactgaggaaggtagcagttactggaaccaggtgtatatatatagagagagagatctgtagacccttccctctagaagctgaaggccctgtaaaatggagctagggagtagacaccctgctttccctccctttcttctctctgctttcttatcctttctcctattggatggctgagctcactccagaagcaaaggaacctcagtctgtggtccatgcaagattaggcttgaagggcacagatcctrgtggagaagggttaggactggatctggggcacagctgttggattgattgagattttctgtctttttctcatctttttttttttcattctattactccattatcctgaaaattttattatttgtgcctattcttttagtgttcacctggcctattttaacatgcgtatttaacttaaagtctaaaacaaattaggacctttactctcttactgaacaatgtaagacctt

SEQ ID NO: 347019 - DNA, 562 bp, Homo sapiens
ctacaaacctatgcagcatgttaccgcattgactactataggcaactgtttcactatggtaagaatttgtatatctaaacatagtaaaggtagagtaaaaagggaatattaaagatttaaaatggtacacctgtatagggcactgattatgaataaagctcgcaggactggaaggtgttctgggtgagacagtgagtggtgaattaatgtgaagatgtaggacattactgtacactactgtagactttagaaatactacacttaggctacatcaaatttctttaaattttttcttcaaaaataaattaacctcagcttatgataattttttaactttataaactttaatttttttaagtttttgactttttgtagtaacacttagcttgaaagacaaacacattgtatagttgtacaaccatattttctttctktgtatccttattgtataagcttttctgttgtttttaattttttttaactttttaaactttttaattaaaaatgagacacaaacgcacacattagcctaggcctacacagggtcaagagcatgaatacc

SEQ ID NO: 347020 - DNA, 536 bp, Homo sapiens
tctggttcaagcacctctaatatcagtattaaattgagactgtttcatcactgataataactaggaattttaattggttgatggcagctgtggaaggcataggagcttcctaaattttcacttaggaatgggggaaaaacagctagctgcacaacataaatwtaaattaaaaaaaaaagtcactctgtgattgcctgccatgagttgtgctttgttgtcatactcgcttcatgcattcatgacagcaggagagcagcatgtctgacgtagagagtatggactactggatgatgggaaggcacattgagtggagtggattctgaagttcaaaaacatgacaggcaagtttaaatttgattattaaggaactaaggaatgatatgaagatatttagcatcagtgtgatatggtgaaagtgatatttaaggaaaattattctggcagcagtgtcctagatggattgtaggactagaacatttgaatagaaaaactagttataaaaatccatacataaagtaatgagggtcgtactaaag

SEQ ID NO: 347021 - DNA, 561 bp, Homo sapiens
agttaagccatctgtgtccactggaaatgtatttgggcctcccaaaaagggactatcagcccacatccctgttgccaacttgtgtcagtatccagctttataaaatcagaaagctttattgaaaagattttgaaatattaacttaggggaacacattgtaaaccccatgcaaactataagagtctgccacctacagtagtgggacaaatgcaaaatatacatctatccaggactggkttagataagtctatggaccacaaatctgtaccatttaagtaaaggggctagacatgttggaatgagtgtcattacagcctctcccaaaatgctccttggtggcaggctaccaggtcagattggccactggtcagctcttccagcggacttcctatgcatgctttgcagtgaagtattgatgctactcaagttcctcctactttccctttccccaaaatatttttaaatcattcattattgattatttcttggggcatggaattacccatctaataccttgtagtccttatgagagaaggaagggaactagtattgtattaagga

SEQ ID NO: 347022 - DNA, 561 bp, Homo sapiens
agttaagccatctgtgtccactggaaatgtatttgggcctcccaaaaagggactatcagcccacatccctgttgccaacttgtgtcagtatccagctttataaaatcagaaagctttattgaaaagattttgaaatattaacttaggggaacacattgtaaaccccatgcaaactataagagtctgccacctacagtagtgggacaaatgcaaaatatacatctatccaggactgggttagataagtctatggaccasaaatctgtaccatttaagtaaaggggctagacatgttggaatgagtgtcattacagcctctcccaaaatgctccttggtggcaggctaccaggtcagattggccactggtcagctcttccagcggacttcctatgcatgctttgcagtgaagtattgatgctactcaagttcctcctactttccctttccccaaaatatttttaaatcattcattattgattatttcttggggcatggaattacccatctaataccttgtagtccttatgagagaaggaagggaactagtattgtattaagga

SEQ ID NO: 347023 - DNA, 564 bp, Homo sapiens
gctaccaggtcagattggccactggtcagctcttccagcggacttcctatgcatgctttgcagtgaagtattgatgctactcaagttcctcctactttccctttccccaaaatatttttaaatcattcattattgattatttcttggkgcatggaattacccatctaataccttgtagtccttatgagagaaggaagggaactagtattgtattaaggagtcagtatatgtcagacactatgctacagtactttgtagtactatactgtagtacaacagtactttgtttatatatacgatgtaattttatcctcatagcagttctgcacagaaaatgggattagactgattcttcagtctgtgtaaagtgataaacagaagctcagagcacttaagaaactgctgaagatcaaactagggattgatagaaccaagatttgaacccagctgtatctgatgcaaaaatctgactccatgctcttttcttactccatcaaccctaaataatagatttcttgccttgcttttaagaagaccgctccccatatggaaaatatctaggat

SEQ ID NO: 347024 - DNA, 564 bp, Homo sapiens
gctaccaggtcagattggccactggtcagctcttccagcggacttcctatgcatgctttgcagtgaagtattgatgctactcaagttcctcctactttccctttccccaaaatatttttaaatcattcattattgattatttcttggggcatggaattacccatctaataccttgtagtccttakgagagaaggaagggaactagtattgtattaaggagtcagtatatgtcagacactatgctacagtactttgtagtactatactgtagtacaacagtactttgtttatatatacgatgtaattttatcctcatagcagttctgcacagaaaatgggattagactgattcttcagtctgtgtaaagtgataaacagaagctcagagcacttaagaaactgctgaagatcaaactagggattgatagaaccaagatttgaacccagctgtatctgatgcaaaaatctgactccatgctcttttcttactccatcaaccctaaataatagatttcttgccttgcttttaagaagaccgctccccatatggaaaatatctaggat

SEQ ID NO: 347025 - DNA, 564 bp, Homo sapiens
gctaccaggtcagattggccactggtcagctcttccagcggacttcctatgcatgctttgcagtgaagtattgatgctactcaagttcctcctactttccctttccccaaaatatttttaaatcattcattattgattatttcttggggcatggaattacccatctaataccttgtagtccttatgagagaaggaagggaactagtattgtattaaggagtcagtatatgtcagacactatgctacagtactttgtagtactatactgtagtacaacagtactttgtttatatatacgatgtaattttatcctcatagcagttctgcacagaaaatgggattagwctgattcttcagtctgtgtaaagtgataaacagaagctcagagcacttaagaaactgctgaagatcaaactagggattgatagaaccaagatttgaacccagctgtatctgatgcaaaaatctgactccatgctcttttcttactccatcaaccctaaataatagatttcttgccttgcttttaagaagaccgctccccatatggaaaatatctaggat

SEQ ID NO: 347026 - DNA, 564 bp, Homo sapiens
gctaccaggtcagattggccactggtcagctcttccagcggacttcctatgcatgctttgcagtgaagtattgatgctactcaagttcctcctactttccctttccccaaaatatttttaaatcattcattattgattatttcttggggcatggaattacccatctaataccttgtagtccttatgagagaaggaagggaactagtattgtattaaggagtcagtatatgtcagacactatgctacagtactttgtagtactatactgtagtacaacagtactttgtttatatatacgatgtaattttatcctcatagcagttctgcacagaaaatgggattagactgattcttcagtctgtktaaagtgataaacagaagctcagagcacttaagaaactgctgaagatcaaactagggattgatagaaccaagatttgaacccagctgtatctgatgcaaaaatctgactccatgctcttttcttactccatcaaccctaaataatagatttcttgccttgcttttaagaagaccgctccccatatggaaaatatctaggat

SEQ ID NO: 347027 - DNA, 594 bp, Homo sapiens
aggcaatttcccaggtcacttatgcaagtaaccgaaggaaactgttttgttttgttcttaacgtataattcgttcttcttgctcctccaagcacctcctagaaaagcctcaaatagttggttgttctaagtgcacctccccttacaacgaaagcataggccaggcygggcatggtggttcacacttgatcccagtgctttgggaggccaaggtgaggggatcacttgagcccaggagttcaagactagcgtgggcaacatagtgtgaccctgtctctacaaaaaatagaaaataattagctggctgtggtgttgtgtacctgtggtcccagatactagggaggctgaagtgggaggattacttgagcctaggagttctaggctgcagtgagctgtgatcaggccactgagctccagcctgagtgatagagcaagacactgtcaaaaaaaaaaaaaaaaacgaaagaaagaaagtataggccacctgcccttctggtcgagccaccaacatccctcgagtagaacaaaaactgatgatagaatcctcattataagaatgcatttgtctacccctgaaaaatgacttcaaaatctc

SEQ ID NO: 347028 - DNA, 594 bp, Homo sapiens
aggcaatttcccaggtcacttatgcaagtaaccgaaggaaactgttttgttttgttcttaacgtataattcgttcttcttgctcctccaagcacctcctagaaaagcctcaaatagttggttgttctaagtgcacctccccttacaacgaaagcataggccaggccgggcatggtggttcacacttgatcccagtkctttgggaggccaaggtgaggggatcacttgagcccaggagttcaagactagcgtgggcaacatagtgtgaccctgtctctacaaaaaatagaaaataattagctggctgtggtgttgtgtacctgtggtcccagatactagggaggctgaagtgggaggattacttgagcctaggagttctaggctgcagtgagctgtgatcaggccactgagctccagcctgagtgatagagcaagacactgtcaaaaaaaaaaaaaaaaacgaaagaaagaaagtataggccacctgcccttctggtcgagccaccaacatccctcgagtagaacaaaaactgatgatagaatcctcattataagaatgcatttgtctacccctgaaaaatgacttcaaaatctc

SEQ ID NO: 347029 - DNA, 635 bp, Homo sapiens
tctccatactgaatttcaaactattttttgctcttaacaagatggagcttgaggaaaaatcacctggaaactttataccatgaggtattctcaagagggctttaataacaatattcaactgcagtcctgatgtggtgctgtctttactgagaagttaaaactattatatgatggtcagtgatgtggaaggcacactacctttttagataatttttatgtaactgaratagatgaataagaaaattgtaaacagggaaggataccttttccaagcaacctgagtgtggcagacaccttttgatcataaaacatatcccttaaacacactccctcaatcctacgtttctctccatgcacaaaacaaaattcttcaaagagctgcctaattccttgttgacttcctttcctcacctcctattccctcttcaaactacctcagtcctgtttcaaccctcacaactcatcccattaaattcaactgaaaattactgcactcagttccttgccttgtcctcagcctctgaggctgctttccctccctgcttccgcattccctcttccatggctcttctggtttcctccacatctcaggtgctcctttgcactctgccctatgagcttgccctcccattcct

SEQ ID NO: 347030 - DNA, 635 bp, Homo sapiens
tctccatactgaatttcaaactattttttgctcttaacaagatggagcttgaggaaaaatcacctggaaactttataccatgaggtattctcaagagggctttaataacaatattcaactgcagtcctgatgtggtgctgtctttactgagaagttaaaactattatatgatggtcagtgatgtggaaggcacactacctttttagataatttttatgtaactgagatagatgaataagaaaattgtaaacagggaaggataccttttccaagcaacctgartgtggcagacaccttttgatcataaaacatatcccttaaacacactccctcaatcctacgtttctctccatgcacaaaacaaaattcttcaaagagctgcctaattccttgttgacttcctttcctcacctcctattccctcttcaaactacctcagtcctgtttcaaccctcacaactcatcccattaaattcaactgaaaattactgcactcagttccttgccttgtcctcagcctctgaggctgctttccctccctgcttccgcattccctcttccatggctcttctggtttcctccacatctcaggtgctcctttgcactctgccctatgagcttgccctcccattcct

SEQ ID NO: 347031 - DNA, 635 bp, Homo sapiens
tctccatactgaatttcaaactattttttgctcttaacaagatggagcttgaggaaaaatcacctggaaactttataccatgaggtattctcaagagggctttaataacaatattcaactgcagtcctgatgtggtgctgtctttactgagaagttaaaactattatatgatggtcagtgatgtggaaggcacactacctttttagataatttttatgtaactgagatagatgaataagaaaattgtaaacagggaaggataccttttccaagcaacctgagtgtggcagacaccttttgatcataaaacatatcccttaaacacactccctcaatcctacgtttctctccatgcasaaaacaaaattcttcaaagagctgcctaattccttgttgacttcctttcctcacctcctattccctcttcaaactacctcagtcctgtttcaaccctcacaactcatcccattaaattcaactgaaaattactgcactcagttccttgccttgtcctcagcctctgaggctgctttccctccctgcttccgcattccctcttccatggctcttctggtttcctccacatctcaggtgctcctttgcactctgccctatgagcttgccctcccattcct

SEQ ID NO: 347032 - DNA, 635 bp, Homo sapiens
tctccatactgaatttcaaactattttttgctcttaacaagatggagcttgaggaaaaatcacctggaaactttataccatgaggtattctcaagagggctttaataacaatattcaactgcagtcctgatgtggtgctgtctttactgagaagttaaaactattatatgatggtcagtgatgtggaaggcacactacctttttagataatttttatgtaactgagatagatgaataagaaaattgtaaacagggaaggataccttttccaagcaacctgagtgtggcagacaccttttgatcataaaacatatcccttaaacacactccctcaatcctacgtttctctccatgcacaaracaaaattcttcaaagagctgcctaattccttgttgacttcctttcctcacctcctattccctcttcaaactacctcagtcctgtttcaaccctcacaactcatcccattaaattcaactgaaaattactgcactcagttccttgccttgtcctcagcctctgaggctgctttccctccctgcttccgcattccctcttccatggctcttctggtttcctccacatctcaggtgctcctttgcactctgccctatgagcttgccctcccattcct

SEQ ID NO: 347033 - DNA, 530 bp, Homo sapiens
cttaccctgtcccttgtggctttgagtacagaaaatgggaaattccatgcaagtggatcttcaagaggaaaacagttaaagaactatactcctcatgggctgaacatgcagaaggagccgacccctgggagaaggttaccctggggaaacagcacagaggttgctgagaatccaaagagaaaggcgacagtgggaaagggargataacatagatgaaggaaaacacttcttggctaggagggctgcagtctcccaaagttataagtgccaaagaatagaaaggggacgagggactttaatgagatttgacttgaacggtacttgaatgctgttaagtactggagggagtttcaggtggactggaattcttgcttggactgtgcatcttccaaaagacatgctcacatcacactttctttaccaatcgctaaaaataagaatacttattctgcacttactcagtgctggatactacagagaatgttcctggttcaagcaactatcctagacttactagtaagaattttttg

SEQ ID NO: 347034 - DNA, 592 bp, Homo sapiens
tagccatttaacatgactagccataggaatttttaaaagaaagaactgacttttattttattatttaattttattttattggagacagggtcttgctctgtcacccaggctggggtgcagtggcgcaatcatggttcactgcagcctcracctcccaggctcaactaatcctcccatctcagcatcccaagtagctgggactacaggtgcacatcaccacacctggctaatttttgtattttttgtagaggttttgctctgttgcccaggctggtctcaaactcctgggctcaagctgtccatccacctcagcctcccaaagtgctgggattacagacaagagccaccatgcccagcctgacgtttctttttctcactctctcttagctccatagtttaatcacactcaagtgaaattacatataatggtaaactttcctgggagtttaccatgtgctaggcagtgctctgtgtcctggatatgcatcatctcatttaatcgccacaataaccctaccaggtgaatcccattatcatccctattttatggatgacaaaattgaggcttacaaaggtttaggaatttacttga

SEQ ID NO: 347035 - DNA, 590 bp, Homo sapiens
actgtacagatatggtagggttagyatgcccaaaaaccatccagtaaaaagtgagtgtagcaagatgatttaaacaataatcaagactaagacacttttgcctgttcaatagaatatactattttgattgattcaaccatttcttctcatatgaaacatattagttaatggcttccatcaattacagtgtataacattaagaaatgagcaaaaataaattccatatgtcatttcttacactttagcagctacatttttttcacaacttcttgacactaacagatgagaaagaaggccacttttgctcaagaaccaaaacagagtactgagtccatcgtcaagagatatcagacattgaaaaagatagcagcacaggtttccagaactcttctttgagtaggaaagacttggggaaaaaaatgggccaataggtagcagacatcaactcctacaggacattgaggaaagaagtgagcgaaaaagaccctcacatacttagtttttaaatattacaaactatgaaagagtcgtattatgtgctaagagaataagtaagtatagaggtagaggtaaaagataaaggagaaatg

SEQ ID NO: 347036 - DNA, 590 bp, Homo sapiens
actgtacagatatggtagggttagcatgcccaaaaaccatccagkaaaaagtgagtgtagcaagatgatttaaacaataatcaagactaagacacttttgcctgttcaatagaatatactattttgattgattcaaccatttcttctcatatgaaacatattagttaatggcttccatcaattacagtgtataacattaagaaatgagcaaaaataaattccatatgtcatttcttacactttagcagctacatttttttcacaacttcttgacactaacagatgagaaagaaggccacttttgctcaagaaccaaaacagagtactgagtccatcgtcaagagatatcagacattgaaaaagatagcagcacaggtttccagaactcttctttgagtaggaaagacttggggaaaaaaatgggccaataggtagcagacatcaactcctacaggacattgaggaaagaagtgagcgaaaaagaccctcacatacttagtttttaaatattacaaactatgaaagagtcgtattatgtgctaagagaataagtaagtatagaggtagaggtaaaagataaaggagaaatg

SEQ ID NO: 347037 - DNA, 590 bp, Homo sapiens
actgtacagatatggtagggttagcatgcccaaaaaccatccagtaaaaagtgagtgtagcaagatgatttaaacaataatcaagactaagacacttttgcctgttcaatagaatatactattttgattgattcaaccatttcttctcatatgaaacatattagttaatggcttccatcaattacagtgtataacattaagaaatgagcaaaaataaattccatatgtcatttcttacaytttagcagctacatttttttcacaacttcttgacactaacagatgagaaagaaggccacttttgctcaagaaccaaaacagagtactgagtccatcgtcaagagatatcagacattgaaaaagatagcagcacaggtttccagaactcttctttgagtaggaaagacttggggaaaaaaatgggccaataggtagcagacatcaactcctacaggacattgaggaaagaagtgagcgaaaaagaccctcacatacttagtttttaaatattacaaactatgaaagagtcgtattatgtgctaagagaataagtaagtatagaggtagaggtaaaagataaaggagaaatg

SEQ ID NO: 347038 - DNA, 607 bp, Homo sapiens
cagcacaggtttccagaactcttctttgagtaggaaagacttggggaaaaaaatgggccaataggtagcagacatcaactcctacaggacattgaggaaagaagtgagcgaaaaagaccctcacatacttagtttttaaatattacaaactatgaaagagtcrtattatgtgctaagagaataagtaagtatagaggtagaggtaaaagataaaggagaaatggagtgattgagaatccatgtcagagaagatggaataggggattgttggatggatggatagatggatgggagaatatgaatgggtgagtttgatgtggacaaagaaaaatcatctagtccctagggattggatagtgcatttacagaaagcctcatggtggcaggcaaaaacacaagcaagttttcagctactagcctctactgagtaggaagcatagttacctgtaaagagtaaaggcagcaggctatggtgcttaaagcgaatgaggttgtggaagagatgcttagatgaatacaacaaaattactcaacagaattgagggcctggctgatattaaaataccatacttaaattctactctaagtagactctattatcacttgg

SEQ ID NO: 347039 - DNA, 607 bp, Homo sapiens
cagcacaggtttccagaactcttctttgagtaggaaagacttggggaaaaaaatgggccaataggtagcagacatcaactcctacaggacattgaggaaagaagtgagcgaaaaagaccctcacatacttagtttttaaatattacaaactatgaaagagtcgtattatgtgctaagagaataagtaagtatagaggtagaggtaaaagataaaggagaaatggagtgattgagaatccatgtcagagaagatsgaataggggattgttggatggatggatagatggatgggagaatatgaatgggtgagtttgatgtggacaaagaaaaatcatctagtccctagggattggatagtgcatttacagaaagcctcatggtggcaggcaaaaacacaagcaagttttcagctactagcctctactgagtaggaagcatagttacctgtaaagagtaaaggcagcaggctatggtgcttaaagcgaatgaggttgtggaagagatgcttagatgaatacaacaaaattactcaacagaattgagggcctggctgatattaaaataccatacttaaattctactctaagtagactctattatcacttgg

SEQ ID NO: 347040 - DNA, 607 bp, Homo sapiens
cagcacaggtttccagaactcttctttgagtaggaaagacttggggaaaaaaatgggccaataggtagcagacatcaactcctacaggacattgaggaaagaagtgagcgaaaaagaccctcacatacttagtttttaaatattacaaactatgaaagagtcgtattatgtgctaagagaataagtaagtatagaggtagaggtaaaagataaaggagaaatggagtgattgagaatccatgtcagagaagatggaataggggattgttggatggatggatagatggatgggagaatatgaatgggtgagtttgatgtggacaaagaaaaatcatctagtccctagggattggatrgtgcatttacagaaagcctcatggtggcaggcaaaaacacaagcaagttttcagctactagcctctactgagtaggaagcatagttacctgtaaagagtaaaggcagcaggctatggtgcttaaagcgaatgaggttgtggaagagatgcttagatgaatacaacaaaattactcaacagaattgagggcctggctgatattaaaataccatacttaaattctactctaagtagactctattatcacttgg

SEQ ID NO: 347041 - DNA, 607 bp, Homo sapiens
cagcacaggtttccagaactcttctttgagtaggaaagacttggggaaaaaaatgggccaataggtagcagacatcaactcctacaggacattgaggaaagaagtgagcgaaaaagaccctcacatacttagtttttaaatattacaaactatgaaagagtcgtattatgtgctaagagaataagtaagtatagaggtagaggtaaaagataaaggagaaatggagtgattgagaatccatgtcagagaagatggaataggggattgttggatggatggatagatggatgggagaatatgaatgggtgagtttgatgtggacaaagaaaaatcatctagtccctagggattggatagtgcatttacagaaagcctcatggtggcmggcaaaaacacaagcaagttttcagctactagcctctactgagtaggaagcatagttacctgtaaagagtaaaggcagcaggctatggtgcttaaagcgaatgaggttgtggaagagatgcttagatgaatacaacaaaattactcaacagaattgagggcctggctgatattaaaataccatacttaaattctactctaagtagactctattatcacttgg

SEQ ID NO: 347042 - DNA, 453 bp, Homo sapiens
actccagcagtcccctgtagtctgagtgtttcagagagtgtgtggggcagggggagatatagttggagagatctactgttggtaatatgtatacatgtatggaagaggaagggttagtttggtgcatagaagaattacaacygaacagagaaggaactaaagcaaggaggggggtgatatacaagaagagaaaagaaagagcaagtcatctagaaaaaaatctagattaaaaaataaatgcaaaccaaatcaaaggctgagaaagcggaaaggctggcaagctgtgatcagagagtgagatgagacataagaggtagagttgttctaagtgattccagattacaggggatggctgtaggatagggttcctggagaggaagtaacaataaggacatcaaaactgggtcaactgaagaaacatgagaccaaattgcctggatgacaagagttaca

SEQ ID NO: 347043 - DNA, 585 bp, Homo sapiens
tttgactgtgttttgactgcaatccatcagatgaatcaggcgtagagtttttcttgttgtagcatcatgtcagtactcaaaaagttttggattttggaatattttggatctcatattttttggatttgggatgtcaacttgcattatacttcacaaaacttaaagaataattaatggatctaggctgtgmatcagtggggggccaacatcaaaaataactagcttttggcccatgcctgtagtcccagctatctgggaggccaaggtgtgaggatagcttgcgaccctgaactccaggctgcagtgagctatcatggcacaattgcgctccagcctgggtaacagaaagagacttcatctttttttttttttttggcagctagacctatgcctctgaagggaaaaacagcatttgggaagcagtcgtgcaaaaaacaaacaaacaaacaaacaaacaaaatcctgacctgaatctggtcagttctctagatctgcctcccaatttaaggaaaacataagaatagaggaacatattatgctacacgttggagatgcaacagcaaatctagatcatggaaaatgtca

SEQ ID NO: 347044 - DNA, 609 bp, Homo sapiens
actctttgattccatgaattagactattttagatacttcatgtaaatggaataatggagttttgtctttttgtgactggcttattttacctagcaaaatgtcctcaagatttatccatactgtcacatcttgtagaatgtctttctcttttaaggctgaattgtcttcaatggtatgcacataccacattttctttatccattcatctgccgattaacatttttaggttgttgccacatcttagctattgtggatggtgctgcagtaaacatgggtgtgttactctctcttcaagatcctgatttcaattcttttgtataaatatccaaaagtggagttgctgggccatatggtagttatagttttatgttttgaggaacatccatactattttccatagtggctgtaacattttgaattcccaccaacagtatacaagggttccaatttctctacgccctcaccaatacttgttgtcttttttttttttttttttttttttagtaacagccatcctaacagstataagcaatatctcgttgtggttttgatttgcatttctcaaataattagtgccatggagcattttttcatatacctgttagccat

SEQ ID NO: 347045 - DNA, 339 bp, Homo sapiens
tgtggaatcagtgccttggacaagccaagcagtcaagcatctcaggactaagctgacgtggagccccatgtcctagagaaaccgagcattggctgagctcagacacctagtccyacaggccaagtgaccgcagtaccctgtttccctggaagtggagtagagtctgggctgctgagtccagggagtggagtcattactgtgttgcccctgcctcccagggcccaagtgacagctatgctccaccattccagagtccttgctgctgccatacttgaccccacagaatctgagatactgccatgtcccatcatcccagggtccagagtcaccattatgcag

SEQ ID NO: 347046 - DNA, 618 bp, Homo sapiens
atcaagccactttttaataatctagcaactcagagctggcaatcactctaaagaaagggatggagattattatcacccatatacccaaaagattaaaatggtggaagcagtcatgaaacccacttttactttgcagtagcacctcaattatctaaaggttattatttgagacataatttgcaaagctaaagcctgaactccctaactgagaaccagaaagtaagcagcaaacatcttaaaacaacccaggctgagagcaaaattaagctttagagcttcatgccctggtaagctcttcaggctagatatatttactcaagttatttcagagtaaataaatcagtcttggaactttgattatctcccatcarataagaaataggaaattggccaggcaaggtggcttatgcctgtaatcccagcactttgggaggctgaggcgggagtatcatttgagcccaggagttcgagaccagcctggggaacacagctggacctcgtccctacacattatttaaaaattagctagccatgttggcgcatgcctgtgcttgcagctacttgggagactgaggtgggagaatcactttaccctgggaggtccaggcttcagtgagc

SEQ ID NO: 347047 - DNA, 565 bp, Homo sapiens
tacattccaggagtttgtaggtgcaaagagtatttaagtttttcttctgaatatggatcatttttgagggagagctagtatagagttgtttttaagccctgtccagaaagggccatactgcaagtgatcagcaaccatctggggccagtggcatgrgcagtaagaagaatttaccaagacagtttgtaggtaaagaaaggcaggattattcaagaaagtatgaaaatacattgcaagtgtacaatgggcaggtcagcaagaaaggagctgactgtaaggagacaaaagcttgctggggattttgtgtgatgtgctaaagaaggctttgtgcagtactgataacaccaaggttgcagtgaactaacctgcattttactctcatccaagggtctggtgatagctgggctcagaaagattgtgaattatttgcacaagagtgctacgtgtcctggactatgaagaaaggcagacttatagcttacctgctttttctttttgcttttccctgctcccaccagcctggctccttttccctaattaggactctatagtccagaggtagaaa

SEQ ID NO: 347048 - DNA, 551 bp, Homo sapiens
tcatttttgagggagagctagtatagagttgtttttaagccctgtccagaaagggccatactgcaagtgatcagcaaccatctggggccagtggcatgagcagtaagaagaatttaccaagacagtttgtaggtaaagaaaggcaggattattcaagaaagtatgaaaatacattgcaagtgtacaatgggcaggtcagcaagaaaggagctgactgtaaggagacaaaagcttgctggggattttgtgtgatgtgctaaagaaggctttgtgcagtactgataacaccaaggttgcagtgaactaacctgcattttactstcatccaagggtctggtgatagctgggctcagaaagattgtgaattatttgcacaagagtgctacgtgtcctggactatgaagaaaggcagacttatagcttacctgctttttctttttgcttttccctgctcccaccagcctggctccttttccctaattaggactctatagtccagaggtagaaattctgagtgctgtcaacttttcagcagacaaggaagtaatgaa

SEQ ID NO: 347049 - DNA, 565 bp, Homo sapiens
ctgtatttacatggctgttaaatgatattccatgttacaatccaaatatctacatatactatacaaatatgtgcagatatatgctgaaaactctaaagaaaataaaacaaatggaattctctgttttcaagtgttgataattagaatgttcactgattctaaagtttattagactggtggtagtatcagttcaaatactgtcctctaaggttgcagtttctcaggtgcacacacaaatattccacagatgcatamacagcagagttaatccccaaaaaacaatgaaaacatcattacaatactctgatgtacccaatcttctgatctaaaaaataccaaatggagatttcacaacagaaaatactacagtgataactgctttcatcaactgaccccaaaatattctattacatttccaagaagataatgtctttgcagttacacaatggaggccagaattttaaagaactatgaagaattcctactccccatgtgtggaaataagccaaatcagaaagtagcagctcccatagaacatttcaacattagatttgtcaggggagtt

SEQ ID NO: 347050 - DNA, 564 bp, Homo sapiens
gcttcctctgaagcatattctcacgacaaaatggaatagccctgaaggtagagtgtatttgagaatctctcgtttaaaaaccctgagagggaaggttaggattgaagcatttgcccaagtgataaaactcctgccttcaaagctctcattatagaatttcttcaaaggaattttacgtttcattaaaaaaaaagaaacaaaagagactttaaaaaaatcatcaaaaaatccaaaaatcaaagtttttgctcttctcttctcaatgaaagggaaagcaaaggcaaagagccccgaccaccgtccccacaaatgatgtgccagtcctccctgtstgatatcagacccttcccttcccttgccctgctctgccttgcccttcccaggaatgaccctgcaggctacctctctcaggcacccctgcgaagtggcttctagttagatttacataatgggatgtggcaggagactgagggccaaagaaaggtcagctccaagatgtggcagtccttttctctgtctccagcagtatctacacattctctctctctctctctctctctctct

SEQ ID NO: 347051 - DNA, 564 bp, Homo sapiens
gcttcctctgaagcatattctcacgacaaaatggaatagccctgaaggtagagtgtatttgagaatctctcgtttaaaaaccctgagagggaaggttaggattgaagcatttgcccaagtgataaaactcctgccttcaaagctctcattatagaatttcttcaaaggaattttacgtttcattaaaaaaaaagaaacaaaagagactttaaaaaaatcatcaaaaaatccaaaaatcaaagtttttgctcttctcttctcaatgaaagggaaagcaaaggcaaagagccccgaccaccgtccccacaaatgatgtgccagtcctccctgtgtgatatcagacccttcccttcccttgccctgctctgccttgcccttcccaggaatgaccctgcaggctacctctctcaggcacccctgcgaagtggcttctagttagatttacataatgggatgtggcaggagactgagggccaaagraaggtcagctccaagatgtggcagtccttttctctgtctccagcagtatctacacattctctctctctctctctctctctctct

SEQ ID NO: 347052 - DNA, 634 bp, Homo sapiens
gaatttcttaaagttccaggttgttaaaatttgttattcctatctctgcctacattataaaaatgggaacaatattatcttatatttactttccttttcctcaaaaaaaagagagaaatatcaggtgccaagcatagtactatgtgccaaagacagagtgctgagtcagatatgacctctgtcttcaaaaagattacatggatcttttaaatgaatgagctcatttatatgattttgttacacattatatatacaccatttcatattattttatatgagattcttacacattatatataccattgcatattatgtattgtgttacatattatagaatgctatatattatacatttttaattctcaccacttgccaaacctataaaatgtgttcaattgtktacacataaattcagatctttctgctgtcccttcccattatcctctaatgtgctccaccactctactcaatatttctctgactctttagaaactctcacatattattttgtgctattattctatacacgggttttatccctaagataacaatacattaaccttcaaccctcctagtatattattaaggataaataagatctttacctataactgtagtctgcatacacacattt

SEQ ID NO: 347053 - DNA, 409 bp, Homo sapiens
tatcacgtcatttccatctctggttatgaagatcattcatactactaattttaatgagtctgtcccatgccattgtaatttattgcattttacacaagttcctctcagttattttcctatgttcctttcttaactgacaagaatctaggtgtacacacagtactgagaatatatgatgttatactttaataaaagaygaaatgtcattcttttggccttaacaaaaaatcttcaattacaaatttccatcttgccagtcttaaaaagtaaattttcattacattatgatctggcagatattatataggactgagagctgaaaggagtgaaatagaattctagttttatataagaatgaaaatacatatcatattactatataactcggaggagaaatatatttgagata

SEQ ID NO: 347054 - DNA, 409 bp, Homo sapiens
tatcacgtcatttccatctctggttatgaagatcattcatactactaattttaatgagtctgtcccatgccattgtaatttattgcattttacacaagttcctctcagttattttcctatgttcctttcttaactgacaagaatctaggtgtacacacagtactgagaatatatgatgttatactttaataaaagacgaaatgtcattcttttggccttaacaaaaaatcttcaattacaaatttccatcttgccagtcttaaaaagtaaattttcattacattatgatctggcagatattatataggactgagagctgaaaggagtgaaatagaattctagttttatataagaatgaaaatacatatcatattactatataactyggaggagaaatatatttgagata

SEQ ID NO: 347055 - DNA, 618 bp, Homo sapiens
tctaactataccttagggtcattgcataactctgaatataaatttactgcaatgaaagtgatgagaaaaggcttggctgagagagtggacttcttaattttctggaactgcatgcagttggcagttcccaagttgggagcatggagtaggtggacagagagcaaactggtggggacagggtaaaaaaagagcgaatgtgtgcaacgttacatgasagagagggagggattttgtagctagcatgagtgtgaaaccttagaggaaagagaaggatgtctaaggcagattttaaggaagttttatttgtttgaagcagcatatagattctcattatcccttcaagaaaacccgaagtgaagagccgcattcttctttttggtgttcagagtaggttcctattgcttttgaaagtgtcactataccgaggctagttgtatgaggactctgatttgcaagggtgtcaggtagcatccaactctcatttaatcatcaaataactcaaccacccttacagcatggggggcgagggtcgatgggtggttactgaagagtgtagtgtacatttctgatttcctggatgagaaggaccctggaaagacattctgcaggggtccttat

SEQ ID NO: 347056 - DNA, 542 bp, Homo sapiens
acgatgatataatgatgtttggagtaggggatgagtatggtatatttgatgaggttatgaaggagactttggtttagtggtaaacaaaatttacccattgacttacccaatggttattgaagatagaggcaaaacaaagctcagttcttcccagtgatatcactcaccagaatattacctggatgcaatcgactgtggccccggtttatgtctttttccctcctcaaacctttcaaccacaagagcttattggtcatatgtgtacatttatgtttattaataaatagctgtttttataaaacaagaagtgctttataaacactgagactttcaagttaaaaaaaaagyctaataaatggtgacgtagctcattcagtacaaatttaatagttttaaactatattaaattgagttttgctaactgataaatgttgtgttatagtttttttttttaattcagggaaagaatgttctggtacaagaggagttttcacaatgaaaataggaaaaaacttttctgaaaaacttttatttatgttatc

SEQ ID NO: 347057 - DNA, 542 bp, Homo sapiens
acgatgatataatgatgtttggagtaggggatgagtatggtatatttgatgaggttatgaaggagactttggtttagtggtaaacaaaatttacccattgacttacccaatggttattgaagatagaggcaaaacaaagctcagttcttcccagtgatatcactcaccagaatattacctggatgcaatcgactgtggccccggtttatgtctttttccctcctcaaacctttcaaccacaagagcttattggtcatatgtgtacatttatgtttattaataaatagctgtttttataaaacaagaagtgctttataaacactgagactttcaagttaaaaaaaaagcctaataartggtgacgtagctcattcagtacaaatttaatagttttaaactatattaaattgagttttgctaactgataaatgttgtgttatagtttttttttttaattcagggaaagaatgttctggtacaagaggagttttcacaatgaaaataggaaaaaacttttctgaaaaacttttatttatgttatc

SEQ ID NO: 347058 - DNA, 569 bp, Homo sapiens
taagtcaatgaggctttccgttctattttagtacatgattccagcaaagactttgcatcctttcttttaacaacaatctaatatcaaaggactgtcagtgctgtgactctgctttatttttgcccatgccagcaaaagtttgagtcatttttctaaaatgctggcaaagttcaaagagacktcatagtaactctcaacttactggtgagatatatgtgtatgccttttgcacattataactccaggcatcctgtattttctctaatgacatatggagtaataaacatgtgaaagacattatttggtgaaactgaaagagtctgagttatgtggcaaggagtgtagggttcaattgtgatttttttaaatgcctctctttatatcttctttaatactgtgttctttggtcttacaacttcttagcctgtagggataagaagggtacaacataacattttttctgtgtaagaaacacaatggcttatgattttgatgtctcattaaaatagaatacagatatactcatctttcttagaatttcattttggtctatgaattgttagcagggg

SEQ ID NO: 347059 - DNA, 569 bp, Homo sapiens
taagtcaatgaggctttccgttctattttagtacatgattccagcaaagactttgcatcctttcttttaacaacaatctaatatcaaaggactgtcagtgctgtgactctgctttatttttgcccatgccagcaaaagtttgagtcatttttctaaaatgctggcaaagttcaaagagacgtcatagtaactctcaacttactggtgagatatatgtgtatgccttttgcacattataactccaggcatcctgtattttctctaatgacatatggagtaataaacatgtgaaagacattatttggtgaaactgaaagagtctgagttatgtggcaaggagtgtagggttcaattgtgattwttttaaatgcctctctttatatcttctttaatactgtgttctttggtcttacaacttcttagcctgtagggataagaagggtacaacataacattttttctgtgtaagaaacacaatggcttatgattttgatgtctcattaaaatagaatacagatatactcatctttcttagaatttcattttggtctatgaattgttagcagggg

SEQ ID NO: 347060 - DNA, 566 bp, Homo sapiens
aatcatcctcaaactgctgaaaaaccaaacaaagataaagataaaattttattttttatttttatttatttatttattttgagatggagttttgctctgttgcccaggatggagtgcaatggcgtgatctcagctcacttgcaacctcaacctcccaggttcaagygattttcctgcctctgcctcccgagcagatgggattacaggtgaccgccaccaggcctggctaattttttttgtatttttagtggagagggggtttcaccatgtttgccaagctggtctcaaactcctgacctcaggtgatccagccacctcagcctcccaaactgctgggattacaggcatgagccaccatgcccatgccaagagaaaatgtttaaagtgggtggactctgggggtagaggtgtgagtgaaggtaggggaaacacattatgtagcagggaatgacaggttagcaaatacactacctagacaataagcatgataaagctggtgtggctttgtcttttcagatgaagtagacttcaagacaaaaattattaccacagataaaggaagatat

SEQ ID NO: 347061 - DNA, 566 bp, Homo sapiens
aatcatcctcaaactgctgaaaaaccaaacaaagataaagataaaattttattttttatttttatttatttatttattttgagatggagttttgctctgttgcccaggatggagtgcaatggcgtgatctcagctcacttgcaacctcaacctcccaggttcaagcgattttcctgcctctgcctcccgagcagatgggattacaggtgaccgccaccaggcctggctaattttttttgtatttttagtrgagagggggtttcaccatgtttgccaagctggtctcaaactcctgacctcaggtgatccagccacctcagcctcccaaactgctgggattacaggcatgagccaccatgcccatgccaagagaaaatgtttaaagtgggtggactctgggggtagaggtgtgagtgaaggtaggggaaacacattatgtagcagggaatgacaggttagcaaatacactacctagacaataagcatgataaagctggtgtggctttgtcttttcagatgaagtagacttcaagacaaaaattattaccacagataaaggaagatat

SEQ ID NO: 347062 - DNA, 558 bp, Homo sapiens
actcactatctatggcaactatagccttaggaaatgtatttcttaaataaaatacttgaaagtcraaattactccttgatggatgcatggattgcagaatgaatcttgtattaggaggcattaagaaaaaacctccttgtatatcttcatcagagctcttaggtagccatgtgcattgtcagtgagcagtaatgatttgaaagaattttttgtgaataataggtctcaacagtgggtttaaaatattctgtaaaccaggctgtagacagatgatatctgtaaacagataacatctgtttgtcatccaggctctgttgttccttttataaagcacagtcagagtagatacagtatatttcttaagagccctaggactttcagaatgataaattagcattgttccacttaaagtcaccagctgcattagcccctaacaagagagtcagcctgcccttttaagttctgaagccaggcattgacttctcctctctagctatgaaagtcctagatggcatcttatttcatataaggctgtttcatctacattgaaaatctatt

SEQ ID NO: 347063 - DNA, 558 bp, Homo sapiens
actcactatctatggcaactatagccttaggaaatgtatttcttaaataaaatacttgaaagtcaaaattactccttgatggatgcatggattgcagaatgaatcttgtattaggaggcattaagaaaaaacctccttgtatatcttcatcagagctcttargtagccatgtgcattgtcagtgagcagtaatgatttgaaagaattttttgtgaataataggtctcaacagtgggtttaaaatattctgtaaaccaggctgtagacagatgatatctgtaaacagataacatctgtttgtcatccaggctctgttgttccttttataaagcacagtcagagtagatacagtatatttcttaagagccctaggactttcagaatgataaattagcattgttccacttaaagtcaccagctgcattagcccctaacaagagagtcagcctgcccttttaagttctgaagccaggcattgacttctcctctctagctatgaaagtcctagatggcatcttatttcatataaggctgtttcatctacattgaaaatctatt

SEQ ID NO: 347064 - DNA, 521 bp, Homo sapiens
caaagctgcttctcttgatcagttaggaatgtttctaacttggggactgtttgagtcttatcacttcattgatgcagctttaatacatgtgcataatcttgcataatccactttcatgtactaaggcttcctgatttcatctcactattccacttgacttttttcctgatktgtttaattttatcttcatcttactgagttattgtagttttgttagtagctcatattatatttttaagtagatggataataaaatacattaacttaacaaatggtatccaacagaaatggatgttacaagcatacagctatatgattaatacctgattaaagaatttaaacctaggaaatgttttcagcccagaagagaccaacagataactctaaacatgccactaaaatgaattatgtgcaaagcccattccttgcaagttagaacttctacatgttgattcaagtcccattcacatggctcttcaactaatctctcagtgttccaagtcaatgattgggcttgaaag

SEQ ID NO: 347065 - DNA, 493 bp, Homo sapiens
ccacccatcttttctatactgtgcagctagtcgaagttccacagagaataatgtggctctgagttgattttcctctgggaagcacccggcaaaaattaacagctacctagggacttagcttttgtcaacamtgaaccacataaaactttccaaacccatttaattgtctgcacgatgcacaaagactttccctgtgtccttgctcagacataacacacccatttaaataaaaccagattggcattctccaacctcgcatttattctctcttggggaaccaaatggcaggtgagataagtaaagacagtagaatccatgcgcgcgcaactaagaaagtcaagcagaggagagacagccatttccagaacaagataatgtaaatcttcatctagccttctttagatacgcgcacaatcttttaaaaatagacatcatcatattaacatgaagtcacaaattttatggcctctgaggtagtttcaagaatcatgac

SEQ ID NO: 347066 - DNA, 493 bp, Homo sapiens
ccacccatcttttctatactgtgcagctagtcgaagttccacagagaataatgtggctctgagttgattttcctctgggaagcacccggcaaaaattaacagctacctagggacttagcttttgtcaacactgaaccamataaaactttccaaacccatttaattgtctgcacgatgcacaaagactttccctgtgtccttgctcagacataacacacccatttaaataaaaccagattggcattctccaacctcgcatttattctctcttggggaaccaaatggcaggtgagataagtaaagacagtagaatccatgcgcgcgcaactaagaaagtcaagcagaggagagacagccatttccagaacaagataatgtaaatcttcatctagccttctttagatacgcgcacaatcttttaaaaatagacatcatcatattaacatgaagtcacaaattttatggcctctgaggtagtttcaagaatcatgac

SEQ ID NO: 347067 - DNA, 493 bp, Homo sapiens
ccacccatcttttctatactgtgcagctagtcgaagttccacagagaataatgtggctctgagttgattttcctctgggaagcacccggcaaaaattaacagctacctagggacttagcttttgtcaacactgaaccacataaaactttccaaacccatttaattgtctgcacgatgcacaaagactttccctgtstccttgctcagacataacacacccatttaaataaaaccagattggcattctccaacctcgcatttattctctcttggggaaccaaatggcaggtgagataagtaaagacagtagaatccatgcgcgcgcaactaagaaagtcaagcagaggagagacagccatttccagaacaagataatgtaaatcttcatctagccttctttagatacgcgcacaatcttttaaaaatagacatcatcatattaacatgaagtcacaaattttatggcctctgaggtagtttcaagaatcatgac

SEQ ID NO: 347068 - DNA, 493 bp, Homo sapiens
ccacccatcttttctatactgtgcagctagtcgaagttccacagagaataatgtggctctgagttgattttcctctgggaagcacccggcaaaaattaacagctacctagggacttagcttttgtcaacactgaaccacataaaactttccaaacccatttaattgtctgcacgatgcacaaagactttccctgtgtccttgctcagacataacacacccatttaaataaaaccagattggcattctccaacctcgcatttattctctcttggkgaaccaaatggcaggtgagataagtaaagacagtagaatccatgcgcgcgcaactaagaaagtcaagcagaggagagacagccatttccagaacaagataatgtaaatcttcatctagccttctttagatacgcgcacaatcttttaaaaatagacatcatcatattaacatgaagtcacaaattttatggcctctgaggtagtttcaagaatcatgac

SEQ ID NO: 347069 - DNA, 581 bp, Homo sapiens
gaccaacagatgagtagaagtcttccaagagaaaagaccagggaatgatattctagggaaaggagatagtaaaaatcaaagatatggaagcataaaaatgcttatatgtcagggaaaagttggataatatcatagggctagaatagttctacttgaagtgtgatccatgaaccagcaggatcatcacctgggagcatattagaaatgccaattatcagaccacaattcttattgcctgaatgagactctctggaagagggatttagcagtctaatttagctctttgggtgattctgacacaggtttgagcagcactggactgaaacactaactgattttggagatggactacagggaaggggagcasggtatattggaggtggggccatgtcttgatgaatcatgggcattaattaagcataattaagctcactgaaaatacactgaatgagataaatgattgggtttgaataaatagcaccatgtcacccacaaataaacataatatcaggatgtgaatgtcacagtgatgatccacggacgataactaactatatgtgtccaccttacacgacacagca

SEQ ID NO: 347070 - DNA, 546 bp, Homo sapiens
gttccatgaaaaattgaccatgaagtcaattctgatacccctggaataaccaggctttgttcagggttcttgaacattttcttatgcttgttttacaaacctgttttcatatgtgcatattcagtgctgagtacactgtaagcaatcaataatattttgttctatactaataataataacttaagtagtacttctcatgtgccagatactgtkaaaaagcaccttgttcatgttaattcatttaagcctcacaactacctattattatacccatttcacatagagaaaactgaggcatactaaaggttagaaaaatttcccacagtcactcactcagctattaaatggccgactaattagaacttagtcgggctacctttggatgaatgggtggatgggtaggtggatgaataattagatggaagaaagggagagagagagaagaagagaaaggaagaagagaggggaggacagataaactgtcagcaatagggaatggcagtggaggcacatgtgaaagagcgctttctgttgcaggaacatcaa

SEQ ID NO: 347071 - DNA, 581 bp, Homo sapiens
gaccaacagatgagtagaagtcttccaagagaaaagaccagggaatgatattctagggaaaggagatagtaaaaatcaaagatatggaagcataaaaatgcttatatgtcagggaaaagttggataatatcatagggctagaatagttctacttgaagtgtgatccatgaaccagcaggatcatcacctgggagcatattagaaatgccaattatcagaccacaattcttattgcctgaatgagactctctggaagagggatttagcagtctaatttagctctttgggtgattctgacacaggtttgagcagcactggactgaaacactaactgattttggagatggactacagggaaggggagcacggtatattggaggtggggccatgtcttgatgaatcatggkcattaattaagcataattaagctcactgaaaatacactgaatgagataaatgattgggtttgaataaatagcaccatgtcacccacaaataaacataatatcaggatgtgaatgtcacagtgatgatccacggacgataactaactatatgtgtccaccttacacgacacagca

SEQ ID NO: 347072 - DNA, 542 bp, Homo sapiens
ctattaaatggccgactaattagaacttagtcgggctacctttggatgaatgggtggatgggtaggtggatgaataattagatggaagaaagggagagagagagaagaagagaaaggaagaagagaggggaggacagataaactgtcagcaatagggaatggcagtggaggcacatgtgaaagagcgctttctgttgcaggaacatcaagtcttttggtggggcargggcagtggtatatgcttgtaaactctacaaccagctttctaggggaaaatgcttgctttgtagtataaatagtggtgtaaatcctcctaccatggctgatttcatgatgccaacacaatatctgatcacagagttggagagaaaaaatgtggacaatcgtcagcacaggccagttcgaacacaccagagcacagggtatgccaaggaaaatggcaggtaaagcgacaggtaacagccaggtgacaaaggactgtggaggccaaagcaactccatcttggatgctaatccaccatgttgacttctgattaacttca

SEQ ID NO: 347073 - DNA, 581 bp, Homo sapiens
gaccaacagatgagtagaagtcttccaagagaaaagaccagggaatgatattctagggaaaggagatagtaaaaatcaaagatatggaagcataaaaatgcttatatgtcagggaaaagttggataatatcatagggctagaatagttctacttgaagtgtgatccatgaaccagcaggatcatcacctgggagcatattagaaatgccaattatcagaccacaattcttattgcctgaatgagactctctggaagagggatttagcagtctaatttagctctttgggtgattctgacacaggtttgagcagcactggactgaaacactaactgattttggagatggactacagggaaggggagcacggtatattggaggtggggccatgtcttgatgaatcatgggcattaattaagcataattaagctmactgaaaatacactgaatgagataaatgattgggtttgaataaatagcaccatgtcacccacaaataaacataatatcaggatgtgaatgtcacagtgatgatccacggacgataactaactatatgtgtccaccttacacgacacagca

SEQ ID NO: 347074 - DNA, 581 bp, Homo sapiens
gaccaacagatgagtagaagtcttccaagagaaaagaccagggaatgatattctagggaaaggagatagtaaaaatcaaagatatggaagcataaaaatgcttatatgtcagggaaaagttggataatatcatagggctagaatagttctacttgaagtgtgatccatgaaccagcaggatcatcacctgggagcatattagaaatgccaattatcagaccacaattcttattgcctgaatgagactctctggaagagggatttagcagtctaatttagctctttgggtgattctgacacaggtttgagcagcactggactgaaacactaactgattttggagatggactacagggaaggggagcacggtatattggaggtggggccatgtcttgatgaatcatgggcattaattaagcataattaagctcactgaaaatacactgaatgagataaatgattggktttgaataaatagcaccatgtcacccacaaataaacataatatcaggatgtgaatgtcacagtgatgatccacggacgataactaactatatgtgtccaccttacacgacacagca

SEQ ID NO: 347075 - DNA, 632 bp, Homo sapiens
ggctttaccaaaccttgtatttacctaaactttaatttggaagacgtgatgttactactaaaaatcgctctctacttctcctccccttaaaaacaaactaatagataaatagaccaactttaaacctattgtggggacataattcacaaaaaagcacasaaatcctgtaatgggaaaatttatccagcactacaatattgatgacagtctaatttgctaacatttctcatcacttcattatagtctaaatccacaaggtgctcttcttgaagaatatttgtttctggatcaactttgaatataaatttaaaccctatccagatgcaggaatactaaacctcacacaaaggaatgctcactaggattgaacccaccaaataaatgacacattgggggaatttgcttctgatttggtgacagagatttactagatagataattatttaacgttatctatgtagaaccccttggggaaataaaaatgtatctccacagtaacctagcgaaattttgtaccaggaagtctaacagaagtgttagtgtagtggctaagaaatgtgtttctaatctttttgacccctttggactccttcagtcatctggtaaagccagtggatttcttcttggaacaa

SEQ ID NO: 347076 - DNA, 627 bp, Homo sapiens
tttcttttaaaggactttaaagagactaactcatttaattctcatagagagcataaaggggattgctattgtaatcctcattttacaaatgaggagactgaggcgtcaagaaactaacttacccaagatagcgcagataaaaagcagtcgagctgggactcaaactctaatcgtacctctgagccatgccccattaataaaataggcggacagctggaaagtcatttatacasatacacatttaaatactgagttaaactctctccttgagactcacatacactaccactttccctagcacttgtgccatcctctttcccaaactaatttagatgctgcttctttatttttctcttatacttctggatccacctcaatcctgatccccccacccctacccaagactgtgggccctgaagaacagataacatttttattaatctttgccacaccattgtctagcgaaatgcctgacacagcaatatttagtgaataaatgaataaatgattgaggctatatctgtctattaaatctatgggaatcaatctatactgttccatttctggaaagtaggcacagtgctttttatttttttataccctcctaaatgcttagtagctgtctca

SEQ ID NO: 347077 - DNA, 393 bp, Homo sapiens
gccatttatgcagatattatttcttaggatgaggaatcatttaaataagttgacttcaagaagaagattacataagtatgaacacaggtagagcttagatatagcagaaatcttgaaggtagtattcgagtgactaatatgtgggaagcactaacttaaktgtgttgatgaggcttttgttctaacaaattcagaagaggagattgccttagcaggtaatacccagttcttatgtcagaagtgtttttattcactcatttggtaactcagcctaaaaattcctttgagaatgtgagttatttcacatctacttcatattggtcatacctggtacttagaatgttagactttaacctggatacaattagggggaacaatcagacacatttaaat

SEQ ID NO: 347078 - DNA, 393 bp, Homo sapiens
gccatttatgcagatattatttcttaggatgaggaatcatttaaataagttgacttcaagaagaagattacataagtatgaacacaggtagagcttagatatagcagaaatcttgaaggtagtattcgagtgactaatatgtgggaagcactaacttaagtgtgttgatgaggcttttgttctaacaaattcagaagaggagattgccttagcaggtaatacccagttcttatgtcagaagtgtttttattcaytcatttggtaactcagcctaaaaattcctttgagaatgtgagttatttcacatctacttcatattggtcatacctggtacttagaatgttagactttaacctggatacaattagggggaacaatcagacacatttaaat

SEQ ID NO: 347079 - DNA, 604 bp, Homo sapiens
aacttggtggggttatataggaactccctgttctatatttacaacttttctgtacaactaaaactattctaaatttctaatttcatttaaaaatagcagtatctattgccaagcagttggcaggattggttgagataatatgtacaaagccctgagcttgtagtagagatctaataaatattattaccctcccttccatgaagacccttaaaatccccccaatctttaacattttctattatcagataaattctttcacatgtacttcttctgtcttggkatggctgaaaaaaataattgtcttataataaactttcataaatttgaaggcagccatgtattttcctttccttttcttctccactattaataatctatttgtcttcaccttttccttgcggttactctgctttcttctttgacgtcttttttctctgtagtctttctaaattcatttgactaaatttaggatccagatcatactcagtactcttgcaaaggcgtcccacgataaacttatggacataaatcctcttttctccatgggtctctctccttcactctttcccttggttttacacagaacacattctcaatgtgtctg

SEQ ID NO: 347080 - DNA, 604 bp, Homo sapiens
aacttggtggggttatataggaactccctgttctatatttacaacttttctgtacaactaaaactattctaaatttctaatttcatttaaaaatagcagtatctattgccaagcagttggcaggattggttgagataatatgtacaaagccctgagcttgtagtagagatctaataaatattattaccctcccttccatgaagacccttaaaatccccccaatctttaacattttctattatcagataaattctttcacatgtacttcttctgtcttgggatggctgaaaaaaataattgtcttataataaactttcataaatttgaaggcagccatgtattttcctttccttttcttctccactattaataatctatttgtcttcaccttttccttgcggttactctgctttcttctttgacgtcttttttctctgtagtctttctaaattcatttgactaaatttaggatccagatcatactcagtactcttgcaaaggcrtcccacgataaacttatggacataaatcctcttttctccatgggtctctctccttcactctttcccttggttttacacagaacacattctcaatgtgtctg

SEQ ID NO: 347081 - DNA, 575 bp, Homo sapiens
tcggtttattcattcaaatcgtaggctcttaacacacaaaaggaactttaatgttcactcacctcatgctgctatgtctagaacaatggtttccaacgctggatgctcagaattcccaggggagcttttaaaaattacatatgcctgggctccactgctgagctaccaaatcctyatctgtggttgttggagctcaggcatcagtgtttttgaatccaacctctctccctccaagacactgatcaacagccaggattggggaccactgactcagaattcaaattcacctctactattgagaccttgtttctaagtagtcaggttcaagcaatgcgactcatatataaaagatacaatttataatatgagcccttatgcagtatttaatttgttttcctgtttccaggtacaagatgatgtttttttttcttttttctaccgccaggagaacagaattggactcagcaagaatgaggtcttggttgagtggagagagaggataagaggcaagacacccccgatactatcctttccctctctgttccagggcaaatcagtaacatcctgatatggga

SEQ ID NO: 347082 - DNA, 606 bp, Homo sapiens
tctcaaaaatcatgttgcaggcattaacttaatgagataatgaataattattgagcttctacttgtgcttaacactgtggtaggcacatttatgaacagagaataggaattaaaccccaacttcagggaacctctgtattatgcacctgtgtaaaataatgggaaaaaaaaaagtgagctgaactctgatcagcgaccagagatctctgggactttggacactgatcaaaactgaaagtacacatagcagaataagaagaatagagttgaaccaaaatgtggacatattagaaaggatcttgagaatccaacagaagaagttacacttgctgcatggagtcagtgggggatttggtccaatgccccagtgatacacgaaggagcagcgaaactggaggacaggraagggctgggtgggtaaggaaggctgttgatgtgactcaggtagaggtaattacatgatgttgtggcaatggtattccattttgaataggaaaaaatgatagaattagtttttgggaggggagaacaaagaagaatgagtcaaaggagaaacaagatttttagagtaaatgagtgtatagacatagacagtcatgttgggaa

SEQ ID NO: 347083 - DNA, 379 bp, Homo sapiens
gtcttactttgagtatccctcaaaaggaagtactcaggcaagagtttttgctgacattgtttccttgggaagcactgtaagggagcaagaaaggaaaacagggagggaggagaaccataaagcttgcacaaataaggttactgctgtgagcagcagatgctccatcccactggggactatttggsacactcctcgaaattttccactagggggtgagaaatatcaggtacttaggtaccaacttccattgcaccctgggagggttactcctagaaacttagctcctaggcacttccaggctgtgacatgtaggagccaagcatgctttctgtagagtgatataaagccatagggatgtacagaaatgtctgctggtgac

SEQ ID NO: 347084 - DNA, 511 bp, Homo sapiens
aaatctttaaagcattaatcccagtgcaatggcaaatgtacaaatataaacatatgtgcaaatcggggttaaagactacttaatacttgaagaaatctggagggagtacattaagtgtggccttgtgagcagataaaataggtggccatttacaatctatatatttggagagctgccatgcctggggaagaaacaccgtactgacacttttctcatctttaaatcaggggaacttcattataataatatttttaatgaccttaattgacacaaaataaactgcatatctttagactgtatacattgctaaaatttgacatgaacacacctgtgaaatcaccaccacaatcaagataatgaatggatcaatcacctccaaaagtttctttttgcctttttgtaatcccttgtstgccctactccctccccaggcaaccactgatctgctttctatcattacagattagtttatattctagacaattgtatatgaataggctcatacagtatg

SEQ ID NO: 347085 - DNA, 571 bp, Homo sapiens
ttatttcagttgctgcggcaaaaggcatctggaccagctcaggttcatctcctttgccacctcccacctcagcacattgtgcattctacctctggatcctctctgatgtcacatagttggtgctcactcagcattgcaaatgcaccctggaaatacagggaagctaatgcctcaggacaagtctcaaccaaaacacatcagcaagcagtgggtaaattcctgtctcagatccttcaggagagcactactgaggggcattctataaactcttcttaggagctcatggaagaaccaagttcctggtacccacagtacaacctaacaatatactttcaaacttccttttccccttctttttccaatctctccactccttcattgatgctccctgggattatcttccagataaaataacggcacccaagtatttgtctcaggctctggtttcagggtaactcaaagaaaatagttatctttattctcatattagagataattaaatttcaccaagataaaaacaaatgtcctaagtcaccaagctcataaatgatratgctgggatttgagcaca

SEQ ID NO: 347086 - DNA, 629 bp, Homo sapiens
ccgttttaactaaagtgagatgataccacgttgtggttttgatttgcatttctttgatgattagtgatgttgagcattttttcatatacctgttggcatttgtatgtctccttttgagaaatgtctattcaaatcttttggccactttttagttgaattaattattttttgctattgaattgtttcagctccttatatattctggttattaataccttgtcagatgagtagtttacaaattttttttccattctgtaggttgtctcttgacttcgttgagtgtctcctttgctgcgcagaatcattttagcttgatgtaccccttatctattttcgcttgtggcgcctgcgcttttgaagtctcacacagaaattctttgcccacaccaatgccctggagcatttattttattttattttccagtagtttcatagtttcaggtcatagatttaaatctttaatcaattttgactcaatttttyacatggtgagagataggggtctagtttcatttttctgcatatggatatccagttttccccagtgtcatttattgaacagactgtcctttccccattgtatgttcttgatgaccctgtcaaaaaagggttgactgtaaatgtgtgga

SEQ ID NO: 347087 - DNA, 566 bp, Homo sapiens
aggttttgatgacaggtcatttaaatttctacactatgagccttctatctaggagccattgatatagagagatgtaaggagaatcactttcaagactaagggaaataaatgtattgttaacagaatacaacttaattggtatcrggataatgcctattagaatccaaagatttagccccattgttagactttagtttctccatttgtaaaatgaggctagcagttacctcattggattgcacataagaataaatgacataaaaaacaaggcaaagcaaaatggcagaatagaagactccaccaagttttccttccacaagaacaccaatttaacaaccagcaaaatagaaaaaaaaaaacttcataacaaccaaaaatcaggtgaacagtcataggatctagttttaaccacattgctgaaagacaaactgaagagatttataaaaaacaatctctaataatcatcactactcccctacatgccagcagtggcagtgtgatgtggagagcttctctgggtactgggggagggatatcacagaaactgtgaggcattgaacccagtg

SEQ ID NO: 347088 - DNA, 566 bp, Homo sapiens
aggttttgatgacaggtcatttaaatttctacactatgagccttctatctaggagccattgatatagagagatgtaaggagaatcactttcaagactaagggaaataaatgtattgttaacagaatacaacttaattggtatcaggawaatgcctattagaatccaaagatttagccccattgttagactttagtttctccatttgtaaaatgaggctagcagttacctcattggattgcacataagaataaatgacataaaaaacaaggcaaagcaaaatggcagaatagaagactccaccaagttttccttccacaagaacaccaatttaacaaccagcaaaatagaaaaaaaaaaacttcataacaaccaaaaatcaggtgaacagtcataggatctagttttaaccacattgctgaaagacaaactgaagagatttataaaaaacaatctctaataatcatcactactcccctacatgccagcagtggcagtgtgatgtggagagcttctctgggtactgggggagggatatcacagaaactgtgaggcattgaacccagtg

SEQ ID NO: 347089 - DNA, 531 bp, Homo sapiens
ctcccagaacttgttcaagaccctcaggaaagacctctatgagtctgagtcttcaggaaccacactattactgggcttgggatgccccctaaaggatacatagtttggatcacaacacccatgttctttcaagtgtctggaaagcgttcccaagaaggatgggcaccactaagcccagactgtgaagactataataaatacctaactcttaaatgaccagacactgaaaaacatctcctagcatcaacactatctagcaaaacattacctctccaaatgaactatataaggcggaaaggaccactcctgcaaaaacagagatgtgtgaccttctctaggcagcagaactgcaaaataactgtgtggaggaagactcacagaaatatatgataatacasagaagaaattctgaattctatcacataaatttaacacatagattgagataatttaaaagaatcgagcacaaattctgcagctcaaaaatactattggcatatagaagaatgcgtcacggtcttttaatagtgg

SEQ ID NO: 347090 - DNA, 531 bp, Homo sapiens
ctcccagaacttgttcaagaccctcaggaaagacctctatgagtctgagtcttcaggaaccacactattactgggcttgggatgccccctaaaggatacatagtttggatcacaacacccatgttctttcaagtgtctggaaagcgttcccaagaaggatgggcaccactaagcccagactgtgaagactataataaatacctaactcttaaatgaccagacactgaaaaacatctcctagcatcaacactatctagcaaaacattacctctccaaatgaactatataaggcggaaaggaccactcctgcaaaaacagagatgtgtgaccttctctaggcagcagaactgcaaaataactgtgtggaggaagactcacagaaatatatgataatacacagaagaaattctgaattctatcacataaatttaacamatagattgagataatttaaaagaatcgagcacaaattctgcagctcaaaaatactattggcatatagaagaatgcgtcacggtcttttaatagtgg

SEQ ID NO: 347091 - DNA, 531 bp, Homo sapiens
ctcccagaacttgttcaagaccctcaggaaagacctctatgagtctgagtcttcaggaaccacactattactgggcttgggatgccccctaaaggatacatagtttggatcacaacacccatgttctttcaagtgtctggaaagcgttcccaagaaggatgggcaccactaagcccagactgtgaagactataataaatacctaactcttaaatgaccagacactgaaaaacatctcctagcatcaacactatctagcaaaacattacctctccaaatgaactatataaggcggaaaggaccactcctgcaaaaacagagatgtgtgaccttctctaggcagcagaactgcaaaataactgtgtggaggaagactcacagaaatatatgataatacacagaagaaattctgaattctatcacataaatttaacacatagattgarataatttaaaagaatcgagcacaaattctgcagctcaaaaatactattggcatatagaagaatgcgtcacggtcttttaatagtgg

SEQ ID NO: 347092 - DNA, 531 bp, Homo sapiens
ctcccagaacttgttcaagaccctcaggaaagacctctatgagtctgagtcttcaggaaccacactattactgggcttgggatgccccctaaaggatacatagtttggatcacaacacccatgttctttcaagtgtctggaaagcgttcccaagaaggatgggcaccactaagcccagactgtgaagactataataaatacctaactcttaaatgaccagacactgaaaaacatctcctagcatcaacactatctagcaaaacattacctctccaaatgaactatataaggcggaaaggaccactcctgcaaaaacagagatgtgtgaccttctctaggcagcagaactgcaaaataactgtgtggaggaagactcacagaaatatatgataatacacagaagaaattctgaattctatcacataaatttaacacatagattgagataatttaaaagaatcgagcasaaattctgcagctcaaaaatactattggcatatagaagaatgcgtcacggtcttttaatagtgg

SEQ ID NO: 347093 - DNA, 572 bp, Homo sapiens
ttcccctttcttttgaagaacaataaattcatcaagtactaaccattttactagaaagaaagatcaggagcacatagaaaacaaaatattctttgctttccttatgaagcaatttcatrtcttggaaaacatccaggtggaagcattgggtagcttcaggctacttggtggcttgtggggatccctcctacagtacccaaaagctggctttgtttccctctcagcacaataatgtggggtgtaggagccaggctaccatgggatggtgctccacatgtccaggcctgttgctccagagaaccagagatccattcagggacctcaggaaagtgtttgttaataacagcagggaaagttcattgactcagacagatacgggttctgatctcagccttattgcttgccatcatgggacctttgtcaagttaattaatgtgtctaagtcttgagtccttaaatgaaaaatagggtcaattctggtgccagacttcctgacctagaatcctggctcctctactaaccagttgtgcaactataggccatactgttaatgctctgttccttgctgtcct

SEQ ID NO: 347094 - DNA, 565 bp, Homo sapiens
gcttgtggggatccctcctacagtacccaaaagctggctttgtttccctctcagcacaataatgtggggtgtaggagccaggctaccatgggatggtgctccacatgtccaggcctgttgctccagagaaccagagatccattcagggacctcaggaaagtgtttgttaataacagcagggaaagttcattgactcagacagatacgggttctgatctcagccttattgcttgccatcatgggacctttgtcaagttaattaatgtktctaagtcttgagtccttaaatgaaaaatagggtcaattctggtgccagacttcctgacctagaatcctggctcctctactaaccagttgtgcaactataggccatactgttaatgctctgttccttgctgtcctcatccgtacacaggtataatttcagtatcgtgattattatggcgatgtgagaattaaactagttaatatgtgtaaagtacttggaagagtgagtaggtgttaccattattatattatctgactccattgtttattattagcaccaaatgagatacatatgttg

SEQ ID NO: 347095 - DNA, 565 bp, Homo sapiens
gcttgtggggatccctcctacagtacccaaaagctggctttgtttccctctcagcacaataatgtggggtgtaggagccaggctaccatgggatggtgctccacatgtccaggcctgttgctccagagaaccagagatccattcagggacctcaggaaagtgtttgttaataacagcagggaaagttcattgactcagacagatacgggttctgatctcagccttattgcttgccatcatgggacctttgtcaagttaattaatgtgtctaagtcttgagtccttaaatgaaaaatagggtcaattctggtgccagactkcctgacctagaatcctggctcctctactaaccagttgtgcaactataggccatactgttaatgctctgttccttgctgtcctcatccgtacacaggtataatttcagtatcgtgattattatggcgatgtgagaattaaactagttaatatgtgtaaagtacttggaagagtgagtaggtgttaccattattatattatctgactccattgtttattattagcaccaaatgagatacatatgttg

SEQ ID NO: 347096 - DNA, 484 bp, Homo sapiens
tgctaggtgattcctccaaaaggggtgagacagagttttgagsacaagtggtttatttgggagatgacagcagaaggccacaatcggaaaggggaaagtgagacaggaaagcacagacacccagtagagggtatgttacagatcagagttctgctgtgggtgactgaggctctatccctcagggggaccctggcacagtgcagggcacacctcagaatctatcatctgtgcaaaggagcaaggatgctgtaggatgtttgtccaccaagtccctgtcagtcaccggatggtggctgctttggagcattatctctccagtgtgagggagaaacgttgctaatctctctccttgccatcatgtttcaggatgtggttaacccaaactgagagctcttaaagtcctggtctacccagattaggaattagaagttagtgaattttgcccagctcctaagtacgtatcctcttttatcagaaagcagtg

SEQ ID NO: 347097 - DNA, 610 bp, Homo sapiens
tcagctattctttttctacctctgcatcctgtgctcaagccactctaktttataggctattcacagagtcatcagcacattcacaccactgaattttgactcgtaccattcttccaaatggaatgctgttgtccccaggcaatgctgcacatcctgcccatggtcccaactcaattgagtttcttatctttgtacaaccaccttttttcacttctgatgaaatcaggtgatctttcattcatggtctcattgcagtcagcacaaacttctataacagcactttaattattacatttgatatatgcacctgcttttcctaggtgggtcatggactacctgagtgcaaagactgtaccattctcatctttatatgccacaggacacagcacactctatgcacacaataaatatgtgttgaattgaagacaattcacacaacgaaattgaaagaatattaattaccttaaaaataacctgatagcacacaagaaacttctgggacacctcagacctataagaggcctggcaagagccacagggcataggtcatacatgatgttcttaaaagattcagatatctttttgaaatgataaatttagacagacggaa

SEQ ID NO: 347098 - DNA, 596 bp, Homo sapiens
taattatttaattgatacctgtttgccaacctgagtatatattcaaatatatgcatatatattcaacamtgccagaagaaaaacagttggttattccaattaacttattttttaatcaatacctttgtcagacttccagtttcacatgctgtttggcaaaaaaggaaaaaacactcagtgaggcttcttcacacagcttggaatattctgggcaaactgaaagaagttgagaattaactgtttccatgccaccaaccgcttttcctacattctcactctctggagcaccaggaagacagtgggtagttggcacagtgtgtgtctggctgaaggtagcaagtactccaggaaggggcatgtggcacctagagctcatggcataggcctgactcacaacctcaaccttgtcagtggcgaattcatctgattggggtatcaaagagacatgcagacttgattttaagaatcattggctttgtttatatgctgtacctgaatgtatccattttattttacgaaaatgacaaaagctcctacctgtatctacctgcttatataggtatctacttatatgcaatagaatcaggcgggcagaa

SEQ ID NO: 347099 - DNA, 455 bp, Homo sapiens
tttggggcaaggattctctattagatcatgcagctttgtagttacatcacagtaattatgtggctggggcactcctagaattgtataggtaccygtactatctgttaagacatagaaccccaagaaggccgattctcatgtcatggtcacctttctcggcaagaagcatgtataaatagtggctctgaaagttggagaaataaacaaataatagagctagaagagtccacatcttattcagtccacacaggtgtccattagtagaaatgagccaacaatacattactttctgcaaatttgtccagtacatccaaaacaaacacactaaaaagggattatttaccatttatgtgtcagggaagtaataataatgtatgtattacacatattaatgttcctgtgtgcttctaaagtactgtggaacttcaaaacattttccagtttcagggaattaa

SEQ ID NO: 347100 - DNA, 329 bp, Homo sapiens
acacagtagtatgacattaaaatgggaaattagttgtcaataaaagaaaagatcaaggccatgcaaagacataaagatgaatgcatattgataagctaagtataccagactgaaaaggctacatgtatttttcagtttacatgacattctgaaaaggcaaaacttagacaaggtaaacagatcagtgattgtcagtggttttgggagagagattcaatgagcaaagcacaggagatgtttttagggaggtaaagctattctttttcatactataaagctagatacatgacagtatgaatttgytagtatccatagcaaacttatggcat

SEQ ID NO: 347101 - DNA, 400 bp, Homo sapiens
taaaaattataatatgggaggttgatgtatccaagtatggaaggcaaaatttttacaaatgactctaactgtatgaaagtgtatgctgcaacctcactatagagggtaaggaagagggtgctgaactaagcaactcaggtaatgattgaagtctgyacaactaagggcaaaaggaactatacataaacactgtgctctagtgataaagttatttcccatgagtatatgggttaaaaattacaaaattgctatgcatgtatactagaatcgaccaactaagtaaactaatggcagattgcagtagccaggttctttattatgggagcaggaatttacagataagtaagggaaggagactatagtgattcatatagtaatggattagaattggagacatcag

SEQ ID NO: 347102 - DNA, 631 bp, Homo sapiens
gttttgacaccactcaacataatttgaaacaaataggcaaataaaaatgaagaaattagctattatccggtgcgtatgatcaatgggaactactgaaatgggttttggagaatgcaaatctctctttccttgaataggatggtttgttgtctcaattagctagataaaaagccacttyctctgtttcattttgcttttgtggcaacctagtgtttgctatatttaataaataaattagtatatatatatatatctttacgaacattgtaatctgaaaataaatatcttcctcactatttataatagaaagatccctgcgttattaaacgtgaaagaagatataattttcacgacttactcttcttggtacttgcaatttatcaccttgtaaaattcccacctttagctctacactttactttttctttttccttaggaaaagcagcaatccatttcaaaaatcccctgtaggaaaatgttcagatttctttttaactgctctgtgttcgattttagtttcatggaaaacattcagacacgaaacaaaaacaagaaatttttattccttgcacagtttagaaaatccatttgaactcctattctctatggccagcagccacaggggtaaatt

SEQ ID NO: 347103 - DNA, 487 bp, Homo sapiens
cttcatttatagaaaattctcaatttttgctttttttwaaaaatatcataaggaaagttatatacatatagataaagtaagaggttgagtgagagagacaaacaaaatgaaagatgtttattttgtatgagtaatgaattatactctagtatttttctgttttatgacaggggaaaatttgtgagttgctaagaagtaaaactctgtatgcagttaagcttcaaggctaggtattttaggaatatcttcccacagttccaagaatataatctagagacattagtcttgcctttcatgtgtgccctaaaagaaagcaaagcgtagtggttaagacaccagggctttggagtgatactcagattcaaatccaggctcttctgcttattagctacagcaccttatgtaaattacttaactcttggagcttagtgtccttagatctaaactagagtgtgtaatatctatcagacagggatattaggataat

SEQ ID NO: 347104 - DNA, 487 bp, Homo sapiens
cttcatttatagaaaattctcaatttttgctttttttaaaaaatatcataaggaaagttatatacatatagataaagtaagaggttgagtgagagagacaaacaaaatgaaagatgtttattttgtatgagtaatgaattatactctagtatttttctgttttatgacaggggaaaatttgtgagttgctaagaagtaaaactctgtatgcagttaagcttcaaggctaggtattttaggaatatcttcccacagttccaagaatataatctagagacattagtcttgcctttcatgtgtgccctaaaagaaagcaaagcgtagtggttaagacaccagggctttggagtgatactcagattcaaatccaggctcttctgcttattagctacagcaccttakgtaaattacttaactcttggagcttagtgtccttagatctaaactagagtgtgtaatatctatcagacagggatattaggataat

SEQ ID NO: 347105 - DNA, 565 bp, Homo sapiens
ttgacacttcatttatagaaaattctcaatttttgctttttttaaaaaatatcataaggaaagttatatacatatagataaagtaagaggttgagtgagagagacaaacaaaatgaaagatgtttattttgtatgagtaatgaattatactctagtatttttctgttttatgacaggggaaaatttgtgagttgctaagaagtaaaactctgtatgcagttaagcttcaaggctaggtattttaggaatatcttcccacagttccaagaatataatctagagacattagtcttgcctttcatgtgtgccctaaaagaaagcaaagcgtagtggttaagacaccagggctttggagtgatactcagattcaaatccaggctcttctgcttattagctacagcaccttatgtaaattacttaactcttggagcttagtgtccttagatctaaactagagtgtgtaatatctatcagacagggatattaggataattaattgagttaaagtctgmaacatgcttacaaaatgactggcaaatagcaagtattcaaaaattctgttgct

SEQ ID NO: 347106 - DNA, 498 bp, Homo sapiens
actttgggggttatccaatacccaattcatattctgttgacggttagcacamaagccttatagaataaagagagaataaagactttctgggaagaagaattatgagttgtttcataagtgctttccatgggaaagatgtgtaccttttctctttctcatttaaaaaaaaagtgaaaactggaattcctctaacctcagatcttccaggagtatttgggtgggctctgttgacaacaggtctgctatcatacaacaaatacaaatgtgtttgatgagaaaagatattatcaaatcctatgctcatgaataagacagcatatgattgttatgcatagccataacctatacagctagaaccattcattcatccattcatcagttattcattcagttattcaaatatttaaacagagttgtacacaatcctctatgttggatgatctgtcaactgggtgcttctgcaagaaagatgatagcaggtagtcttggtgtgaccgc

SEQ ID NO: 347107 - DNA, 498 bp, Homo sapiens
actttgggggttatccaatacccaattcatattctgttgacggttagcacacaagccttatagaataaagagagaataaagactttctgggaagaagaattatgagttgtttcataagtgctttccatgggaaagatgtgtaccttttctctttctcatttaaaaaaaaagtgaaaactggaattcctctaacctcagatcttccaggagtatttgggtgggctctgttgacaacaggtctgctatcatacaacaaatacaaatgtrtttgatgagaaaagatattatcaaatcctatgctcatgaataagacagcatatgattgttatgcatagccataacctatacagctagaaccattcattcatccattcatcagttattcattcagttattcaaatatttaaacagagttgtacacaatcctctatgttggatgatctgtcaactgggtgcttctgcaagaaagatgatagcaggtagtcttggtgtgaccgc

SEQ ID NO: 347108 - DNA, 622 bp, Homo sapiens
catagtgacaaatggactgaactctttttacttctctcctcttaaggatcacttttttttgtttcttgtttacaaatgtttgagaacagccatttcatttatttgtccagttttttacttatttatagttattgggaagtgtattagttggcaaggctgtcataacagagtagcacagactggcaacttaaacaacaggaatttattttctcacagttctggaagttaaaaggccaagatcaaagtttgacagagttgttttcttttgaggcctctcttcttggccagtagatgaccgccttctccctgtgcctttacacagcatgtccctatctgtgtctgtgttctaatatcctcttcttgtgatattggattagagcccactctaatgacctcattttaactccataactttttaaagagcctatctgtaaatacacttacattgtgagctattgggggctcacacttcaacatatggaattttttttggkgggggacacacttcactctcactgaacactccactaatgactactctttcatgccaccaacacaatttttgaatactcgctatttgccacacattttgtaagcatgtgtcacactctaactcaattaa

SEQ ID NO: 347109 - DNA, 622 bp, Homo sapiens
catagtgacaaatggactgaactctttttacttctctcctcttaaggatcacttttttttgtttcttgtttacaaatgtttgagaacagccatttcatttatttgtccagttttttacttatttatagttattgggaagtgtattagttggcaaggctgtcataacagagtagcacagactggcaacttaaacaacaggaatttattttctcacagttctggaagttaaaaggccaagatcaaagtttgacagagttgttttcttttgaggcctctcttcttggccagtagatgaccgccttctccctgtgcctttacacagcatgtccctatctgtgtctgtgttctaatatcctcttcttgtgatattggattagagcccactctaatgacctcattttaactccataactttttaaagagcctatctgtaaatacacttacattgtgagctattgggggctcacacttcaacatatggaattttttttggggggggacacamttcactctcactgaacactccactaatgactactctttcatgccaccaacacaatttttgaatactcgctatttgccacacattttgtaagcatgtgtcacactctaactcaattaa

SEQ ID NO: 347110 - DNA, 622 bp, Homo sapiens
catagtgacaaatggactgaactctttttacttctctcctcttaaggatcacttttttttgtttcttgtttacaaatgtttgagaacagccatttcatttatttgtccagttttttacttatttatagttattgggaagtgtattagttggcaaggctgtcataacagagtagcacagactggcaacttaaacaacaggaatttattttctcacagttctggaagttaaaaggccaagatcaaagtttgacagagttgttttcttttgaggcctctcttcttggccagtagatgaccgccttctccctgtgcctttacacagcatgtccctatctgtgtctgtgttctaatatcctcttcttgtgatattggattagagcccactctaatgacctcattttaactccataactttttaaagagcctatctgtaaatacacttacattgtgagctattgggggctcacacttcaacatatggaattttttttggggggggacacacttcactcwcactgaacactccactaatgactactctttcatgccaccaacacaatttttgaatactcgctatttgccacacattttgtaagcatgtgtcacactctaactcaattaa

SEQ ID NO: 347111 - DNA, 561 bp, Homo sapiens
agttttttaggcagggtcaactagtgccaagtccttgatattaaaacataatttgcaggcccaagggtcatgggggatggtcaatggctggagcatagagagcaagatggagagtggggtagacggtgaactactgcatcctaccagaggtgctaaaaagcttggacaagtcagtttttcgtaacctctcccattgcaggaaaattaactttctttggccccaggtgctaaatgccggtagcaccgagcttatcatgacagccaaaaatatgccccacacatttccaacagcacactgggatatagcgttagtytgagtggaggactaagctttataaaaaggaagtgacatgatcaggttttcattgttaaagttattgtggctgctgagttgaaaactggctgaatgggtacagagctgaagaagacattccacctaggacgctaatgcattggtccatgctaaagataatgatgaccagaactaggagtcatcagtgaaggtggtaagaagcagctgatttggggatctagtttgaaggtagagatgacaggatatgc

SEQ ID NO: 347112 - DNA, 524 bp, Homo sapiens
ggatctaagaagaaaaaagaggagttaattaaatttaaaaacctgggttaatcaagtctctagtttagttagtagtattacaccagtgttaaatttttacatttgataaacataccaagtgttatgggatctctgggtgttgatttttctggctggaaacctctgtggccacatcacttttgcctgagcccttgtcctgcatccagaaagaatgaggtacgcasacaagtgaagggtgtagaagagttttatttagtgttaggatagctcagaggagtgggtagctcctctctgtaggcagttcgtccagcagagtgttcagctcctagcagagaggaggccctcgagagggtgtctcctctccacaggcaagtcattcccatgtctctgcaggtctctgaagttctcagcagaggaggcagcttctctctgccagcaggtcactgtctgcagcctcagcagagagggtactcctctgggcagcttgtcttcccatcatcctcagctatcagctgagatggtac

SEQ ID NO: 347113 - DNA, 429 bp, Homo sapiens
gcacaactttgttcaatcattatggccaaaggggcaggatcatccagtaaaggcactgctacctcaggtccacttttacatgctgaggccattcccagaaaaggaagcctggctgttggaaaggcatttcctcctggaggtggttctaaccatgcaatgcccttakggataggaagctaattagtctctgattggattcatcttcattctcaggactgcattaacaccattagaagccctgaggtctgattaccacacctcccaaatcactaaatataattcaaaatggaaacaattcttaccataacatcaatgtagagatttgataaaattgtgtgattttgcatgttcatagtttcaatgctttttttcttattttcttaaagtgccaataggactctaagccttcgtttagtgttcttttttagt

SEQ ID NO: 347114 - DNA, 585 bp, Homo sapiens
tataagaggaaaacacagcaattttttgacacttttaatgtgctgcagctgaatgccacatgcagcatgcaatgggaaggggaagactatccactgaggcaatgccactttcatgtgagaaccctgagaggggagctgtgcasaggcccagtggtacttaaaagtgagtgacagccccaccaaaaggagcatttagtttttctccacgctggggattgtctttctggtggcacttggccaggaaacatactttcccatctcaatgacaggacctcctgggggaaaataaatagatcttcccaccaggaacaaaggcaaaaggaaatgtagttatgaataactacagttattcagtaaataaggtgacttgagacagcaaccaaagcagttctttcctgcaagtgacaatgtatatacgcatgaaagtttgaggttggagaggtggcaagagaagcaaaggagaaaggggcagtgaacttcagagtttgccaggaaaaaggtggcagtaatgagaggcaagctatgtgtgtagcggttctcaagcctaggtagtgtgtaaaaaaaacaaaaggagcttgaaaaaca

SEQ ID NO: 347115 - DNA, 585 bp, Homo sapiens
tataagaggaaaacacagcaattttttgacacttttaatgtgctgcagctgaatgccacatgcagcatgcaatgggaaggggaagactatccactgaggcaatgccactttcatgtgagaaccctgagaggggagctgtgcacaggcccagtggtacttaaaagtgartgacagccccaccaaaaggagcatttagtttttctccacgctggggattgtctttctggtggcacttggccaggaaacatactttcccatctcaatgacaggacctcctgggggaaaataaatagatcttcccaccaggaacaaaggcaaaaggaaatgtagttatgaataactacagttattcagtaaataaggtgacttgagacagcaaccaaagcagttctttcctgcaagtgacaatgtatatacgcatgaaagtttgaggttggagaggtggcaagagaagcaaaggagaaaggggcagtgaacttcagagtttgccaggaaaaaggtggcagtaatgagaggcaagctatgtgtgtagcggttctcaagcctaggtagtgtgtaaaaaaaacaaaaggagcttgaaaaaca

SEQ ID NO: 347116 - DNA, 585 bp, Homo sapiens
tataagaggaaaacacagcaattttttgacacttttaatgtgctgcagctgaatgccacatgcagcatgcaatgggaaggggaagactatccactgaggcaatgccactttcatgtgagaaccctgagaggggagctgtgcacaggcccagtggtacttaaaagtgagtgacagccccaccaaaaggagcatttagtttttctccasgctggggattgtctttctggtggcacttggccaggaaacatactttcccatctcaatgacaggacctcctgggggaaaataaatagatcttcccaccaggaacaaaggcaaaaggaaatgtagttatgaataactacagttattcagtaaataaggtgacttgagacagcaaccaaagcagttctttcctgcaagtgacaatgtatatacgcatgaaagtttgaggttggagaggtggcaagagaagcaaaggagaaaggggcagtgaacttcagagtttgccaggaaaaaggtggcagtaatgagaggcaagctatgtgtgtagcggttctcaagcctaggtagtgtgtaaaaaaaacaaaaggagcttgaaaaaca

SEQ ID NO: 347117 - DNA, 489 bp, Homo sapiens
actatatattatttccaaactatccttcctttcttcttcctccctcaaaatctacttttttaaaaagcctactccagaccacaataattcaggtggcttttgaagtatataagtgacaacaaataaatatttgtagagaacaacaataacagatgtttctcttccctgtccaatgttacctttggkccttggcttacaaaactaaattctatgattaataatgatataggaatgataacaccttctttctagattaggatgcttttctgaaatatttggaaatctgtcttttaggatatgccaaaataaatcccctgtctgggctagactatactttgtatcttttgggcacaatgaaacaaagttgttggagacaaggagggaaaaatcagctatagagtttcttttaccaaatgcaatgccaaataatcttggcatattttatgcacaggcttatgatattctgtgtgaagatatgggaagtcaatt

SEQ ID NO: 347118 - DNA, 489 bp, Homo sapiens
actatatattatttccaaactatccttcctttcttcttcctccctcaaaatctacttttttaaaaagcctactccagaccacaataattcaggtggcttttgaagtatataagtgacaacaaataaatatttgtagagaacaacaataacagatgtttctcttccctgtccaatgttacctttgggccttggcttacaaaactaaattctatgattaataatgatataggaatgataacaccttctttctagattaggatgcttttctgaaatatttggaaatctgtcttttaggatatgccaaaataaatcccctgtctgggctagactatactttgtatcttttggkcacaatgaaacaaagttgttggagacaaggagggaaaaatcagctatagagtttcttttaccaaatgcaatgccaaataatcttggcatattttatgcacaggcttatgatattctgtgtgaagatatgggaagtcaatt

SEQ ID NO: 347119 - DNA, 489 bp, Homo sapiens
actatatattatttccaaactatccttcctttcttcttcctccctcaaaatctacttttttaaaaagcctactccagaccacaataattcaggtggcttttgaagtatataagtgacaacaaataaatatttgtagagaacaacaataacagatgtttctcttccctgtccaatgttacctttgggccttggcttacaaaactaaattctatgattaataatgatataggaatgataacaccttctttctagattaggatgcttttctgaaatatttggaaatctgtcttttaggatatgccaaaataaatcccctgtctgggctagactatactttgtatcttttgggcacaatgaaacaaagttgttggagacaaggagggaaaaatcagctatagagtttcytttaccaaatgcaatgccaaataatcttggcatattttatgcacaggcttatgatattctgtgtgaagatatgggaagtcaatt

SEQ ID NO: 347120 - DNA, 456 bp, Homo sapiens
ctgttataggcattcagttttaaaaaggaaacagacataaaagttcagaaaatttgcagcttgatgatgccatagaaaagaaaatctcattttctgagaagaaattcaagctggctgcagaaatttgcrtaagtaatgaggagccaaatgttaattgtcaaaacagtggggaaaatgtctccagggcatgtcagagacgtttatgccagcccctcttatcacaggcctggaggcctatgaggaaaaaatggttccatgagctaggcccagagccatcctgctgtgtgcagcctagggacctggtgccctgtgtcccagttgttctagctatggctaaaaggggccaaatgtatagcgtgggtcatggctatagagggtgcaagccccaagccttggcagcttccatgtggtattgagcctgccagtgcgtacaagtcaagaattgaggtttgggaa

SEQ ID NO: 347121 - DNA, 565 bp, Homo sapiens
ttggttttgaaaagtgaggacataagatttgggaggggccggggcagaatgatatgagttgactttgtccccaccgaaatctcatcttgagttgtagctcccaaaatttacacgtgttgtgggaatgacctggtgggagataattgaatcatgggggcagtttcccccatacttttctcatcatagtgaatgatgagatctgatggttttataaggggaaatcccttttgcttggttctcaattctctcttgtctgccgccatgtaagacaygccttttaccttcaccatgattgtgaggcctccccagccaggtggaattgtgagtccattaaacctctctctcttttttttttttaatgaaatacccagcttccagtatgtctttatcagcagcatgaaaacagactaatacagtggagtttgaatttatactgagatagcctattggaaagtggaagagctatgacaaaacctaaaaagacagttggtggtttgggaatagaaatacaacaagaaaagtagctacaatgatagctgatggcattttgttggtcagcctgtaa

SEQ ID NO: 347122 - DNA, 581 bp, Homo sapiens
attaagaccttaaaggccctaagcatggaagaattgaagttgcctgtctctgcctcacctgccatatgcagtttaaattaaagcaataaaaaataaaataaatttttgaaattccaataaagttttattttttcccatgatgaatatattaatgcatyttgaaacattgaatattgcattttaaaaatattttatcatgtttagcttgtttattgggtattcagtactaataactcagaatttcttgatcctcctgcaaacttatggctattgaatttatgatcttgaccttggctgtggaatgaagagttcatgactttggattggtaaacttggttcactcatctaaccttggttggacagcctcatttagatctttcatgttcattttgatccagggcagacaccagcagactttttctgtaaagggccagatagtaaataccttaggctttgtgaagcatgaggtctgtgttgcagccactcaattctgccactgtagttcaaaagcagttattgacaatatatgaataaattgatatagctgtgttcaataatattttatttacaaaaacaagcag

SEQ ID NO: 347123 - DNA, 571 bp, Homo sapiens
ttccttttcctctcacagtagttcattttaaatttattttactggctctttgtccatgtaaatgctggtgttccccacagtcttgtcctcagtctttttatttttccatagttctctcagagatctcttatccattcccatggccttgactaccgttgacctactgaatcttgcaaaatgctgtatcttgtcccttttctgagatccatatttctattttcaaccaaacagagtcatttstgttataatgtgacttatgtattcccacattatgcaaactcatgcaacaaacactataggacttgtagaaaatcagagttagaagcacagtctgccagtaactgtagtggactgaatgtttatgtcttccccaaaatttatatcttgaaatcctagcccctaaggtggtggtattctgaggtgaaacctttgggaagtgattaaaacatgaggctagagctctcttacatgggattataaaagaaaccccagagagatctcttgccccttcccccatgtgagttacaaataagaagatggttatctatgagaaagtgaatcctcacctgac

SEQ ID NO: 347124 - DNA, 571 bp, Homo sapiens
ttccttttcctctcacagtagttcattttaaatttattttactggctctttgtccatgtaaatgctggtgttccccacagtcttgtcctcagtctttttatttttccatagttctctcagagatctcttatccattcccatggccttgactaccgttgacctactgaatcttgcaaaatgctgtatcttgtcccttttctgagatccatatttctattttcaaccaaacagagtcatttgtgttataatgtgacttatgtattccmacattatgcaaactcatgcaacaaacactataggacttgtagaaaatcagagttagaagcacagtctgccagtaactgtagtggactgaatgtttatgtcttccccaaaatttatatcttgaaatcctagcccctaaggtggtggtattctgaggtgaaacctttgggaagtgattaaaacatgaggctagagctctcttacatgggattataaaagaaaccccagagagatctcttgccccttcccccatgtgagttacaaataagaagatggttatctatgagaaagtgaatcctcacctgac

SEQ ID NO: 347125 - DNA, 536 bp, Homo sapiens
ccatgttcctctaatgttccatcaatgacttctctcctccatagcactatagcatttctgcttattcagaccttcattgtcacctgggatacagcagcttcattctacctgatctccgtgtgaccagtctctgttcctataaatccataccccacaatatggccaaaaagatgtcctaagaacataaattttctttcccaaaacttcaaagattttcttgtcaccccaggaggattttcctaaaaatgggacactaggcactggtagttttgagaatgcttttagagacccatggtgacagcattacctcatgttaaatccacagcagcaacrtcccagatccctctccatccttctaagggaaagcttcactgtaggagtgctttatggctgtcatactcctcaaaaacctgctcatttccctttttaagccaagagatagtaggcttgggctcagagttgtcattaggcaaaagtatctagtaagagtgtaataatatagtttggttttactttatgggtttcattttcttatg

SEQ ID NO: 347126 - DNA, 566 bp, Homo sapiens
ggagctgaaacaattcaatagcaaaaaataattaattcaactaaaaagtggccaaaagatttgaatagacatttctcaaaaggagacatacaaatgccaacaggtatatgaaaaaatgctcaacatcactaatcatcaaagaaatgcaaatcaaaaccacaacgtggtatcatctcactttagttaaaacggcttttgtcaaaatcacagggaatattgaacattagcgaggatatggacaaaagggaactctcatacactgttggtgggattgtaaattagtacagccactakggaaaacagcatggaaggtcctcaaaaaactaaaaataaaactaccatatgatccagcaattccactactggatatatacccaaaagaaaggagatcaatagatcaaagagatatctgcactcccatgtgtattgaagcactatctgcaatagccaaaatataaaatcaacctaagtgcccatccgtgaatagatgaaaaaaatatgatatatatacacattaaaatattattcagtcataaaaaagaattaaatcatgtgatttgcagcaa

SEQ ID NO: 347127 - DNA, 566 bp, Homo sapiens
ggagctgaaacaattcaatagcaaaaaataattaattcaactaaaaagtggccaaaagatttgaatagacatttctcaaaaggagacatacaaatgccaacaggtatatgaaaaaatgctcaacatcactaatcatcaaagaaatgcaaatcaaaaccacaacgtggtatcatctcactttagttaaaacggcttttgtcaaaatcacagggaatattgaacattagcgaggatatggacaaaagggaactctcatacactgttggtgggattgtaaattagtacagccactatggaaaacagcatggaaggtcctcaaaaaactaaaaataaaactaccatatgatccagcaattccactactggatatatacccaaaagaaaggaratcaatagatcaaagagatatctgcactcccatgtgtattgaagcactatctgcaatagccaaaatataaaatcaacctaagtgcccatccgtgaatagatgaaaaaaatatgatatatatacacattaaaatattattcagtcataaaaaagaattaaatcatgtgatttgcagcaa

SEQ ID NO: 347128 - DNA, 566 bp, Homo sapiens
ggagctgaaacaattcaatagcaaaaaataattaattcaactaaaaagtggccaaaagatttgaatagacatttctcaaaaggagacatacaaatgccaacaggtatatgaaaaaatgctcaacatcactaatcatcaaagaaatgcaaatcaaaaccacaacgtggtatcatctcactttagttaaaacggcttttgtcaaaatcacagggaatattgaacattagcgaggatatggacaaaagggaactctcatacactgttggtgggattgtaaattagtacagccactatggaaaacagcatggaaggtcctcaaaaaactaaaaataaaactaccatatgatccagcaattccactactggatatatacccaaaagaaaggagatcaatagatcaaagagatatctgcactcccatgtktattgaagcactatctgcaatagccaaaatataaaatcaacctaagtgcccatccgtgaatagatgaaaaaaatatgatatatatacacattaaaatattattcagtcataaaaaagaattaaatcatgtgatttgcagcaa

SEQ ID NO: 347129 - DNA, 566 bp, Homo sapiens
ggagctgaaacaattcaatagcaaaaaataattaattcaactaaaaagtggccaaaagatttgaatagacatttctcaaaaggagacatacaaatgccaacaggtatatgaaaaaatgctcaacatcactaatcatcaaagaaatgcaaatcaaaaccacaacgtggtatcatctcactttagttaaaacggcttttgtcaaaatcacagggaatattgaacattagcgaggatatggacaaaagggaactctcatacactgttggtgggattgtaaattagtacagccactatggaaaacagcatggaaggtcctcaaaaaactaaaaataaaactaccatatgatccagcaattccactactggatatatacccaaaagaaaggagatcaatagatcaaagagatatctgcactcccatgtgtattgaagcactatctgcaatagccaaaatataaaatcaacctaagtgcccatccgtgaatagatgaaraaaatatgatatatatacacattaaaatattattcagtcataaaaaagaattaaatcatgtgatttgcagcaa

SEQ ID NO: 347130 - DNA, 597 bp, Homo sapiens
acacttaacttcagtgttatgtctcttttctttaacactgctgcaactcaactaagccggtatccccacctccagaaggtcacccttctggatgatctggttttgaatggctcttcctgaagagtggggcagctgtgcaagtttttcctacttgcwtaaaaacaaaattgacttctaatgaattctccggaaaatgaatgcttctccttgagataactggggtcttggggattcagaacagtcaacctgacacaaaacgcagactgaggtcgagggtaggaaaaaaaggaagaggaggagcagctcttagtgcacgttggctctctgtgggcattttggtcacacttgggtgcctcagcagccaagcctcacctccatcttcctccacctcatccctcctctgacaatattgttgcctcactctcttcttttcttcctccactataggatggcctaggtcctcactataggatggcctatgtcctagtgtgccacagcattagagatggaaatcctattccaggtgacctaaaaggcaccaggtttccactatctgtctatgactcttgccccgctgatctgattctgaaaaacagg

SEQ ID NO: 347131 - DNA, 285 bp, Homo sapiens
agaaaatagcctcaaaaaggcaaatctaagagttattgaccttaaaaagtagagaaagagataggggtagagagtttatgcaaagggataataacagagaattttccaaacctagggcaagataccaacatccaagtacaggaagcttagagaacaccaagcaaatataacccaaagatgactacctcaaggtrtttaacaatcaaactccaaaagattaaagataaagaaaggaacccaaaagcagcaagagaaaagagacacataacatacaatggagctcca

SEQ ID NO: 347132 - DNA, 549 bp, Homo sapiens
aatgatgcatctttaagaactagaaaagcaagtgcaacccaaatgaaaaattagtagaagaaaagaaataataaatatcagagcataaataaatttgaaatttaaaaaaatattaaaaaatcaatgaaacaaaagatcgtttttttgaaaaagaaaacaaaattggcaaaccattaatcagaccagctaagaaaaaagagagaagatccaaataaataaaagcagaaatcagaaatgaaatattacaacaaataccacagaaattcaaaggatcattagcaactaatataagcaatgatatgccaataaattggaaaatctagaagaattggacaaattcctaagtacatacaacctaccaagattgaaccagggagaaatccaaaacctgaacagaccaaaaataagtaacaacattaaagccataataaaaagtctcccasgaaagaaaagctcgggacccgatggctttattgctgagttctaccaaatatttaaagaactaataacactcctactcaaactactttgaaaaatagaggaggaggg

SEQ ID NO: 347133 - DNA, 595 bp, Homo sapiens
tcactgcactacagcctgggcaacagcgagactctgtctcaaaaaaaaaaaaaaattgaaacaataattgttattcattcattaaaataatgaccataacaataaaaccaataataaaagtcagttyattttcattagcatcacacatcggcaattttaaggcatgtcagtgatacaatactgctccccaccaaggaggggctcccactgccacccgttggtacgccgctgcctcggacttaggtgaccacaagggcaaatgccctggaagtcacagggctccctggcttgctcagggaggggaggaaaagtgctgctgcgtatttctagggacggtgcagacgcaggccggtttgggccccatgggtatagtctgcccacctacaagagcagaaaacagtaagggaatggaactctctgtgcatcaatgaagctgaaccccttcctgctggcactgagcccttaacgttgccagtgtccccaaggggactgtggaggccacccagcactagggagggagagtaaatcccaaaggcacattcagaagcctcgcaaggagaccagatacaggtggaagagagtcataggcccccct

SEQ ID NO: 347134 - DNA, 595 bp, Homo sapiens
tcactgcactacagcctgggcaacagcgagactctgtctcaaaaaaaaaaaaaaattgaaacaataattgttattcattcattaaaataatgaccataacaataaaaccaataataaaagtcagttcattttcattagcatcacacatcggcaattttaaggcatgtcagtgatacaatactgctccccaccaaggaggggctcccactgccacccgttggtacgccgctgcctcggmcttaggtgaccacaagggcaaatgccctggaagtcacagggctccctggcttgctcagggaggggaggaaaagtgctgctgcgtatttctagggacggtgcagacgcaggccggtttgggccccatgggtatagtctgcccacctacaagagcagaaaacagtaagggaatggaactctctgtgcatcaatgaagctgaaccccttcctgctggcactgagcccttaacgttgccagtgtccccaaggggactgtggaggccacccagcactagggagggagagtaaatcccaaaggcacattcagaagcctcgcaaggagaccagatacaggtggaagagagtcataggcccccct

SEQ ID NO: 347135 - DNA, 595 bp, Homo sapiens
tcactgcactacagcctgggcaacagcgagactctgtctcaaaaaaaaaaaaaaattgaaacaataattgttattcattcattaaaataatgaccataacaataaaaccaataataaaagtcagttcattttcattagcatcacacatcggcaattttaaggcatgtcagtgatacaatactgctccccaccaaggaggggctcccactgccacccgttggtacgccgctgcctcggacttaggtgaccacaagggcaaatgccctggaagycacagggctccctggcttgctcagggaggggaggaaaagtgctgctgcgtatttctagggacggtgcagacgcaggccggtttgggccccatgggtatagtctgcccacctacaagagcagaaaacagtaagggaatggaactctctgtgcatcaatgaagctgaaccccttcctgctggcactgagcccttaacgttgccagtgtccccaaggggactgtggaggccacccagcactagggagggagagtaaatcccaaaggcacattcagaagcctcgcaaggagaccagatacaggtggaagagagtcataggcccccct

SEQ ID NO: 347136 - DNA, 595 bp, Homo sapiens
tcactgcactacagcctgggcaacagcgagactctgtctcaaaaaaaaaaaaaaattgaaacaataattgttattcattcattaaaataatgaccataacaataaaaccaataataaaagtcagttcattttcattagcatcacacatcggcaattttaaggcatgtcagtgatacaatactgctccccaccaaggaggggctcccactgccacccgttggtacgccgctgcctcggacttaggtgaccacaagggcaaatgccctggaagtcacagggctccctggcttgctcagggaggggaggaaaagtgctgctgcgtatttctagggacggtgcagacgcaggccggtttgggccccatgggtatagtctgcccacctacaagagcagaaaacagtaagggaatggamctctctgtgcatcaatgaagctgaaccccttcctgctggcactgagcccttaacgttgccagtgtccccaaggggactgtggaggccacccagcactagggagggagagtaaatcccaaaggcacattcagaagcctcgcaaggagaccagatacaggtggaagagagtcataggcccccct

SEQ ID NO: 347137 - DNA, 547 bp, Homo sapiens
tttgccaagggcacaggcccaaagccagaaaaggtacccaacagggataccatcaggaagaagttggaaacaaaagataaagcactctacctgagggaagtaccccagctgcaggggcctcctggagacatgctcacctgagctggctcatgtgctgctgaggytggatggaatggcacatggcaacatgctttgtcaacggtaacgtgttgttattttaactctatgcttagtttgtaaagactcactccctctcctttgttaaataaaaccctcatctcatctctcccggggtaaggcagggcagctggtcaagggatgccacctctattccctgggcctccccttctccccagaaacctcgcatcttaactgcatcacacgagaccccagagctctgctgattccccttgacactggagcccttttggtcatggaccaattcctgttctcaaagacctttctctttaagccatggaggactacttgaagaatactaaagaaaaacatgccaccatgcccagctaatttttggaaaaggaaattg

SEQ ID NO: 347138 - DNA, 547 bp, Homo sapiens
tttgccaagggcacaggcccaaagccagaaaaggtacccaacagggataccatcaggaagaagttggaaacaaaagataaagcactctacctgagggaagtaccccagctgcaggggcctcctggagacatgctcacctgagctggctcatgtgctgctgaggctggatggaatggcacatggcaacatgctttgtcaacggtaacgtgttgttattttaactctatgcttagtttgtaaagactcactccctctcctttgttaaataaaaccctcatctcatctctcccggggtaaggcagggcagctggtcaagggatgccacctctattccctgggcctccccttctccccagaaacctcgcatcytaactgcatcacacgagaccccagagctctgctgattccccttgacactggagcccttttggtcatggaccaattcctgttctcaaagacctttctctttaagccatggaggactacttgaagaatactaaagaaaaacatgccaccatgcccagctaatttttggaaaaggaaattg

SEQ ID NO: 347139 - DNA, 547 bp, Homo sapiens
tttgccaagggcacaggcccaaagccagaaaaggtacccaacagggataccatcaggaagaagttggaaacaaaagataaagcactctacctgagggaagtaccccagctgcaggggcctcctggagacatgctcacctgagctggctcatgtgctgctgaggctggatggaatggcacatggcaacatgctttgtcaacggtaacgtgttgttattttaactctatgcttagtttgtaaagactcactccctctcctttgttaaataaaaccctcatctcatctctcccggggtaaggcagggcagctggtcaagggatgccacctctattccctgggcctccccttctccccagaaacctcgcatcttaactgcatcacacgagaccccaragctctgctgattccccttgacactggagcccttttggtcatggaccaattcctgttctcaaagacctttctctttaagccatggaggactacttgaagaatactaaagaaaaacatgccaccatgcccagctaatttttggaaaaggaaattg

SEQ ID NO: 347140 - DNA, 547 bp, Homo sapiens
tttgccaagggcacaggcccaaagccagaaaaggtacccaacagggataccatcaggaagaagttggaaacaaaagataaagcactctacctgagggaagtaccccagctgcaggggcctcctggagacatgctcacctgagctggctcatgtgctgctgaggctggatggaatggcacatggcaacatgctttgtcaacggtaacgtgttgttattttaactctatgcttagtttgtaaagactcactccctctcctttgttaaataaaaccctcatctcatctctcccggggtaaggcagggcagctggtcaagggatgccacctctattccctgggcctccccttctccccagaaacctcgcatcttaactgcatcacacgagaccccagagctctgctgattccccttgacactggagcccttttggtcatggaccaattcctrttctcaaagacctttctctttaagccatggaggactacttgaagaatactaaagaaaaacatgccaccatgcccagctaatttttggaaaaggaaattg

SEQ ID NO: 347141 - DNA, 498 bp, Homo sapiens
tgggttgtcctctttctgataaattcccagatttaacaaaaaagctgccttctgccatgaggacacattgatataaaagtttgagagatactggtgcacttcttcacactaacagrcatttgaggatgtatgactctaaaccacacagcgtgtagttcatgcctatgtaatgtttacttttctacctctgcgtctggttttggtccccggcagctgctgattcatggcaaaaccccagagcttggagtcagaagactgagtttaagttccattattgcccccccacacttttttttttagccataatatccatccctctcagtcacttaagtgattgtgacaacaccttgtacagttgttggtggcattaaatcagatggtgtataagagtattttgcaaaaactgtaaggagggtgtggctgtaagggctggtagttctcatgtgtattactgctcttctttcccacagctaaaagaatatcagcaaaggaagagcc

SEQ ID NO: 347142 - DNA, 498 bp, Homo sapiens
tgggttgtcctctttctgataaattcccagatttaacaaaaaagctgccttctgccatgaggacacattgatataaaagtttgagagatactggtgcacttcttcacactaacagacatttgaggatgtatgactctaaaccacacagcgtgtagttcatgcctatgtaatgtttacttttctacctctgcgtctggttttggtccccggcagctgctgattcatggcaaaaccccagagcttggagtcagaagactgagtttaagttccattattgcccccccacacttttttttttagccataatatccatccctctcagtcacttaagtgattgtgacaacaccttgtacagttgttggtggcattaaatcagatggtgtataagagtattttgcaaaaactgtaaggagggtgtggctgtaagggctggtarttctcatgtgtattactgctcttctttcccacagctaaaagaatatcagcaaaggaagagcc

SEQ ID NO: 347143 - DNA, 561 bp, Homo sapiens
agcagcgagactagtacctgggtcacctgcagcagtacatggccacctatcagcagctgacctctgagaaggaggcgctgcacaggcagttactgctgcagacccagttcgtggaccagctgcagcagcaggaagcttggggcaaagcggtggctgagatggccrgccaaaagttgcaggagacccaggggagggagttgctgaggacggggccccgagggggatgacctggcaacctccgtgccttctcactctgtttcccgtccccttaggagcacctagaagctgccagccagcggaaccaacagctagagacccagctaagcctcgtggctctccctggagaaggtacaggagaccactcagaggaagaggagagagccccaggaggaaggggggactgttagcagcataggattgaggggttggaagagacctttagaacagctggtcgttatgccaaccgggtgtccgcactaagttcagcatcaatatggtgacctcctgggagcagggggccaccaggttgcctaaggatgaatgaactggaccagatcagaa

SEQ ID NO: 347144 - DNA, 561 bp, Homo sapiens
agcagcgagactagtacctgggtcacctgcagcagtacatggccacctatcagcagctgacctctgagaaggaggcgctgcacaggcagttactgctgcagacccagttcgtggaccagctgcagcagcaggaagcttggggcaaagcggtggctgagatggccggccaaaagttgcaggagacccaggggagggagttgctgaggacggggccccgagggggatgrcctggcaacctccgtgccttctcactctgtttcccgtccccttaggagcacctagaagctgccagccagcggaaccaacagctagagacccagctaagcctcgtggctctccctggagaaggtacaggagaccactcagaggaagaggagagagccccaggaggaaggggggactgttagcagcataggattgaggggttggaagagacctttagaacagctggtcgttatgccaaccgggtgtccgcactaagttcagcatcaatatggtgacctcctgggagcagggggccaccaggttgcctaaggatgaatgaactggaccagatcagaa

SEQ ID NO: 347145 - DNA, 561 bp, Homo sapiens
agcagcgagactagtacctgggtcacctgcagcagtacatggccacctatcagcagctgacctctgagaaggaggcgctgcacaggcagttactgctgcagacccagttcgtggaccagctgcagcagcaggaagcttggggcaaagcggtggctgagatggccggccaaaagttgcaggagacccaggggagggagttgctgaggacggggccccgagggggatgacctggcaacctccgtgccttctcactctgtttcccgtccccttaggagcacctagaagctgccagccascggaaccaacagctagagacccagctaagcctcgtggctctccctggagaaggtacaggagaccactcagaggaagaggagagagccccaggaggaaggggggactgttagcagcataggattgaggggttggaagagacctttagaacagctggtcgttatgccaaccgggtgtccgcactaagttcagcatcaatatggtgacctcctgggagcagggggccaccaggttgcctaaggatgaatgaactggaccagatcagaa

SEQ ID NO: 347146 - DNA, 561 bp, Homo sapiens
agcagcgagactagtacctgggtcacctgcagcagtacatggccacctatcagcagctgacctctgagaaggaggcgctgcacaggcagttactgctgcagacccagttcgtggaccagctgcagcagcaggaagcttggggcaaagcggtggctgagatggccggccaaaagttgcaggagacccaggggagggagttgctgaggacggggccccgagggggatgacctggcaacctccgtgccttctcactctgtttcccgtccccttaggagcacctagaagctgccagccagcrgaaccaacagctagagacccagctaagcctcgtggctctccctggagaaggtacaggagaccactcagaggaagaggagagagccccaggaggaaggggggactgttagcagcataggattgaggggttggaagagacctttagaacagctggtcgttatgccaaccgggtgtccgcactaagttcagcatcaatatggtgacctcctgggagcagggggccaccaggttgcctaaggatgaatgaactggaccagatcagaa

SEQ ID NO: 347147 - DNA, 593 bp, Homo sapiens
ttctcaggttctgctgctgctgctagtccagagactacatttttgagaaccactcttgtctactaactgtaaattgtagaactctagaacaaagcttagtttggtgtaggaaaagamgctcacaggttatggagcaaatcatgaaagattcaacccttgatcccagcctagtgtggaattcaggtaacaatcaatacacagtgacataacacaattcttggttttcatgattgcaagtcatagccaagtatcaagtgagaaattcagtttcatttgcaaggcttagagaggccaggtgattctagaaaaataggccttgtatttgctttaaaccagtaaagagctttgagtgcttattaaatggaaagctttgtgtttttatttatttttgactattttattttatttttttgagatggagtctcagtctgtcacccaggctggagtgcagtggcgtgaccttggctcactgcaacttccgcctcccgggttcaagtgattctcctgcctcagcctccccagtagctgggattacgggtacccaccaccacacctggctagtttttgtatttcgagtagagacagggtttcac

SEQ ID NO: 347148 - DNA, 661 bp, Homo sapiens
ggcctcattttcttttttaacaggtgtttgaattaatatacaaataaagtctataaatagggcttggttgataaatcttaaaacctgcaagtttcycctccgtctctttttgttttgtaatactgttttgttaaggaaattgggggatttttttaattttgtttttgttttttggttttttttggagaccgagtcttgctatcacccagcctggagtgcagtggcgtgatatcggctccctgcaacctcagctttcagggttcaagtgattctccagcttcagcctcccgagtagctgggattacaggcgtgtgccaccacacccagctaaattttgtatttttagtagagacagggtttcaccaggttggccaggctggtctcgaactcctgacctcaagtcatccaccagcctcagcctcccaaagtgttggaattacaggcgtgagctaccgcaccaagctggaaactaggttgtttatccttgcagtttcccacagtctgaatttggttgattgcaaccctgtggtaccatttaacatgtcttctgtcttctgtatttagttagggaggcttgaacaaattcacgtccaactatttttttcaagaccacctcctagatggtgatatgtgcttccatcaggaagcacctaacttctgg

SEQ ID NO: 347149 - DNA, 661 bp, Homo sapiens
ggcctcattttcttttttaacaggtgtttgaattaatatacaaataaagtctataaatagggcttggttgataaatcttaaaacctgcaagtttcccctccgtctctttttgttttgtaatactgttttgttwaggaaattgggggatttttttaattttgtttttgttttttggttttttttggagaccgagtcttgctatcacccagcctggagtgcagtggcgtgatatcggctccctgcaacctcagctttcagggttcaagtgattctccagcttcagcctcccgagtagctgggattacaggcgtgtgccaccacacccagctaaattttgtatttttagtagagacagggtttcaccaggttggccaggctggtctcgaactcctgacctcaagtcatccaccagcctcagcctcccaaagtgttggaattacaggcgtgagctaccgcaccaagctggaaactaggttgtttatccttgcagtttcccacagtctgaatttggttgattgcaaccctgtggtaccatttaacatgtcttctgtcttctgtatttagttagggaggcttgaacaaattcacgtccaactatttttttcaagaccacctcctagatggtgatatgtgcttccatcaggaagcacctaacttctgg

SEQ ID NO: 347150 - DNA, 585 bp, Homo sapiens
gctgtttttgccttaaaattttgtgtgtcttgaaaactgtggtgttaaaggtattgagactgtgcaaatgctgggcacgcttggcatgagataatcggtttttatttttataaaattgtaatgtaaccatgaagtgtgtttatttgaagaacacaaacccaaagttatgggataaaaaaggttgtgggatgaaaaagttacaggataaaaaatgttatggaaaagttgtggcaaaaaaaagttgtggaaaaaacgtaaaagttttatgaaaagcttaaaaaaagggccgggctcgctggctcatgcctgtaatcccagcactttgggaggccgaggcgggtggatcacgaggtcaggagatcgagaccatcctggctaacatgctgaaaccccstctttactaaaaatacaaaaaaaaaaaattagctgggcgtggtggcgggcgcctgtagtcccagctactcgggaggctgaggcaagagaatggcgtgaacctgggaggtggagcttgcagtgagccaagatcgcaccactgcactccagccagggtgactgagcaagactccatctcaaaaaaaaaaaaaa

SEQ ID NO: 347151 - DNA, 585 bp, Homo sapiens
gctgtttttgccttaaaattttgtgtgtcttgaaaactgtggtgttaaaggtattgagactgtgcaaatgctgggcacgcttggcatgagataatcggtttttatttttataaaattgtaatgtaaccatgaagtgtgtttatttgaagaacacaaacccaaagttatgggataaaaaaggttgtgggatgaaaaagttacaggataaaaaatgttatggaaaagttgtggcaaaaaaaagttgtggaaaaaacgtaaaagttttatgaaaagcttaaaaaaagggccgggctcgctggctcatgcctgtaatcccagcactttgggaggccgaggcgggtggatcacgaggtcaggagatcgagaccatcctggctaacatgctgaaaccccgtctytactaaaaatacaaaaaaaaaaaattagctgggcgtggtggcgggcgcctgtagtcccagctactcgggaggctgaggcaagagaatggcgtgaacctgggaggtggagcttgcagtgagccaagatcgcaccactgcactccagccagggtgactgagcaagactccatctcaaaaaaaaaaaaaa

SEQ ID NO: 347152 - DNA, 584 bp, Homo sapiens
accttccaggtttggatcacagtaaagcctctgccttgggggatgtgctggccgagacagatggggttgaaccagccatgatacgttggccttgggcaagtcatctgtgccttgcttccccagcagccaggaaggataatagcacctatttcacccatactcaagtgttcacttgttagcaggaactgagtcccggaggaggtgcaggtggagccattgaggcagcactgcagctggacctgggtctgagtcccagctcctggctgtgatatgcatcactctctccatttatttatctgaaggacagggctgtgctgttctggggtcactgtgacaatgcagctggcctgtgtgagttggtggtggcctcctgwgatggtttgaggtgggctggaggtgtgtcttgaatgccccctcacccccatggggaagacccacttagggaagactcaagtgtctgtatggaggaacccacattccctgcccctcagctgtcctctgtcccttcctagccccctctgctgtcctgcaggctctggcggtggccatccagcttggtggccatctggctgatccactcctcc

SEQ ID NO: 347153 - DNA, 584 bp, Homo sapiens
accttccaggtttggatcacagtaaagcctctgccttgggggatgtgctggccgagacagatggggttgaaccagccatgatacgttggccttgggcaagtcatctgtgccttgcttccccagcagccaggaaggataatagcacctatttcacccatactcaagtgttcacttgttagcaggaactgagtcccggaggaggtgcaggtggagccattgaggcagcactgcagctggacctgggtctgagtcccagctcctggctgtgatatgcatcactctctccatttatttatctgaaggacagggctgtgctgttctggggtcactgtgacaatgcagctggcctgtgtgagttggtggtggcctcctgagatrgtttgaggtgggctggaggtgtgtcttgaatgccccctcacccccatggggaagacccacttagggaagactcaagtgtctgtatggaggaacccacattccctgcccctcagctgtcctctgtcccttcctagccccctctgctgtcctgcaggctctggcggtggccatccagcttggtggccatctggctgatccactcctcc

SEQ ID NO: 347154 - DNA, 627 bp, Homo sapiens
acagtctaggtgacacttaaagagatgtagtttgcttatgtatttaaaagcaagtagccattaccttctaccagagcctccttctctcttttctggttctcactttgtcttaaaatcctaatgtattaatttrtgcttcagccttacaatatactaaatgattttgtagtgggaagaaaatggaaggaaatggattttgaaggcagagaaatctggcctcaaatttgattttcacagttcattagccatatgatcttaggaacctgtacaatgggattaataatattagtttagtttttttttttttttttttttttgaggatgaaatgagttacgggaacatacctaaactaacataatgtttttcacttaggggtcactgaattgttggtttccctcctgtctttcaaaatttagatagaattcactggtttcagaatttcctaaactatgctctgcagaaaattaggtgttctgagagaggtaattaacattcttcataaaaacgtttttcacggtcagtatgttggtgtggagtgaatgcttctaaagaaatgcttctcttaagaaatgcttctaactcttgcttttacccactctcccttcccccagaggatcccaaccata

SEQ ID NO: 347155 - DNA, 461 bp, Homo sapiens
gattttgaaggcagagaaatctggcctcaaatttgattttcacagttcattagccatatgatcttaggaacctgtacaatgggattaataatattagtttagtttttttttttttttttttttttgaggatgaaatgagttaygggaacatacctaaactaacataatgtttttcacttaggggtcactgaattgttggtttccctcctgtctttcaaaatttagatagaattcactggtttcagaatttcctaaactatgctctgcagaaaattaggtgttctgagagaggtaattaacattcttcataaaaacgtttttcacggtcagtatgttggtgtggagtgaatgcttctaaagaaatgcttctcttaagaaatgcttctaactcttgcttttacccactctcccttcccccagaggatcccaaccatacagagctcataggtcaattccaaatg

SEQ ID NO: 347156 - DNA, 627 bp, Homo sapiens
acagtctaggtgacacttaaagagatgtagtttgcttatgtatttaaaagcaagtagccattaccttctaccagagcctccttctctcttttctggttctcactttgtcttaaaatcctaatgtattaatttgtgcttcagccttacaatatactaaatgattttgtagtgggaagaaaatggaaggaaatggattttgaaggcagagaaatctggcctcaaatttgattttcacagttcattagccatatgatcttaggaacctgtacaatgggattaataatattagtttagtttttttttttttttttttttttgaggatgaaatgagttacgggaacatacctaaactaacataatgtttttcacttaggggtcactgaattgttggtttccctcctgtctttcaaaatttagatagaattcactggtttcaraatttcctaaactatgctctgcagaaaattaggtgttctgagagaggtaattaacattcttcataaaaacgtttttcacggtcagtatgttggtgtggagtgaatgcttctaaagaaatgcttctcttaagaaatgcttctaactcttgcttttacccactctcccttcccccagaggatcccaaccata

SEQ ID NO: 347157 - DNA, 627 bp, Homo sapiens
acagtctaggtgacacttaaagagatgtagtttgcttatgtatttaaaagcaagtagccattaccttctaccagagcctccttctctcttttctggttctcactttgtcttaaaatcctaatgtattaatttgtgcttcagccttacaatatactaaatgattttgtagtgggaagaaaatggaaggaaatggattttgaaggcagagaaatctggcctcaaatttgattttcacagttcattagccatatgatcttaggaacctgtacaatgggattaataatattagtttagtttttttttttttttttttttttgaggatgaaatgagttacgggaacatacctaaactaacataatgtttttcacttaggggtcactgaattgttggtttccctcctgtctttcaaaatttagatagaattcactggtttcagaatttcctaaactatgctctgcaraaaattaggtgttctgagagaggtaattaacattcttcataaaaacgtttttcacggtcagtatgttggtgtggagtgaatgcttctaaagaaatgcttctcttaagaaatgcttctaactcttgcttttacccactctcccttcccccagaggatcccaaccata

SEQ ID NO: 347158 - DNA, 584 bp, Homo sapiens
ttttgttttgttttgttttggtgcacaatggggttcatattagggaaaaagtgatctagaaagacagctatttagccacggccttaattatctccttcctttctagagtgcaaatttgcctctaatggatggaaatgctaatgattttaaaccttactacaaaaaaaacagtctaaaaatttttaaagaaatactttagcaagctttatatattctattgggaataagacgtcctttaggcaacaattatctacaaaagaaaggaagtcatgagaaaggtgggggtgaaatgaacaagggaatgggatggtggtagggttttttgtaggtgactacatatttggtwgaaaaaggtcaagagcagaactcattcacttcacttcagggaggaagaggaaagcaggatattagagtggaaaaaagagaaaaaagagctgaatatgattctgggatgataaagtactcctgaaaactgcctcacgggctactcaggggcactaaggctcacctgcattcgccataatccatcctttctggtcatgcagggttttcaaggagggagcctgacttttaggaatgaggtt

SEQ ID NO: 347159 - DNA, 619 bp, Homo sapiens
tgttttgatagctttgtaatacattttgaaatcaggaattataatgcctccatctttgtccttctctctcaagattgcttcagctattaggggtcttttgtgattccatgtgagttttagcatggctttttctattctgtgaaaaatgtcctttgaattttgatagggattgcattgaatctatagattgccttgggtggtacagacattttaacaatattagttgtctaattcatgaacacataatgtttttccattacttgtgctccttcaatttctttcaccaatgctttatagttttcagcaaacagatctttcacctctttggttaaattaattcctaagtgttttrttctttttgatgctatttgttaatgaaaatattttcttaatttctttttcaaatacttcattgttagtgtatagaaacacaacctgtttttgtaagttgactttatatcctacaagtttactgaattacttcttagttctaacagctttttggtgtagtcttcagagttttctatacgtaagatcatattggagcagatttttaacattgcttatattttacaaaatttttttcaaaattccactaaaacattattaaaaccttgtt

SEQ ID NO: 347160 - DNA, 619 bp, Homo sapiens
tgttttgatagctttgtaatacattttgaaatcaggaattataatgcctccatctttgtccttctctctcaagattgcttcagctattaggggtcttttgtgattccatgtgagttttagcatggctttttctattctgtgaaaaatgtcctttgaattttgatagggattgcattgaatctatagattgccttgggtggtacagacattttaacaatattagttgtctaattcatgaacacataatgtttttccattacttgtgctccttcaatttctttcaccaatgctttatagttttcagcaaacagatctttcacctctttggttaaattaattcctaagtgttttattctttttgatgctatttgttaatgaaaatattttcttaatttctttttcaaatacttcattgttagtgtatagaaacacaacctgtttttgtaagttgactttatatcctacaagtttactgaattacttcttagttctaacagctttttggtgtagtcttcagagttttctataygtaagatcatattggagcagatttttaacattgcttatattttacaaaatttttttcaaaattccactaaaacattattaaaaccttgtt

SEQ ID NO: 347161 - DNA, 601 bp, Homo sapiens
atgctttatagttttcagcaaacagatctttcacctctttggttaaattaattcctaagtgttttattctttttgatgctatttgttaatgaaaatattttcttaatttctttttcaaatacttcattgttagtgtatagaaacacaacctgtttttgtaagttgactttatatcctacaagtttactgaattacttcttagttctaacagctttttggtgtagtcttcagagttttctatacgtaagatcatattggagcagatttttaacattgcttatattttacaaaatttttttcaaaattccactaaracattattaaaaccttgttatttacagtggactttataatataaacttacattaatttgtccaacttatatcttcttcttaccacttttcttgctttgcaatgcaaccaagaatacacaatacccagaccatgtcaaaatgatattgtttgtaattaaactgcattattcagctaattattttctcatttgcatttatttttcttcacagcagaaactatggcaatttagggctaattgtttaatactttctcataatttaccaaaaatatgatgatatattaattt

SEQ ID NO: 347162 - DNA, 621 bp, Homo sapiens
tttcttcacagcagaaactatggcaatttagggctaattgtttaatactttctcataatttaccaaaaatatgatgatatattaatttttaaaaatacgttgcattaatcacaccaagcaccttggctggaagcttactctcaatatgagaacacattatttctaaagacacaagtgacraaatatttcatcccaagatgtgggtggactgtgacaaaacagcctgcattcatcactttgtttatttactaggcaaaagttcagtgacagtgaccaatttttcacctttccctatattcacaaatagtgcctttctatcatgggtggggtgacctatcccacccctgacagtggtttcaaccatgtgacttgctttggcagatgggatattatcggacataaatgcaagaagagacttgagatgggcctgtgtgccgtggtttactctcttgtgcgtctgccatcaccatgggaacatgcctgagctctcttgctaaaaggtgagagacacatggagcagaactgtgtcaccatgtcacccccactgttctggtcaagactagcctagatcagccaactgccagctgaccccccaaacatgagcaataagcaatgactgtt

SEQ ID NO: 347163 - DNA, 562 bp, Homo sapiens
ggatattatcggacataaatgcaagaagagacttgagatgggcctgtgtgccgtggtttactctcttgtgcgtctgccatcaccatgggaacatgcctgagctctcttgctaaaaggtgagagacacatggagcagaactgtgtcaccatgtcacccccactgttctggtcaagactagcctagatcagccaactgccagctgaccccccaaacatgagcaataagcaatgactgttgaatgccactgaagttttgtagcaaacgattactaatgctgtatccttttctggcttttatgttcaaatgacttagtagggtctgggctgatatcacctgattctcaaygtgtctcttatattcttagcctttggcaattctgtcagagcactttgccatcctttcccagactttctgtgagcagttccacccacagccttttctgctgctctcatctcaaatttacttagtccctcaaggcagctgtctggtgaacactggaagttagtgagcacaatgaagataagagggtagacgtgaaaataaagatttgggagttacgaa

SEQ ID NO: 347164 - DNA, 562 bp, Homo sapiens
ggatattatcggacataaatgcaagaagagacttgagatgggcctgtgtgccgtggtttactctcttgtgcgtctgccatcaccatgggaacatgcctgagctctcttgctaaaaggtgagagacacatggagcagaactgtgtcaccatgtcacccccactgttctggtcaagactagcctagatcagccaactgccagctgaccccccaaacatgagcaataagcaatgactgttgaatgccactgaagttttgtagcaaacgattactaatgctgtatccttttctggcttttatgttcaaatgacttagtagggtctgggctgatatcacctgattctcaatgtgtctcttatattcttagcctttggcaattctgtcagagcactttgccatcctttcccagactttctgtgagcagttccacccacagccttttctgctgctctcatctcaaatttacttagtccctcaaggcagctgtctggtgarcactggaagttagtgagcacaatgaagataagagggtagacgtgaaaataaagatttgggagttacgaa

SEQ ID NO: 347165 - DNA, 575 bp, Homo sapiens
tggcacattataataagcagtttcattttgggagtcttggcacatgtttctcattatcaggggtaagataagkgtgtctgcaatatcgattctctacgtctctcagaaattggttgcctaacaactttttgctcaataaattttggagactcctgggattggtgccttatcagaaacataggtaggcaaagttgatcttttgcaccagctcagcaattttttggcactttttccttgccttctgttccatttccctccgatctagtccttgcaaactttgtgccctgagtgctgtccctttggtgcttcgaaggacctgaccagtagcactgtatagtcctactctcctacattgtcctatcttccagagttatcccttgttaccggttgtgataaattttggttggtgttgtaaaatggcattatggttagcaacatagaaatacatgaatcctatcaggttttcaggtatttttttttctctgcattcctaaagagtttgcaaacatcacaaaaaaaaaaaaaaaaggaaaaaaataaaaaaaatgctttgctcactgtgctaggaggaagct

SEQ ID NO: 347166 - DNA, 551 bp, Homo sapiens
ctacaaaaaacacccttcaccaataaagacacacagaggctgacaataaagggatagaaaaagatatcccatgcaaatggaaaccaaaaaggggcagaaggatttatacttatatcagatgagatagatttcaagacaaaaactataaaaaagacaaagaatgtcattatatartgataaagcagtcaatttagcaaaaggatataacaattataaatatatatgcattcaacactggagcaaccagatatagaaagcaagtattattagtgctagagagagaggtagaccccaaggcagtaatagtgggagacttcaacaccccactttcaacattggacagattatccaggcaaaaatcagcagagactttggacttaatctgtactatagaccaaatggacctaagagatatttacagaacatttcattcagtggctgcagaatacacattcttctccttagcacatgaatcacttgcaaggatagaccatatgttgggccacaaaacaagtcttaaaatactaaaaaaattgaagtaatatcaagta

SEQ ID NO: 347167 - DNA, 596 bp, Homo sapiens
caaaagacatagagtggctgaatggatacacaagacccaatgatctgttgcctacaaaaaacacccttcaccaataaagacacacagaggctgacaataaagggatagaaaaagatatcccatgcaaatggaaaccaaaaaggggcagaaggatttatacttatatcagatgagatagatttcaagacaaaaactataaaaaagacaaagaatgtcattatatagtgataaagcagtcaatttagcaaaaggatataacaattataaatatatatgcattcaacactggagcaaccagatatagaaagcaagtattattagtgctagagagagaggtagaccccaakgcagtaatagtgggagacttcaacaccccactttcaacattggacagattatccaggcaaaaatcagcagagactttggacttaatctgtactatagaccaaatggacctaagagatatttacagaacatttcattcagtggctgcagaatacacattcttctccttagcacatgaatcacttgcaaggatagaccatatgttgggccacaaaacaagtcttaaaatactaaaaaaattgaagtaatat

SEQ ID NO: 347168 - DNA, 566 bp, Homo sapiens
ttaaaaaactattagaactgataaatttagtaaagttgcaggatacaaaatcaacatacaaatattagtagcatttctacatgccaatagtgaacagtctgaaaaagaaataaagggagtaatcccatttacaatagccacaaataaaattaaacacctggaaattaaccaaagaagtgaaggatctccacattgaaaactaaaatcgaagagggcatagaaaatgggaagatatttcatgttcatagattggaagaatcaatactggattggaagattcaatgcaattcctatcaaaataccagtgacattcttcccagaaatagaaaaaaaaattctaaaatttatatggaaccacaaaacacccagaatatccaaagctatcttaagcaaaaagaacaaaactagaggaattgcattacctgacttcaaattattctatagagctatagtaaacatcatgatacggcataaaaacagacatacagaacaatagaacagaatgcagaacccagaaagaaatctgtgcatctayagtgcacttatttttgacgaaggtgccaaga

SEQ ID NO: 347169 - DNA, 569 bp, Homo sapiens
gtatttttcaaaaagaattctttactctctagatttcttggtaactggaatattttccttttcttttttactaatagaagcaggaaaaataatggtttacccattgaaactttctagctttcctctgggctttgaatagttcaagataaagctagagcccatactaggataaaaatagctgggaccttggataagcagatgtgtgaagatctttttttgttgttgttgttgtaatctgaactgaaaaactcttgctgttctaagattctgtatccttgatcaccaagatgaggcactatttagaatctgattctaagcaggggttattacataaatatttacagttttgctctcccagttccagcatatatatgtttcatatagttttgggtatagttccacagagtrggttagccataagctttctagttaattctaaatggaactgtgcaactgtgccatgtaaaataaagagcctagactcaatagtgagaattttttctaaaaacagcagaatttagcaatagtctgtagttacatggaataataagtggctctaaaaacacacc

SEQ ID NO: 347170 - DNA, 573 bp, Homo sapiens
gcattgatgctaactatgcactcaaagattcagaaaatgaccacaagagggttcatggcccgtagtaaggtcttggtctcgacctccatttgctaccttgcctctgtagactttcctcctaatagtkgggctatgatggtgctttgaatctcctaatagtatcagcaaagaccatgcagccaacagtacttacatagtctgggcattgtctttattctatcaaatatccatgggtctccttggagatgaactgggaaaattgttagtctttacacttgcgatagtgtcacagtgtccttcctcaggggggttgagaatcttcttccatcagtggactttgggtctgagaatcagctcaggtctagaaactatgtcactcaaaggaacacaatgatcttttagccattgccacagacctttgtgagttggggttctctgatgccattttagccttgttgttgttgcagttattacatctaccttgcctctgatgattaaatattgccatctggctgttgcaattccagatcctatcatgcccattaataccagggagcccaggtgcgtagcatc

SEQ ID NO: 347171 - DNA, 573 bp, Homo sapiens
gcattgatgctaactatgcactcaaagattcagaaaatgaccacaagagggttcatggcccgtagtaaggtcttggtctcgacctccatttgctaccttgcctctgtagactttcctcctaatagttgggctatgatggtgctttgaatctcctaatagtatcagcaaagaccatgcagccaacagtacttacatagtctgggcattgtctttattctatcaaatatccatgggtctccttggagatgaactgggaaaattgttagtctttacacttgcgatagtgtcacagtgtccttcctcaggggggttgagaatcttcttccatcagtggactttgggtctgagaatcagctcaggtctagaaactatstcactcaaaggaacacaatgatcttttagccattgccacagacctttgtgagttggggttctctgatgccattttagccttgttgttgttgcagttattacatctaccttgcctctgatgattaaatattgccatctggctgttgcaattccagatcctatcatgcccattaataccagggagcccaggtgcgtagcatc

SEQ ID NO: 347172 - DNA, 609 bp, Homo sapiens
attcttctggcatcttctgaagtagtcacaggacttgcractgtgaggcaccaaaaaactggtttaaaatgtaggaagtaaaaaggtatgactagggcaggatcaagaaatgcacgagttttgtgatcctgaacacaatataccggatgacatattcattgggtgtgcataactgagagtttctcattcctggcctgtggaggtagggtggggtgggattgccaggtagctatgggcaaggttaggggaggggattgtaggaaaagtagttcacagcatacatgacactgtggaactcttaactatgctatctactaaatgaacttgcctcagaaagggcaagcataaagtaactatttattttagaaatacgtgttatacaggctcagggactattccctgttcctggttcctgcatgatgtttccagcaggtttcagagtttttagctacttttaaataaatcaataatctccttgttttagcattaaaattccatttaagggtcgtgggagaggtagatgtggggatggttcacaggtacaaaaatgtggttagatagaatgaataagatctagtatttgatagggtgacagggtgacaacagtca

SEQ ID NO: 347173 - DNA, 609 bp, Homo sapiens
taagtaaaatatgtggtactggttcacagacatataaagcaatggaacacactagagcgagacatatagaaatttagtatatgataaaggaatctcaaataagtagggaaaagtagccttattataaacgatgttggaacaattggtcagccatctgaaaagtaatgaaggatgatgaatgcctttagaacctcggtgtggagaagggcattgtaactatgatgcaaaatctggaggtgtaaaagaaaagattgrtaaatctaaatacataaaaataaagacattttctagggggatgtctactgggagagttaaaagacaaataaaaaattggggaaaatattagtattccatttcacagataaaagactgatttctcgaatatgtaagaactcctgtatgatataaaaagaccaattcaatagaaaaatagtcaaaagatgtgaatggggattataaaatgaaataaaaatgacataaatattttaaaaagatggtctatgccattcatattcagtgagatgcaaattatacatccactgaaagttttgtaatttactgaattgatacatattccaaagttcattagcacatttgcattgaggcaag

SEQ ID NO: 347174 - DNA, 448 bp, Homo sapiens
tagggagagtttttttttttaaaaaatattgtgcaattacaattttatttaattaagttaattaatttttaaatttccaacttttatgttcaggggtacatgtgcgtgatgtgcaggtttgttacataggtaaatgtgtgccatggtggctttcggcacagatcatcccatcacccaggtattaagcctagcatccatcagccattcttcctgatcctctccctcttcccacccctccaccctctgacagaccccagtgtgtgttgttcccctccatgtgtccatgcgttccmtcatttagctcccacctataagtgagaacatgtggtatttggttttctgttcctgtgttagtttgctaaagataatggcttccagcaccagccatgccctgcaaagaacgtgatctcattcttttttatggctgcatagtattctatggtgtata

SEQ ID NO: 347175 - DNA, 524 bp, Homo sapiens
ttacatgaatgtgttagaagagctctgtttatcttccytcttgagcaattattttcaacaaaagttagtggtactgttttcttctctaataagaatggatgccaatatattgcatccattacaatttcactgttcccacggctgcagaaaccacattaggttttgactctaggaggcgtttaaaaaacataaaagctgaagaagtcatgggtaattaatttatctaaattagtttattagagattattcaactagtattgttaccagttaatggcatcaaacataagttggctaagttttggtctaaacaccaggggaggcccagagcagtggctcacgcctgtaattccagcactttgggaggccgaggcaggaggatcacctgagatcaggagtttaagaccagacctgccaacatggcaaaaccctgtctctaccaaaaatataaaaattagccaggtgtggtggtgtgtgcctgtagttccagctactcgggaggctgaggcaggagaattgcttgaacc

SEQ ID NO: 347176 - DNA, 524 bp, Homo sapiens
ttacatgaatgtgttagaagagctctgtttatcttccctcttgagcaattattttcaacaaaagttagtggtactgttttcttctctaataagaatggatgccaatatattgcatccattacaatttcactgttcccacggctgcagaaaccacattaggttttgactctaggaggcgtttaaaaaacataaaagctgaagaagtcatgggtaattaatttmtctaaattagtttattagagattattcaactagtattgttaccagttaatggcatcaaacataagttggctaagttttggtctaaacaccaggggaggcccagagcagtggctcacgcctgtaattccagcactttgggaggccgaggcaggaggatcacctgagatcaggagtttaagaccagacctgccaacatggcaaaaccctgtctctaccaaaaatataaaaattagccaggtgtggtggtgtgtgcctgtagttccagctactcgggaggctgaggcaggagaattgcttgaacc

SEQ ID NO: 347177 - DNA, 541 bp, Homo sapiens
gaagtctatagtatggctgaaggtaactctgattttgagtatctattgaccacagaaaactggtattgtctaggaaaataataagcctttttccaggcacataagtagaaagactattggattaggatttargaggcttgtgttttaaggttagctctcctaccaagtaacatttagatttaatttagatgatctcttcatgtcctaaaattcttgatgaagtatttaagatgaaaataactgagaatcacctcatgtatttcatataaatttaagttgttaacttgtaatgaatggaaatgggtttgaagaaatttttacaaaggcactatttacaagggtgcagtgttaacacagtaaaaacagtgaagtagttactaccactaggcctgaaggtgggggaggaaaaagaaagaggcttgtggaggcctctgagaggagccatgaccatgggttatggacataccagtcataggatagtttacaaggaaggagccagggaaatgaatcacctcatcttataccttttctttttgaattt

SEQ ID NO: 347178 - DNA, 541 bp, Homo sapiens
gaagtctatagtatggctgaaggtaactctgattttgagtatctattgaccacagaaaactggtattgtctaggaaaataataagcctttttccaggcacataagtagaaagactattggattaggatttaagaggcttgtgttttarggttagctctcctaccaagtaacatttagatttaatttagatgatctcttcatgtcctaaaattcttgatgaagtatttaagatgaaaataactgagaatcacctcatgtatttcatataaatttaagttgttaacttgtaatgaatggaaatgggtttgaagaaatttttacaaaggcactatttacaagggtgcagtgttaacacagtaaaaacagtgaagtagttactaccactaggcctgaaggtgggggaggaaaaagaaagaggcttgtggaggcctctgagaggagccatgaccatgggttatggacataccagtcataggatagtttacaaggaaggagccagggaaatgaatcacctcatcttataccttttctttttgaattt

SEQ ID NO: 347179 - DNA, 541 bp, Homo sapiens
gaagtctatagtatggctgaaggtaactctgattttgagtatctattgaccacagaaaactggtattgtctaggaaaataataagcctttttccaggcacataagtagaaagactattggattaggatttaagaggcttgtgttttaaggttagctctcctaccaagtaacatttagatttaatttagatgatctcttcrtgtcctaaaattcttgatgaagtatttaagatgaaaataactgagaatcacctcatgtatttcatataaatttaagttgttaacttgtaatgaatggaaatgggtttgaagaaatttttacaaaggcactatttacaagggtgcagtgttaacacagtaaaaacagtgaagtagttactaccactaggcctgaaggtgggggaggaaaaagaaagaggcttgtggaggcctctgagaggagccatgaccatgggttatggacataccagtcataggatagtttacaaggaaggagccagggaaatgaatcacctcatcttataccttttctttttgaattt

SEQ ID NO: 347180 - DNA, 598 bp, Homo sapiens
tttgattaccttctggaataataaatacagccatgtgctgcataatggtatttcagtcaackatgtactgcatataggatggtggtcccataagataataatggaggtgaaaaatttctatcacctagtgacatcatagccatcataatattatagctcaattacttaattttaaaataaatttagtatagcctaagtgtatagtcttttaaaagtctgcaataatgtacagtaacgtcctaggctttgacagtcactcatcactcactcattgacttacccagagctacttccagtcctttgagcaccattcatggtaagtgacctatataggagtgccattttcatcttttacactgtatttttgctgtacctttttatgtttagatacacaaacacttaccattgtgttacaatcgcctacagtttccagtgtggtaatatgctgtataggcttgtagcctgggagcagtaggctataccatctagctttgtgtaagtacaccctatgatgttctcacagccatgaaatcacctagcaatgcatctcttagaacatatccctgttgttaagcgactcatgactgtaattaccaat

SEQ ID NO: 347181 - DNA, 480 bp, Homo sapiens
ggctgttacctgggaacccaagagtgaggcaccctgtgtctctcagacaccctgggcacacattggagccagcaaaggcattactggtatagtgagcaagcattcgtcagagagcagaggaagagccttcatgacgctgtgtgcagaaactgggtccgtggactgaccagcagytccagctctctctttgacttacctagatttgaccttttcagatggaatgaatcttcagaattcttggactaattggcattaggcttcaagagggagatatggaacatcctgttaataaagatacctggatgcttgagttgttaaccaaaaatcagaagaggctgtgtcatctgttcatgctcacttggtgtagctggctatgctgcttgtatctttataacttaggttaggtgcatttatcatctttacgtagttttagaaactgaggctggtagaggttaggtaacttgcttactgtaacacagt

SEQ ID NO: 347182 - DNA, 542 bp, Homo sapiens
tgaggtctatcatgcactattaactaaataggaatgtttctttaacattgtacatttgaccaacacacctatttaaggtagtaaagaaatggttcttccatggaattgacttcaatagtacagtttttattttttcatcctgcccacttgcttttcctccttttattttcttttctcaacaaggtggtttctcttgtcagattaagaaggrgtagcagtacaggttggtaagtccttatgcaacctgtgatgtgagaattgctataataatgactgaagtcaacaataaaaattcgattcacttcagcaagcatttgttgtatagctttttatgtgcaggcgctatgctagggcctgtaggggatacaaggatgactaaatcttggttttggtccacaaaacaattagaaggggcacaattgcgggaggaattttataagtaaagacatgggggaggaagtgaggatttgggagatgctcagagactagtggctagaggaaatgacttgctgtggaaagaaagaagttggaaaggaagatag

SEQ ID NO: 347183 - DNA, 583 bp, Homo sapiens
ttttcctccttttattttcttttctcaacaaggtggtttctcttgtcagattaagaaggggtagcagtacaggttggtaagtccttatgcaacctgtgatgtgagaattgctataataatgactgaagtcaacaataaaaattcgattcacttcagcaagcatttgttgtatagctttttatgtgcaggcgctatgctagggcctgtaggggatacaaggatgactaaatcttggttttggtccacaaaacaattagaaggggcacaattgygggaggaattttataagtaaagacatgggggaggaagtgaggatttgggagatgctcagagactagtggctagaggaaatgacttgctgtggaaagaaagaagttggaaaggaagatagcaacctgacagtgagggcttgactgtaattatttcgcacacgattttctatctcataattggtctaatataccaagtgtcagttttcgttgaacaaaacactgaaataatggcacttaaatgagatgaagtcagtgttaatagcttttgaaaagcgtatctgttagttttctcagtattaaatttgcttgtc

SEQ ID NO: 347184 - DNA, 553 bp, Homo sapiens
tgaggctaaagtgtagtggtgcaatcatagctcaccactgtcttgaactcctgggtttcagccatcctccccagcctcttcagtagctgtgaagacaggcaygagccaccatgctcagcagcaattttaatctttaatgtcatcttccctctactccaccagattgtcaaaattctgagacattttaggctgcaccaaaataagaaggagactcctcttaccttactgataaactctgcgatgcctattgtcaatgttccttccaagtctggcaactgtgcggcttttgttttaggcttgggacatagaaattattacttttgattagggtccagtgttcctgagtgaccacatagcaatgccccgagtttagctaacttctcaggttagtgctacagagcagggccattctttgcacaggtgtgcctctgttatttgtatacttccctttactttgttcttaagttatgggtctttttctttttctccctaccctctaaacactggcatggtgtcctctatgaagctggtcttttgctgtttgcatagcaca

SEQ ID NO: 347185 - DNA, 557 bp, Homo sapiens
gacctcacctggcacttctcaccccttacaatctcgcatgatstccgagtcctaccacgctcttgtgctctttaaaataataatgaactgagagatgaccccgtgagtgactgctcttcagagcccctcccactccttttggaatttcagtctccatggaatgaccccaagttgcatcattatccctctcctttctcctagcatgctgagaaagcaaagaaccagggtaaagacaggggtctgagtctggggaaggaaagtatcagcacggctgctctcttgccccctttttccgccctggtacagctaagagaggcagagaaggggacaacagaggtgggttttcaaagactgccccagccacatcccctagggagtggccagagccttcgagctctgcttttgttgcccataatgtgttaaacagtcatcaactgtccaacctcccctttatcccgacccccagcgaaggaaggaaataatacgttctactttaaacaaaatcggaatttagagttgaaataattttgcttgtagcctctcagttaagtgttatt

SEQ ID NO: 347186 - DNA, 557 bp, Homo sapiens
gacctcacctggcacttctcaccccttacaatctcgcatgatctccgagtcctaccacgctcttgtgctctttaaaataataatgaactgagagatgaccccgtgagtgactgctcttcagagcccctcccactccttttggaatttcagtctccatggaatgaccccaagttgcatcattayccctctcctttctcctagcatgctgagaaagcaaagaaccagggtaaagacaggggtctgagtctggggaaggaaagtatcagcacggctgctctcttgccccctttttccgccctggtacagctaagagaggcagagaaggggacaacagaggtgggttttcaaagactgccccagccacatcccctagggagtggccagagccttcgagctctgcttttgttgcccataatgtgttaaacagtcatcaactgtccaacctcccctttatcccgacccccagcgaaggaaggaaataatacgttctactttaaacaaaatcggaatttagagttgaaataattttgcttgtagcctctcagttaagtgttatt

SEQ ID NO: 347187 - DNA, 557 bp, Homo sapiens
gacctcacctggcacttctcaccccttacaatctcgcatgatctccgagtcctaccacgctcttgtgctctttaaaataataatgaactgagagatgaccccgtgagtgactgctcttcagagcccctcccactccttttggaatttcagtctccatggaatgaccccaagttgcatcattatccctctcctttctcctagcatgctgagaaagcaaagaaccagggtaaagacaggggtctgagtctggggaaggaaagtatcagcacggctgctctcttgccccctttttcygccctggtacagctaagagaggcagagaaggggacaacagaggtgggttttcaaagactgccccagccacatcccctagggagtggccagagccttcgagctctgcttttgttgcccataatgtgttaaacagtcatcaactgtccaacctcccctttatcccgacccccagcgaaggaaggaaataatacgttctactttaaacaaaatcggaatttagagttgaaataattttgcttgtagcctctcagttaagtgttatt

SEQ ID NO: 347188 - DNA, 557 bp, Homo sapiens
gacctcacctggcacttctcaccccttacaatctcgcatgatctccgagtcctaccacgctcttgtgctctttaaaataataatgaactgagagatgaccccgtgagtgactgctcttcagagcccctcccactccttttggaatttcagtctccatggaatgaccccaagttgcatcattatccctctcctttctcctagcatgctgagaaagcaaagaaccagggtaaagacaggggtctgagtctggggaaggaaagtatcagcacggctgctctcttgccccctttttccgccctggtacagctaagagaggcagagaaggggacaacagaggtgggttttcaaagactgccccagccacatcccctagggagtggccagagccttcgagctctgcttttgttgcccataatgtgttaaacagtcatcaactgtccaacctcccctttaycccgacccccagcgaaggaaggaaataatacgttctactttaaacaaaatcggaatttagagttgaaataattttgcttgtagcctctcagttaagtgttatt

SEQ ID NO: 347189 - DNA, 584 bp, Homo sapiens
aacgatttttttaatgattgaaacatcatttacaaagtttggaagtcttacttatttaaaatacaggttttggcaaaaagcagttggaagtgctaggagttaaggcagggataatagagaaggaactaacctttgagcagttactatatacaaggtgtcatgttgggtgccttcaaatgttatcacattggaacttcccagtaagccctaactctcagctgtgtggaaagaaaatgtcccaaacatcaacatcaaataagattacttgtctgacaatccatcaattaccaaattcatgtcacattttactttgctcaacattgggattatgattttttttaagagtcacttttcccagagcttcttattgtcctctttccagtgattagtaaaacaaatcattatcttatcaataagatcacacaatttttttttttttacttttttatkttattttactttaaattctgggatacatgagctgaacatgaaggtttgttacataggtatacatgtgccatggtgatttgccgcacccatcaacccgtcatctaggttttaagccccacatgcattagatattt

SEQ ID NO: 347190 - DNA, 584 bp, Homo sapiens
aacgatttttttaatgattgaaacatcatttacaaagtttggaagtcttacttatttaaaatacaggttttggcaaaaagcagttggaagtgctaggagttaaggcagggataatagagaaggaactaacctttgagcagttactatatacaaggtgtcatgttgggtgccttcaaatgttatcacattggaacttcccagtaagccctaactctcagctgtgtggaaagaaaatgtcccaaacatcaacatcaaataagattacttgtctgacaatccatcaattaccaaattcatgtcacattttactttgctcaacattgggattatgattttttttaagagtcacttttcccagagcttcttattgtcctctttccagtgattagtaaaacaaatcattatcttatcaataagatcacacaatttttttttttttacttttttatgttattttrctttaaattctgggatacatgagctgaacatgaaggtttgttacataggtatacatgtgccatggtgatttgccgcacccatcaacccgtcatctaggttttaagccccacatgcattagatattt

SEQ ID NO: 347191 - DNA, 584 bp, Homo sapiens
atggaaatgagtggcaaaactataaagaaatacaagtaagagattattacaaagtccagagagtggttgcctctatgtggggagaggtatcaagtggtttctaatcatgttctattttttgacctaggtagtggtttcctggatatttactacataatagttattaaattatacccatatgtttatgcatttttgtatgtacaatacattaaacaatttttaaaaagaaaaaatcaatggtattggttagaaaagyatttttggtatagaataatatataaaacatcttgaggtttccaccttctatctattgaagaacagccattgaaagaaacaaccatggcagtgagctgccctgtggctgtgtgctatccatggcacagatacaatagacataacctcaagcatatagataacactagaatgtagtaaaaccattaagaagtgataagccttgagtatttattacctgtttttttaaaataagttgtttaattacaagttcatataatttaatgtttaattatgtcaatgttttacaaccagttcacaaaactcctgaaaagtgaacaagtgactggtaa

SEQ ID NO: 347192 - DNA, 571 bp, Homo sapiens
ccttatccagtaccttttctctcttaaatatctttgcatcatcatttcaacaacrattatgttaacttattacttgaaaaattgttttgaaggcaacaccattggaaaatttcctaaagagaataatttctcctcctattcctgtccaggtatgatgctctggaccaaggacatcagcttgagaacaataggaatagttaatgcaagtagtttttggggaaaataaagcattttaaactcaatttttctgagtaattatctatattatgtgaattactcagataaggacttaggtctttgaccatgtggaactgaactttaattgaaaatggagtgttaacttctgctgagtccttcttcccctgccagcttaacatgcttagggagatgagatcataaagtattgtgaccatttctccgcacagtttttcagatcaacattatgaccaaagattacatttctaagtgttttgaagttgtgcaactatgagagaaaatgttaggttgaaccacaaaaatttgttttgtaaaaaatgatcaaacataggcaatttcatatgagttaacctaa

SEQ ID NO: 347193 - DNA, 571 bp, Homo sapiens
ccttatccagtaccttttctctcttaaatatctttgcatcatcatttcaacaacgattatgttaacttattacttgaaaaattgttttgaaggcaacaccattggaaaatttcctaaagagaataatttctcctcctattcctgtccaggtatgatgctctggaccaaggacatcagcttgagaacaataggaatagttaatgcaagtagtttttggggaaaataaagcattttaaactcaatttttctgagtaattatctatattatgtgaattactcagataaggacttaggtctttgaccatgtggaactgaactttaattgaaaatggagtgttaacttctgctgagtccttcttcccctgccagcttaacatgcttagggagatgagatcataaagtattgtgaccatttytccgcacagtttttcagatcaacattatgaccaaagattacatttctaagtgttttgaagttgtgcaactatgagagaaaatgttaggttgaaccacaaaaatttgttttgtaaaaaatgatcaaacataggcaatttcatatgagttaacctaa

SEQ ID NO: 347194 - DNA, 571 bp, Homo sapiens
ccttatccagtaccttttctctcttaaatatctttgcatcatcatttcaacaacgattatgttaacttattacttgaaaaattgttttgaaggcaacaccattggaaaatttcctaaagagaataatttctcctcctattcctgtccaggtatgatgctctggaccaaggacatcagcttgagaacaataggaatagttaatgcaagtagtttttggggaaaataaagcattttaaactcaatttttctgagtaattatctatattatgtgaattactcagataaggacttaggtctttgaccatgtggaactgaactttaattgaaaatggagtgttaacttctgctgagtccttcttcccctgccagcttaacatgcttagggagatgagatcataaagtattgtgaccatttctcygcacagtttttcagatcaacattatgaccaaagattacatttctaagtgttttgaagttgtgcaactatgagagaaaatgttaggttgaaccacaaaaatttgttttgtaaaaaatgatcaaacataggcaatttcatatgagttaacctaa

SEQ ID NO: 347195 - DNA, 557 bp, Homo sapiens
atcaaacctatcactcaatgcctgctacaaagaaaagccccttcccgaaggtcacaacagataagtaaaactaaaaaaattgaaaaaaaaaaattttaagaaaaagaaaagcccctcagataaatgtattctaggatatgctgccaggaaaaaaaaaaaaaaaaaaaatcctgtattttctaaracctgtgcttcttccttttaaagaagaagaagcatgcaactaattgtattcccccttttgcactgactgccaggaatctcacaagcaagtatcacgttcagtatggcagtgacttaatccacatgacatcattttgcattctccatttttccatagatctgattttctatatctattttattactttttatcaacattattgccaggcacaatggctcatgcctgtaatcccagcactttgggaggccgaggcgggcagatcacgaggtcaggagttcaagaccagcctgaccaacatggtgaaaccccatctctactaaaaatacaaaaattagccaggcgtggtagcacacgtgcctgtaactccagctac

SEQ ID NO: 347196 - DNA, 487 bp, Homo sapiens
ctagggtaaatactcagggttcatcgtctcacgccaagaaaatttaggacacagacacacccaagaagtttatgagtggaggtttaataggcagaagaaaagagaaaggggaaacagctctctctctagtgagaaagaggggcttttgaggaaaaggccgggtggagttcgccggattttataggcagacttgaggaggtggtgtctgatttacctagggcacacagattggttcagtcaggtatgatatttacatagcgctgggaaggcaggccacccaaccctaatcttattatgcaaatggagtttccacttgaccagcaacatcttgtctgctccgctgtacacgtggatggcaaagagaaaagggaagatggagccgccatttttaacatgattggcacaacccccagcagctrtgtctgcagctcgattttacaggctgctgtttgttagaaaatgatttggcactacttttcattaaaaa

SEQ ID NO: 347197 - DNA, 610 bp, Homo sapiens
cattgacactggtatcagatgtaatttggatcttttttaatgatctgcaagaattaatgcaaaagcattttttaaaagttaggttcacctgggtgtaatttacatacaataaaattcactcttttaagtgtggaatttaatgagttttgacaaatgcatatacagtcatgttactaccaccatgatcaagatacaaaatatttctatcgccccaaaatgtttccttgtggcaatttgcagttacttcctgtcctaaacctttagccgctggcaactgccaatctgtttcctgtccctatgattttgtcttttacagaatgtcacataagtggaattgttctgtatacacacttttgtacgaagctmctttcacttagtggaatgcttttgaggttcatttgtattgttgcatgtagttcattcctttttatggctgaatagcattctatcataagagttgtatcacaatttgtctatctattgaccaattgatggatatttggttgtttccattctttgtctacaatgaaaaagcctgctgaaaacatctgcatacaactctttctttccatatatattttccttgcaatagcacttgaagtcatttctc

SEQ ID NO: 347198 - DNA, 565 bp, Homo sapiens
cttgtaattatttgtttatatgtctgtcccctccttctaaactaattaatttcttgagggcaggttgtatatagacacgtttctatcttcaatgccaagcacaataccaggstttaaaagtgtttactaagtgaatgaataatcacaagacaaatgtttgaagataaaggaactgaaatactatgttgaaataggaaatagagattaaaaaaaaatcaacaactacgttatttacaccaagaaatctgctaaggagcagtaaacagcagacaggagtgttttacccaagatgtccccacggctttcctgtctatcaaagttattatatgtgtgctcagctttcccttatgtttcccccatataggctcagattccacagtttccatgtagctatatttatccctacacttcattttggacacaatatgggcccacgagcctataggggaaaaaatgaaaccataaggcagagtgacctagattctcttttggggtcccttgagcccacgctatatgtaggccatttggtttgagtgacaagcagaccagtgaatgatactagatt

SEQ ID NO: 347199 - DNA, 590 bp, Homo sapiens
cctgtctctgcaaaacactggaccctggactgagagcttccacagaactgaccacaatggatgtcttcttttctggaactgaataagtcttcaggttcttgtaccacataagggagtgaggagagcrtacagtgttatccatatcacccttcttgataaccaaataaagaaatattacgctggatctgttctattaaattccttgttaattcatgaaattatttcacacactgcatcatcctgccatctgcacgctagattgtgttttatcaacatggcattgccactccagtctgaggctggaaacatcttccaaatacccttcccataatgtcctgggttaaatctggccacgagaggtccctatgtgacatttggaaagcagaagagcgacagaagccattactctgggaagatgatggcaatcagacaaggtgaagacagtgtaaatgtgcctaaagggctctggctttcagcttgttttctcagcttctggctgtgccaaccaaaagtaactcacaccgatcaccaaatacttggccgtatttcccttagaggtagcagcttccacagacctcactatgagctct

SEQ ID NO: 347200 - DNA, 590 bp, Homo sapiens
cctgtctctgcaaaacactggaccctggactgagagcttccacagaactgaccacaatggatgtcttcttttctggaactgaataagtcttcaggttcttgtaccacataagggagtgaggagagcgtacagtgttatccatatcacccttcttgataaccaaataaagaaatattacgctggatctgttctattaaattccttgttaattcatgaaattatttcacacactgcatcatcctgccatctgcacgctagattgtgttttatcaacatggcattgccactccagtctgaggctggaaacatcttccaaatacccttcccataatgtcctgggttaaatctggccacgagaggtccctatgtgacatttggaaagcagaagagygacagaagccattactctgggaagatgatggcaatcagacaaggtgaagacagtgtaaatgtgcctaaagggctctggctttcagcttgttttctcagcttctggctgtgccaaccaaaagtaactcacaccgatcaccaaatacttggccgtatttcccttagaggtagcagcttccacagacctcactatgagctct

SEQ ID NO: 347201 - DNA, 594 bp, Homo sapiens
tggagcatgggcaagaacacaaactctttagtaagtcagtcttaccagacagagcccaggaaacaggaaaaataataactacaatccaagcagttcctatttttcatgtctatgttgaacctctttgaaaagtcatctccaaaggttaggggagactttagactgagtccaggatatttcacttgtactgcagcccatgggtcagacatgtcccaaagctaaatgatttatcccaactttttacatcacaaactcttccctgagccagactgcgtggtggctgggcaactgtacttagtgattatttttaaaacgtcactgtgtttcactggacaagaatgagacaaagaaagttatctttacttgaactsttctcagagaaaactgcttatagatggaaggaataaactcctctaaagatgggggcacaggttaggggagattggacactgacatggttaggctgtgtccccacccaaatctcatcttgaattggagttcccataatcctcaagtgtagtgggagggggccggtgggaggtaattgaatcatggggatgattacttccatgctgttctcagtgatagtgggtg

SEQ ID NO: 347202 - DNA, 577 bp, Homo sapiens
tttcttcttctcaaatgttgagtctctcttaattctttatggctatttctaagtgtcacttcttccttgatcagtttttgatcatttattttagtaaaatggaaacattttattcatgttcttttatatgttgtatttaataattctaagagcagtctttggtgtccttttctgctcatgcttgtgttcgtctgtatctcttgtttttgtccytttctgatttcgagttcttattagtttaaacttaaatttttggaatcccagagctttcattccaggatatatttctgaaatttatttatttgcttatatttttattgcctatatttcctgacaagaatataagctacttgaagtcaggaactcttgtcttgttaagactgtatttccagtgccttggacagggcctgtcatatagaaatgactcaatatatatatgctctgtcatcctctttctccctctaaccaacatatgtatgctcatattttgtcatacaatttcagagcttccactgatcctaatttaataagcattgctctaaatatatatatgtatatatataatgcaatatatata

SEQ ID NO: 347203 - DNA, 552 bp, Homo sapiens
gttacaatccttagtaaaaatgggctaaatgcgcaaacttaactttattgaacatggtattatttaaaatatgaaaataacttttacattcttgaaaaaataaaacatatactttatgattaagtgtaatacctctgaaacatagagaaaatataaccaaattcataatatgtttacaaaactgaaatttacctaagaatttttgtattttacttctagaataaaagagtttgtatttcaaaacaacagtcttattaggctcatgtctaacttagaacaaactattgcaaattatttctatttctctaagtctgagctttgcaggctcwttttttttttttttttggacagagtctcactgtgtcatccaggctggagtgcagtggtatgatcttgactcattgcaacctccaccccacaggtccaagtgatcctagtgcctcagcctcctgagtagctgggattacaggcgcccgccaccatgcctggctaatttttgtatttttagtagagatggagtttcactatgttggccatgctagtcttgaactc

SEQ ID NO: 347204 - DNA, 552 bp, Homo sapiens
gttacaatccttagtaaaaatgggctaaatgcgcaaacttaactttattgaacatggtattatttaaaatatgaaaataacttttacattcttgaaaaaataaaacatatactttatgattaagtgtaatacctctgaaacatagagaaaatataaccaaattcataatatgtttacaaaactgaaatttacctaagaatttttgtattttacttctagaataaaagagtttgtatttcaaaacaacagtcttattaggctcatgtctaacttagaacaaactattgcaaattatttctatttctctaagtctgagctttgcaggctcattttttttttttttttggacagagtctcactgtgtcatccaggytggagtgcagtggtatgatcttgactcattgcaacctccaccccacaggtccaagtgatcctagtgcctcagcctcctgagtagctgggattacaggcgcccgccaccatgcctggctaatttttgtatttttagtagagatggagtttcactatgttggccatgctagtcttgaactc

SEQ ID NO: 347205 - DNA, 547 bp, Homo sapiens
cattattaatgaatgatatggcttaccatcaaagtatcactcatagacttctaatcttttatcaaaaccaacaacatttacttgtaactgaagtagttttataaaaaaatgtttatgacccaaggatgatcacaaaagacttagtgtttctactcctttcttctctaagtataaagccataagaaattccacttcttcagcagcaactgactgttccctgcagttcatcaagtgtgaatgactttattggaccactttaaaaacgagagttttcaagactctgtaggacttccaaatcccatgggtatttaacaggaaagggagtcagtgactgaattatctacggcagtacttcagttctctcatcctcattttggagccccggcttctaaaactgtctctgtcatttcttcccttgtgctttattcactctgacagtctgggtcagagtgatgaagaatgattgaaagtgtctccaactcgcrccaggtgaacaatgttcaaagtagttggcaagaagacattatgcatttctgaaaatatcaag

SEQ ID NO: 347206 - DNA, 592 bp, Homo sapiens
gtaaacaattctctgctttagttcacaaatactgatgaattttctagatcagagtttccatgaacaatagaaaccaggagaaaccaggttgtgaggaaacttttttccttgttaagaatttcattattaataacagagtccttgaggactggtcataactaatagaggctaggctgacaattaatgcttgctttattcatgcctttaatcttggtttgaaatactacacctggatagtttatgtcaaaacaagaattttaaagccagaatacttagcttagaatagtgtcttatagatatccactttgtgttgatgtttttctaaatctattcttcacatatagaatttaaattaagactgcttgtataaccctggtaaaatgaagcttgtacatcttctattaatattcttaaatgagatactcttatgaggtcaaatgaagtgctaacatgaaaaaaatctgagctaaaagtcagattacwcatcaagacatatggtatagatgattggataaaggcagaagttattgcttcatttatttgtttttcttttttaaaactcatgctgttccataaaagatttgaaatgact

SEQ ID NO: 347207 - DNA, 573 bp, Homo sapiens
gatttttaaaatgtataatagaaatgtatatatgtaaccattctttatgtgcatacataccacttattcaagtgtggctgaaaatatgtgtattttctaattaaaaataagaactgctagttataggtacttataaaatataaaagcgattttaaaatatrtcactttataaagattcttatgaagggtttcctattaaagatgctattttggaagagtattacagtcatttgcatatttatttttgtatgctggtaattcacatgatctgtgtattgcttttacagtttaactgtaagcctcttgccaaatgaaattttatttttaaagtaccttatcaccacacacacatatgcaagcagtctgaattgtataaaatataagatccacatttcaattgctttactttgttgcctatcacaactagagcatcctaaaattctcctttattagagcaaaatgtggctgattcaaatatcatacttcagctgccttcaccatttgaatgaaataagctcccagcaagatgtattcaagaaactatggttcaaactgtgttattctgctataaag

SEQ ID NO: 347208 - DNA, 573 bp, Homo sapiens
gatttttaaaatgtataatagaaatgtatatatgtaaccattctttatgtgcatacataccacttattcaagtgtggctgaaaatatgtgtattttctaattaaaaataagaactgctagttataggtacttataaaatataaaagcgattttaaaatatgtcactttataaagattcttatgaagggtttcctattaaagatgctattttggaagagtattacagtcatttgcatatttatttttgtatgctggtaattcacatgatctgtgtattgcttttacagtttaactgtaagcctcttgccaaatgaaattttatttttaaagtaccttatcaccacacacacatatgcaagcagtctgaattgtataaaatataagatccacatttcaattgctttactttgttgcctatcacaactasagcatcctaaaattctcctttattagagcaaaatgtggctgattcaaatatcatacttcagctgccttcaccatttgaatgaaataagctcccagcaagatgtattcaagaaactatggttcaaactgtgttattctgctataaag

SEQ ID NO: 347209 - DNA, 606 bp, Homo sapiens
tgcctaaggcagtattaatggatgaaagtcaggacattcctggcagagatttgaggtgtaatggtgaagattttctgtatattcattccctctacacttggtgtgatattgacctggtcttttggagagatataacttgtaaacaaatcatagttacatctacaattggcaaactatgtttttcagcataccattatttttttctcctgctctcctctacttacytccttctctatcccatggggttagaaattactttgaacagattggtgaataagggtaatattccacaagctacagcatccactctttttatggtttggattttttttctctatctctgtatctctatatacttctgaaatctgtaattcttgtgtgttttgaacctaactcatccccccaaaacaattctaactttaatatcctccctcaataatccatatcttccttatcagttacattcttaaaattctcccttttgtcaaatctatatacagttgtccatgagtgattgttttcaggaccaccccctcgtatccaaatccacagatgctcaaatcccttgtgtaaaatggcatagtattcgcatataccctaccctgt

SEQ ID NO: 347210 - DNA, 606 bp, Homo sapiens
tgcctaaggcagtattaatggatgaaagtcaggacattcctggcagagatttgaggtgtaatggtgaagattttctgtatattcattccctctacacttggtgtgatattgacctggtcttttggagagatataacttgtaaacaaatcatagttacatctacaattggcaaactatgtttttcagcataccattatttttttctcctgctctcctctacttacttccttctctatcccatggggttagaaattactttgaacagattggtgaataagggtaatattccacaagctacagcatccactctttttatggtttggattttttttctctatctctgtatctctatatacttctgaaatctgtaattcttgtgtgttttgaacctaactcatccccccaaaacaattctaactttaatatcctccctcaataatccatatcttccttatcagttacaktcttaaaattctcccttttgtcaaatctatatacagttgtccatgagtgattgttttcaggaccaccccctcgtatccaaatccacagatgctcaaatcccttgtgtaaaatggcatagtattcgcatataccctaccctgt

SEQ ID NO: 347211 - DNA, 541 bp, Homo sapiens
agaaaaaaatagcatgcctgcatttctttttgtgtgttggacagttaattttttttaaaaaaaagactaaatcaagaaattctgaagagttgatgtcaaaattaagtattgcaactgcatctaaatttcttgtttaaatatactttttaagaaatctctttataagtttggtttcttgtgcagtcagacgtaagcttgaaaactttggtataatggttgatatttcctccacaaaaatagagactttaacaatgtatatcaatgcagtgttgcacatttagaatcctttggtaatgcaaagctgaatttcatataattgaaaatgttgctatgtartattttaattacagttagccttttataagcagatcttacagcataccacatttgctaaatgaatggaatttactattttattaatagtaaataatttacatgagcttttaaaatgaagatgatgtgaggcaagtcagaaatactttacattgcctggtcttgaaccatgaaaaacatactttggttttgattgagaaagatgata

SEQ ID NO: 347212 - DNA, 584 bp, Homo sapiens
aatacaaatttctgtgtatctagaactgatagtttatgatggattcctaagaaaactgagcaattgaatataatcayaataattgctagacatctctggccttcactaaactaattgctgagaaaaacaacatgaaggaaaagtagaatccccctccagcttgattatttgaatatcggataagttaggtatggtgatgagaagctggaatatcgtgtgagagcagtaatgctacttctaaagtctaagggatatatattatactaagaaatatgaacggttcaaatctcttcacatccacttcccctagcacatgtatatcagacaatggcagaacttctgttctcattgttttcttgccacaggaaccttgcagatgatgtcctaatccttgagagaaataaaaaggtcctaaaagtgaaacttctcctgtcagttccttctcctgtcagattttttttttcaaaccgtaaaactctctgtacctgttgggattctttcagttgcaagtgacagaatacctaacaaaaatttgtgtaactacgaggtcaggagattgcgaccagcctggccaacatggtgaa

SEQ ID NO: 347213 - DNA, 584 bp, Homo sapiens
aatacaaatttctgtgtatctagaactgatagtttatgatggattcctaagaaaactgagcaattgaatataatcacaataattgctagacatctctggccttcactaaactaattgctgagaaaaacaacatgaaggaaaagtagaatccccctccagcttgattatttgaatatcggataagttaggtatggtgatgagaagctggaatatcgtgtgagagcagtaatgctacttctaaagtctaagggatatatattatactaagaaatatgaacggttcaaatctcttcacatccacttcccctagcacatgtatatcagacaatggcagaacttctgttctcattgttttcttgccacaggaaccttgcagatgatgtcctaatccttgagagaaataaaaaggtcctaaaagtgaaacttctcctgtcagttccttctcctgtcagattttttttttcaaaccgtaaaactctctgtacctgttrggattctttcagttgcaagtgacagaatacctaacaaaaatttgtgtaactacgaggtcaggagattgcgaccagcctggccaacatggtgaa

SEQ ID NO: 347214 - DNA, 469 bp, Homo sapiens
aaatcaagaagatctttgaaaataatgagaacaaagatacaacataccagaatctctgggacacagctaaggcagttagtgttaagaggtaaatttatagcaccaaacgcccacatcagaaagttacaaagatctcaaattaacaacctaatatcacaactgaaagaactagagaagcaagagcaaaccaaccccaatgctagccgaagacaagaaataaccaaaatcaggctgacctgaaggaaattgagacytgaaaaaccattcaaatattaataaacccaggagttggtttttttaaaacaaataaaatacatagtctgctaggtagactaataaagaacaaaagagagaagatacaaataaacacaactagaaacaacaaaggggatattaccactgaccccacagaaataaaaataaccatcagaaactactatgaacacctctatgcacacaaactagaaaa

SEQ ID NO: 347215 - DNA, 487 bp, Homo sapiens
agcacgcatcctatgcccactgtgtgtcgagcacttttctcgaggcacaaggagcacagcagtgagtaacggaggcctgtctctggagcttgcattccagcgggttgataagtgatacctgccatgggtacaagaggagcacggaccacccaactggcacatcgttgccatcctgcacctgacggcccctgaggccctttccagctcagactctgaacaacgatgaattctaaaagcagagagagacccaaacttaatttgatggccatttcaagaactgttgtccaggggygtctctagagctggaagggcaagcctggttgaggttcagccagggactctgttcttgctgtcattcccgagcttgctgggaagaaaagtcgaaagactggcctccctttcctcatctgagaagtaggattccaccaaggagttccatgcaggcttactccagctccagtaatagtatctcacatggctgccaggt

SEQ ID NO: 347216 - DNA, 487 bp, Homo sapiens
agcacgcatcctatgcccactgtgtgtcgagcacttttctcgaggcacaaggagcacagcagtgagtaacggaggcctgtctctggagcttgcattccagcgggttgataagtgatacctgccatgggtacaagaggagcacggaccacccaactggcacatcgttgccatcctgcacctgacggcccctgaggccctttccagctcagactctgaacaacgatgaattctaaaagcagagagagacccaaacttaatttgatggccatttcaagaactgttgtccaggggtgtctctagagctggaagggcaagcctggttgaggttcagccagggactctgttcttgctgtcattcccgagcttgctgrgaagaaaagtcgaaagactggcctccctttcctcatctgagaagtaggattccaccaaggagttccatgcaggcttactccagctccagtaatagtatctcacatggctgccaggt

SEQ ID NO: 347217 - DNA, 579 bp, Homo sapiens
atttgacagctgctccacaccctttgccagtgcctgctacactgggtggtgatgctgatgaaggtcatggctaaaatgctttgggcacttgccatgtgcccagtgccacccacccaaagggctttatgtgaattaacccatttaataattaatgttcccagcaactctcccaagcttgatacattaccatcctcactagacggatgaggaaactgaggcacgaagcagcagccttctcactccactctgggcggccacctttcttcttggaaagtccactgaggtgggcgggagggggtcttccagcctgggtgcctcatgcagtcttctgcctccaccttgcatggctttttggccctgacttcatcctcttcccctcccttcaaaggcaattctacctgagtccttgtgctcaaatgcacagcatcttccctggtcttyacatgaatcccaggagagacccattttcttaaggtgtttgtccaggaatcacccctcatggtgaaaactgcgtctcgaatatgcacagcacttcatagtttatagagtgcttttacacccgttatctcttcgctgatg

SEQ ID NO: 347218 - DNA, 560 bp, Homo sapiens
atgcttttccaagcctgctcttctcgcccatcccttcctgatggacgccgcccctcagcagccatgcccktgctgcactccacacctgctctgctcacggtgatgagggtgacagcccacgccccatcctggaatcctgcatgccccatcctggaaccccacctgcccccaatctctctcagagtacgcaaagattaccgtgatgagataaggcaagcttagagtgacactgattgcttcaaaaccataaaaagcccatgccagcctggtgcagtggctcacacctgtaatcccagcactttggaaggccaaagtgagtggatcatctgaggtcaggagttcgagaccagcctagccaacatggtgaaaccctgtctctactaaaaatacaaaaattagccaggcatggtggcgcgtgcctgcagtcccagctagttgggaggcgggggcacttgaacctgggaggtggaggttgcagtgagttgagatcatgccactgcactccagcctgggcaacagaatgagatccgtctaaaaaaaaaaaaaaaaagcccatgcca

SEQ ID NO: 347219 - DNA, 597 bp, Homo sapiens
gcttctggggtgggaattcccactggggccgttcttgcctggtggcccctggactcctgggtgagtatcccctggtgccgcctccagcagacatgagcgctcagatgactgtgtcagaaggagtggaggcctcttcctggctgtgccccagcgctgagtgtgtgtgtctgagggcagtgggttcccttggtaatccccagggagacgcttgctggtgtttctgaggcaaagccacgagggcaagtgtgggcggtggctactggagagtgacatctccccacccccagttaactcctgaaatggagagctccgcctcctagtcagaaggcactaaaaaaaaagacttaccaggccgggggcgtgagtcagccacttgggtatctcagtctctctgatgtaactctttagtttcttactgagtgccagcaggcacttaacattcatctttctctgcaaacttactyccctgtctctgcacatggcagcagcatctacctgactagccagacagaactctgagtcactctagatcccctccttccctgaacatccctgaagttaattagttaccaagtctcgtgggcccaacttccaaaa

SEQ ID NO: 347220 - DNA, 635 bp, Homo sapiens
cgctgtgtgcaccaaggccggcactgggctcctgtcacctgggaaggcctagccgacctggccctcagtcagatctaccaatgtccttgtgagcaccaaccggctgtgtctcgctcgttgccatcctcctcatgaccttctgcaccatgatctcacgctgttactggtgatctggaaagctctctgtgcggacgtgtctctgtggctgtgcctctgctgatacactctgggaaatgatttaaccttggggcctcagtggcacccgkgcaggaagggttgatggcaggtctccacctcatagggtttttgtgaggcgtgaacagagttactgcatgtgaaggacacacgacaaaaagaacaagggcaggctgcccccacagctcttcatgccttagaaaaacctttaacctctcatcttcattctttattctgtatggaattctaatatttttttttccctaaaaggccagcattcacctgtcaataactggaaatgccatcttttccacacgcaaagatgaccaggtcccaggtcggtgcccagtgcgctggatcctgggctcctggctctgccacgcagccccagcaccagaacatgctttcagctggccacagccttgcgtgaagtcttagct

SEQ ID NO: 347221 - DNA, 611 bp, Homo sapiens
ggctgagtgtgcaaaggggaggacatggcgtggacagaaccccagatctagtggtggctgtgtctggcctgcagaaaggagcagggcatgtgggtgggacaacagctctctgcgagccccttcttctgtggctggttcctgctctacatgtttgtcagggtgaaatgtggtcatgactatagctaagatcacaagggagagaccccagacgaagcagtgtgactgagcacctggagaagttggccagggctggagcccatcccctgggagggcacaggtgtgcagggactgcttgagggcagtttggggatcatcagaggcccagtgagggcagcccttcttcccccttcatccctttgccctgcgttgcaaggggctcatcaagcaggggtgtcgtctttaagcccacaacaaccctgccaggaggcatggcttagtcctggcctccatatgaggagactgagggtcaggaggtgaagggcctgcccagagtcacacagcacgaggcgcagagcaggaccaggccccaggtagggggaccagagcccaggcctctcttcctctaggtgcagctctccagggycgcccactcaaggatcgtgtggccctgg

SEQ ID NO: 347222 - DNA, 635 bp, Homo sapiens
cgctgtgtgcaccaaggccggcactgggctcctgtcacctgggaaggcctagccgacctggccctcagtcagatctaccaatgtccttgtgagcaccaaccggctgtgtctcgctcgttgccatcctcctcatgaccttctgcaccatgatctcacgctgttactggtgatctggaaagctctctgtgcggacgtgtctctgtggctgtgcctctgctgatacactctgggaaatgatttaaccttggggcctcagtggcacccgtgcaggaagggttgatggcaggtctccacctcatagggtttttgtgaggcgtgaacagagttactgcatgtgaaggacacacgacaaaaagaacaagggcaggctgcccccacagctcttcatgccttagaaaaacctttaacctctcatcttcattctttattctgtatggaattctaatatttttttttccctaaaaggccagcattcacctgtcaataactggaaatgccatcttttccacacgcaaagatgaccaggtcccaggtcrgtgcccagtgcgctggatcctgggctcctggctctgccacgcagccccagcaccagaacatgctttcagctggccacagccttgcgtgaagtcttagct

SEQ ID NO: 347223 - DNA, 527 bp, Homo sapiens
tgtggagagcatggcccagggaggatgtgtggggagggcacctcacccccgtctccagcaacccagcccgggtctcatctccagaagacatcaggcaggcccacagggaggacggtccagagcgataggcccatcctctttgaaagcatcatgacaagggagggccaaggccctcaaccagaccagaggagacggggaggggtgacaattaaatgcacatggaacctggaacagggaagggcactgggggagtctggtcacattcacatcaagtctgccattcagctgccaggactgcggccacaggggactctcagctgtgataaatgcagcatgagtatgcaggatgctgctttgaggggaggcrggcaaaggcatccccgccagaggatgcaacactgtgacaagacacacagaggagcgctgtgcaggaatatgtgtctaaaaccacagcagacccatgggcgcgggaagacaccagtgccctgcatgttttggaaaagagacggtggccttcctgcactggc

SEQ ID NO: 347224 - DNA, 561 bp, Homo sapiens
  misc_feature (1)...(561): n = A,T,C or G
nnatttctgggctcaacaccagttcatgtgtccttttgttctttgtgggtgttgcaaagcgcatcttacattacaggctctcaaatacagctgcacatcataatgggaatcatgtggacctatacaaatcctaggacctgccaaaaactatggaatcaggagtgggaccccagaacctgtacagttaaaaagctcctcctggagtttttgatatgccaaatcaatgaactggcactttgaaaccacytgttctactgttttattgatgtgtttagtcctgcaacagtataatatttttaaatactgagaaaggtcaccctctatactttctcaaaggttgcttagctattttcacatatgtatttttcaaaacgaattttaaaataatcagccaatctccaaaaagaaaaaaaaagtctcatggagatcttactggacttatataaaatttacaaaccatttttgagatactgtcttcacaatattgagacatcctctataaaagcatagtaaattttttgttatgcctttatattctttccttatatatcctgtacattc

SEQ ID NO: 347225 - DNA, 548 bp, Homo sapiens
ctgacacctctggagacaagccctgcctcccccaggtcaccccagcatcctgggaactcaaatgcattctgtggggctgcagctgggagggggttttgtccacagggagacccttagcagcccttgcccagctgacagtctggggtccgccttcgttacccccatcacagcctaagccgaggggcctctgggtgggctcaggcctccctgggtcatcccagagcccaggccagctgcttscccaagtcacgcgaggagcatggccacagacgactgcccctcctgagctgtgttggaattggtgtgctgggcacccattgtttgtgagctcctgggactcgcaactagccaggataacgggcagcccgagggggcctgggccaagtctccacagggcacttcacataaggacagagccacgggccaaagaggcaaaacaaatgcaagggaaatcttgccagcaatgcctggggcgcagggcagctggcctcccacccgcaggacagcaggcagcacctggcactggggctcagcttggcaccgtgcaa

SEQ ID NO: 347226 - DNA, 542 bp, Homo sapiens
ttttgccccacatcgccgagctgaagcratggggcttagcggccagggctgggctctgagagctcagatgttcctggtctcagattctacccatgcaaaatggactggcttagagtcaggggcagctgtggggtcagagcagaggcctggggctgaacccctgctgctgggaacatgtcagggagctgaagggggcagtgggctgagccaaggctggggagagataattgaccagggaccaagcggctcccagggcccagccacagcagggagttggtcccatgccagggctgggggagtgggcattggtgggtttccacatctctacggccgggcccatgagcacaggaggtagggagggggctgtgggtgtcagcctcagtcaaatggcagcaaaacaatggggagcaggcagaagggagctttcccacgccatcctgtcggggagctgcggagacagtcaagcctgtgggtggcatgctgggtcctgcatgtagctgctgggagatgggctggaaggaggagtgggagacagagggtgt

SEQ ID NO: 347227 - DNA, 441 bp, Homo sapiens
cctttggcacagctgtttcctctgcctgtggcgcttggcccttcctgtctgcctattgactcttgctcttcacctcagcttcaatgtccctaccttggagaggagttgctctcccccatctaaactaggatcctctcaggagagctcttgttgcacctcatactcccctttagagcagaattagttaagtattagtgtgggtggtgatcagatgacatcttcccctgctggactggtggctmcactaggggagggacctggccaacctgcttgctgctggatctcagcatcctgaccacagcctgcatgcagtaggtgctcaatatgtgctgtccgaataagtacttgtgtgtgtggggtgtgtgtgtgtgtgtgtgtgtgtgtgtttgtgtgtgtgtgtgagaaagagagagagagagccagagtgtggggttcttggtg

SEQ ID NO: 347228 - DNA, 655 bp, Homo sapiens
aaaaataacatcctatgaaaaagtttatacaccatgaccaagtaggatggatcccaggaatgcaagattggctaaatatacacaaatcaatcaatgtaatacactgtattaatagaatcaagaaaaaagcccacatgctcatcaataaatgcagaaaaagcataggacaaaatccaatacccttcttcatgacaaaacacactaaacagcttaagaatagaaggaaactttgccaaactgataaagggcatcaacgaaaaaccctcagataacttaatagtgaaagactggaagctttctccctaagatcaggagcaaggcaagagtgcctgcttttgccagttctattaattatactggaggttttatccagggtaattgggcagggaaaataaataaaaggcatccaggttggaaagtaataagtaaaactttgtctattcatagatgacataaccgtatatatatatagaaaaccctaaagaattcacaaactgtaagagctaataaatgggttcagcaaggttgcacgatgcaagattaatatacaaaagtcaattatattctatatactagcaawgaataatcaaacaacatcaaaattaataaagtaataaagaagaagttggtaacaaaggaagtataagacctgtcc

SEQ ID NO: 347229 - DNA, 557 bp, Homo sapiens
tggtgctgagacagcatgagatattcacatgcaaaagaatgaagttgtaccccatcttcataccacatacaaaaactaactcaaaatggatcatagccccaaacattgaagttaaaactatgaaactcttaagtgaaaacaccgacataaatctccatgaccttggattaggtgatgatgtattagatatgacaccaaaagcacaaaacaacaaaattttaaaaaatagataaattgaactacatcaatattaaaaaacatttgtgcttcaaagcacactatcaagaaggtgaaatgacaatccgtagttgggagaaaatatttgcaaattatctctctggtaaggaactagtacccacaacgtatggagaactcttacaatggaacaacaaaagacaactcaattttttaaatgggcaaagaatctgaatagacatttctccaaagatatacctacrgcaataagcacatgaaaaggtgcgcaacatcactagccattagtgaaatagaaatcaacaccatgaggatggttatttaaaaagacagtaaataacaag

SEQ ID NO: 347230 - DNA, 488 bp, Homo sapiens
agatttgggaatgagggtcatccctcaggcaggtccttcaaaaagagctttgggagggggtagagtggtgtgccccccagcgggagctgaagagagcacacttgccactgagggcccccactgcacctgtcacccagccctccagtggggagccaaggagggcacacctgctgctgggtgctcccgctccacctgtcaccccaccccccagcaggaggtagcaggaggaggggctctacactctgtgtccggttcagtgtcacatggcttcccatctcctcatcatcaagatgcagatccccacatcgaatgtttggtgtggtgcrccagagggctgccacagcacaccccagcattagagccccacccacccccaaagctgtcccggacagcacagccctcctggaaggggaagtgagcccagcccccctccccactgtgaagcctgccctcccgcagagcaatgtcctccccaggtcagcgctgca

SEQ ID NO: 347231 - DNA, 633 bp, Homo sapiens
atttgctttggtaacaacttgtgtagtaaattgcagggaggaaaactgtacccccagcctgggaggtgactctgtgtcaccattctcttacaaacacttgtaggcagcacacacatgaatatactcccagcattgggggtgggacttgtacctttctgcaggctgacagcctcctgtgatgctttctgtttccatttaccccttgcttaagtttttgccaatcagggctgaagctgagggctggtttcctggtgcatgctgccattgttcacacactgattttcatgttcccttaagctgtagcccttggggaggagagaccttctggccagagatgtgaccaggagtggccatgtgggaayggccatgggtaattcccatgcaagttctataggagggggaagagacacaagtgagttctgtttcagcattgttgaaattttgtctatgaagatggtcagtgcttgttcctgatcagagactggcctttgtaggtttcatatctgtggctacctctgcaggcttctcagctattgtgaccaaagtgcagaccagaagcataggaaaatggcactgggattgtcatggtaaaaccctataaatgtccacacatgcagagagactggtgagcac

SEQ ID NO: 347232 - DNA, 529 bp, Homo sapiens
ttccctttgcctagcacagtggttcttaaagtgtcttgggaaggccggaagtatcacgattacttgggaacttgttagaaatgcaaattcccaggtcccacgcagacccactgaatatgggactctgagggtgggcccggcagcctgcgttcaagccctctaggtgagtctgatgtgtgcgagagtttggaagtcactgggctggacagttcaygccacactcccatgtgaattgaaagcttcccacacgctggtcccaatttgcctgttctgtccaattcctaactgtcccatctcccatatcccttcctgggggacgctgctcacacggttccctctcctgaaaagctgtttgccacttccaagtattgaaagcttcaagatccagctcaagcatcatttgttttgatggatcccaagattcctcctacaagaacaattttccttcctccagcctccacagtattatttttttttttttgcctctccctctctcagtctttctgtctctctgaaggggtttagcctt

SEQ ID NO: 347233 - DNA, 535 bp, Homo sapiens
gggcgccactgcagacccgaggtcgcggccaccggctcctgggccaggccctgtttctcgcctcgagccgtcgggggagggtctccagggtgcttgtttggggaaagcggaaacagactgtctgggccgctgttaaaatgtcagcagccaaggaagaagcagcgacctggcgtctgctcgggccaggtgacctttatggcggcgccttctgtccctggtcgcttttccactgaatgaatgaccgaaactgtagtaactcatggccagggaatggcttagttatctgagggaatcttgtcttgtctgtgaaaaagggaaactggtgcaaatgggaattcagacaggtcaggaggggaaggaagggaaggattgaggtgggaaaagagagagaaagatgattggcctcttaggggaagaacacacttggacgkggctcctggggcacttccttgattccgctgtactcgtcagcgggaccggagaggcggaggttccaggagggagccttccagagtcggtgcagggttgacaggag

SEQ ID NO: 347234 - DNA, 282 bp, Homo sapiens
gccagctaacaacggcgtgcgtgagcacagggaaaggcttcttgagaaatgaaaactaggttgtaggtttaggaggggaataggaaggttagctctgtccagccgaaagccttttggtaagttgggggtccttgaatttcctgggtgactgcatcttggtgacttctctgaatagaccttcgagggcactggggggtgattgttggagggcttggggagctcaggcagcmcttgtgtgggaacgtggctgttacaggaactgcagaaactgggactgggttc

SEQ ID NO: 347235 - DNA, 589 bp, Homo sapiens
cgcggctgggtgaagccatcttcacagacatgccgtccttgaggctctcacacatgcacacagacgctccgtcctctcccacccgcccccccgccaccccgggcaggccaggaagtcccatctggggcctcccaccccgagggttgccgtcagtccgtgtgcccaggcatcggggcctgcagcctccacagacagcgagacctgtgtrcgaagcagactctgtcctagggacagtgctgaccctacaaggctgggtcactggaggctccccgggtccagtggctttggtgggactcctggccaggctcctcctgggccgggctggtctccggcctcctgcctcccttggtggagcacccttgctccccagcacctcccaggttcacacagctcctccctggggctgcgcactgacccaggggcaggaggtgggccatcctctcggtggactgaagaccttgtccgaagggaaagcagggccggcccaaggcctggctggaagagtgggtcttggtggcaaaggcggcccgtggggggagcccacgcgaatgcttccccggcgccctgagcccctgaccgcggctgagcc

SEQ ID NO: 347236 - DNA, 583 bp, Homo sapiens
aggcgtgagcgactgcacccagccatcttccctgcattcataattgatctcagaaaatgttctgatggagttggttctctatcaytgggagaacgaactcttataacctcagacctggatcccatggcatccctttcacccaggagcagtgtatgttataagaagagtgaaggagaaactttgatgcgctgatgaaagtaataactaattattataagcttgcttaaccacaataaccgctattacctagtaaagttggcataaaaagtaaactacaagccagtctcatacatgagtctagatgaacatatcccaaataaaatagtgaatgctattttattgttgtcacggacattatgcattcaaataatgtggaggaaacaatctagagataaaacaacaaagaaaattatgatcaatataacaaaatataggaataaagataaaaatatgccagcaaggaaccgtggaatctggaaagcataaatttagatggtagaagtgatagcagaatgttacccaaccaatgtaaatggattgaaattctctactgaaaggcaaagactatgagattggatgagca

SEQ ID NO: 347237 - DNA, 537 bp, Homo sapiens
ctgttgcttgtcacagttatcttactgtattatggtcatttataattgtatgttttctctcatttgactttgggcttaatcctgagaaatggctgcagtttgtctatttctagcttctagtatagtcaataacacataataactagcctgattctgtatatgttggaatgagtgctaaaagccatgtaraaagcatagttttagaaaatagtatggctgccttttaaaaaaaaggttctgaaattgatgctttaccttctattaaaataatgtttattgtatggatagtgatgtttattttttgtttagtatgagtgaaatatgtaagtataatatgatactgagatatttcataaataactaacatattttatagtatttattactattaatttctaaacccagccagaagttgttgtagtaaaccctttgaatcctattttattgttctaagcaacggtaaaaaatcggaggaaatgaaagatgacataaaggcataagggagataaagaatcagaggatttatgtggcctacag

SEQ ID NO: 347238 - DNA, 591 bp, Homo sapiens
tcttctcttcctctctagggatatcactgtgatcctagcctctgtcatctctcacctgtcttacttcttccagatctggtctctcccattcagtctgttgttctccacccaggagccagagtaatcctttaaaaatgtaaatcagattagattatttatgtatgttagtcatttctactactttcattaattactggttcatatttatcatcccatttgataaaaaatctccagcatttccttttgcacgtgtataaaatccaagttagctgttaccatgtygtgtatgatgtttctttcccttgctcctttttcaggcttcatcccatgccacttgccccatcacctgtaatgctaattctagttattttgttgttattttgtccttcctttcagttccttcccatcagcttttactccttcaatgtctatgcatttgccttttctggaatttctcctcctagctgtttgcatggctggcttcatttcatccaaagtagtttcttcctgttatattctgataacatcctgttttctccttcattgtatttataacaggctttaattatttgtttacattttactttttga

SEQ ID NO: 347239 - DNA, 489 bp, Homo sapiens
ggttgggccaaattcccctccccctacagcttgaaggggacataactgatagcccaggggcttttgtggtcctttggagacttctttgcttatttccttctgggcaggggagattagaggaggcttatcattaataggaaggggagctatagggagactaggatatggaggtaaactgagaggtcctcctgtgggatgtaaattgcaatctttgcatagttgaggattcaccttcaatgaaaagaaagcttgaactaaggtacttcactccatttgccttccctcttacagaaaaggtcaagctgcaggatagttttgtaatttatatgtccctcaggtggccattttggccatttttccccaccagagagagaatactggggccaggscataatgcagaaaaaaatgatccatctctttttcagggtctgtgggtcaaattggtcccaatagcttaggatgcatttcaagggtgagcctgttggtgcc

SEQ ID NO: 347240 - DNA, 489 bp, Homo sapiens
ggttgggccaaattcccctccccctacagcttgaaggggacataactgatagcccaggggcttttgtggtcctttggagacttctttgcttatttccttctgggcaggggagattagaggaggcttatcattaataggaaggggagctatagggagactaggatatggaggtaaactgagaggtcctcctgtgggatgtaaattgcaatctttgcatagttgaggattcaccttcaatgaaaagaaagcttgaactaaggtacttcactccatttgccttccctcttacagaaaaggtcaagctgcaggatagttttgtaatttatatgtccctcaggtggccattttggccatttttccccaccagagagagaatactggggccaggccataatgcagaaaaaaatgatccatctctttttcagrgtctgtgggtcaaattggtcccaatagcttaggatgcatttcaagggtgagcctgttggtgcc

SEQ ID NO: 347241 - DNA, 644 bp, Homo sapiens
ccctttttttcgcagagggctagtcccactcctagttccttcatgtatttattattcatcaaagcctttgctgtccatcaggtgccctctttcttccagttgctgaacagtgtccatggtgggtgtcagaaggtgtgtggagtgagcagagcagggtccagcatgggaaacatgctgtgccctcttacatgatgttataaggaaagaatagaagggcaatggcatgacaagagtgtggctgtgtcctcagatgcttcaggatccttcctgtgtggactctgtccctggatatggtgcccaccttagggagctagaggctgggaagaggtccagcagtcacctgcatctgctactgttctgtgtggacactttgatcctgttagttattatatagttatttcttgtttaattagaaggcaaatattccagtttcatagtagacatgkttgtggtcctaaatatataaccaactaaaacacaattgttggccaaaataaaaaaaatcactccagaaatgtgtagaatgatgcaattcatgtaaaaatttaaaaacattatactttctatggctatatttacatgtaataaagggataaagcatggactggagaggatccacacctgcttcatgagagtggttgctt

SEQ ID NO: 347242 - DNA, 415 bp, Homo sapiens
cttgcactaatactaattcatcaacccctgtaagccgaccttcattcagcctgttatttctgtttttgcaagaaattacttaagttgctgtcacaactaagttctcctgggaaactggtgttcatatttgcctagttgcagcattactcacatgctattattcactgsatagagccttcatagcccggaatgatggatgcatctccccagacacctaatttactattaactagagactcagtggaaagaatctgggtcaataattcgtagaagcacagagaactgaaaccccaatacctagaactaaacaaattaggggtttattttttcttgcacaataggaagccagagatgggggttgctggcagtaatttcagctcaaggatggaagtcagctcagggctgagaccttcat

SEQ ID NO: 347243 - DNA, 582 bp, Homo sapiens
cattgttcgtgtgttttggggtgagctagaaatactttataatttcccccatttaaaataatgagatataggctaccactattcaaaaattgtatatccaaatatttgcttagatttggataaagatgcctgaatatgtatttcaactattcatggaataagcagaacaatatatgccaaaagaaagggttatacattttccaagtagatgcctggggaatctgtgaccttagtctcacaatcctgacattactcaaaatattttgaacaccttttaaaaaatcacctttagtttctgacatagacttttaaatcttctaagtggtgagaaattttcatcatcaatagtttgattttatttggaaaatagacaaagacattcagagccagatctggcaaataagrtaaatgatctttccaagaaatggtattttgatcaactgtagtttccctataaagtaaagtcaccaaatttcatgtaagtcttataaactgctttgaaatcagtaggacagaaggaattccaaagtgttttaattaatggcagcatcataagaaaagatacatctttttccaaatgaa

SEQ ID NO: 347244 - DNA, 509 bp, Homo sapiens
ccacaatatgttcagctgaaacaacccaacaaaaaatattttccagtcccacttgtggatgctggagttatgcaacgcagctctggctaagacatgaaagcaggaagaatctctacaagaagagcagaattagctgatagtaccactgtttgctggaaamatgtgtacagtgctgagatgctggaggtgggacagccatttgcaacctcaagtagaccactaagaaagggccaagagaagaactgccagtgggaacctccaggaagcaaacactgagtcagaagtaagactgggagagctttattgtgactgtagaggcaaaaagcaaggtgggagtagggatgtggaataggattgggtgagaaaagtctttagattacaatgctgatttgacgctttgacatgctggacccctatgacttcagcagaaaccgcaccatgtttaagaggcccaagaagagacctagagccagtgaagaatacatagggtttgttgaggaaacttacat

SEQ ID NO: 347245 - DNA, 596 bp, Homo sapiens
tgtttctagttgttattgcgcaatattcggtttttcactatgggcttcaagtactcagaaatgtttctttgtggattatacgaaaagagtctttctaaactggtaaaccaaaacacaggtttaactctggaagaataatccaaacattacaaatcttttacataaatattgtgtttctagtattaattgtgggacattcttgttctcacaataggctttaatgggctcagaaagtcacctcatagattctacagaaagagtgtttcaaagctggtgaatcaaaatacaggttcccattgatgttcttcacagaattagaaaaaaactactttaaatttcatatggaaccaaaaaagagcctgtatagccaaggcaatccttagcaaaagtataaagctggaggcatcatgctacctgacttcaaactattctacaaggctacagtaaccaaaacaggatggtactagtaccaaaacagatatatagaccaayggaatagaacagaggcctcaaaaagaacaccacacatccacaaccattggatctttcagaaatctgataaaaataagcattagggaaaggattccctatttagt

SEQ ID NO: 347246 - DNA, 610 bp, Homo sapiens
cagaaatcttttcgtagattctacaaaagtgtgtttccaaactggagaatcaaaacacaggttccattctgtgagatgaatccacacataacaagcattttcacaggtagcttctttctaatttttatcgtgagatattccatttttcactataggcttcaatgggctcagaratgtaccctcatagattctacaaaaagagtgtttccaacgtgatgcatcaaaacactggttccattgtgtgagataaatcctcatatgatgaaccattttcacagataacttgtttctagtttttatcgctggatattcagtttcttacaatgggcctcaaggtactaagaaatgtcccattgtagattctacaaaaactgtgtgtccgctctggtgaatcagaacaaagggtccatcctgtgaaatgcatccacatatcacaaagcattttcacagatggcctgtttctagttttttgatggaatactcagttttccactataaactgcaatggactcagaaatgtcttttcattgattctacaaaaagcgtgtgttcagcatggagaatcaaaacacacgtttcattctgttaaaagaatccacacatcccaaag

SEQ ID NO: 347247 - DNA, 610 bp, Homo sapiens
cagaaatcttttcgtagattctacaaaagtgtgtttccaaactggagaatcaaaacacaggttccattctgtgagatgaatccacacataacaagcattttcacaggtagcttctttctaatttttatcgtgagatattccatttttcactataggcttcaatgggctcagagatgtaccctcatagattctacaaaaagagtgtttccaacgtgatgcatcaaaacactggttccattgtgtgagataaatcctcatatgatgaaccattttcacagataacttgtttctagtttttatcgctggatattcagtttcttacaatgggcctcaaggtactaagaaatgtcccattgtagattctacaaaaactgtgtgtccgctctggtgaatcagaacaaagggtccatcctgtgaaatgcatccacatatcacaaagcattttcacagatggcctgtttctagttttttgatggaatactcagttttccactataaactgcaatggactcagaaatgtcttttcattgattctacaaaargcgtgtgttcagcatggagaatcaaaacacacgtttcattctgttaaaagaatccacacatcccaaag

SEQ ID NO: 347248 - DNA, 610 bp, Homo sapiens
aatcctcatatgatgaaccattttcacagataacttgtttctagtttttatcgctggatattcagtttcttacaatgggcctcaaggtactaagaaatgtcccattgtagattctacaaaaactgtgtgtccgctctggtgaatcagaacaaagggtccatcctgtgaaatgcatccacatatcacaaagcattttcacagatggcctgtttctagttttttgatggaatactcagttttccactataaactgcaatggactcagaaatgtcttttcattgattctacaaaaagcgtgtgttcagcatggagaatcaaaacacacgtttcattctgttaaaagaatccacacatcccaaagcattttcktagataccttgtttctagttttttttgttttttgttttttgtgggatattcaatttcatcttatgcacatcagtgggcttagaaatatcccttagtagattttaccaaaagactgtttccaacctaatgaatcaaaacacaggtttccttctgtgagatgaatccactcatcacaaagctttttcatacatagttatttctagttgttatcacgggatattctgtttttcattgtagacct

SEQ ID NO: 347249 - DNA, 634 bp, Homo sapiens
ttccaacctggtgaattaaaacacaagttccattctgtgagatgaatccacacatctcaaagcattttacagatagcttgtttctagttttaatcggggatattcagtttttcactataggcctcaraaagctcagaaatgccccttcatagattctacaaacagagtgtttcctacccggtgaatcaaaacacaagttccattctgtgagataaatccacacatcacaaagcattttcacagatagcttatttctagttctcatcattggatatacgggttttcagtaaagacatcactgggctcaaaaattctcctcatagattctacaaaaagaatgtttccaacctagggaatcaaatcacaggttccattctgtgaggtgaatccacacatcacaaagcattttacagatagcttgtttgtagttttaattgtgggacattctggctttcagtaaaggtctaattgggctcagacatgttcctttgtagattctacaaaaagagggtttctaacctagtgaatccaaacacaggttctattttgtgagataaatttacacatcacaaagcattttcacagatagtctgtgtctcacttttttcatcaccggaatatttggtttttcaca

SEQ ID NO: 347250 - DNA, 504 bp, Homo sapiens
tagctgcattaaaaatctataaattttatttaaataagataccattataagtttaattttcaggagctaaaagcacaaatgtgattattgctgattctctttttctaaaaatacattttattgtatatatttaagatacagaacataatgctatgagatagatatagatagcrcaaaagattactatagcaaagcaaatcaatgatccatcatctcacatagttatacattttgttttgttttgctgttttggcaaaaccaaataaaatctactcatttagcatgaatccaaaatacagtacaattttattacttatagttctcaggttgtacaacagatttctagatttgttcatcccacttatctgctagtttatacactctgacctatttctcctcattttctgtcccctatccccaacaccttgtaaacaagattttgtttcctatctgttcatattttatatatattttttcagatttcacatataggtgaaataatgc

SEQ ID NO: 347251 - DNA, 595 bp, Homo sapiens
ggactatttgctaataagtaatatattttgctaataattgacatatagtatatatactggttcatttctaaccagtatgagtgtgtttgtatatatttatatatagctatgtctccctctgttgcatgcaatcataaatttattttggcttttcagaatctatgttatttgatttatttattcacttattaatctttaatttctttggcaactaattcaaaatttccagagccttttctttatgctgtagtcttaattgcaaatgytgacctggtttaccacaatgcttctgaccttatacccaccttaagtttcaggcattggtcataaatatagaatctaaactcccccgttacaccacattggttcatagtctgcagtcttttgactaattgtcctctctacctaactagttctgcgaagcgtttatgattttataagaacatctcctttttactaggctctgcacttccagaactggcaaccactgctatatttattttttagctgtgtaaatagtattttttttagtctaaaacaattttgaattaaaacattgcaatattgtcagtagacaattgtcatatatgttatt

SEQ ID NO: 347252 - DNA, 533 bp, Homo sapiens
caaattttatgtctgttttttcttcaacaatgtgaatcccattgtaacctagaataaaggcattgcccaaatagcatggacatggttttctgttaaaataatagcaagcacacagaaatcattttggctttctttcttagatggcctttgcaaataattccaccattattatttatatgtgagaatgtttctttttagattgatattggtttttacaatttaatttacaataaattaaactggatttcatttttgatgtttaccatattttgaaaagaattccaaatgctattagaattgataaacaacttcagcaaattttcatgatacaaaatcaatgtacaaaaaataktaacatttctatacaccaataacatccaaggagagagatgaatcaggaatgaaatcccattcacaagagtcacaaaaaaaatagaaaaaaaaaagccaaataaacagggaagagaaggatctccacaacaagaattacaaaacactgctaaagaaatcagaaatgacacaagtggaaaaac

SEQ ID NO: 347253 - DNA, 505 bp, Homo sapiens
aagaattacaaaacactgctaaagaaatcagaaatgacacaagtggaaaaacattccatgctcatggataggaagaatcaatattgttaaaataggcacactgcccaagtaattaacagattcaatgctgtattagtcagttctaacgttgctaataaagacatacctgagactgggtaatttatcaaggaaagaggtttaattgactcacagatctgcatggctggggaggcctcagaaaatagaatcatggaagaagttacctcttcaaagggaagcaggagagagaatgagtgcaagcaggggaaatgtggcatgcttataaaaccgtcagatttcataagactagygcattacaacaagaacagcatgggcgaaattgcccccatgatccacttacctccacctggtctcgcccttgatacatgaggattattacaatttaagatgaggtttgagtggggatacagagccaaaccatatcaaatactgctcctataaaacc

SEQ ID NO: 347254 - DNA, 635 bp, Homo sapiens
acaggcgtgagccaccgctcccagccacattgttatttctgaatacatgttttccatgaaactttgaagaccccttagtgtgtgtgtgtatgtgtgtgtaaatgtgtgtatgtgtgtgtatatgtgtgtgtgaaatttgtaaccaacaaagttacatatttctgagccatatgtatacatattatgtatgtataaataaacatattatctaacttttgtaattattaacttttaatcatatttctacttatttgtcatagataaataatattaaggttgtttgctggtacaattatatttctgtgtgttttcttatacttttgtaataatcgcattatatgttattggtgttaggttatctgatgcatacataatctgaacgtatatgctcctgtaattttattttactcactttcaatttgcttaaaatcccccttttatcatatctaatagttatagtyttaacttttatttgctatgtatcttaaatgttctattaagtttctttgattttgtctgagacagggtctcactctgtcactgagagctagagttcagtggtgtgatcactgctcactacagcctcaggctcctgagctcaggttatctcctgcctcagcctcccaagtaactgg

SEQ ID NO: 347255 - DNA, 568 bp, Homo sapiens
gtttgtttctagtttatatcatgggatatttgggttttcactataggctccaaagggctcaggaatatccctttgtatatagtacataaagcataattacaacctgtgtaatcaaaacacaggttccattcagattttcattacaggcttcaatgtgctaaaaaatgtcccttcgtatatactacataaagagtatttccaatgtggagaatcaaaacacaggtttcattctattagatgagtccacacatcacaaaacatattgacagatagcttgtttctagtttgcatggtgtgatatttgattttaccttataggcgtcaatgggaagaggaatgtccctttgtwtgtactaaaaaagagtatttctaacgtgttgaatcaaaacaaaggattaactctgtgagatgaatccatttatcacaaaacattttcacagatagcttgtttctagtttttggtgtgggatatttagtttttcactataggccccagtggtctcagaaatgtccctttgtagattctacaaaaaatgtgtttccaacctggtgaatcaaacacggtttc

SEQ ID NO: 347256 - DNA, 560 bp, Homo sapiens
gagcagaactgaggattccctaaagaagaagaaatwcatcttgtacctaacagcttcagtctttgctaaagaattccagcctttctcctgacagcctgccctttggattttctatttgctacacatttctcccaaatcatgtaagccaaatgatgacaataaaactcttaatatttatctactactgtttttgtccctctagttgaagcatgatggctacagttttggtactgaaagtggttctggaagaagagaagtttaaaaataagttctctgaattggttctgaaatttctggaattggttttctaatgtaatcagatttcaaaacactcatgactataaaagaaatactgattttccctcaaataatgtggcaatagagataatacaaaagattgccattggatactcttaatcaaatacctattgaagatattttagaacactttaatcaaattaagaattatcatgggatttgctggagtaagtgcatgtatgagttagcttagctgtcataacaaaatgctgctgactggatggcttgaaaaacagaagttt

SEQ ID NO: 347257 - DNA, 560 bp, Homo sapiens
gagcagaactgaggattccctaaagaagaagaaattcatcttgtacctaacagcttcagtctttgctaaagaattccagcctttctcctgacagcctgccctttggattttctatttgctacacatttctcccaaatcatgtaagccaaatgatgacaataaaactcttaatatttatctactactgtttttgtccctctagttgaagcatgatggctacagttttggtactgaaagtggttctggaagaagagaagtttaaaaataagttctctgaattggttctgaaatttctggaattggttttctaatgtaatcagatttcaaaacactcatgactataaaagaaatactgattttccctcaaataatgtggcaatagagataatacaaaagattgccattggatactcttaatcaaatacctattgaagatattttagaacactttaatcaaattaagaattatcatgggatttgctggagtaagtgcatgtatgagttagcttagctgtcataacaaaatgctrctgactggatggcttgaaaaacagaagttt

SEQ ID NO: 347258 - DNA, 596 bp, Homo sapiens
tggtatttgatatgatttgacaatatccccacccaaatttcttcttgaattgtagctcccataatccccatgtgtcatgggagggacctgatgggacgtaattgaatcacgggggtgggtatttcctctgctgttctcatgaaaatgaatgagtctcaggagatccagtgcttttataaaggggagatttcctacacaagttcccttttttgacagctgccattaagacgtaactttgctcctcatttgccttctaatgtgattgtgaggcctccccagccatgtggaactgtgagtcaattaaaacctcttttctttctaaattacccagtcttaagtatgtctttattagcagcmtgaaaagagactaatacagtattctcaggttttcaaaatttcagataatgactttttataaatgataaaaccccagattaatccattttttaatgcccagagaggtatgccaccataagacaaccttaaagtatgtagcagtaattttgtgccaggtcctggggatggggacactattaaaagaagttagtaaatgacaagaaaataattagagaaggttgggataacacagcaaaaag

SEQ ID NO: 347259 - DNA, 567 bp, Homo sapiens
ttttgcttctggcttttgctacagagtaaacttgaatcaaaaatcaaggaagctaatgaatatttgagaaagttgtatttacaaaagaattgccagtctgagtaaagttgatgggaaatgtaaaaagtgataaatatctctgccctgccccccaacattctgtaagaagaaaatattttgaaaatgttgattgaagggcatatttttcagtgatctctttgaataaccagcatatcatagggaaggaaatctccccagaaagaaaattcaaactataaagaaaaatggttggagaagcccttcccagggatcaaaagyagaattaagtcaaggaaaattcccagaacctaataacattttctcagcaagatttcacaatattcacagagtatgatatgcacctcctctttgttttcccttttaaaatgagagtgtatttagtttatgctaagattccataattgtaattagtgtatggataaagaagatgtggtacatatacacagtggggtactattcagccacaaaaaatgaatgagatcctgctatttgcaacaacatggatga

SEQ ID NO: 347260 - DNA, 465 bp, Homo sapiens
tcaccaatggtttgaatatttttattactacacttaaatagaggtgctggctttttctaaggccaactgctctgctttttcagacaattaagtgtgttagttatcacatgagataggtgattcaaattagtctcccaaaataattgatcaccatgcaaagaagtttgatttcaatttaattttatcaatgtatttacatgcacttttttactgtgtataaccatagcatagtgactaaaataatgtttgacacattacgcatctagtaaaattacagatttatctttrtatttatttccaagaagcaaatgaacgattttcatgcgatatacagttttagtgactagactgatgacaagaaaccactgttcaattaattttagattccacgtcgtttgttgacataattatattacaggtttatataaaaacagacttttaggtatcattatgaaccacacatct

SEQ ID NO: 347261 - DNA, 622 bp, Homo sapiens
tctgtttttcactataggcttcaatgaactcagaaatgtttcttgtagattctacagaaagagtggttccaatttggtgaatcacaaaacaagttccattctttgagatgaatccacgtatcatgacacatttcatagatagctcgtttctagtatttattgcgggatattcggtttttcactataggtctcaattggctcagaaatgtgcatttgtagattctacaaaaaaattgtttccaccctggtgaaaaaaaacatgggttacattctgagagatgaatccacacatcacaaagcattttcacagtagcttgtttctagttttcattggggrtattctgttttccactataggcctcaatggggtcagaaatttctcttcattgattctacagagtgttttcaacctgctgaatgaaaacacaaatttaagtctgtgaaatgagtctacatcacaaagcattttcaaaggtagtttttttctagttttaatagcaggatattcagttcttccttataggtgtcaatggaaacagaaacgctcgttcataggttctacaaaaagagtatttccaacctggtcaataacacacaggttgtattctgtgagaagaatcca

SEQ ID NO: 347262 - DNA, 586 bp, Homo sapiens
tgtaacaatcaccaggaaataaaaagacatatcatcttgatttgctaaaaagtatagggcctaccccaagcacttggatgatgagatggattcagtaagtagtagtttatttagaaagttattgacaatgacatacatagaaatgtcagtataccagggtaaacatttttaactgcttcctaatttttttgcctgctgtttttgttttgtttccttttgtttttagaaattgtattagtgcactttcacgctgttgataaagacatacctgagactgggcaatttacaaaagaaagaggtttaattggacttacagttctrcatggctggggaagcctcacaatcatggcagaaggcaaaaaggagcaagtcctgtcttacatggatagcagcaggcaaagagagaatgaggaagactcaaaaacagaaatccctgataaaaccatcagatctcatgagacatattcactaccatgagaacagcatgggggaaaccaccccaatgatccaattatctcctaccaggttcctcctacaaaatgtgggaattatagtagtacaattcaagatgagatttagatgggga

SEQ ID NO: 347263 - DNA, 583 bp, Homo sapiens
aattttaaaagattaatgagtaagcagactgtgaatatcactgggatataatctgaaaagtatttgtgaatcagtctatggattcaccttacttggatygttttccatttttataaactgagtacttcaacaatatggttaattgaggcctacatgaataatgtaaggcacaactttaacctcatcttgaaaagtgccagaatcacaaatgatattgatttttattgcctaatttgtgccacttacaaaatgagtattttggttttagagatttattcttaatcacatgagttgccatatatttgctacattcatatcatttaaacatcaaaaaaataaaagtaagtggtctatgtcccaccatatacatcctaaatgatgtatcttgggatgttattatatttaatatcaatatgaaatgacctttcttattttttttacatactttctgttgtacagatgtaacattatatatttaaccagtgcctttttgatgaacatttagattatagtctgttgctataaaaaagtactactataaatactttgtgtcaacatcatttgcatatatttgcaaataaat

SEQ ID NO: 347264 - DNA, 583 bp, Homo sapiens
aattttaaaagattaatgagtaagcagactgtgaatatcactgggatataatctgaaaagtatttgtgaatcagtctatggattcaccttacttggattgttttccatttttataaactgagtacttcaacaatatggttaattgaggcctacatgaataatgtaaggcacaactttaacctcatcttgaaaagtgccagaatcacaaatgatattgatttttattgcctaatttgtgccacttacaaaatgagtattttggttttagagatttattcttaatcacatgagttkccatatatttgctacattcatatcatttaaacatcaaaaaaataaaagtaagtggtctatgtcccaccatatacatcctaaatgatgtatcttgggatgttattatatttaatatcaatatgaaatgacctttcttattttttttacatactttctgttgtacagatgtaacattatatatttaaccagtgcctttttgatgaacatttagattatagtctgttgctataaaaaagtactactataaatactttgtgtcaacatcatttgcatatatttgcaaataaat

SEQ ID NO: 347265 - DNA, 583 bp, Homo sapiens
aattttaaaagattaatgagtaagcagactgtgaatatcactgggatataatctgaaaagtatttgtgaatcagtctatggattcaccttacttggattgttttccatttttataaactgagtacttcaacaatatggttaattgaggcctacatgaataatgtaaggcacaactttaacctcatcttgaaaagtgccagaatcacaaatgatattgatttttattgcctaatttgtgccacttacaaaatgagtattttggttttagagatttattcttaatcacatgagttgccatatatttgctacattcatatcatttaaacatcaaaaaaataaaagtaagtggtctatgtcccaccayatacatcctaaatgatgtatcttgggatgttattatatttaatatcaatatgaaatgacctttcttattttttttacatactttctgttgtacagatgtaacattatatatttaaccagtgcctttttgatgaacatttagattatagtctgttgctataaaaaagtactactataaatactttgtgtcaacatcatttgcatatatttgcaaataaat

SEQ ID NO: 347266 - DNA, 687 bp, Homo sapiens
cttgctctgttgtccaggctggagtgcagtggcacgatcttggctcactgcaagcgctgcctcctggaattaacccaaatatcttttgaataggtggtgaaaatgaaaactctgtttggaggaactgattctaattgattactttaagaagtttttttctttttttttaaatttaagataaggcaacaaccaccaatgtttacattttgttttaaagtakgcatccagagggaatgatgatttaaatgtttctttgaactatatttttcttagatagcatatttaaaacatgcaaaagcaattgtcaccctctgtggcctgaagtagagtatctgtccttaagtaattaaacttgtgtcacaaaagcctcttgaaaaagataacattgcttaggcaagctgagagtatagcctcaaaagtgctaggttcaaaccactgtctgaagaattgttactcacgaagccctcctcctgagctgcaagtaggagaccagcatcttaaaatcactcctaagtccaaaccactgtctgaagaattgttgctcacgaagccctcctcctgagctgcaagtaggagaccagcatcttaaaattacccaattgtttggactttattcctcgttctctacctgctcggctgattcctggaagctgaaagtgatatgtgttctgtgtgtgtagatgcatg

SEQ ID NO: 347267 - DNA, 620 bp, Homo sapiens
caccacatgtggaggcgccaccttaacacttttgattagactggcagctctggggaagctgagcatcccactgtgctggccgcgtttaactcctggcgacagctgtaaaaggcctcggggtgtgtggtcagaataaacagtgaccacctatgctgcattcagccaagtgtagcccaccgattagacgatgggacagcatgcactgtttgcatgcaccctgaggttcctctttggagaacactcatgccgaggaaagaaggagtcaggtaaaatcagctaggtgccatagcaaagcagggtgcyggaggaatgggttataaataaaaatgaaaagaaccatgttcgctgtgtgagatcacagtgcttgtcagaagctaaataataccagtatcacctgggaggaacagaatagagcacctgggagacaccattgcagaaatatttgtgtggattcagggtgaggtggaaggctatgcttcagcaatcaggtaaaagttaggaaaattagagttatttctgttaatatgaactctatttattatcactacactagtgagggctggatacatttggattacatagtaatgaaggcacatgtttcatgtgcctgctggactgta

SEQ ID NO: 347268 - DNA, 620 bp, Homo sapiens
caccacatgtggaggcgccaccttaacacttttgattagactggcagctctggggaagctgagcatcccactgtgctggccgcgtttaactcctggcgacagctgtaaaaggcctcggggtgtgtggtcagaataaacagtgaccacctatgctgcattcagccaagtgtagcccaccgattagacgatgggacagcatgcactgtttgcatgcaccctgaggttcctctttggagaacactcatgccgaggaaagaaggagtcaggtaaaatcagctaggtgccatagcaaagcagggtgctggaggawtgggttataaataaaaatgaaaagaaccatgttcgctgtgtgagatcacagtgcttgtcagaagctaaataataccagtatcacctgggaggaacagaatagagcacctgggagacaccattgcagaaatatttgtgtggattcagggtgaggtggaaggctatgcttcagcaatcaggtaaaagttaggaaaattagagttatttctgttaatatgaactctatttattatcactacactagtgagggctggatacatttggattacatagtaatgaaggcacatgtttcatgtgcctgctggactgta

SEQ ID NO: 347269 - DNA, 331 bp, Homo sapiens
tgtccttctccaaattccttaagattctatgcccctaactcaagctttacaaaatcagagtgatattccagatgcttgctcactgagaaactgagagaccagctgtcacctctgctytctgttactctgtgactcagggtatggtcccaaaataggtctggcctttcatgctgccttctctcattgcagtctggcttcaccttacctgtccaccatcaccccagttcccctttagcattcctgctttccaggtttctcttccccatgaagtgaacatgtttcagtttatttccattcaaacatgaatatgccactggtcagcactctcaga

SEQ ID NO: 347270 - DNA, 575 bp, Homo sapiens
tttgtcgttatgatgcttgagaatatagaaccaccatatcagccattacagtaattacaaaagaaggtcacatcacaaccacggcatttgttacccgttgtataaaccactgcaaggtgaatgtgagtttttccacagagtttgcctgcaagaaaaaccatgtatttcttccttatcagcaagctactgtctaaacaatttaatgttttcacattaccatcaataataaaacagctaatgtttattgtacctttatacaataatccattattacctcatttaatcattacaacaaccacatgaagcatcccctttttacaaacaggaaaacagaggtaaaaagagatagagtaacttgaccaaaccaatccccgttaataagtgttgaagtttaatttcagattttcctagctagtcacctcaagaaattartcacatttgatacggttgtttacaattcaaaatttgaatgccatcagttccaactttattttaatggccaactttatctttcccccagctagttaagctgatttttcacatatgtaaatgacttctattaaaattcagtttgt

SEQ ID NO: 347271 - DNA, 487 bp, Homo sapiens
tattctctctgtttcttccccctcaaacccagagcctgctacaaatatttgaaaagccctgactggatgtaaggctcatattctatttgaagacaccagactctaaacccctctgggcttcaatttcttgtctgtgaagtgagatcctgattatactgtcttgggaggcacaccaccaaaggtttctccatccttctctagatcgaaatttacccacctcagctttccaagctgcagtaggttaggcattcatagcttcttggagattattttcttggagatttttctctttacagcaagacactcctaaatatatgctgccatatttcaaagaatacattactcctgatgcaaatgtcatattctgaaggtggcaatagtgtttcagtgacargcatatttggagccatcttcaatcatacttctgaggcagcttcctccttggccaaatatactcagcctttaataacagtgtagagaaacaagg

SEQ ID NO: 347272 - DNA, 569 bp, Homo sapiens
gaagttctaccattgttaagcagaaaaacatctttttgttttttttgagacggagtcttgctctgttgcccaggctagagtgcagtggcacgatctcagctcactgcaagctctgcctcccgggttcacgccattctcctgcctcagcctcctgagtagctgggactacaggtgcccaccaccacgcccagctgattttttgtatttttagtagagacagggtttcaccgtgttagctagaatggtctcgatctcctgaccttgtgatccacccgcctcggcctcccaaagtgctggsattacaggcgtgagccaccgtgcctggctagaaaaaatcttttagacacaaagctttggagagaaaaaaagagatgtaaacattgtcttggccaaggcaccagtaataggtaacattgccctgagaagagcaaatcacagaataagcaagcacctgttattgattaaccaattacacacatgttcagaggtagatggctttgaatcccaggttgaaaccatttggttagaaaaagcttccacatttctgttttgctcttttaaaatggaat

SEQ ID NO: 347273 - DNA, 522 bp, Homo sapiens
agcaaaaataaacaggattatatgaagccaaatatctcctgcacagcaaaggaaacaatcaacagattgaaaaagacagcctacagaatgggagaaaatatttgtagactatccactcaacaagggattaaaatccagaatatgcaagaaactcaaacaactcaacagcaaacacacacacacacacacacacacacacaaacatacacaaataatttgatttaaaaataggcaaaagacctgaatagacatttctcaagagaagacatacaaatggccacaggtatatgaaaaaattttcaacatcgctaataatcagggaaatgcacatcaaaatcataataagatatcatctcaccccagttaaaatagttattatcagaaagacataaaataacaaattctggtaagaatgcagagagaggaaattcttacacttcattggtrggaatgcaaattagtaaagccattatggaaaattatggaggtttctaaaagtacatctatcatattaaccagcca

SEQ ID NO: 347274 - DNA, 277 bp, Homo sapiens
acttgaatagtgtaaaaagagtgaaaaaaaaagagcaggatacttaagagttaccaaaaaatttaggttacttttagcatttgatgttctccaatactgttgatcttttatggaatttttaaaaatgttaaaactgttgttttatarttacatagtgtgttacattgatctttcatattttatttttaacataacacttgaaagaagtaaggtaggtactagcatgtctgctttacagatgaggaaactgaaacaaagatattctctcccaacaagt

SEQ ID NO: 347275 - DNA, 536 bp, Homo sapiens
tagctggtcagtcatatggttaatgtcacagattaatgtgtgtgtgattacaggcatgtcatattccatgggaaactggagatccataaccactatagcaacaaagtcttttctttctttttgcctatctttggaaagggctatctcctccaaatttcatgttaaaatttgatccccaatgttggaagtggggcctaacgggaggtktttgggtcattggagcagatccctcacaaatggtctggtgctgcccttgtggtaatgggtgagttcttgctctattagtttctgcaagagttcctccaagagctggttgtttaaaagagcctgacacattctctctctcttgcctcctctatcaccatgtaatctctgcacaagtcggttcaccttcaccttctgccatgagtagaatcagcctgaaggcctcatcagaagcatatgatggcaccatgcttcttgcacagcctacagaaccataaaccaaatatatttcttttctttataaattatccagtctcaggtattcctttaca

SEQ ID NO: 347276 - DNA, 536 bp, Homo sapiens
tagctggtcagtcatatggttaatgtcacagattaatgtgtgtgtgattacaggcatgtcatattccatgggaaactggagatccataaccactatagcaacaaagtcttttctttctttttgcctatctttggaaagggctatctcctccaaatttcatgttaaaatttgatccccaatgttggaagtggggcctaacgggaggtttttgggtcattggagcagatccctcacaaatggtctggtgctgcccttgtggtaatgggtgagttcttgctctattagtttctgcaagagttcctccaagagctggttgtttaaaagagcctgacacattctctctctcttgcctcctctatcaccatgtaatctctgcacaagycggttcaccttcaccttctgccatgagtagaatcagcctgaaggcctcatcagaagcatatgatggcaccatgcttcttgcacagcctacagaaccataaaccaaatatatttcttttctttataaattatccagtctcaggtattcctttaca

SEQ ID NO: 347277 - DNA, 455 bp, Homo sapiens
tgaactcaatagttatcttttagaaatacaaacttcagggaggtaactgttatcaaaagaaaaaaagagagaggaagaaacaagtttaaacaaagtttaactttttagtttctttgcttctgtgatattttttataactgcctgatttttaaacmagaaaaataaaatgatgcttagctttgtttaatgtctcaagaagttgtcatgagcagtttaattgttgagaacaagttaaataaatataactggagtaaaaatttgtaagtgaactcttcaataataacattttatacaagatgtcaacttaaaaagaggttccaaaatctttttggtaacttgcaaccttaaagttatacttaagtaagattaagtaacagatattcattaaatgtctaggtcatttcttagtaaaataaaatgctgaaacattaattgctgaacataaatttgaattt

SEQ ID NO: 347278 - DNA, 634 bp, Homo sapiens
ataaaatagcctagaaataaacccttgcatatatagccaattggttttttaaagaagtgccaagaccatttgatgtggaaagcaccaacaaatggtgctgggaaaactggatatccaattctaaagaatgaaaatgaatccttgtcttacaccatatacaacagttaactaaaaatggatcaaagggccgggcgtggtggctcatgcctgtaatcccagcactttgggaggctgaggcaggcagatcatgaggtcaggaattcaagagtagcctggccaatatggtgaaaccccatctctactaagaatacaaaaattaggagggcatggtggtgcackcctgtagtcccagctactcaggaggctgaggcagaagaatcgcttgatcccgggaggcagaggttgtagtgagccgagattgcgccactgcactctagcctgggtgacagaggagattccgtctcaaaacaaacaaacaagcaaacaaaaaaacagatcaaagacctcaatggaagagctaaaactgtaaaactttgagaagaaaacataggaggaaatcttcgacagtgaatttggcaaggaattactggatatgacaataaaagcacatgcaacaaaaaaatacagataatca

SEQ ID NO: 347279 - DNA, 553 bp, Homo sapiens
ctcctctataatttttattctgaagacaaaaagaatcaagtaaaaacatcttgaactttacctgtagtttgttgctggtggtattagagaggtaatttaaaaaaagaatctatggttcgatagtaactaacaaaaacaatgatggcaacaacaaaaacctagtgagtccagccagtaactgtagaagaaatgatagcatagaaaatgaccatcttacaaccatcagtaatacstaattcaggcaaggataatcaaaagatgttaaaacaatttggtgaaattttgtggggaatcaggattcatgcaatatcaaagcatcaacccttagattacataacgtatgatggagaaatctggtatgtaccactttaactgagtgatcaaacttaacatcaggaataattactgcctttatgtacctccagaagggactctttgagaaaaacatattacatatataatattcttaccaaaaatgcttaactttaatctaattatgaggaaacaaccagaggaacctaaatcacagaacattctataaaatgactaacct

SEQ ID NO: 347280 - DNA, 521 bp, Homo sapiens
gagattactatgaaatgcaattcattcaggctcaaagtaccttcgtaaattataaagttgtaattaaattaatttaataatgacgacataggggtttaagtttataagactgcaatgttatcgtgtacttctctacctatgataaaaccatttctaagacaacattttaataatgttggctggtgatttataaaccatattaacttgagaatggctataaaaagcaaatataaaacttcaatgttgcagttgatttcaagcattcctgcttaattaatagattctaaaagtaccaagatttcccagaggtatgatcacctcaaatcttctctctatataggaaattgaaacatgctcaatttgagacatcaaaaaacatttaaaatagacaccacaaaatgtatctgtagtttaaaggtccaatttattaggagattaagagatgtatttattatacatggactataaatactgcayagctgactttattcacagtcaagcagagatatagtcagtgccaa

SEQ ID NO: 347281 - DNA, 618 bp, Homo sapiens
caaatatataaacagacttttattccacttgcgtatttttttaattatacatgtttactgatcaaataagccaaaattacttgtttaatgtttagtcaagaaaaaatgtaaacttacaattaaccaaattgattcattattgacaattttatttcaacaataattatgttttgtaatatgtcaccttcaaaattaatttccagattgtcaggtaattaatagatatttattagatatccagatctcttatttttttaattattttttaaggctagtggagtcaagctgtgggagtggaaaaggaataatgatatctgtaaccggttgtgatcaattagttgtgaaccctagatctcttctaagtaagayagaatactaatccattgataatgatagggttcaggacatgctaccctaaaataatggcaccttggcatttgaagaaacagagaaggaaggccactctgacctcctcccacccttgtaccttgaagtagaccataaaataattctctggccttcccgtggaagaagtcataagacactcatgtgccctatcacccagaggcaaggaatatcacagagggatggacttaagagaagaatctgaacaaacag

SEQ ID NO: 347282 - DNA, 590 bp, Homo sapiens
gcagtctgtcttttacatgttgtatgagcattccaatttaggttttttttttttttttttttggaggtgggtgttctgatgtagttaaagtctgaaaccactggattagatacaatgaaaccactggattccaactcaaattctgtatacttaattggttttmattaaggttaagaacataaaatcattatcttgactttgtcaaaaacagaccaaacataccatttttttctgcaaaggaaactgcatcttctttagtactgaaggttagaaccatgttggataagggatcagccctgtaagaaacaaatttttttccaagatttaacattaagctttagctgagaaacaaaatcaatatttaaaataaacagctactataaaatcaaataagtacattattgatggaatattttatttgtaataatttctttaaaactgttagttggaatacctttttctgtgttaaatttgggagattttctaatatgtattgtcaaataataaaattcataattgcaaaggcattgttagtctttaataattttattccactctaaaaaaacaatttgagatgaattttaaaaccc

SEQ ID NO: 347283 - DNA, 590 bp, Homo sapiens
gcagtctgtcttttacatgttgtatgagcattccaatttaggttttttttttttttttttttggaggtgggtgttctgatgtagttaaagtctgaaaccactggattagatacaatgaaaccactggattccaactcaaattctgtatacttaattggttttaattaaggttaagaacataaaatcattatcttgactttgtcaaaaacagaccaaacataccatttttttctgcaaaggaaactgcatcttctttagtactgaaggttagaaccatgttggataagggatcagccctgtaagaaacaaatttttttccaagatttaacattaagctttagctgagaaacaaaatcaatatttaaaataaacagctactataaaatcaaataagtayattattgatggaatattttatttgtaataatttctttaaaactgttagttggaatacctttttctgtgttaaatttgggagattttctaatatgtattgtcaaataataaaattcataattgcaaaggcattgttagtctttaataattttattccactctaaaaaaacaatttgagatgaattttaaaaccc

SEQ ID NO: 347284 - DNA, 647 bp, Homo sapiens
cttagttaagtgataaaatttaattagatgatcatgaaaaaccttcagcttacaattctaacaattttagaaaaagatttaaaatatttcacaaagagaagtcagaattcaatatgtccaagcagtaaaattacatactattttggtgtcattaaaatgctaaaaaaagagtagcaattctctgttctaatcaaatcaaataagtaaatattttaaataataattttattcttatattttttcatgctactggttgttaacaccagaacaaaaagaattaatgaatgttttttaaaattattcaagattcaaaacaatgtctcagataaaccaatgcagacaaggtctatggcttcaaaaaactttttacttcggcaaaactacgtttkgaaaaagaactttacctcccaaacatatagtatatctcattttcaatcaaatatgtaataaaaacagcatttccatatttatgcacaataggttacagttttgtcttaaagcatcagagtattaaatcactacatatttcaacatttaatatgctatttccagactaagcaatactataataatgattgtgtgaacctttgtgcaagcaccagcaaagtaaaactgtatttatttaaacaatccactaatgcgcttcc

SEQ ID NO: 347285 - DNA, 440 bp, Homo sapiens
ctagcacagaacttttgggctaaaatgacataataggctgcgcaccatcgctcacacctataattctagcmctttgggaggcccaaggcaggtggatcacctgaagtcaagagtttgagacccgcctggccaacatggcgaagccccatctgtactaaaaataccaaacccaggcgtagtggcatgcaagtgtaatcccagctccccgggaggctgaggcaggagaactgcttgtacttggaaggcggaggttgcagtgagctgagatcacaccactgcactccagtctgggcgacagagcaagactcggtctcaagaggaaaaaaaaaaaaaaaaaaaaaaaaagacataataaagccagattatagaatctttcccctaatggaataaacttaaaatcgctgttaaaagaaaaaaaagtcaaaaatgttaccagagac

SEQ ID NO: 347286 - DNA, 440 bp, Homo sapiens
ctagcacagaacttttgggctaaaatgacataataggctgcgcaccatcgctcacacctataattctagccctttgggaggcccaaggcaggtggatcacctgaagtcaagagtttgagacccgcctggccaacatggcgaagccccatctgtactaaaaatacmaaacccaggcgtagtggcatgcaagtgtaatcccagctccccgggaggctgaggcaggagaactgcttgtacttggaaggcggaggttgcagtgagctgagatcacaccactgcactccagtctgggcgacagagcaagactcggtctcaagaggaaaaaaaaaaaaaaaaaaaaaaaaagacataataaagccagattatagaatctttcccctaatggaataaacttaaaatcgctgttaaaagaaaaaaaagtcaaaaatgttaccagagac

SEQ ID NO: 347287 - DNA, 636 bp, Homo sapiens
ataatatgcatttaagttttctttatgtgttttttgcggcatggtagcttatttctttctagtgccaaataatattccactgtgtggatttaccacagtttatgtattcattcgcctctgaaggaggtcttgattgcgtccaggttttgacaattatgaataaagttgctagaaacatctatgtgcaggtttttgtgtggacataagttttcaactccttgtagacaccaaggagcgtgattgttggttcatatggtaaatgtttaattttgtaagaaactaccaaatatgttgataatggaggaggctatgcatgtgagaggcagggagtatgtgggaaatctctgtatattctgctcggttttgctaggaaactaaaacaactgctctacaaacataaagtctgtaaaataaataaataaatgaacatatatatgtatataaacatatatatatatatataaacacacacacacacactataggagaggctaattttacccctacactcttagagtttttttggctaggcctgagaattaaattgacatagacaaattagtagragaaaagcatacaaatttatttaatgttttacatgatacttaagcaaatgaaggcccaaagaagtggcaa

SEQ ID NO: 347288 - DNA, 574 bp, Homo sapiens
gtagtataaacaagaccatgctcaagcaggccttgaaggcacaaataagctatgggagaagttggctcagattccctggcacctactccctgctcgttgtcacctctcccctggcccaaactcacagccctatgattagttccaagaaagaaacaacttggacccgattttgagatgatctgattttgagataattctgcatggtgtactggcactacccccaaatggagtggtatggcatttcagctttattcatggctagtcctcaagagcatagtgaatggtccatgatggctgtaaggagccactaaaaggataagaaagagattcttacmtaagtctccctgatgcccatatacaacattacattttatgtatcagagctcaagactccagtgttttcctatcacccacccactgctattcccctccacggcccctcactgcggctaccatttattcactactgttcactagatgctctcccagcttcgggattcgtttcaagatggtgcttctctctgagtgacctttcccacccaacccgcaaagctgtcacctgattaaagccttt

SEQ ID NO: 347289 - DNA, 540 bp, Homo sapiens
aatagtaagctactagtagttaagttttgggggagtcaaaagacatacacaaattgtcagctgtgcaggggttggtgctcataaccctctcattgttcaagggccaactgtagtataaacaagaccatgctcaagcaggccttgaaggcacaaataagctatgggagaagttggctcagattccctggcacctactccctgctcgttgtcacctctcccctggcccaaactcacagccctatgattagttccaagaaagaaacaacttggacccgattttgagatgatctgattttgagataattctgcatggtgtactggcactacccccaaatggagtggtatggcatttcagctttattcatggctagtcctcaagagcatagtgaatggtccatgatggctgtaaggagccactaaaaggataagaaagagattcttacctwagtctccctgatgcccatatacaacattacattttatgtatcagagctcaagactccagtgttttcctatcacccacccactgctattcccctc

SEQ ID NO: 347290 - DNA, 553 bp, Homo sapiens
taagcactggggacacaaaagtgaagtgaacatagactgtattttctataatttctgtaattaataagactgttagaagtggtaatacacataatcacctcttagctattagagtacaagagaatggcataaatactacttaagtaacatgcaaatatgtatctaaattgccagcttctacaagaaacatctttttytaaatgttaaaagaaataacaaaagttgtgctgtgttgtgtgtgttgtatttaaaagttcctaaagaaaaatcaggggccaatttaagaatgatccccccaaaatttaggaagatccacactggttgcaacattttgcaaaatgtagaaattccatccattatagaatggcaagactgaaaatgtggaataacactaaaatcatgcaacagacacgtgataatttgcttgtgaccaaggaaacagggtcataaatgttgcaaagattatagttttttttttttttaattgatgggagagagaaaaaaatggcaacacgttctatatgacaggggagaaggccaagagggcctgaga

SEQ ID NO: 347291 - DNA, 552 bp, Homo sapiens
tgaacatagactgtattttctataatttctgtaattaataagactgttagaagtggtaatacacataatcacctcttagctattagagtacaagagaatggcataaatactacttaagtaacatgcaaatatgtatctaaattgccagcttctacaagaaacatctttttctaaatgttaaaagaaataacaaaagttgtgctgtgttgtgtgtgttgtatttaaaagttcctaaagaaaaatcaggggccaatttaagaatgatccccccaaaatttaggaagatccacactggttgcaacattttgcaaaatgtagaaattccatccattatagaatggcaagactgaaaatgtggaataacactaaaatcatgcaacagrcacgtgataatttgcttgtgaccaaggaaacagggtcataaatgttgcaaagattatagttttttttttttttaattgatgggagagagaaaaaaatggcaacacgttctatatgacaggggagaaggccaagagggcctgagagaccctgtagataacaagtaacaag

SEQ ID NO: 347292 - DNA, 576 bp, Homo sapiens
ttttaaatattctcaccagaaaaaaatggtaagtacatraggtaatgcttacattgttaagcctaacttagttattccactgtgtatgcatatttcaaaacatcatgttgtataccataaatatctactatttaaataataatttaaaaatgaaaaaagttggaaattaatcccaatgttttatttaaaagaatgtttgccttaataacaagtataataaatttagtgttcttctgttttccttttattagagaattagaatttacaaatagaataaaaatgacatgtcctccatgctcattagttgcctttgtaccactttcattttcatgttactgatatttctgttataaatggtgtcctataaaaatgggattttactttttttatcaaaagaaggcaatttcattttctacctcggagagaatccatgcaaagagagccagcataattatacacatactattataacttcaatatcataatattttgattttgctttacatcacacactttcccagctggtgggcagcttctgttttagcttcgtggattatattagtaacggggaaagag

SEQ ID NO: 347293 - DNA, 605 bp, Homo sapiens
tctggctttcagaggaaagccagtaagatagaatggaaaataatgagcacaaagtcacaccctaaaacaatgtaagctccctctgcattttaccaatattcctttaaaaacagccattctttgctcagtgcacatctcagacatcagcctagccagactcaagctgatacaagaaaaaagagacaatttattttctggaggaggaaggatctgaattgtttaaaccctaaagtggaacctactgcaagatgcagactccaaaagcacatcaacaggcatgcaattttyttagggccaattgtatgaaggcaccaatctgtgtttgtctggctacttgccaatagcaccatcctagagaacaggcaatccacagtgttaaaaatatagaatttatcaacttgacatggtgtttaacctcatgaaaacaaaagcgtgtggtggtaattgatgctaaatattaatggtgatttaaaactcagttatgatggggaaagtaaaaccaccactactaaatggtatttgcaaaatacgcatcttctcgcccctgcacagttgtgcagataaaccatttgtacaaaaatgctggcagttgacgatcaaattgg

SEQ ID NO: 347294 - DNA, 645 bp, Homo sapiens
gtgtgtgtgtctctctctgtctcattctctctctaaaaaattagaggagttaagtcattctatctaaggaacagggggaaggtgagaagcaagcctctgagttgcctgtccgcctacaggagaacattaacattgttaatcagcattacaggcttggctttgcttcccagggaaatggctggtagagatataaaatgtttcagtcctttccaagcaatgttgtccttggtgatagccacgaaggagggatttttttttcatttatacctttttgcaaccttgtagttttgaatggctaacaataagaaccaaattaatgtcaaatcaggttaaagaagaattagcaacttcttgctctatacccaacattgtgctaagccctaccagacatatgaaaaataatatggtctttgcccttgaagacttcaccatttcttggaacaacaatatttaataacaaaaacaagaaaatgttgctgtacctygggtatagtgaattccggtagggctgaccccctatcctgtgcggcatgactcagggaagcagtcagaaggccaggaaggaaacatggtagctctgaatagtgaacactagggctatctcacgtgaaccccatgagcagatccatcccagataccctgtga

SEQ ID NO: 347295 - DNA, 282 bp, Homo sapiens
ggactaatatccaaaatatataatgaacccacataattcaatagtaaataaataaatagcccaatcttaaaatgaacaartcacctggataaacattttttcaaagaagacatacaaatggcccacagctaatattaaaaggtgctctaggtcgggcactgtggcttctgcctgtacttccagcactttgagaggctgaggcgggcagatcactggtgaaatccgttctctattaaaaatacaaaaattagccatgtgtagtgggaggtgcctataatccca

SEQ ID NO: 347296 - DNA, 594 bp, Homo sapiens
ttcacttacacatgaaggcactgtggatctgagaggccgtgtgttctctgaggtcacaaggatatcatgtggctgaattgagactagaaaccaggttttctgaaaagctaaaattcctttattctttcttcctaaccttattagaatatatcctataggatatgagtgagcaagggggcaatacagtggatagtgaactctagttccaggaataaaagaacgatagaagtcgtaggcgaggaggcaattaaccatgggaacttctaaataggcaaataggagcaaggagggaagaggccttgactttttgacattttggcaaagatcagaacaactagcacacactgtgtaaaaaaaatcctctgtctcaaactgattcattcattcaataaattcttaatgaatgcttaaygtgcgaagcaaggaggggtccaagagtgagaaatatggatgcaggccagctagacacactgagagcatggtgtggagaggaagcagtaacactgcttttcatgccaatcttggctcttcttacactggctagaggtgggggacagctagtttgccagttcgtggtgtaaattctcccacctg

SEQ ID NO: 347297 - DNA, 594 bp, Homo sapiens
ttcacttacacatgaaggcactgtggatctgagaggccgtgtgttctctgaggtcacaaggatatcatgtggctgaattgagactagaaaccaggttttctgaaaagctaaaattcctttattctttcttcctaaccttattagaatatatcctataggatatgagtgagcaagggggcaatacagtggatagtgaactctagttccaggaataaaagaacgatagaagtcgtaggcgaggaggcaattaaccatgggaacttctaaataggcaaataggagcaaggagggaagaggccttgactttttgacattttggcaaagatcagaacaactagcacacactgtgtaaaaaaaatcctctgtctcaaactgattcattcattcaataaattcttaatgaatgcttaatgtgygaagcaaggaggggtccaagagtgagaaatatggatgcaggccagctagacacactgagagcatggtgtggagaggaagcagtaacactgcttttcatgccaatcttggctcttcttacactggctagaggtgggggacagctagtttgccagttcgtggtgtaaattctcccacctg

SEQ ID NO: 347298 - DNA, 565 bp, Homo sapiens
ctttttggttagatttgccttggctatttgggctctttttagattccatatgaattttaaaatagtttttttctagttctgtgaagaagtcattggtagtttgataggaatagtacagaatctataaattgctctgggcagtgtggccattttaatgatattgattctccctatccatgagcatggaatatttttctgtttgcttctgtcatctctgatttccttgagcaattctttatagttctccttgtagaaatctttcacctccccagttatctatgttcctaggtattttattctttctgaggcaattggaaatgagattgtgttcctgatttagctctcagcttggctgttattggtgtacaggaatactagtgatttttcatatgttgattttgtttcctgaatctttgctgaagttgtttatcagctgaaggagcttttaggmtctagatatagaatcatgttttctgcaaacagcaatagttttacttcctctctttttatatggatgccctttattgcttcctcttgactgattgatctggccaggacttccaaa

SEQ ID NO: 347299 - DNA, 600 bp, Homo sapiens
tatgattgccacaggtagtgacatattgggagagcattcaccagatacttccatttactctgggaaagggaaagatgggtgcaattgagaggtgagtaggggagagaacattggaaacagctgctatgggacatggagaaggaagtccatgtggataattggagagcattgatttctcatggagcaagttcaccattttctcccttgtcatcgatctatggcttgagagctcaatgaaagtgtactgtgagcataatcyaggaagaaccccttctaccaggatgcaagaacaacggccacccaaggaatgctccaggttgggagcatatcatagatatctgtcatttttcctacccactgatatacatttttgcagtgaagattaagttaaagtgagcactcaatgtaattttgaataggaaaggtctcgaaggagtgcttggggtgaggtttctggaaggcatgaggtctagccccatgcttctggtgataagtctgtatgtgcacaagagcctcagcttatatttgctaacaataggaaaatctatcttttctgtcaactgatactctaagtctgtctgagctcctcaaaggcctaaa

SEQ ID NO: 347300 - DNA, 275 bp, Homo sapiens
ttgttttgtaggaaagtaatgcacaaactttttattccagcactccagggtgtgtgtgtggttggtgggcggggtgggtgagagagagagagagcgcctcattcacctggaagacactgccttcaaacagctctcygtggaagatggttttttgtgcacagagagtctactccctgaagagggcatggaaatgaaatgatgttgtagctgctaattcactggctttggaaaccatgtagataagtaaggggtaagaacataaggaaaataaggca

SEQ ID NO: 347301 - DNA, 599 bp, Homo sapiens
acctggaccctttccctcagaccctgtgggatctgggggacatgagaaactagcactgacatcaggctcaacatcttcctgtctctttaacatcttcctttgtctctaatcagggtgtcttgtgttttccactgacatccacgaaacagtagtgacccctcgaccttttacagatcttgaaattacccacctacctcagagactcttcatattgttggcatagcctttacctcyctgtgcctttcttcccatgaaaggaagctgcaagagaggatgagtcaagtagcataatacactgctgagagagacataagaaggtaagggaaggagagctggagaaggactttattctttataacccttctcactatttgaaattatgtattgacttattttatgtctatcctcccaatagaatgcaagctgctacaagtcagagaccttgtgattcaacattgtatcttagtgagtaaaatagtgtctagcaatattgaggcctaataaatatttgttgaatgagtgaatactaatcttggtcctgagctaccagttgatgtggattggtggtgcccattatgagttgccctggctcgtaatag

SEQ ID NO: 347302 - DNA, 453 bp, Homo sapiens
agtggtgcagggcaggttcttggcttcactcaggaaggaatgcagcgtaagctggtggtagaagaaaacagctttactgaggtggcagtgttacagctttgtgactgttcttgtgaaacagagctaccacataggcgtgccaagagcagtagcgtaggggcagttttgcactcatatttatccccasttttaatgacatgctaataaaggagtgggttattcagaaatagctagaaaatgagcaataactttcaggtgttgccatggcaatggtaaactgatatggcaatggtgggcatgtgttatggacaggtgcttccagtgtctcttccttgtgtcagccagtcttcaatctggtcctgggttgagtcccacctacctcctatctcattgctccctcagagattagatactcctccttaatcttaaggggactgcagaagagcagagtcc

SEQ ID NO: 347303 - DNA, 453 bp, Homo sapiens
agtggtgcagggcaggttcttggcttcactcaggaaggaatgcagcgtaagctggtggtagaagaaaacagctttactgaggtggcagtgttacagctttgtgactgttcttgtgaaacagagctaccacataggcgtgccaagagcagtagcgtaggggcagttttgcactcatatttatccccacttttaatgacatgctaataaaggagtgggttattcagaaatagctagaaaatgrgcaataactttcaggtgttgccatggcaatggtaaactgatatggcaatggtgggcatgtgttatggacaggtgcttccagtgtctcttccttgtgtcagccagtcttcaatctggtcctgggttgagtcccacctacctcctatctcattgctccctcagagattagatactcctccttaatcttaaggggactgcagaagagcagagtcc

SEQ ID NO: 347304 - DNA, 453 bp, Homo sapiens
agtggtgcagggcaggttcttggcttcactcaggaaggaatgcagcgtaagctggtggtagaagaaaacagctttactgaggtggcagtgttacagctttgtgactgttcttgtgaaacagagctaccacataggcgtgccaagagcagtagcgtaggggcagttttgcactcatatttatccccacttttaatgacatgctaataaaggagtgggttattcagaaatagctagaaaatgagcaataactttcaggtgttgccatggcaatggtaaactgatatggcamtggtgggcatgtgttatggacaggtgcttccagtgtctcttccttgtgtcagccagtcttcaatctggtcctgggttgagtcccacctacctcctatctcattgctccctcagagattagatactcctccttaatcttaaggggactgcagaagagcagagtcc

SEQ ID NO: 347305 - DNA, 599 bp, Homo sapiens
tttaaacactcttagttgctttcttaattttatatctgctgctttatgcttctgtttattttcattctttccaatgtccacattctagtaaatttgaatattttaatccaagtttatatactatttaatattgcttgtatagtttagtatttttaagactcaaaaaggtttacagaaagaagaaaaagatcaacatgttattaatcatttaaagatcattttgaaatctttgacctttatattttaatgaataaaatattagtagttattagtataaaataatttatgtcttttggacttagcatccagtatttcttttttaataaagaaaataattattctcttgcaatgtactatgtttatctgrgttttgaaaagtgatgtttcctaatatgagaaagccatttacagttttaaatctacaaaggcaaatggaatggtactaaattatttacataataatgtttagatggtggcccttataacattctttctatacttcctacagagttggggatatgcaattctagaatatttctgggagctaatcctttagcttgatgaatgaaacaagacttttaaataaaattaaactttca

SEQ ID NO: 347306 - DNA, 599 bp, Homo sapiens
tttaaacactcttagttgctttcttaattttatatctgctgctttatgcttctgtttattttcattctttccaatgtccacattctagtaaatttgaatattttaatccaagtttatatactatttaatattgcttgtatagtttagtatttttaagactcaaaaaggtttacagaaagaagaaaaagatcaacatgttattaatcatttaaagatcattttgaaatctttgacctttatattttaatgaataaaatattagtagttattagtataaaataatttatgtcttttggacttagcatccagtatttcttttttaataaagaaaataattattctcttgcaatgtactatgtttatctgggttttgaaaagtgatgtttcctaatatgagaaagccatttacakttttaaatctacaaaggcaaatggaatggtactaaattatttacataataatgtttagatggtggcccttataacattctttctatacttcctacagagttggggatatgcaattctagaatatttctgggagctaatcctttagcttgatgaatgaaacaagacttttaaataaaattaaactttca

SEQ ID NO: 347307 - DNA, 599 bp, Homo sapiens
tttaaacactcttagttgctttcttaattttatatctgctgctttatgcttctgtttattttcattctttccaatgtccacattctagtaaatttgaatattttaatccaagtttatatactatttaatattgcttgtatagtttagtatttttaagactcaaaaaggtttacagaaagaagaaaaagatcaacatgttattaatcatttaaagatcattttgaaatctttgacctttatattttaatgaataaaatattagtagttattagtataaaataatttatgtcttttggacttagcatccagtatttcttttttaataaagaaaataattattctcttgcaatgtactatgtttatctgggttttgaaaagtgatgtttcctaatatgagaaagccatttacagttttaaatctacaarggcaaatggaatggtactaaattatttacataataatgtttagatggtggcccttataacattctttctatacttcctacagagttggggatatgcaattctagaatatttctgggagctaatcctttagcttgatgaatgaaacaagacttttaaataaaattaaactttca

SEQ ID NO: 347308 - DNA, 599 bp, Homo sapiens
tttaaacactcttagttgctttcttaattttatatctgctgctttatgcttctgtttattttcattctttccaatgtccacattctagtaaatttgaatattttaatccaagtttatatactatttaatattgcttgtatagtttagtatttttaagactcaaaaaggtttacagaaagaagaaaaagatcaacatgttattaatcatttaaagatcattttgaaatctttgacctttatattttaatgaataaaatattagtagttattagtataaaataatttatgtcttttggacttagcatccagtatttcttttttaataaagaaaataattattctcttgcaatgtactatgtttatctgggttttgaaaagtgatgtttcctaatatgagaaagccatttacagttttaaatctacaaaggcaaatggaatggtactaaattatttacataataatgtttagatggtggcccttataacattctttctatacttcctacagagttggggatatgcaatyctagaatatttctgggagctaatcctttagcttgatgaatgaaacaagacttttaaataaaattaaactttca

SEQ ID NO: 347309 - DNA, 650 bp, Homo sapiens
tcttaaccagcctggccaacatggtaaaacccccatctctactaaaaatataaaaaaattagccaggtgtggtcgcaagcacctgtaatcccagctactcaggaggctcaggcaggagaactgcttgaacctgaggtagaggttgtggtgagtcgaaatcatgccactgcattccagcctgaatgacagagcaaaactgtctcaaaaaaaaaaaaaaaagaagaagaagcaaagaatagtcccagaaccctctttttttccccaaagtgttgggattacaggtgtgarctaccgcgtccagccccagaaccctaccctttttactccacagaagtatggagtcttatacaggccttcaagctgacagatgagtacatactagctttttaattctcttccaaattccttatttatgactatacttttggcagtctcctgataaaatgaaatctaccaatgtatttcagttcaatcacgtgtttgggaaatacctacttcccatcaggtctaaactgctgtaaaggagaatataggaaaaacaaataaaaccaagtttctacccacaatgtacttccaatctagttagggtaaaaaagcagcacacatatgttcacaaaaacagctaagaaaagatagtgcagtactaataa

SEQ ID NO: 347310 - DNA, 650 bp, Homo sapiens
tcttaaccagcctggccaacatggtaaaacccccatctctactaaaaatataaaaaaattagccaggtgtggtcgcaagcacctgtaatcccagctactcaggaggctcaggcaggagaactgcttgaacctgaggtagaggttgtggtgagtcgaaatcatgccactgcattccagcctgaatgacagagcaaaactgtctcaaaaaaaaaaaaaaaagaagaagaagcaaagaatagtcccagaaccctctttttttccccaaagtgttgggattacaggtgtgaactaccgcgtccagccccagaaccctaccctttttactccacagaagtatggagtcttatacaggccttcaagctgacagatgagtacatactagctttttrattctcttccaaattccttatttatgactatacttttggcagtctcctgataaaatgaaatctaccaatgtatttcagttcaatcacgtgtttgggaaatacctacttcccatcaggtctaaactgctgtaaaggagaatataggaaaaacaaataaaaccaagtttctacccacaatgtacttccaatctagttagggtaaaaaagcagcacacatatgttcacaaaaacagctaagaaaagatagtgcagtactaataa

SEQ ID NO: 347311 - DNA, 534 bp, Homo sapiens
aactgcaaatgtaacttttcattgcttcttgatgacgcccttcaccctatccatattgtcactaccaagtggtgattacttttcaggttcacatacttattcttcagaaaaatcttctctgtgcyttataaagaatatgattgttggcattcaaaagccagtgaagtatacattattagcctgttgcctaactcatttctttaagaaactacactaattacccacatacttatgtttttatttcctcattatttctggagaaaacaaatactgctaacgtgatatttgtaagagagaaaaaagtcttttcttgaaaagtgctgtcattgtagtactaacttatagtatcaacttctttataaactccttagacactttttattctgagagaaataaaaaagctaaaagtcaaatgactttttttactcttcttattataagcacctatcttggtaatttagggtctttatagttagggtaagttgtgtcataccgaggttacaaaataaaaagtattttgtctctttgggcctt

SEQ ID NO: 347312 - DNA, 534 bp, Homo sapiens
aactgcaaatgtaacttttcattgcttcttgatgacgcccttcaccctatccatattgtcactaccaagtggtgattacttttcaggttcacatacttattcttcagaaaaatcttctctgtgctttataaagaatatgattgttggcattcaaaagccagygaagtatacattattagcctgttgcctaactcatttctttaagaaactacactaattacccacatacttatgtttttatttcctcattatttctggagaaaacaaatactgctaacgtgatatttgtaagagagaaaaaagtcttttcttgaaaagtgctgtcattgtagtactaacttatagtatcaacttctttataaactccttagacactttttattctgagagaaataaaaaagctaaaagtcaaatgactttttttactcttcttattataagcacctatcttggtaatttagggtctttatagttagggtaagttgtgtcataccgaggttacaaaataaaaagtattttgtctctttgggcctt

SEQ ID NO: 347313 - DNA, 534 bp, Homo sapiens
aactgcaaatgtaacttttcattgcttcttgatgacgcccttcaccctatccatattgtcactaccaagtggtgattacttttcaggttcacatacttattcttcagaaaaatcttctctgtgctttataaagaatatgattgttggcattcaaaagccagtgaagtatacattattagcctgttgcctaactcatttctttaagaaactacactaattacccacatacttatgtttttatttcctcattatttctggagaaaacaaatactgctaacgtgatatttgtaagagagaaaaaagtcttttcttgaaaagtgctgtcattgtagtactaacttatagtatcaacttctttataaactccttagacactttttattctgagagaaataaaaaagctaaaagtcaaatgactttttttactcttcttattataagcaccyatcttggtaatttagggtctttatagttagggtaagttgtgtcataccgaggttacaaaataaaaagtattttgtctctttgggcctt

SEQ ID NO: 347314 - DNA, 375 bp, Homo sapiens
agggtccagggcaagggcaaggccagggcagaagcagagccagagcaggccaaaggcagggccagggcagggcaaggccagggtagggyggggccagtgtagggtgagggtagggccagggtgagttcagggccagggcaggactaagatagcacagggccaaggcagggccagggcagggccaaaaggaggggccagggccaagcatggccagtgtcagacctggggattgtcagggccagggtcagggtcaagtctgggccagggacagggccagagcaagggcagggccagggagaaagcagaaccagagaggatccagagcaaggccagggtcagggcagaaccaggaccaggataaggcaaagccaaggc

SEQ ID NO: 347315 - DNA, 446 bp, Homo sapiens
tagggcaggtacagggcaaggcagggcagtacagggccagatccacggcaggcgcagggcaaagccaggcccattgccaatgcaccagccctccctacaaggctcctaccacctggccactgctgcagcccgtccatcgctctaagcctgacccccaaccctggctgcagccgcctgccctcctagcgcagccgctctcctaccsctctggtgtaccgcagtctctgtcactgccgcccacccgcagtgaggcgagccatggtgttgcaggctctaggtgtctcctcctcctggcacagagcagctgggcgggcaaagccagaaaagcctagagaaagatgtgaggggtggaagggttagagcctcaacttgtcatgccggccactgggtggcaggggccagtttcagcaaaggcacttacacccaccctccaaagtccagcctct

SEQ ID NO: 347316 - DNA, 446 bp, Homo sapiens
tagggcaggtacagggcaaggcagggcagtacagggccagatccacggcaggcgcagggcaaagccaggcccattgccaatgcaccagccctccctacaaggctcctaccacctggccactgctgcagcccgtccatcgctctaagcctgacccccaaccctggctgcagccgcctgccctcctagcgcagccgctctcctaccgctctggtgtaccgcagtctctgtcactgccgcccacccrcagtgaggcgagccatggtgttgcaggctctaggtgtctcctcctcctggcacagagcagctgggcgggcaaagccagaaaagcctagagaaagatgtgaggggtggaagggttagagcctcaacttgtcatgccggccactgggtggcaggggccagtttcagcaaaggcacttacacccaccctccaaagtccagcctct

SEQ ID NO: 347317 - DNA, 446 bp, Homo sapiens
tagggcaggtacagggcaaggcagggcagtacagggccagatccacggcaggcgcagggcaaagccaggcccattgccaatgcaccagccctccctacaaggctcctaccacctggccactgctgcagcccgtccatcgctctaagcctgacccccaaccctggctgcagccgcctgccctcctagcgcagccgctctcctaccgctctggtgtaccgcagtctctgtcactgccgcccacccgcagtgaggcgagccatggtgtygcaggctctaggtgtctcctcctcctggcacagagcagctgggcgggcaaagccagaaaagcctagagaaagatgtgaggggtggaagggttagagcctcaacttgtcatgccggccactgggtggcaggggccagtttcagcaaaggcacttacacccaccctccaaagtccagcctct

SEQ ID NO: 347318 - DNA, 480 bp, Homo sapiens
ggtgttgcaggctctaggtgtctcctcctcctggcacagagcagctgggcgggcaaagccagaaaagcctagagaaagatgtgaggggtggaagggttagagcctcaacttgtcatgccggccactgggtggcaggggccagtttcagcaaaggcactyacacccaccctccaaagtccagcctctccttttggcccaagctgggcaggaactggggtctggggtgggtgctggagacaccacagcatccagctccccactccacaggaaccattgggcccactggggctgcactcctcagggagcaggagaagcagaaaaattcagacccagccagccctccacacccaggtgccaattcctgttccggacgcctccacgcacagggccctgtcccccgtggtgtccccaggggtgcctggcagcctctgaggcacagacccacagtacacaggcccaggaaccacggtgggtgtgggg

SEQ ID NO: 347319 - DNA, 480 bp, Homo sapiens
ggtgttgcaggctctaggtgtctcctcctcctggcacagagcagctgggcgggcaaagccagaaaagcctagagaaagatgtgaggggtggaagggttagagcctcaacttgtcatgccggccactgggtggcaggggccagtttcagcaaaggcacttacacccaccctccaaagtccagcctctccttttggcccaagctgggcaggaactggggtctggggtgggtgctggagacaccacagcatccagctccccactccacaggaaccattgggcccactggggctgcactcctcrgggagcaggagaagcagaaaaattcagacccagccagccctccacacccaggtgccaattcctgttccggacgcctccacgcacagggccctgtcccccgtggtgtccccaggggtgcctggcagcctctgaggcacagacccacagtacacaggcccaggaaccacggtgggtgtgggg

SEQ ID NO: 347320 - DNA, 429 bp, Homo sapiens
tgtgtgtctattctttttcccaagcaacaaaaattataattcattaattttaattttattatttaagaatattcttaagagttgaaggaaaaataatatctgtacattatgggttacaatctaagtataaataatacataaatatattaaaacttacaaagaatatgttttggaatcgaatataccatgcttctgtgatgacagttatttcatgctggttgtcayaattttacatgaaaaactaatgaaaaaatgtttttaactgtttctaaaaataacagtttccaaaacagttttacattcgaaatatgaaaaagatgtctttgtgttccttaatctgatgagattttcacactctgcacatgataattgttagatttttattgtgttgataaattgtatatcaaataaaaaatgttattacctctt

SEQ ID NO: 347321 - DNA, 554 bp, Homo sapiens
aatgaaataatggaaatgagatgagatgagatttggtgaaatgatgagatgaaatgatgagatgatatgaaatgatgagatgagatgggatgagatgaaatgagataaaatgatgagatgaaatgatgaaatgatgagatgaaatgatggggtgaagtgatgcactgtcacgtgtgtgtctattctttttcccaagcaacaaaaattataattcattaattttaattttattatttaagaatattcttaagagttgaaggaaaaataatatctgtacattatgggttacaatctaagtataaataatacataaatatattaaaacttacaaagaatatgttttggaatcgaatataccatgcttctgtgatgacagttatttcatgctggttgtcacaattttacatgaaaaactaatgaaaaaatgtttttaactgtttctaaaaataacagtttccaaaacagttttacattcgaaatatgaaaaagwtgtctttgtgttccttaatctgatgagattttcacactctgcacatgataattgttagattttt

SEQ ID NO: 347322 - DNA, 620 bp, Homo sapiens
attgttagatttttattgtgttgataaattgtatatcaaataaaaaatgttattacctcttaaattaggatttttaggtgatataggcagaaaggacrgcaagtttttataactttctctaaatgaactttctaaatgcctgagtattaaaagatagcatgtctataaatcacaatgtatatattactgtatgacctaggaccaatcaaaaccgttacctctgataacattatattgtgcccagtataaaatagatataataatacctcaaacttaaatccgggcattgtcattgaatatcttaagaatatgcaacaaaggtgcttttaaaaatacaagctagtgattgtaccaaatttgtaaatcacataggatagtgggtcattttaagaatattagttatttcaatctataaacgtggatgtctttccttttttgtgttttctttaatttctttcattaatatttgtcatttttgttgtcgaaatcttttacttccttggttaaatttatttctaagtacatttttgtagctattgtaaaaggaattgctttcttaatttcttgtttcagctagtttattatcaatatatagaaatgctactgatttttgtatgttg

SEQ ID NO: 347323 - DNA, 620 bp, Homo sapiens
attgttagatttttattgtgttgataaattgtatatcaaataaaaaatgttattacctcttaaattaggatttttaggtgatataggcagaaaggacggcaagtttttataactttstctaaatgaactttctaaatgcctgagtattaaaagatagcatgtctataaatcacaatgtatatattactgtatgacctaggaccaatcaaaaccgttacctctgataacattatattgtgcccagtataaaatagatataataatacctcaaacttaaatccgggcattgtcattgaatatcttaagaatatgcaacaaaggtgcttttaaaaatacaagctagtgattgtaccaaatttgtaaatcacataggatagtgggtcattttaagaatattagttatttcaatctataaacgtggatgtctttccttttttgtgttttctttaatttctttcattaatatttgtcatttttgttgtcgaaatcttttacttccttggttaaatttatttctaagtacatttttgtagctattgtaaaaggaattgctttcttaatttcttgtttcagctagtttattatcaatatatagaaatgctactgatttttgtatgttg

SEQ ID NO: 347324 - DNA, 562 bp, Homo sapiens
ctcagtcgttttgtttgctcagatcttttgatgatccggataatcttttaatttatgcaggatgtttctctgcttgtgcaggctggtgggattggggactggagagaggataagtgtctgcttgcccaggactggcaaactgtcacttgccctggttgtgccttgccaggagctcccgtgcctgtctctgagagtgtcatgagcrcagcggtggtagttgtgtggtggatgcatttcccctaggttggggggtgggtggctggtcctagctctgtttgttgttgccgatgagacacagcacacttctgcttcctgatggatcttgtcagtcatttgacttcttcctggtctgggctcctgagctggccctctgcaggccaagcaggaatggagctggctgctacaagagttccttcactagagggcatctctcctctctcctcccacacatgggaacacaagggtgggctttcctccacccactgtgatccgcagcccggctttcccctcctcaccctctgctctcagacagacttgcttttccctggtgtctgtgagaggt

SEQ ID NO: 347325 - DNA, 562 bp, Homo sapiens
ctcagtcgttttgtttgctcagatcttttgatgatccggataatcttttaatttatgcaggatgtttctctgcttgtgcaggctggtgggattggggactggagagaggataagtgtctgcttgcccaggactggcaaactgtcacttgccctggttgtgccttgccaggagctcccgtgcctgtctctgagagtgtcatgagcgcagcggtggtagttgtgtggtggatgcatttcccctrggttggggggtgggtggctggtcctagctctgtttgttgttgccgatgagacacagcacacttctgcttcctgatggatcttgtcagtcatttgacttcttcctggtctgggctcctgagctggccctctgcaggccaagcaggaatggagctggctgctacaagagttccttcactagagggcatctctcctctctcctcccacacatgggaacacaagggtgggctttcctccacccactgtgatccgcagcccggctttcccctcctcaccctctgctctcagacagacttgcttttccctggtgtctgtgagaggt

SEQ ID NO: 347326 - DNA, 562 bp, Homo sapiens
ctcagtcgttttgtttgctcagatcttttgatgatccggataatcttttaatttatgcaggatgtttctctgcttgtgcaggctggtgggattggggactggagagaggataagtgtctgcttgcccaggactggcaaactgtcacttgccctggttgtgccttgccaggagctcccgtgcctgtctctgagagtgtcatgagcgcagcggtggtagttgtgtggtggatgcatttcccctaggttggggggtgggtggctggtcctagctctgtttgttgttgccgatgagacacagcacacttctgcttcctgatggatcttgtyagtcatttgacttcttcctggtctgggctcctgagctggccctctgcaggccaagcaggaatggagctggctgctacaagagttccttcactagagggcatctctcctctctcctcccacacatgggaacacaagggtgggctttcctccacccactgtgatccgcagcccggctttcccctcctcaccctctgctctcagacagacttgcttttccctggtgtctgtgagaggt

SEQ ID NO: 347327 - DNA, 562 bp, Homo sapiens
ctcagtcgttttgtttgctcagatcttttgatgatccggataatcttttaatttatgcaggatgtttctctgcttgtgcaggctggtgggattggggactggagagaggataagtgtctgcttgcccaggactggcaaactgtcacttgccctggttgtgccttgccaggagctcccgtgcctgtctctgagagtgtcatgagcgcagcggtggtagttgtgtggtggatgcatttcccctaggttggggggtgggtggctggtcctagctctgtttgttgttgccgatgagacacagcacacttctgcttcctgatggatcttgtcrgtcatttgacttcttcctggtctgggctcctgagctggccctctgcaggccaagcaggaatggagctggctgctacaagagttccttcactagagggcatctctcctctctcctcccacacatgggaacacaagggtgggctttcctccacccactgtgatccgcagcccggctttcccctcctcaccctctgctctcagacagacttgcttttccctggtgtctgtgagaggt

SEQ ID NO: 347328 - DNA, 687 bp, Homo sapiens
caaaaccgttacctctgataacattatattgtgcccagtataaaatagatataataatacctcaaacttaaatccgggcattgtcattgaatatcttaagaatatgcaacaaaggtgcttttaaaaatacaagctagtgattgtaccaaatttgtaaatcacataggatagtgggtcattttaagaatattagttatttcaatctataaacgtggatgtctttccttttttgtgttttctttaatttctttcattaatatttgtcatttttgttgtcgaaatcttttacttccttggttaaatttatttctaagtacatttttgtagctattgtaaaaggaattgctttcttaatttcttgtttcagctagtttaytatcaatatatagaaatgctactgatttttgtatgttgatttatatcctgcaactttattaatttcatgtatcaccctaagaagcttttggtagagtcttatttttttccgtgtataagatcacattgtctttaaacagggacaatttgactgtctcctttccaattcagatgtcctttatttctttctctcacctaattgtcctggctaagactttcactatgtgaaatatgattggtgagaataggcatccttttcttgttccagtaaaatctttttcttgttcacagtaaaatctttcaccttttcca

SEQ ID NO: 347329 - DNA, 337 bp, Homo sapiens
ttcatctactttgaattttaattatatttcttgctgagcagagaaaactcctgatggagttttcactgatgtgcaaaaccacctcatattcccctcacctgggagccagagtagcaggaggaagaagaagctgtgctggggcttccatggttccrtctgggtcctaactgagcagttcctccccagggctctgacccaggcattgatatgggccctggaaggtagggcagctgggagggacatgcaaagcagctggggtgggagctgggcttccagctgcagataccacctgcttcttcctctctgcactgagcatcctgcgccaccttggttgtca

SEQ ID NO: 347330 - DNA, 584 bp, Homo sapiens
ctcggtttccatatctgtgtaactgtgacaatagtggtacctgccttacagtgctgtagacagtttaaagaaaataagataaaacatttacagtagtattcaggacattatgtgtgtggcaattaattttgttttcattgtttaaatgttcagcactacagtcatcatcattataaatatacttaccatggaaaatagtcttaaatctaatccaagaatgttttatccacagtcaaattaaattctaaggcattttcttcagtaactgtacacaactcttaaaatcctaatgatttgatcttaatctgtgctaaagtactcagaccttcaatcattcccatccatccctgtctaacgcattacttmtcatcatccattatttaaatgttaccctataaacagttcccatgtcctgttgctgtccttctttcttatgtaatctttattctaccttgttatcttttatgttattcttgccccaggactgacaataaggaaaaactaccatcattacttgtagacttgctccagtataattttttcaggcttgttgtcttggaaatgaggactgtgtcttgcaaaga

SEQ ID NO: 347331 - DNA, 584 bp, Homo sapiens
ctcggtttccatatctgtgtaactgtgacaatagtggtacctgccttacagtgctgtagacagtttaaagaaaataagataaaacatttacagtagtattcaggacattatgtgtgtggcaattaattttgttttcattgtttaaatgttcagcactacagtcatcatcattataaatatacttaccatggaaaatagtcttaaatctaatccaagaatgttttatccacagtcaaattaaattctaaggcattttcttcagtaactgtacacaactcttaaaatcctaatgatttgatcttaatctgtgctaaagtactcagaccttcaatcattcccatccatccctgtctaacgcattacttctcatcatccattatttaaatgttaccctataaayagttcccatgtcctgttgctgtccttctttcttatgtaatctttattctaccttgttatcttttatgttattcttgccccaggactgacaataaggaaaaactaccatcattacttgtagacttgctccagtataattttttcaggcttgttgtcttggaaatgaggactgtgtcttgcaaaga

SEQ ID NO: 347332 - DNA, 584 bp, Homo sapiens
ctcggtttccatatctgtgtaactgtgacaatagtggtacctgccttacagtgctgtagacagtttaaagaaaataagataaaacatttacagtagtattcaggacattatgtgtgtggcaattaattttgttttcattgtttaaatgttcagcactacagtcatcatcattataaatatacttaccatggaaaatagtcttaaatctaatccaagaatgttttatccacagtcaaattaaattctaaggcattttcttcagtaactgtacacaactcttaaaatcctaatgatttgatcttaatctgtgctaaagtactcagaccttcaatcattcccatccatccctgtctaacgcattacttctcatcatccattatttaaatgttaccctataaacagttcccatgtcctgttgctgtccttctttcttatgtaatctttattctaccttgttatcttttatgttattcttgccccaggactgacaataaggaaaaactaccatcattacttgtagacttgctccagtataatyttttcaggcttgttgtcttggaaatgaggactgtgtcttgcaaaga

SEQ ID NO: 347333 - DNA, 584 bp, Homo sapiens
ctcggtttccatatctgtgtaactgtgacaatagtggtacctgccttacagtgctgtagacagtttaaagaaaataagataaaacatttacagtagtattcaggacattatgtgtgtggcaattaattttgttttcattgtttaaatgttcagcactacagtcatcatcattataaatatacttaccatggaaaatagtcttaaatctaatccaagaatgttttatccacagtcaaattaaattctaaggcattttcttcagtaactgtacacaactcttaaaatcctaatgatttgatcttaatctgtgctaaagtactcagaccttcaatcattcccatccatccctgtctaacgcattacttctcatcatccattatttaaatgttaccctataaacagttcccatgtcctgttgctgtccttctttcttatgtaatctttattctaccttgttatcttttatgttattcttgccccaggactgacaataaggaaaaactaccatcattacttgtagacttgctccagtataattttttcaggcttgttktcttggaaatgaggactgtgtcttgcaaaga

SEQ ID NO: 347334 - DNA, 335 bp, Homo sapiens
atttacactaagccatgagctcatctttaaaaagttttattaaaagattttcagctgttccaaatgggacttattagtggaatgtgttttaaaggatcatatcagatgaatgaaaggtatttgatccttcgtttccttaataataaaatgatggtttggaaaaataggctacagtctaaccacagtgctattattaggctttcttgttaaacataggtctaagcctaagtatgtcaatacaacaaatacttactgtttcatttctagtaatraaaaaaaaaacaagtctttctggcataaggatgattttcatctggttattttgaaacattttt

SEQ ID NO: 347335 - DNA, 630 bp, Homo sapiens
aattgttgagacgttttttgtcatgtaagaatatttaattttgccaaacgcttttattgtgtttattaatttaatcatatggttttcagtatatatccaaaggaaagaaaaccagtatatcaaagacttacctgcacccccatgtttattacagcactattcacaatagccaagatatggaatcaacaaaagtgtccatcaacagatgaatggataaagaaatgtgacatacatatataatggaatactatttagtcataataaagaacaaaatcctgttatttgtggcaacaagaatgcaagtggagggcattatgttaggtgaaataagcctggcatagaaacataracaccacataactacgtgttctcacttatgtatggaagctaaaatttttaatctcgtagaagtagatagtagagttttggttaccatatgctggaaagagtaggagaaagaagagtataagaaaaatgtggttaatacatacaaaattacagctggagagaaggaagaagttctagttctctacagcactgttgggtgactgtagttaacgggaatttattgtgtgttttcaaataactaaaataaaagattttgaatattctcactgcaaagaaataata

SEQ ID NO: 347336 - DNA, 630 bp, Homo sapiens
aattgttgagacgttttttgtcatgtaagaatatttaattttgccaaacgcttttattgtgtttattaatttaatcatatggttttcagtatatatccaaaggaaagaaaaccagtatatcaaagacttacctgcacccccatgtttattacagcactattcacaatagccaagatatggaatcaacaaaagtgtccatcaacagatgaatggataaagaaatgtgacatacatatataatggaatactatttagtcataataaagaacaaaatcctgttatttgtggcaacaagaatgcaagtggagggcattatgttaggtgaaataagcctggcatagaaacatagacaccacataactacgtgttctcacttatgtatggaagctaaaatttttaatctcgtagaagtagatagtagagttttggttaccatatsctggaaagagtaggagaaagaagagtataagaaaaatgtggttaatacatacaaaattacagctggagagaaggaagaagttctagttctctacagcactgttgggtgactgtagttaacgggaatttattgtgtgttttcaaataactaaaataaaagattttgaatattctcactgcaaagaaataata

SEQ ID NO: 347337 - DNA, 502 bp, Homo sapiens
gcagccaacctctgcccgccctggttcaggccccgactggccccwgtggtgggtgatgtctatcttcctggcctttgtgctcccagccaactgggatggagcctccagctggcatgacatgttgtagctacggacagaagagtggctatgaggctgccaggaatctcaccagggccccctcccagggcctgtccagagtgaggtctgggtaccccaggcattgccagaccacaggatctgatgttggccaagaggccatggccacaggctttctgaggctggcccccagggagagttcaatcctactatcccaattcctgtcctggccttacctctcagtctcaccgagccgcttcgtggtcccaaaccaggacccaaagtgctgcttgggctcaaggttgtaattatttgcagtcaactggagcagtggacctccttgcttactttgaattcctgggtccagagggaaaaactgggtggtgacagggactggacagggatg

SEQ ID NO: 347338 - DNA, 502 bp, Homo sapiens
gcagccaacctctgcccgccctggttcaggccccgactggcccctgtggtgggtgatgtctatcttcctggcctttgtgctcccagccaactgggatggagcctccagctggcatgacatgttgtagctacggacagaagagtggctatgaggctgccaggaatctcaccagggccccctcccagggcctgtccagagtgaggtctgggtaccccaggcattgccagaccacaggatctgatgttggccaagaggccatggccacaggctttctgaggctggcccccagggagagttcaatcctactatcccaattcctgtcctggccttacctctcagtctcaccgagccgcttcrtggtcccaaaccaggacccaaagtgctgcttgggctcaaggttgtaattatttgcagtcaactggagcagtggacctccttgcttactttgaattcctgggtccagagggaaaaactgggtggtgacagggactggacagggatg

SEQ ID NO: 347339 - DNA, 516 bp, Homo sapiens
tacgtgttctcacttatgtatggaagctaaaatttttaatctcgtagaagtagatagtagagttttggttaccatatgctggaaagagtaggagaaagaagagtataagaaaaatgtggttaatacatacaaaattacagctggagagaaggaagaagttctagttctctacagcactgytgggtgactgtagttaacgggaatttattgtgtgttttcaaataactaaaataaaagattttgaatattctcactgcaaagaaataatacatgatttaggtaatggatatgataatgactctgacttgatctttacgtattgcataaatatatcaaaatatcactctgtaccccataacatgtacatttattatatgtcaattaaagtaaatttaaaagagaaaaaatgaggtaaaggtaaatatacataatttaattactttttcttctataaaacccgagtcagtaccaagaagagtcaatttattagttttctaaaataaaaaaaatcaaaat

SEQ ID NO: 347340 - DNA, 516 bp, Homo sapiens
tacgtgttctcacttatgtatggaagctaaaatttttaatctcgtagaagtagatagtagagttttggttaccatatgctggaaagagtaggagaaagaagagtataagaaaaatgtggttaatacatacaaaattacagctggagagaaggaagaagttctagttctctacagcactgttgggtgactgtagttaaygggaatttattgtgtgttttcaaataactaaaataaaagattttgaatattctcactgcaaagaaataatacatgatttaggtaatggatatgataatgactctgacttgatctttacgtattgcataaatatatcaaaatatcactctgtaccccataacatgtacatttattatatgtcaattaaagtaaatttaaaagagaaaaaatgaggtaaaggtaaatatacataatttaattactttttcttctataaaacccgagtcagtaccaagaagagtcaatttattagttttctaaaataaaaaaaatcaaaat

SEQ ID NO: 347341 - DNA, 630 bp, Homo sapiens
ttctagttctctacagcactgttgggtgactgtagttaacgggaatttattgtgtgttttcaaataactaaaataaaagattttraatattctcactgcaaagaaataatacatgatttaggtaatggatatgataatgactctgacttgatctttacgtattgcataaatatatcaaaatatcactctgtaccccataacatgtacatttattatatgtcaattaaagtaaatttaaaagagaaaaaatgaggtaaaggtaaatatacataatttaattactttttcttctataaaacccgagtcagtaccaagaagagtcaatttattagttttctaaaataaaaaaaatcaaaatcaccaaaaaagagcaatatccaagaaaacattgaaaatgaaacacaacatttagtaagaatagaaaacttgggcaccgtatcaccctgttcctagataccgatttactgatggccatttaaatagaattttattctatctaattcattaatactcccagagttcgaaattacattttacctacaataaatgagataacacttgtaaattatatggtactctgcctaacacacgttaataactcaatacatgttagcaataaacttttagtat

SEQ ID NO: 347342 - DNA, 630 bp, Homo sapiens
ttctagttctctacagcactgttgggtgactgtagttaacgggaatttattgtgtgttttcaaataactaaaataaaagattttgaatattctcactgcaaagaaataatacatgatttaggtaatggatatgataatgactctgacttgatctttacgyattgcataaatatatcaaaatatcactctgtaccccataacatgtacatttattatatgtcaattaaagtaaatttaaaagagaaaaaatgaggtaaaggtaaatatacataatttaattactttttcttctataaaacccgagtcagtaccaagaagagtcaatttattagttttctaaaataaaaaaaatcaaaatcaccaaaaaagagcaatatccaagaaaacattgaaaatgaaacacaacatttagtaagaatagaaaacttgggcaccgtatcaccctgttcctagataccgatttactgatggccatttaaatagaattttattctatctaattcattaatactcccagagttcgaaattacattttacctacaataaatgagataacacttgtaaattatatggtactctgcctaacacacgttaataactcaatacatgttagcaataaacttttagtat

SEQ ID NO: 347343 - DNA, 630 bp, Homo sapiens
ttctagttctctacagcactgttgggtgactgtagttaacgggaatttattgtgtgttttcaaataactaaaataaaagattttgaatattctcactgcaaagaaataatacatgatttaggtaatggatatgataatgactctgacttgatctttacgtattgcataaatatatcaaaatatcactctgtaccccataacatgtacatttattatatgtcaattaaagtaaatttaaaagagaaaaaatgaggtaaaggtaaatatacataatttaattactttttcttctataaaacccgagtcagtaccaagaagagtcaatttattagttttctaaaataaaaaaaatcaaaatcaccaaaaaagagcaatatccaagaaaacattgaaaatgaaacacaacattyagtaagaatagaaaacttgggcaccgtatcaccctgttcctagataccgatttactgatggccatttaaatagaattttattctatctaattcattaatactcccagagttcgaaattacattttacctacaataaatgagataacacttgtaaattatatggtactctgcctaacacacgttaataactcaatacatgttagcaataaacttttagtat

SEQ ID NO: 347344 - DNA, 520 bp, Homo sapiens
attaggctaaatttattaatgttggcccactaaacagagattctggactcagggttgtaggtcaaagctttagaaagggctccaagggttggtttgatcggttacttggttggttgyttgcttggttggttggtgcttgcttccttgcttggttgtttggttggtttgttgcttgcttgcttgttggttgattggttggctgtttgcttgtttggtgacttggttggttggctgaaacagaatcagagtttacctaaggtacataaagttgagatgccacaacttccttggtttatgtgtacagaaaggtatgcaaaaactcagggagactggatttattatgtcagacctgctcactcacactggagggtctacggaacatactcctcacaacgatcatgagaaagaatattgtgagaggagcccagtatcctggaagagctttgagcttgtgctctcagtaggcaaaatgttacagcaggaactgcagccactggactgggatctttaagtaaaatga

SEQ ID NO: 347345 - DNA, 520 bp, Homo sapiens
attaggctaaatttattaatgttggcccactaaacagagattctggactcagggttgtaggtcaaagctttagaaagggctccaagggttggtttgatcggttacttggttggttgtttgcttggttggttggtgcttgcttccttgcttggttgtttggttggtttgttgcttgcttgcttgttggttgattggttggctgtttgcttgtttggtgacttggttggttggctgaaacagaatcagagtttacctaaggtacataaagttgagatgccacaacttccttggtttatgtgtacagaaaggtatgcaaaaactcagggagactggatttattatgtcagacctgctcactcacactggagggtctacggaacatactcctcacaacgatcatgagaaagaatattgtgagaggagcccagtatcctggaagagctttgagcttgtgctctcagtaggcaaaatgttacagcaggaactgcagccrctggactgggatctttaagtaaaatga

SEQ ID NO: 347346 - DNA, 630 bp, Homo sapiens
ttctagttctctacagcactgttgggtgactgtagttaacgggaatttattgtgtgttttcaaataactaaaataaaagattttgaatattctcactgcaaagaaataatacatgatttaggtaatggatatgataatgactctgacttgatctttacgtattgcataaatatatcaaaatatcactctgtaccccataacatgtacatttattatatgtcaattaaagtaaatttaaaagagaaaaaatgaggtaaaggtaaatatacataatttaattactttttcttctataaaacccgagtcagtaccaagaagagtcaatttattagttttctaaaataaaaaaaatcaaaatcaccaaaaaagagcaatatccaagaaaacattgaaaatgaaacacaacatttagtaagaatagaaaacttgggcaccgtatcaccctgttcctagataccgatttactgatggccatttaaatagaattttattctatctaattcattwatactcccagagttcgaaattacattttacctacaataaatgagataacacttgtaaattatatggtactctgcctaacacacgttaataactcaatacatgttagcaataaacttttagtat

SEQ ID NO: 347347 - DNA, 558 bp, Homo sapiens
acattttacctacaataaatgagataacacttgtaaattatatggtactctgcctaacacacgttaataactcaatacatgttagcaataaacttttagtatagtagtcaaagtattaatttctcacattgcaatttccttcaaagacatgaatacaacctttctaatgactccttgttcatcaagatacctcttcaaattattctatttgtttcattcagtatattatctgtgtataccgatattasactcttttctttttttgagatggaatctcattctgttactgatgctggagtgaggtggcatgatctcggttcactgcaacctccacctcccaggttcaagcgattctcctgtctcagcctcccaagtagctaggactacaggtgcataccacgatgcctggctaatttttgtatttttagtacagtcaagagtttcaccttgttgtccaggctggtctcgaactcctgacctcaggtgatccacccaccatggcctcccaaagtgctgggattacaggcataagccaccgcacccagcctgatattgcac

SEQ ID NO: 347348 - DNA, 558 bp, Homo sapiens
acattttacctacaataaatgagataacacttgtaaattatatggtactctgcctaacacacgttaataactcaatacatgttagcaataaacttttagtatagtagtcaaagtattaatttctcacattgcaatttccttcaaagacatgaatacaacctttctaatgactccttgttcatcaagatacctcttcaaattattctatttgtttcattcagtatattatctgtgtataccgatattacactcttttctttttttgagatggmatctcattctgttactgatgctggagtgaggtggcatgatctcggttcactgcaacctccacctcccaggttcaagcgattctcctgtctcagcctcccaagtagctaggactacaggtgcataccacgatgcctggctaatttttgtatttttagtacagtcaagagtttcaccttgttgtccaggctggtctcgaactcctgacctcaggtgatccacccaccatggcctcccaaagtgctgggattacaggcataagccaccgcacccagcctgatattgcac

SEQ ID NO: 347349 - DNA, 558 bp, Homo sapiens
acattttacctacaataaatgagataacacttgtaaattatatggtactctgcctaacacacgttaataactcaatacatgttagcaataaacttttagtatagtagtcaaagtattaatttctcacattgcaatttccttcaaagacatgaatacaacctttctaatgactccttgttcatcaagatacctcttcaaattattctatttgtttcattcagtatattatctgtgtataccgatattacactcttttctttttttgagatggaatctcattctgttactgatgctggagtgaggtggcatgatctcggttcactgcaacctccacctcccaggttcaagcgattctcctgtctcagcctcccaagtagctaggactacaggtgcataccacgatgcctggctaatttttgtatttttagtacagtcaagagtttcaccttgttgtccaggctggtctcgaactcctgacctcaggtgatccacccaccatggcctcccaaagtgctgggattacrggcataagccaccgcacccagcctgatattgcac

SEQ ID NO: 347350 - DNA, 471 bp, Homo sapiens
aacgaggaattcaaactcgtagctgcctcaatattgaactttctaaagtttaattytttttaattaaaaaatattcatttgggttcaatatgtatggatctccagggcagaaatgtctctccaaaaagtgaaccactctgaaaatcaccgtcatttgggaaagggtgatgccccagctgtcttctgaaaaatagcagaggcttccgctcagtggggtgtctctctctttccctgaggccgaaatgtcagggaatttttcttccccacccctaggagcccagtaaatggagaatatttcagaaggatttgcacagggtcccggcttctgctatttatgagctccatggattcttggctcaggcttgtgatcagctcacctgctccagaatcacttcccatcttagcttctgggctaagacacctcaaaaccagcaaaggaaagtcctcactggtcaacacgtccatcccaac

SEQ ID NO: 347351 - DNA, 471 bp, Homo sapiens
aacgaggaattcaaactcgtagctgcctcaatattgaactttctaaagtttaattctttttaattaaaaaatattcatttgggttcaatatgtatggatctccagggcagaaatgtctctccaaaaagtgaaccactctgaaaatcaccgtcatttgggaaagggtgatgccccagctgtcttctgaaaaatagcagaggcttccgstcagtggggtgtctctctctttccctgaggccgaaatgtcagggaatttttcttccccacccctaggagcccagtaaatggagaatatttcagaaggatttgcacagggtcccggcttctgctatttatgagctccatggattcttggctcaggcttgtgatcagctcacctgctccagaatcacttcccatcttagcttctgggctaagacacctcaaaaccagcaaaggaaagtcctcactggtcaacacgtccatcccaac

SEQ ID NO: 347352 - DNA, 471 bp, Homo sapiens
aacgaggaattcaaactcgtagctgcctcaatattgaactttctaaagtttaattctttttaattaaaaaatattcatttgggttcaatatgtatggatctccagggcagaaatgtctctccaaaaagtgaaccactctgaaaatcaccgtcatttgggaaagggtgatgccccagctgtcttctgaaaaatagcagaggcttccgcycagtggggtgtctctctctttccctgaggccgaaatgtcagggaatttttcttccccacccctaggagcccagtaaatggagaatatttcagaaggatttgcacagggtcccggcttctgctatttatgagctccatggattcttggctcaggcttgtgatcagctcacctgctccagaatcacttcccatcttagcttctgggctaagacacctcaaaaccagcaaaggaaagtcctcactggtcaacacgtccatcccaac

SEQ ID NO: 347353 - DNA, 471 bp, Homo sapiens
aacgaggaattcaaactcgtagctgcctcaatattgaactttctaaagtttaattctttttaattaaaaaatattcatttgggttcaatatgtatggatctccagggcagaaatgtctctccaaaaagtgaaccactctgaaaatcaccgtcatttgggaaagggtgatgccccagctgtcttctgaaaaatagcagaggcttccgctcagtggggtgtctctctctttccctgaggccgaaatgtcagggaatttttcttccccacccctaggagcccagtaaatggagaatatttcagaaggatttgcacagggtccyggcttctgctatttatgagctccatggattcttggctcaggcttgtgatcagctcacctgctccagaatcacttcccatcttagcttctgggctaagacacctcaaaaccagcaaaggaaagtcctcactggtcaacacgtccatcccaac

SEQ ID NO: 347354 - DNA, 506 bp, Homo sapiens
tatcatttgctactagatagattaattatctccagttgtaggagtggatacatctttaatggtatattttgggttattgtcttatttttgatgcagtattctataaataatttattaaacctggcatccttgggtgagcatagatttttcaactttggygttatattgtgtttgcttttaaaaactgcttctgaggccaggtatggtggctcttgcccatacccagcactttgggaggccaagatgggtggattacctcaggtcaggagttcaagaccagcctggtcaacatggcaaaaccatgtctctactaaaaacacaaaattagccaggcatggtggtgcgtgcttgtagtcctaaccactcgagaggctgaggcaagagaatcacctgaacctgggaggcaaaagttgctaggttgctgtgagccaaattcgcaccattgccctccagcctgggtgaaaagagcaaaactctgtctcaaaaaaaaaaaaaaccaccaaaaa

SEQ ID NO: 347355 - DNA, 522 bp, Homo sapiens
agtgtatatgtaaaatacttttatttctaatacataattttatagattaaatttaatatattaagcaaatacttttatttctaatacataattttatagattaaatttaatatattaagcaaaaatatatgtaacatatataacatataacatcatttatataatatataacttaatgtaaataagtatataaaattgatattatatttgttaatacataattatacatatatacygtgtaaaaataaaattacatattgtatatgcataattatatttctataagtacaattatatactatgtataattatgtataaaataattgtataataaaattatataataaattttgaaacgttataaattattatacatagtattttattgtattaaatttagaaatgcgttatatgtaataaaattttattataataaatgtagattatataaaatcttatttataataaattaccttatgtataattataatatgagaaaataattacatatcattgtattat

SEQ ID NO: 347356 - DNA, 522 bp, Homo sapiens
agtgtatatgtaaaatacttttatttctaatacataattttatagattaaatttaatatattaagcaaatacttttatttctaatacataattttatagattaaatttaatatattaagcaaaaatatatgtaacatatataacatataacatcatttatataatatataacttaatgtaaataagtatataaaattgatattatatttgttaatacataattatacatatatactgtgtaaaaataaaattacatattgtatatgcataattatatttctataagtacaattatatactatgtataattatgtataaaataattgtataataaaattatataataaattttgaaaygttataaattattatacatagtattttattgtattaaatttagaaatgcgttatatgtaataaaattttattataataaatgtagattatataaaatcttatttataataaattaccttatgtataattataatatgagaaaataattacatatcattgtattat

SEQ ID NO: 347357 - DNA, 522 bp, Homo sapiens
agtgtatatgtaaaatacttttatttctaatacataattttatagattaaatttaatatattaagcaaatacttttatttctaatacataattttatagattaaatttaatatattaagcaaaaatatatgtaacatatataacatataacatcatttatataatatataacttaatgtaaataagtatataaaattgatattatatttgttaatacataattatacatatatactgtgtaaaaataaaattacatattgtatatgcataattatatttctataagtacaattatatactatgtataattatgtataaaataattgtataataaaattatataataaattttgaaacgttataaattattatacatagtattttattgtattaaatttagaaatgygttatatgtaataaaattttattataataaatgtagattatataaaatcttatttataataaattaccttatgtataattataatatgagaaaataattacatatcattgtattat

SEQ ID NO: 347358 - DNA, 522 bp, Homo sapiens
agtgtatatgtaaaatacttttatttctaatacataattttatagattaaatttaatatattaagcaaatacttttatttctaatacataattttatagattaaatttaatatattaagcaaaaatatatgtaacatatataacatataacatcatttatataatatataacttaatgtaaataagtatataaaattgatattatatttgttaatacataattatacatatatactgtgtaaaaataaaattacatattgtatatgcataattatatttctataagtacaattatatactatgtataattatgtataaaataattgtataataaaattatataataaattttgaaacgttataaattattatacatagtattttattgtattaaatttagaaatgcgttatatgtaataaaatkttattataataaatgtagattatataaaatcttatttataataaattaccttatgtataattataatatgagaaaataattacatatcattgtattat

SEQ ID NO: 347359 - DNA, 555 bp, Homo sapiens
tcacatttgttgcacaggagtttttgcctctctgagctttggttttcttattgtaaaatagggattaaaatgagctaacatataacacagggctctgaaaaaacctctgaagcatcaccctaaaccaaattattattaatgtaagaaaacacagtgcacttggtagtaaaaggattcktttctaggtagtttttctcccaggaaacgaaacaaacctttagtctatattgcttcctgtatctgtacctactagctacaggaaaagcagacgtatataaatctctctattgcattccttagctgatgtgtacttctcgtacatatggattgcataagccttcatttattcatttaacaaatgctaattgagtaccctttgtacctttcacatgtcagacactgtactagttattttgggcacattaggaaaaaaaaatccttgcccttttgaagcttagtgttccttctgggaatagaaggagggtgatggaaggaagcaagagatcgtaaataataaataatgaaaataactgaaatgtgccatgtattagaaga

SEQ ID NO: 347360 - DNA, 580 bp, Homo sapiens
ctaggaagcttgtctttcctgtttgggtgtgcagcttagagaggaaatcacaggaagtagtaaggtaggaggggatagtagcaaagttaattatcagtttgtagataatcactttacatttttattctttattcaattagcgccacttttrgtattaaaaatataaaacttgcaagcataaatgcatggaaaagagtgaaaatagttttgggcagagaatctttaggaatttatcttattacaccatgtgaaaagctgcttctagccttccacctctacactgtcataacagacatccagatgaggaatcaggaagagaatagagctaccgttgctgttgctgagagaatgcataacgaaattgattttcttgtctctgtgaaatttcacaaggctatacgttgagactttgcggcccactttatatctgtaaacttgtgccagtgagtgtaacctgacactatataaataggtgggtaacctggcttatttaagtttgtggcgtgtgagttcaagtaaattcttttgtctttggccagaataattctctttttccatcataagtagtcattcataaacg

SEQ ID NO: 347361 - DNA, 581 bp, Homo sapiens
aagggtatccctggacctgggccacaagcgtccagagcgctcccgggaggcgtggctttggcaggagggtcgctggcctgggtgacccagcagggggagtcctcccacctcctgcctgggcctctggtgggaaactccatgggaagccaacatggaaaggaacccattggccagttctgacagctgcttctccagcacataggtgaagtgcggagagtggatatgaagagaaaaccggaagtgcaaagaccggaagtgcgaagaagatcagaggtaaagagaaaatcccaagtgggcagccctgaagtgaacaaggcctgaatctcctctgaggggtcactgtatccgtggtctggagaatggagagggcggatgtgaagtcaggagcagggagaggtcctgtgctggaggacagggagaaacttgagatttttttttttttttagatagagtttcactcttgttgcccaggctggagtgcaatggcaccatctcggctcactgcaacctccgtcmcccgggtttgagagattctcctgactcagcctcccaagtatctgggattacaggcacgcgccaac

SEQ ID NO: 347362 - DNA, 615 bp, Homo sapiens
caaatgagtgtacaaatactgcatctgtgcacttgccccttctaccgtagaatgatcagagtcacttccaaggtcctccagtagcaggcaccatgtggttactttgcatacacaacttatttgatctgtataaccctgtgaggtaaatactattatcacttgcatcttgctgatgaaaaaattgaagcccagaaaagttaaccaacttcctcaaagtcacacagtgaggaagaggaccagaatttggacttggcattctgccaccatcacatggaatgtccasatgcccactgtcattggtgactagggtgtccccctcctgttgtgccctggcacatgacagattattgtgtgatgtgaaagggacatatttgtgaatctggattgttctatttgaaccacttttgggttgatgttatttggaaaaacttcgtggggagggagcagtttctgcagagatgccaaaaatatggtactgtcactgtttcgaattgccagatgatatttccatttggaggtatttttcactcctcacatgaatcaataagagaaataggactaacttagcccaaggaataataatagcccatgtatgtattaggcagcattactgtt

SEQ ID NO: 347363 - DNA, 598 bp, Homo sapiens
gaatcaataagagaaataggactaacttagcccaaggaataataatagcccatgtatgtattaggcagcattactgttggggaatcaactaaaactgaaattctactttctcctaaagagatttattatacatagagtccttataattgtacctctttgtgctggttttctcatctgggtctgccctagctcctatatgcctgtccttggccycattcctccctgtaggaaaacctcatcaggtgcaaagggcactggaagggcattcactaggatgccacacagggttcaatccagccactcgccagcttctccctgtgcggtgccagccatgggtcctgtgacctcccttgaagcctgcccagtgctgctcactgtctcgagagccccagacctatgtgtgcagctctcagggcatctggaagagcctcctagggaaggcaacacaagggcgcaacaaggaggtgtgagtggggtctgggatttgcagtgttttcctgaaagagctggacttttacaagggaggaaaaatgttctctgagtttcccaaacatctgtttttgacttagtttcaatggaggtgtttttgatggcggct

SEQ ID NO: 347364 - DNA, 539 bp, Homo sapiens
ggtaggaaagagaataaatcagaaagtgagagaaatactcyataggattggagtttaatgaattgtggtatgcacttgctagagtattttgcctatttaattttgactagagacctataactttattatgtgaataacttatactttaggccattacctagcacagctaaattaaatatttatttcaagatgagatttgttggatgaatatttaatgataggagctttattactgaaaattgttattatgtcatttttgatcaacactgatcttttagctttgtatctattactttttcatttattttggtatctataagaaagatgtattttatttttattttcacacattgcgtattaaactgaacattttatttgttcctactgtctattttttattttcgtagagatggagtctccccatcttgcccaggctggtctcaaactcccagcctcaataaattctcccactttagcctcccaaagagttgggattagagatgtgagtcgctgtgcaaggccctcagatcttcctattc

SEQ ID NO: 347365 - DNA, 539 bp, Homo sapiens
ggtaggaaagagaataaatcagaaagtgagagaaatactctataggattggagtttaatgaattgtggtatgcacttgctagagtattttgcctatttaattttgactagagacctataactttattatgtgaataacttatactttargccattacctagcacagctaaattaaatatttatttcaagatgagatttgttggatgaatatttaatgataggagctttattactgaaaattgttattatgtcatttttgatcaacactgatcttttagctttgtatctattactttttcatttattttggtatctataagaaagatgtattttatttttattttcacacattgcgtattaaactgaacattttatttgttcctactgtctattttttattttcgtagagatggagtctccccatcttgcccaggctggtctcaaactcccagcctcaataaattctcccactttagcctcccaaagagttgggattagagatgtgagtcgctgtgcaaggccctcagatcttcctattc

SEQ ID NO: 347366 - DNA, 605 bp, Homo sapiens
tgaaactgtggcccaaagtgagaacatacatccctgttttctcgctggagtgttgccttttccaaaaccacccatgaccaccccacccctatcctgtgcccctaaaaacctcaagctctactggcagagagaagagaagcagctggatgtcagagactaccattgaacgttggaaagaagtgtcttgacttcagagggatagctgtctgacagtgtagctttggagaggagtccggctggggatggctggactctgggggaagattactcttccgctctgtcccctttcagctccccttcccaccgagagccactttcattggcaataaaatctccttcattgaccatctccgatttgtttgtgggacytctttcctcctgggcactggacaagaatgtgtgtgtgggtgcaaaaggctgtaatactgaccttccactgagctgttaatacttaagctgtccgcagatgacaaagctaaaagagcactggatgtaacactccttctggggcttcaggggtcatgggttacccactagatgctgctgcagggctggtacagagttttttcctgccagcgcccaaaagcattcaccctggctcctgg

SEQ ID NO: 347367 - DNA, 572 bp, Homo sapiens
ggtgctcaccataggcctgggatgtgtttcttttttgcgcttgtgaaataattattataagtcccttcctttgcacttgagggaactgttacccaaagaggtggtgtaatcaaattctttgctgttggggctcagatgtagamccagatcagttcaattccaaagctcagatttttctacttgaagctgtactgttgtttctcattcatcacatggatgggcttatgctgagagcacaaggtgatagataaaaaaaaaaaaaaaaaaaagaatgagatcgtcctgaaaaggaatgtgctaagcatgtaaatgtctctataataacatagtagagaaagtataaaattatttactcttcccctccagaaaaattcatggtggttgaaacgagaaagagaatgaatttgattgaaagattaaaaatgtttcttggagacagtggtttcaaaggtgggataggatcacaggaagaaaggacaaatgctggaggaagtaacagcaacagccaagctacaaagaaagcaatgggggatgacttaggggacaggtcctatgttctccattttggctgc

SEQ ID NO: 347368 - DNA, 527 bp, Homo sapiens
tatttgattaacccatattgtccttacaaggtcaaggcagaagagtggtcaaatctgccttcttctttattttattatagtaatgtagccgtaagtgagtggttacttttatgacaatttccattttctgggaattttaataagtagcattcatttatttcttgattataaatgtaacctaggcttttttgcagaaaatttataacccaggcaaaagaccaacattaaaaaaataaaatgaccaattatctaaccagccattcttaagtactattaattttttagtgttaagatgcagtagtttctgctttatacaatatgtgtgactrtatgagtacattcatttttatacatttaaaactgtgatcacaaaatttatttatactatatggttaatattctactcattatagatgataatcttaataatattcttctgacatgaatggctctatcctatttgtcataacgtaacagtcctttattgtgcatcacctgactaacttccagtctttctctaaacctgc

SEQ ID NO: 347369 - DNA, 459 bp, Homo sapiens
cagcattcattatgtcagttgatcctcatcactgcctaatatgaagtagaatcagtgtaacaatctacactccacygatgagagcacactggctcagagagacgaaacaacatggtcaagatcgtattgctaatacatgttgcagtctggccaagtgccctggttacctgatttctagtttggaatgctttctactgtggccctctgctataccagtggggcataaggaaaatgacagagtcctcatttaattccctgccccagagtaatggatcactagcttaatagactgagttttattcaagttgacaccagcttggatctctagcccctcactgggatcaaagagatagtcttcttctgatcgtctttgtttctctccaaagaaggttttgaagtaactaggggaagatgactactctagatgcttggtcttagcccatggttacatttgtggtg

SEQ ID NO: 347370 - DNA, 592 bp, Homo sapiens
taacaaatatataagcaatgataagattttgggattagtgctcaagttgataatgtgactgcttttaagaacacattgatataaatgtacaagttctgrtatgtttgctttcaaaaatacgcaaataaaccaccctctatactttccttggctttactataaattcatgaacacacagcaggcaatagagttgtgatatgaccatgactggcagcaaaccactctccttcccttttacacactgtcagaatgagtttttatgaatttcctcctgcatattgtccttgatattatttactgtaactaggatttatctcaataataatgcgaggagaaaatgaaggagcttgtgtagtataacatattctgggtcctatagtcccacaggaatggccttgactaggggcatggttttcttctgggggccagtataaaatcagaagttgtgggttgaaccatgacactgtaatgagaaagttgtgaggagaaagcgtgagaactattgctgtaatgtgggcagattattcttgcgcaatgccaagcacttaattccatgcacacgctatcttccttctcatattgaggaaagata

SEQ ID NO: 347371 - DNA, 605 bp, Homo sapiens
gattcgatttgcaattttcaaaacactgtgtggaagtttagcccagtgtggcaagcacacgcctgyagtcccagctacccaggaggctgaggttggaggattgtttgagcctgggcagtcaaggctgcagtgaaccaagatagtgccaccgcactccagcctgagcaacagagcgagaccccatctcaataaaaataaaataaaataaataaataaataaagcaagcaagcaagcactgtgtgagctacaatatgaaggaaccaaaacaaacaaaaatcataatgcaaacaaacaaacccaaagcacgtctgagggtctggttttggctgcccgtttgcaagttctgagctggttcctcagtttaccaaagaggagatggaggcccagaagtctgtagtgaattccctgcagccccatagcgggccagtgaaatgtgaggttgtttcctcattgctctgagagttggcattgagtgaagatgagtccccaacccctcctctctgggggatgaagtgttagaaatggctggcagggaggctgaggttggagcaacactgacctttggaattatgggcaggaaatgtgtggggcttttttttttttt

SEQ ID NO: 347372 - DNA, 605 bp, Homo sapiens
gattcgatttgcaattttcaaaacactgtgtggaagtttagcccagtgtggcaagcacacgcctgtagtcccagctacccaggaggctgaggtyggaggattgtttgagcctgggcagtcaaggctgcagtgaaccaagatagtgccaccgcactccagcctgagcaacagagcgagaccccatctcaataaaaataaaataaaataaataaataaataaagcaagcaagcaagcactgtgtgagctacaatatgaaggaaccaaaacaaacaaaaatcataatgcaaacaaacaaacccaaagcacgtctgagggtctggttttggctgcccgtttgcaagttctgagctggttcctcagtttaccaaagaggagatggaggcccagaagtctgtagtgaattccctgcagccccatagcgggccagtgaaatgtgaggttgtttcctcattgctctgagagttggcattgagtgaagatgagtccccaacccctcctctctgggggatgaagtgttagaaatggctggcagggaggctgaggttggagcaacactgacctttggaattatgggcaggaaatgtgtggggcttttttttttttt

SEQ ID NO: 347373 - DNA, 605 bp, Homo sapiens
gattcgatttgcaattttcaaaacactgtgtggaagtttagcccagtgtggcaagcacacgcctgtagtcccagctacccaggaggctgaggttggaggattgtttgagcctgggcrgtcaaggctgcagtgaaccaagatagtgccaccgcactccagcctgagcaacagagcgagaccccatctcaataaaaataaaataaaataaataaataaataaagcaagcaagcaagcactgtgtgagctacaatatgaaggaaccaaaacaaacaaaaatcataatgcaaacaaacaaacccaaagcacgtctgagggtctggttttggctgcccgtttgcaagttctgagctggttcctcagtttaccaaagaggagatggaggcccagaagtctgtagtgaattccctgcagccccatagcgggccagtgaaatgtgaggttgtttcctcattgctctgagagttggcattgagtgaagatgagtccccaacccctcctctctgggggatgaagtgttagaaatggctggcagggaggctgaggttggagcaacactgacctttggaattatgggcaggaaatgtgtggggcttttttttttttt

SEQ ID NO: 347374 - DNA, 605 bp, Homo sapiens
gattcgatttgcaattttcaaaacactgtgtggaagtttagcccagtgtggcaagcacacgcctgtagtcccagctacccaggaggctgaggttggaggattgtttgagcctgggcagtcaaggctgcagtgaaccaagatagtgccaccgcactccagcctgagcaacagagcgagaccccatctcaataaaaataaaataaaataaataaataaataaagcaagcaagcaagcactgtgtgagctacaatatgaaggaaccaaaacaaacaaaaatcataatgcaaacaaacaaacccaaagcacgtctgagggtctggttttggctgcccgtttgcaagttctgagctggttcctcagtttaccaaagaggagatggaggcccagaagtctgtagtgaattccctgcagccccatagcgggccagtgaaatgtgaggttgtttcctcattgctctgagagttggcattgagtgaagatgagtccccaacccctcctctctgggggatgaagtgktagaaatggctggcagggaggctgaggttggagcaacactgacctttggaattatgggcaggaaatgtgtggggcttttttttttttt

SEQ ID NO: 347375 - DNA, 577 bp, Homo sapiens
taattagtaaaataaacatctgaaagctgtagataatttgtattgcactacaggctttgtggatgttttaccgcctacgctcctctaattagggaatagggctgataaatgctgaagtggagagagatccctgagacacagagccaaatgctccarctggactaaaattaccaagaagatcaattaaaagaaggaagatgaccagtgtagcaaagagcatcagggtggggtcaaatttgagacagatggcaaatgaggcaacttcaagagagacaggctgtcccagagtttttttattgtattcctgatgaacaagactaaggagaaatctgaacacttaacaagaactgtgcaaaaagatctggcaccaaatgcagggtgggataaagagagacactggccttggacagcccagacctggttcactggctcaggcagttctgccaatgaggtttccctttttagggatggcagacaagagaccactgcagtggtaaaggaagtaatatttttaaaaatgtataaattatgaagagctatataagaagggctattatcaatgacagaattgctgtgc

SEQ ID NO: 347376 - DNA, 464 bp, Homo sapiens
aaaaatgattccaaagttaatcagaatcttctcttctccctcgatttctgcaatctcatgtcttcctggctccctcacacttctctttctagtctttctcagactaacatcctagcctttttccacaaataatctcacccaatccaaaggctcctaaaattctatttttagtctgagactaaatttgtattgtggtctagtctagtcttcagacttcttttcagatatcctggccygattctggttgccagaaaatggctgatctgaatgttcctggatacctcaaacttcacatgtgaataaacggaatttattactttcccactatacttcctgtttcttctacattttcatactcaggttaatgttatcattgcctgtcccagtcacccaagtcccaaaactgggagatggctgaaatctctcctataacatctccatctccgtcactgaattctataaat

SEQ ID NO: 347377 - DNA, 464 bp, Homo sapiens
aaaaatgattccaaagttaatcagaatcttctcttctccctcgatttctgcaatctcatgtcttcctggctccctcacacttctctttctagtctttctcagactaacatcctagcctttttccacaaataatctcacccaatccaaaggctcctaaaattctatttttagtctgagactaaatttgtattgtggtctagtctagtcttcagacttcttttcagatatcctggcctgattctggttgccagaaaatggcygatctgaatgttcctggatacctcaaacttcacatgtgaataaacggaatttattactttcccactatacttcctgtttcttctacattttcatactcaggttaatgttatcattgcctgtcccagtcacccaagtcccaaaactgggagatggctgaaatctctcctataacatctccatctccgtcactgaattctataaat

SEQ ID NO: 347378 - DNA, 565 bp, Homo sapiens
tttcctgccccacactttgttggttatattaacatcatggaataaatttgaacaggatatccatttattcatttctagaacatgcacttttargcttaccactggttatcctttcttaaatccttttgacgagcttctgtccttacatcttttcagaaacagtttttcattagaaaaccaagagccgtatcatcatatctggaaaatttggctttccaggtacatcataaactgggataaaacaaggactagaacttagtgggccttctgccatctaatgataagggccctcatgggatagtggtgaagactgaatgacttcacttattcagatcaccctgaagactgcatggcatgtgccatatttcagttttaatattaacttttatattcagacatctgtgaaattagtatgtgtcttagaagtaatgaatgacattgaaattataattggcatttttgacttttacatttgatggaaaatgttagtaaactttcagtaaatgttatctcctcctctttctccttcccctcctcctgctcttcttccaactcctgctttaag

SEQ ID NO: 347379 - DNA, 602 bp, Homo sapiens
gatcttttctttcttggccacccccatcgtcatgttctcatgattacatagggtgggaatagaggtgaggatgctaaggtgtctgttctttcaggaatagtaaactttttctgtgttctctcctattctcccacccttcctatagaaatatccctctttccatagctgtacagcaaagggaacatagccttgcttagtattcaaagagtacagcagatattcaaactgttgtcctgggacaagaagaacttttaaacaatctaaagtgtttcctgccccacactttgttggttatattaacatcatggaataaatttgaacaggatatccatttattcatttctagaacatgcacttttaggcttaccactggttatcctttcttaaatccttttgacgagyttctgtccttacatcttttcagaaacagtttttcattagaaaaccaagagccgtatcatcatatctggaaaatttggctttccaggtacatcataaactgggataaaacaaggactagaacttagtgggccttctgccatctaatgataagggccctcatgggatagtggtgaagactgaatgacttcacttattcagat

SEQ ID NO: 347380 - DNA, 602 bp, Homo sapiens
gatcttttctttcttggccacccccatcgtcatgttctcatgattacatagggtgggaatagaggtgaggatgctaaggtgtctgttctttcaggaatagtaaactttttctgtgttctctcctattctcccacccttcctatagaaatatccctctttccatagctgtacagcaaagggaacatagccttgcttagtattcaaagagtacagcagatattcaaactgttgtcctgggacaagaagaacttttaaacaatctaaagtgtttcctgccccacactttgttggttatattaacatcatggaataaatttgaacaggatatccatttattcatttctagaacatgcacttttaggcttaccactggttatcctttcttaaatccttttgacgagcttctgtccttacatcttttcagaaacagtttttcattagaaaaccaagagccgtatcatcatatctggaaaatttggctttccaggtacatcataawctgggataaaacaaggactagaacttagtgggccttctgccatctaatgataagggccctcatgggatagtggtgaagactgaatgacttcacttattcagat

SEQ ID NO: 347381 - DNA, 607 bp, Homo sapiens
atttttgacttttacatttgatggaaaatgttagtaaactttcagtaaatgttatctcctcctctttctccttcccctcctcctgctcttcttccaactcctgctttaagtcctaagactaacagtcctcatctggcatctgagcatgagaaatactcagaatatcctttccccaggttgcatggccaggttattacttttctccataagctcaggcaataatggtcactgatcatttaatcacccttaatagagaaggtaattctcatccaggtacctatacaacagatattgtgagtctactatgtgccataaactctgctctatatgagacatatgcctggccctcaagcaactcacaatggaacaggaagaaaccacagaaaacaaagaaaaacagcggactatataccacacctcattcccacctcagactstcatcaatatcttgtctacctcagggcagaacttgacatttgtcttgtaaacttaaaaagcaaacccaactccacaatgatgaacatttttcaggtagtgtgagaagaatgttaaataattgtatactatatggcaaaatgcaacaagaatcccagctagacctctctaa

SEQ ID NO: 347382 - DNA, 580 bp, Homo sapiens
caaccatttccccacgaatctctcccaattctctgtctccaactcatttttttttcgaggatgggtatctactctcaatggcacttccatgccaacacacacacacacacacacacacccccacactaaccccttcccctgtwtctttcccttttctaatacaaacactaatagttccttttcagattttacaaattatttgcatcatcacagtgatcaactctcttcccacctttctacttcttagcattcacccttctcagtgcagtagaggattctaaccaggcacaagtgtgtgtgtgcatgtgtctgtctgtgagtgtgtgtgtgggggggagagagagagtgagagagagaaagagagagaaggacagaaaaatacaagaaaatataataagtgaaaatataacaggtggacacaggataatatgagaccaaaactaacaaaagcaacccctcatcctaagcccagaaaagagatcaagttacagcaatggttctcaacactttagaatgtctggagacatttttaattgtcacaattagagaggtgatataatacgaaactaacatctagcaa

SEQ ID NO: 347383 - DNA, 580 bp, Homo sapiens
caaccatttccccacgaatctctcccaattctctgtctccaactcatttttttttcgaggatgggtatctactctcaatggcacttccatgccaacacacacacacacacacacacacccccacactaaccccttcccctgtatytttcccttttctaatacaaacactaatagttccttttcagattttacaaattatttgcatcatcacagtgatcaactctcttcccacctttctacttcttagcattcacccttctcagtgcagtagaggattctaaccaggcacaagtgtgtgtgtgcatgtgtctgtctgtgagtgtgtgtgtgggggggagagagagagtgagagagagaaagagagagaaggacagaaaaatacaagaaaatataataagtgaaaatataacaggtggacacaggataatatgagaccaaaactaacaaaagcaacccctcatcctaagcccagaaaagagatcaagttacagcaatggttctcaacactttagaatgtctggagacatttttaattgtcacaattagagaggtgatataatacgaaactaacatctagcaa

SEQ ID NO: 347384 - DNA, 580 bp, Homo sapiens
caaccatttccccacgaatctctcccaattctctgtctccaactcatttttttttcgaggatgggtatctactctcaatggcacttccatgccaacacacacacacacacacacacacccccacactaaccccttcccctgtatctttcccttttctaatacaaacactaatagttccttttcagattttacaaattatttgcatcatcacagtgatcaactctcttcccacctttctacttcttagcattcacccttctcagtgcagtagaggattctaaccaggcacaagtgtgtgtgtgcatgtgtstgtctgtgagtgtgtgtgtgggggggagagagagagtgagagagagaaagagagagaaggacagaaaaatacaagaaaatataataagtgaaaatataacaggtggacacaggataatatgagaccaaaactaacaaaagcaacccctcatcctaagcccagaaaagagatcaagttacagcaatggttctcaacactttagaatgtctggagacatttttaattgtcacaattagagaggtgatataatacgaaactaacatctagcaa

SEQ ID NO: 347385 - DNA, 608 bp, Homo sapiens
attaagaatttccctgcaaataagtgaatgaagaagattccagcagaaaacctttatggtaggattttagatgatcactttgacaagartgtgagaattattttaaacatttagagagagttaatctttatttagcatgtagaaagtcattaaaaagccagatgatttacaaaaccattgtcattttaaccctgccaggaagttaagattgtaaagtaatctaatgaactaaaatccaagaggggtcaagtccctcctaagagagatgggaaccatggctattttcatctttggcagaacagagagaggaggaaaacacattcatggatgtgggtaagaaaaaaatagctgaattttaatgaacttgtggaggctgagtgtgaactgagtattagagcttaggatccttgagaaccccagacaaaagaggagtccacgcctaccctataaggtattttacacaagtcttcacaatatcctcatgtgaaagattgtgatcggggcagaactattcagaacaaactcctctgaagtgcaagcagtgtttctgctgtactttgagagtgaagcacaaaaacagagaaatattctcatactcaaaaccttac

SEQ ID NO: 347386 - DNA, 608 bp, Homo sapiens
attaagaatttccctgcaaataagtgaatgaagaagattccagcagaaaacctttatggtaggattttagatgatcactttgacaagaatgtgagaattattttaaacatttagagagagttaatctytatttagcatgtagaaagtcattaaaaagccagatgatttacaaaaccattgtcattttaaccctgccaggaagttaagattgtaaagtaatctaatgaactaaaatccaagaggggtcaagtccctcctaagagagatgggaaccatggctattttcatctttggcagaacagagagaggaggaaaacacattcatggatgtgggtaagaaaaaaatagctgaattttaatgaacttgtggaggctgagtgtgaactgagtattagagcttaggatccttgagaaccccagacaaaagaggagtccacgcctaccctataaggtattttacacaagtcttcacaatatcctcatgtgaaagattgtgatcggggcagaactattcagaacaaactcctctgaagtgcaagcagtgtttctgctgtactttgagagtgaagcacaaaaacagagaaatattctcatactcaaaaccttac

SEQ ID NO: 347387 - DNA, 568 bp, Homo sapiens
aataagtcattatacgaaaaagatacttgcacatacatgtttatagcagcacaattcatagttgcaaaaatatggaaccaacccaaatgtccatcaatcaatgagtggattaaaaaaactgtgagatatgtgtgtgtatatatacatatatatrtgtgatatatatgtatatatgtatatgtgtatatatgtatatatgtatatatgtgtatatatgtatatgtatgtatatatacacacatatatacacgtgtgatatgtatgtatatatacacacatatatacacgtgtgatatgtatgtatatatacacatatatacacgtgtgatatgtatgaatataaatacacatatatatgtgtatatacacacacacacacacacacacacacacacacacacaatggaatactactcagccataaaaaggaaagatttaatggcatttgcaacaacctggatgagattggagactattattctaagtgaagtaactcaggaatggagaaccaaatatcatatgttctcactcataagtgggagctaacctatgaggctgcaaaggcatg

SEQ ID NO: 347388 - DNA, 568 bp, Homo sapiens
aataagtcattatacgaaaaagatacttgcacatacatgtttatagcagcacaattcatagttgcaaaaatatggaaccaacccaaatgtccatcaatcaatgagtggattaaaaaaactgtgagatatgtgtgtgtatatatacatatatatatgtgatatatatgtatatatgtatatgtgtatatatgtatatatgtatatatgtgtatatatgtatatgtatgtatatatacacacatatatacacgtgtgatatgtatgtatatatacacacatatatacaygtgtgatatgtatgtatatatacacatatatacacgtgtgatatgtatgaatataaatacacatatatatgtgtatatacacacacacacacacacacacacacacacacacacaatggaatactactcagccataaaaaggaaagatttaatggcatttgcaacaacctggatgagattggagactattattctaagtgaagtaactcaggaatggagaaccaaatatcatatgttctcactcataagtgggagctaacctatgaggctgcaaaggcatg

SEQ ID NO: 347389 - DNA, 568 bp, Homo sapiens
aataagtcattatacgaaaaagatacttgcacatacatgtttatagcagcacaattcatagttgcaaaaatatggaaccaacccaaatgtccatcaatcaatgagtggattaaaaaaactgtgagatatgtgtgtgtatatatacatatatatatgtgatatatatgtatatatgtatatgtgtatatatgtatatatgtatatatgtgtatatatgtatatgtatgtatatatacacacatatatacacgtgtgatatgtatgtatatatacacacatatatacacgtgtgatatgtatgtatatatacacatatatacacgtgtgatatgtatgaatataaatacacatatatatgtgtatatacacacacacacacacacacacacacacacacacacaatggaatactactcagccataaaaaggraagatttaatggcatttgcaacaacctggatgagattggagactattattctaagtgaagtaactcaggaatggagaaccaaatatcatatgttctcactcataagtgggagctaacctatgaggctgcaaaggcatg

SEQ ID NO: 347390 - DNA, 606 bp, Homo sapiens
actgggtgagttaatagatgtaaaagtacttagtacagtactctacaaatagtaagtgcccaataaatgttaactgttattattatgtattctgtccttcactatgttaggccctgggatgtagtggtgacaggcaaggctgctgctcttgtggttcttacatgaaacaagggaacagggaaataaacaaaataaatgcagactatgaaaagtgctaaagaataaataaatagagtaatataatagaagaaaatgcctctctgaggaggtgacagttaaactgagacttgagcaatcatcaggggcacagggttcccagaagagaaaaaaataagtgcaaactccctgtaacacamaaaaaaaagagcttactgtgtccaaaaattaaaacgaaccctaaagtggtttgagaatagtaacatgggctttggttaggctggagctagggctcacctagtagagtatagaaaggcaacaccccatctcctgcaaatctattttcatccattaatttacacggcatctgaagaacatgctgaattaaagcctgttaacccttgggatacagtcatcaaatgtatcagatatattgagataaccccaaca

SEQ ID NO: 347391 - DNA, 649 bp, Homo sapiens
cttcatttacaaatggttaactttgtgtttaaatttcatctcccagagaagagctattaacatccacttggttgtcagggcccctcttccattagcaggtcattaataatcaagttagtaataacaggctgacactgtattttgtagaattcaatatgtacaaccaggctcatagtaactcattgataagtgcagatttcattcattttgagtaaaatagattttttaaaatgtcgatatgattaggcggtgagaattggcaaaattgaaccagtagaaaatctgaatgaatgaatgaatctgaataaactgatttttatttcctaggaataacaagtwttaagtatctattatgtgccagactttattctaagtgttttatatataacacatttactttagtgatggttaaggtaggacaggtggctaaaaaaggactccctaatatattctattaatgcaatgaagcctctaggagtccttaatctttgccaaggatcacaagctcacatgcctccagaatctgggccactcacataaataaatgaacagagctgagtatgaaacaataggaaagaaaggagactgtgtagaacaggagagttcaggctccaactggtcattgccttgctggaatgctatgttgtac

SEQ ID NO: 347392 - DNA, 543 bp, Homo sapiens
gatttttggatggaaagaacatgaacacttttaagcttccatctagaacctaagaagctaaagcaaaacaaaacaaaaytgcacatcgctgaggcttgaatggcagtggcatagtaaatgtgaaagcagctttattggggtatagtttatataccataaaattcactctttgcacatgcacaattcaaaaattcgtagtaaatttgtagagttgtgcagcataccccaaagtccaatcttagaacatttctaccaatctcaaagttctctcatgctcgtttgcaatcagtcccagcttcaacctctagtcccagggaaacactgctttctttctctatagatttgtattttctagaaattttgtttaaatggaataatacaatatgtagtcttttgagtctagcttcttttgctttgcataatatttttgaggttcattgatgtagcatgtatcagtagttcatttctttgggttgccaaatagtattacattgttcacacataccatattctgtttatgaattttgattgcattggatatag

SEQ ID NO: 347393 - DNA, 543 bp, Homo sapiens
gatttttggatggaaagaacatgaacacttttaagcttccatctagaacctaagaagctaaagcaaaacaaaacaaaattgcacatcgctgaggcttgaatggcagtggcatagtaaatgtgaaagcagctttattggggtatagtttatataccataaaattcactctttgcacatgcacaattcaaaaattcgtagtaaatttgtagagttgtgcagcataccccaaagtccaatcttagaacatttctaccaatctcaaagttctctcatgctcgtttgcaatcagtcccagcttcaacctctagtcccagggaaacactgctttctttctctatagatttgtattttctagaaattttgtttaaatgkaataatacaatatgtagtcttttgagtctagcttcttttgctttgcataatatttttgaggttcattgatgtagcatgtatcagtagttcatttctttgggttgccaaatagtattacattgttcacacataccatattctgtttatgaattttgattgcattggatatag

SEQ ID NO: 347394 - DNA, 554 bp, Homo sapiens
aagagtttccttctgggacttcctgttctattccattgatctgtctatatgtttatattgcaatacctgtcccatacctgtcaaggtaagctgccttgattagtgttactttatagtaagttttgaaatcaggaagtgaaaagtcatccacrtgactatcacaaatctgctgttgatcttctctagctaattttcatttaagttattttacttttcaaatctagaaattccatttgttatagtttttatatctctgttgagattccccccttttgtttttttaatcttctaactttacaagttttagatttatagaacatttgcaagaatactgtagagctctcatgtagcccaaaccaaattttctattgttaacctattgtatttgtaacaactaatgaaccagttttgatccattattattaaaatgcatactttactcagatttctttagtttttacctaatgtcctttctcagttccagggccccatccaggatattacattatatttagtcattatttctcctcagcctcctctagactgtgacaaat

SEQ ID NO: 347395 - DNA, 563 bp, Homo sapiens
agtgttactttatagtaagttttgaaatcaggaagtgaaaagtcatccacgtgactatcacaaatctgytgttgatcttctctagctaattttcatttaagttattttacttttcaaatctagaaattccatttgttatagtttttatatctctgttgagattccccccttttgtttttttaatcttctaactttacaagttttagatttatagaacatttgcaagaatactgtagagctctcatgtagcccaaaccaaattttctattgttaacctattgtatttgtaacaactaatgaaccagttttgatccattattattaaaatgcatactttactcagatttctttagtttttacctaatgtcctttctcagttccagggccccatccaggatattacattatatttagtcattatttctcctcagcctcctctagactgtgacaaattctcaggctttttgtgattttaatgacccttgacggttttttaaagtaatgattaggtattttgtagactgtcctttgattttaatttgtctgatgtttttctcatggtt

SEQ ID NO: 347396 - DNA, 563 bp, Homo sapiens
agtgttactttatagtaagttttgaaatcaggaagtgaaaagtcatccacgtgactatcacaaatctgctgttgatcttcyctagctaattttcatttaagttattttacttttcaaatctagaaattccatttgttatagtttttatatctctgttgagattccccccttttgtttttttaatcttctaactttacaagttttagatttatagaacatttgcaagaatactgtagagctctcatgtagcccaaaccaaattttctattgttaacctattgtatttgtaacaactaatgaaccagttttgatccattattattaaaatgcatactttactcagatttctttagtttttacctaatgtcctttctcagttccagggccccatccaggatattacattatatttagtcattatttctcctcagcctcctctagactgtgacaaattctcaggctttttgtgattttaatgacccttgacggttttttaaagtaatgattaggtattttgtagactgtcctttgattttaatttgtctgatgtttttctcatggtt

SEQ ID NO: 347397 - DNA, 563 bp, Homo sapiens
agtgttactttatagtaagttttgaaatcaggaagtgaaaagtcatccacgtgactatcacaaatctgctgttgatcttctytagctaattttcatttaagttattttacttttcaaatctagaaattccatttgttatagtttttatatctctgttgagattccccccttttgtttttttaatcttctaactttacaagttttagatttatagaacatttgcaagaatactgtagagctctcatgtagcccaaaccaaattttctattgttaacctattgtatttgtaacaactaatgaaccagttttgatccattattattaaaatgcatactttactcagatttctttagtttttacctaatgtcctttctcagttccagggccccatccaggatattacattatatttagtcattatttctcctcagcctcctctagactgtgacaaattctcaggctttttgtgattttaatgacccttgacggttttttaaagtaatgattaggtattttgtagactgtcctttgattttaatttgtctgatgtttttctcatggtt

SEQ ID NO: 347398 - DNA, 618 bp, Homo sapiens
attttcatttaagttattttacttttcaaatctagaaattccatttgttatagtttttatatctctgttgagattccccccttttgtttttttaatcttctaactttacaarttttagatttatagaacatttgcaagaatactgtagagctctcatgtagcccaaaccaaattttctattgttaacctattgtatttgtaacaactaatgaaccagttttgatccattattattaaaatgcatactttactcagatttctttagtttttacctaatgtcctttctcagttccagggccccatccaggatattacattatatttagtcattatttctcctcagcctcctctagactgtgacaaattctcaggctttttgtgattttaatgacccttgacggttttttaaagtaatgattaggtattttgtagactgtcctttgattttaatttgtctgatgtttttctcatggttagggttagactgaaattatgggcttttgggagtaagactgcagaggtataagtactatcctcatcacataatatccagggcacatactattaacccgacttatcacagatgacattaaccttgatcatctggctttagaagta

SEQ ID NO: 347399 - DNA, 618 bp, Homo sapiens
attttcatttaagttattttacttttcaaatctagaaattccatttgttatagtttttatatctctgttgagattccccccttttgtttttttaatcttctaactttacaagttttagatttatagaacatttgcaagaatactgtagagctctcatgtagcccaaaccaaattttctattgttaacctattgtatttgtaacaactaatgaaccagttttgatccattattattaaaatgcatactttactcagatttctttagtttttacctaatgtcctttctcagttccagggccccatccaggatattacattatatttagtcattatttctcctcagcctcctctagactgtgacaaattctcaggctttttgtgattttaatgacccttgacggttttttaaagtaatgattaggtattttgtagactgtcctttgattttaatttgtctgatgtttttctcatggttagggttagactgaaattatgggcttttgggaktaagactgcagaggtataagtactatcctcatcacataatatccagggcacatactattaacccgacttatcacagatgacattaaccttgatcatctggctttagaagta

SEQ ID NO: 347400 - DNA, 618 bp, Homo sapiens
attttcatttaagttattttacttttcaaatctagaaattccatttgttatagtttttatatctctgttgagattccccccttttgtttttttaatcttctaactttacaagttttagatttatagaacatttgcaagaatactgtagagctctcatgtagcccaaaccaaattttctattgttaacctattgtatttgtaacaactaatgaaccagttttgatccattattattaaaatgcatactttactcagatttctttagtttttacctaatgtcctttctcagttccagggccccatccaggatattacattatatttagtcattatttctcctcagcctcctctagactgtgacaaattctcaggctttttgtgattttaatgacccttgacggttttttaaagtaatgattaggtattttgtagactgtcctttgattttaatttgtctgatgtttttctcatggttagggttagactgaaattatgggcttttgggagtaagactgcagaggtataagtactatcctcatcacataatatccagggcacatactattaaccygacttatcacagatgacattaaccttgatcatctggctttagaagta

SEQ ID NO: 347401 - DNA, 649 bp, Homo sapiens
ggatttttagtttcaagtattatacatcactaggaggggcatagtaacatatctggggatttcacagcctgggctgatgcctcaatacgctgccagatggctccatctgagcccatcctgcccctgaggggtacaggcattgcagtttacatttcagacgctaggcaaactactcaccaggccatcagctgcagctccctttaaaacaggatttcttagtcatacttctgtcttatcctgggtttcctagaaaacagaacctaaggaagagcttgcatgctgatgctttaggggttggtgtaatcccagagaagcaaaaataaataagaaagggaagaaaaacaggaaagaagtacattactgatctggctgcaatttcacacacaagaaaactcagctagttatttagatgtgtaggatgtctccagagaggttgtcaacaatccctgtgtcttacaaaattcttyggtggcagggaagatggttgatttatctgctggttccttctttggttaaaggttgtctcatgagatactggggctttgctacctgtaccttccaggtagccactaggaagccagagttgccatgggtctggtaggtttgagtcctggagctgttgcagcactcaccaaggtgggtaatggaa

SEQ ID NO: 347402 - DNA, 582 bp, Homo sapiens
gatggtttcaacatctccatggaaacagagctcaggtccacttggtctacacatcacctttgaaaagcaaagataacaaagcaaggccagtgatttttmtcagtaaatatgagaattcaaaaatctgtttgagggagccaagccaattcaatgaggaaagaataatctttttaacaaatggtgctgggacaactagatatctacatgcaacagaacaaagctaggtttctcctcagaacaaacataagaataaaaatgtaggagtaaatctttaggaccctggattagaaaaagccttctcaaatatgacatccaaagcacaagaaacaaaagaaaagagagataaactgtacttcatgaaaataaaataattttgcttcaaaggaaaccaccaagaaagtgaacaagcaacccaaagaatgggagaaaatatttgctattacagctcaataataaaaagtcaagtaacccaattttaaaatgcacaaaggatctgaagagatattttttccaaagaagatgtacaaatggccaataagcacataaaaagatgctcaacatcattagccatcaggaaaatac

SEQ ID NO: 347403 - DNA, 582 bp, Homo sapiens
gatggtttcaacatctccatggaaacagagctcaggtccacttggtctacacatcacctttgaaaagcaaagataacaaagcaaggccagtgatttttctcagtaaatatgagaattcaaaaatctgtttgagggagccaagccaattcaatgaggaaagaataatctttttaacaaatggtgctgggacaactagatatctacatgcaacagaacaaagctaggtttctcctcagaacaaacataagaataaaaatgtaggagtaaatctttaggaccctggattagaaaaagccttctcaaatatgacatccaaagcacaagaaacaaaagaaaagagagataaactgtacttcatgaaaataaaataattttgcttcaaaggaaaccaccaagaaagtgaacaagcaacccaaagaatgggagaaaatatttgctattacagctcaataataaaaagtcaagtaacccaattttaaaatgcacaaaggatctgaagagatattttttccaaagaagatgtacaaatggccaataagcacataaaaagaygctcaacatcattagccatcaggaaaatac

SEQ ID NO: 347404 - DNA, 582 bp, Homo sapiens
gatggtttcaacatctccatggaaacagagctcaggtccacttggtctacacatcacctttgaaaagcaaagataacaaagcaaggccagtgatttttctcagtaaatatgagaattcaaaaatctgtttgagggagccaagccaattcaatgaggaaagaataatctttttaacaaatggtgctgggacaactagatatctacatgcaacagaacaaagctaggtttctcctcagaacaaacataagaataaaaatgtaggagtaaatctttaggaccctggattagaaaaagccttctcaaatatgacatccaaagcacaagaaacaaaagaaaagagagataaactgtacttcatgaaaataaaataattttgcttcaaaggaaaccaccaagaaagtgaacaagcaacccaaagaatgggagaaaatatttgctattacagctcaataataaaaagtcaagtaacccaattttaaaatgcacaaaggatctgaagagatattttttccaaagaagatgtacaaatggccaataagcacataaaaagatrctcaacatcattagccatcaggaaaatac

SEQ ID NO: 347405 - DNA, 581 bp, Homo sapiens
ttaaagttgcttctctaggcatcatttaccagttacccttggtccccagacctcagtgagtatgcttcccctcataaacaagcacacacacagatggttattagattagattattaaatttttgagagctgaagtcggcttcattcatcctagtgtcaagtaatgtttgcggaatggatgtatttatttcacrttctacattatatttacaaatccctttcattatctttttttgaccttctcaaatactgcataagacaagatgacaaacaagtattattatcctggtttaatagatgaataaaatttgactcagagaggttaaggaacatgctaaaagtctcgctagtaggaaacggcagagccagaattgaatccaaatttttggttacaaaattctctgtttttcgccacggggttcagacacttgtcacctactcaatgaaaatggccaccacaattcacctagaagtaacctgggctgctcatcacaaacaccattcaaagatatttgcattttgttcttgaccccttaccttcctgctcctttccaaaacagaacaccacactggccactagac

SEQ ID NO: 347406 - DNA, 581 bp, Homo sapiens
ttaaagttgcttctctaggcatcatttaccagttacccttggtccccagacctcagtgagtatgcttcccctcataaacaagcacacacacagatggttattagattagattattaaatttttgagagctgaagtcggcttcattcatcctagtgtcaagtaatgtttgcggaatggatgtatttatttcacattctacattatatttmcaaatccctttcattatctttttttgaccttctcaaatactgcataagacaagatgacaaacaagtattattatcctggtttaatagatgaataaaatttgactcagagaggttaaggaacatgctaaaagtctcgctagtaggaaacggcagagccagaattgaatccaaatttttggttacaaaattctctgtttttcgccacggggttcagacacttgtcacctactcaatgaaaatggccaccacaattcacctagaagtaacctgggctgctcatcacaaacaccattcaaagatatttgcattttgttcttgaccccttaccttcctgctcctttccaaaacagaacaccacactggccactagac

SEQ ID NO: 347407 - DNA, 581 bp, Homo sapiens
ttaaagttgcttctctaggcatcatttaccagttacccttggtccccagacctcagtgagtatgcttcccctcataaacaagcacacacacagatggttattagattagattattaaatttttgagagctgaagtcggcttcattcatcctagtgtcaagtaatgtttgcggaatggatgtatttatttcacattctacattatatttacaaatccctttcattatctttttttgaccttctcaaatactgcataagacaagatgacaaacaagtattattatcctggtttaatagatgaataaaatttgactcagagaggttaaggaacatgctaaaagtctcgctagtaggaaacggcagagccagaattgaatccaaatttttggttacaaaattctctgtttttygccacggggttcagacacttgtcacctactcaatgaaaatggccaccacaattcacctagaagtaacctgggctgctcatcacaaacaccattcaaagatatttgcattttgttcttgaccccttaccttcctgctcctttccaaaacagaacaccacactggccactagac

SEQ ID NO: 347408 - DNA, 661 bp, Homo sapiens
agtgggagaaaagaaagaaaggctgagtcttatagggtgtgatttggttctagacatgcttatgttactttttataagattatccatttgactagatttctttcctgctgacaaaagaggcaatttctacatataaaataaatctgattaaaactctttctctgttcctgtcaaggtaatagatgcagaccccaggaacagaatatatttggattcctagtgtgtgcaaatgattgtttatgtgatatctggtgccaagacccacagamggctcctgtactgccctgtaaaaataacgggaatggaaagcttttccttaggcataaaaagttaattttatttcttattctctttcacagcggtaactattactttgtaattttcctggtattttgttggcagccaaaaataacacaagtaatagtccttgcctacaatatgcagctccgattcattttgcttagctcaagttgcctcctataataaaggtggtggcactagaccttaagcataggtctaaactagagcaaatttcttaagcccgtttttaatcagaaaggcagaacaagttcaaatcctttccattcctttatcctagtagggtttttagaacacaccaaatagcaagaaatgaatgcagctttagtaattaacattgata

SEQ ID NO: 347409 - DNA, 661 bp, Homo sapiens
agtgggagaaaagaaagaaaggctgagtcttatagggtgtgatttggttctagacatgcttatgttactttttataagattatccatttgactagatttctttcctgctgacaaaagaggcaatttctacatataaaataaatctgattaaaactctttctctgttcctgtcaaggtaatagatgcagaccccaggaacagaatatatttggattcctagtgtgtgcaaatgattgtttatgtgatatctggtgccaagacccacagacggctcctgtactgccctgtaaaaataacgggaatggaaagcttttccttaggcataaaaagttaattttatttcttattctctttcacagyggtaactattactttgtaattttcctggtattttgttggcagccaaaaataacacaagtaatagtccttgcctacaatatgcagctccgattcattttgcttagctcaagttgcctcctataataaaggtggtggcactagaccttaagcataggtctaaactagagcaaatttcttaagcccgtttttaatcagaaaggcagaacaagttcaaatcctttccattcctttatcctagtagggtttttagaacacaccaaatagcaagaaatgaatgcagctttagtaattaacattgata

SEQ ID NO: 347410 - DNA, 661 bp, Homo sapiens
agtgggagaaaagaaagaaaggctgagtcttatagggtgtgatttggttctagacatgcttatgttactttttataagattatccatttgactagatttctttcctgctgacaaaagaggcaatttctacatataaaataaatctgattaaaactctttctctgttcctgtcaaggtaatagatgcagaccccaggaacagaatatatttggattcctagtgtgtgcaaatgattgtttatgtgatatctggtgccaagacccacagacggctcctgtactgccctgtaaaaataacgggaatggaaagcttttccttaggcataaaaagttaattttatttcttattctctttcacagcggtaactattactttgtaattttcctggtattttgttggcagccaaaaatracacaagtaatagtccttgcctacaatatgcagctccgattcattttgcttagctcaagttgcctcctataataaaggtggtggcactagaccttaagcataggtctaaactagagcaaatttcttaagcccgtttttaatcagaaaggcagaacaagttcaaatcctttccattcctttatcctagtagggtttttagaacacaccaaatagcaagaaatgaatgcagctttagtaattaacattgata

SEQ ID NO: 347411 - DNA, 524 bp, Homo sapiens
aggatggtacttgcaattgtattatggtaggtgtgcacaaacactaggtaggacttctcatagcctggaggagttaacctggttatgtgaataactttatgtatgttcagcttcaaagtgatctctgtgccaaccaaagaaagatatttaaagagctycttctatattacgattatataaaaatataaataatatatacatatattatattattacatgtagtatatataacattatataatgcaaatatattattataaaaaagaatatataatgcttatacatagattgatttatttatatttaaaagtgtgtatataaatatacaatttaatacatacatatatttaaaaaatacatataacaaacataaatatatataacagtatacttataaaaagagcttcctttcatattatgcattgttatctattctctgaagatcattttcattgcaatgcttcaaaaatgtacatattcatttttcttcttgttataagtgttagaatttgatgtttgatctt

SEQ ID NO: 347412 - DNA, 573 bp, Homo sapiens
ataatgcttggcatgtagaagatgctcagtaaatgtttatgaatattataaatctgggttaagaatgacccagattgcttgtctaatgggttattgatctcacatcttctacagtagaaagatataatgtctctacttctactatagtactattgatttataaattgagttgaattcaaatctcgaaagaactaaaatctgtttcctacattaagctgcccatgctctgggattcacagaatcatcacatattaatgtaagaaagtatcttagagatactttcatgcacagcctaagggacttctgaggggaaatagagggcgccttaattcaaacttttattatggttcatctaggaggagaaaaaatagtggttttcagctttgcagagtttgaaaaatcactcgtcttgaccaactgcttcattttacagagaagaagtggaattccagaaatattcagtggcaagctcaagttcasagtgtcagagcaaaacaaagactagaactcctggtgcagactgaatgcccacagcagtctcctgcagtcagctgtgctgtcccatggtaaaag

SEQ ID NO: 347413 - DNA, 542 bp, Homo sapiens
tggtgaattaatgtaacaattaatggtgactgtgtctcagctaggatcaagttgacctcactgaggtttaaatggccacttagattgttgctgtttttttctgggttttcaaacttccacaaaggaagggagaatagggaggagtggctwtgtgcatgtgctttggaatcagtctattttttcaatttcagtttcaccatttactagtcgtataaccttgaacaagttacataacctggctaaggctcagtttctccatctgcaaactgcagataatatttcctcaataggatttacataaagattaagcaagaagttgtatatgaagtgagaagtgctcatcagtggttgtgaatattatggtgtattcctagcagtccaggatgaaagcaaacttttagattactgttctgctattactgttttttagtttacaaatgagagaacctgaggtggcaaaataatgaactgccatcttacttgtgtcagttgacattttagtttgttaccgatgtgtactttatgtatttagcaatgttgct

SEQ ID NO: 347414 - DNA, 498 bp, Homo sapiens
tcctctccactttgaatattgcactggtatcctctccagtacaataaggcaggaaaaagagacacacaacacctgactstaaaggaagaagtatcgctgctttatccccagaaaacatgactatctatgcagaaaatctgatgaaatctaccccaaaactgctagaataagtaagttcagaaagactgagaatacaaggtcaatatacaaaacaattatatttctatatgctagcaacaatcagaaatagaaattaaaaaaaatttacactagcctctaaaatatgaactatttagatataaatctgggaaaagatatgaaatacctgtatagtaaaatctctaaaaccctcctgagaaacattgaataagactgatatggtttggctgtgtccccacccaaatatcatcttgaattgtagctcccataattcccatgtgtcttgagagagatctggtgggaggtaatggaatcatggcaggggcgggggtgggtctt

SEQ ID NO: 347415 - DNA, 498 bp, Homo sapiens
tcctctccactttgaatattgcactggtatcctctccagtacaataaggcaggaaaaagagacacacaacacctgactctaaaggaagaagtatcgctgctttatccccagaaaacatgactatctatgcagaaaatctgatgaaatctaccccaaaactgctagaataagtaagttcagaaagactgagaatacaaggtcaatatacaaaacaattatatttctatatgctagcaacaatcagaaatagaaattaaaaaaaatttacactagcctctaaaatatgaactatttagatawaaatctgggaaaagatatgaaatacctgtatagtaaaatctctaaaaccctcctgagaaacattgaataagactgatatggtttggctgtgtccccacccaaatatcatcttgaattgtagctcccataattcccatgtgtcttgagagagatctggtgggaggtaatggaatcatggcaggggcgggggtgggtctt

SEQ ID NO: 347416 - DNA, 603 bp, Homo sapiens
gcaaatatttatagtagatttatctagaatatttttttgaaaaaaatcttaaatctcaaaaataagaaaacaacccaagtaaaaaatgggcaaaatatttaaaaatatgccttactaaagaaaayatgcagaggacaaatatgcacatgaagcaatgttcaacattgttagtaattaggaaaatataaataaaaaccacaatgagatacaactacatatcaattagaatggccaaaattccaaagactgaccatattgtgtgttggtagggatgtggaggaaatggaactctcatatgctgcaaatggaaatgtaaaattatacaaccaatttgcaattcattttggcagttttctaaaaacttaaacatatacctaccatatgatccagctacttcacttctaagtatttacccaaaagaaaggaaagcatatgtccatacaaagacttggacatgaatgttcatagcaaccttacttgtaacagctcatatcaaaaaaaaccccacatgtcaatcaacaagtgaacgaataaacaaaccataatatatccatacaatggaatactcttcagcaaaaaaaggaatgaactattgatgcacat

SEQ ID NO: 347417 - DNA, 603 bp, Homo sapiens
gcaaatatttatagtagatttatctagaatatttttttgaaaaaaatcttaaatctcaaaaataagaaaacaacccaagtaaaaaatgggcaaaatatttaaaaatatgccttactaaagaaaacatgcagaggacaaatatgcacatgaagcaatgttcaacattgttagtaattaggaaaatataaataaaaaccacaatgagatacaactacatatcaattagaatggccaaaattccaaagactgaccatattgtgtgttggtrgggatgtggaggaaatggaactctcatatgctgcaaatggaaatgtaaaattatacaaccaatttgcaattcattttggcagttttctaaaaacttaaacatatacctaccatatgatccagctacttcacttctaagtatttacccaaaagaaaggaaagcatatgtccatacaaagacttggacatgaatgttcatagcaaccttacttgtaacagctcatatcaaaaaaaaccccacatgtcaatcaacaagtgaacgaataaacaaaccataatatatccatacaatggaatactcttcagcaaaaaaaggaatgaactattgatgcacat

SEQ ID NO: 347418 - DNA, 593 bp, Homo sapiens
tcattttacataaattttatatcaaaagaaaaatctataaatattaaacttcacttagtagtatacatgctgaagtatttagggaaagtgtattgatacctacaattaactttgaaatatatcaaaaaatataacgggtgatgtgagtggggcttgtgggttaaaaatatacatgatggaacaattaatgagtagatgaacagacatgaccaaacaagcatgatattatgttaatagaatctgtgtcatgggtatgtagatggatgttcattgtaactcattataaaattgtaaaattctttttactttgctgtatgtttggaaatttttataacaaaatgttgaaaatatatatataatcaatagacttcaaagtggagcataatggtataaatactgaaataagtgtgtctacagaaatttatttatttatttatttattttgagacagattcttgctctgtggcccaggttggagtgcagtggygtgatcttggctcactgcaacctccgcctcctgggttcaagcaactctcctgcctcagcctcccgaataagtgggattacaggctcacgccaccatgtccggctag

SEQ ID NO: 347419 - DNA, 573 bp, Homo sapiens
tttatgtgaagcgtgcattcaactcacagagttgaaccwttcttttgatagaacagttttgaaacactcttttgaacaattgcaggtgaatctttggagcgctttgaaggctttgttggaaatgggaatatcttcacacacaaactagccagaagcattctcagaaacttctttgtgatgtgtgcgttgaacccagagagataaactttcctttgatagagcagttttgaaacgtgtttttgtaagatctgcaagcggataattggcttcgctttgtgtcctttggtggaaacgggaatatcttctaataaaatctagacagaaatattctcagaatcttctttgtgatgtgggcattcaactaacacagttgaacatttcttttcacagaacagttttgaaacactcttttgaacaattgcaggtgaatctttggagcgctttgaagcctttgttggaaataggaatatttcacacatcaaactagccagaagcattctcagaaacttctttgtgatgtgtgcgttgaacccagagagatgaacctttcctttgatagagctgttttgaaac

SEQ ID NO: 347420 - DNA, 573 bp, Homo sapiens
tttatgtgaagcgtgcattcaactcacagagttgaacctttcttttgatagaacagttttgaaacactcttttgaacaattgcaggtgaatctttggagcgctttgaaggctttgttggaaatgggaatatcttcacacacaaactagccagaagcattctcagaaacttctttgtgatgtgtgcgttgaacccagagagataaactttcctttgatagagcagttttgaaacgtgtttttgtaagatctgcaagcggataattggcttcgctttgtgtcctttggtggaaacgggaatatcttctaataaaatctagacagaaatattctcagaatcttctytgtgatgtgggcattcaactaacacagttgaacatttcttttcacagaacagttttgaaacactcttttgaacaattgcaggtgaatctttggagcgctttgaagcctttgttggaaataggaatatttcacacatcaaactagccagaagcattctcagaaacttctttgtgatgtgtgcgttgaacccagagagatgaacctttcctttgatagagctgttttgaaac

SEQ ID NO: 347421 - DNA, 557 bp, Homo sapiens
ttcacattaaactagacagcagcattcccagaaacttctttaggatgtttgcagtaaactcacagagttgaacatacctttccgtagagcagctttgaaacactctgtgtgtgggrtccgcaagtggatatttggaccgctttgagacctttgctggaaacgggaatatcttcacatataaactggacagaagcattctcagaaacttcttcgtgatgtgtgcattgtactcccaaatttgaatcttccttctcatggagcagttttgaaacactctgtttgtgcaatctacaattggagaattggaaggcttggatgcccgtggtagaaaaggaaatatcctcatatgaaaactagacagaaggattcacagaaaatgctttgtgatgtgtgcattcaaatcacggagttgaatctttcttttgttagagcagttttgaaacactgtttctgtggaatctgccagcggacacttggagcgctttgagggctatggtggagaaggaaatatcttcacataaaaactagaaagaagcattctcagaaccatttatgtg

SEQ ID NO: 347422 - DNA, 553 bp, Homo sapiens
ttcacattaaactagacagcagcattcccagaaacttctttaggatgtttgcagtaaactcacagagttgaacatacctttccgtagagcagctttgaaacactctgtgtgtgggatccgcaagtggatatttggaccgctttgagacctttgctggaaacgggaatatcttcacatataaactggacagaagcattctcagaaacttcttcgtgatgtgtgcattgtactcccaaatttgaatcttccttctcatggagcagttttgaaacactctgtttgtgcaatctacaattggagaattggaaggcttggatgcccgtggtagaaaaggaaatatcctcatataaaaactagacagaaggattcacagaaaatgctttgtgatgtgtgcattcaaatcrcggagttgaatctttcttttgttagagcagttttgaaacactgtttctgtggaatctgccagcggacacttggagcgctttgagggctatggtggagaaggaaatatcttcacataaaaactagaaagaagcattctcagaaccattta

SEQ ID NO: 347423 - DNA, 531 bp, Homo sapiens
gacacaacgcgaagccaattatcygcttgcagatcttagaaaaacacgtttcaaaacagctctatcaaaggaaaggttcatctctctgggttcaacgcacacatcacaaagaagtttctgagaatgcttctggctagtttgtgtgtgaatatattcccatttccaacaaaggcttcaaagcgctccaaagattctcctgcaattgttcaaaagagtgtttcaaaactgttctgtgaaaagaaatgttcaactgtgttagttgaatgcccacatcacaaagaagattctgagaatatttctgtctagtttttattagaagatattcccgtttccaccaaaggacacaaagcgaagccaattatccgcttgcagatcttacaaaaacacgtttcaaaactgctctatcaaaggaaaggttcatctctctgggttcaacgcacacatcacaaagaagtttctgagaatgcttctggctagtttgtgtgtgaagatattcccatttccaacaaagccttcaaagcactccaaaga

SEQ ID NO: 347424 - DNA, 531 bp, Homo sapiens
gacacaacgcgaagccaattatccgcttgcagatcttagaaaaacacgtttcaaaacagctctatcaaaggaaaggttcatctctctgggttcaacgcacacatcacaaagaagtttctgagaatgcttctggctagtttgtgtgtgaatatattccyatttccaacaaaggcttcaaagcgctccaaagattctcctgcaattgttcaaaagagtgtttcaaaactgttctgtgaaaagaaatgttcaactgtgttagttgaatgcccacatcacaaagaagattctgagaatatttctgtctagtttttattagaagatattcccgtttccaccaaaggacacaaagcgaagccaattatccgcttgcagatcttacaaaaacacgtttcaaaactgctctatcaaaggaaaggttcatctctctgggttcaacgcacacatcacaaagaagtttctgagaatgcttctggctagtttgtgtgtgaagatattcccatttccaacaaagccttcaaagcactccaaaga

SEQ ID NO: 347425 - DNA, 511 bp, Homo sapiens
cgtttcaaaacagctctatcaaaggaaaggttcatctctctgggttcaacgcacacatcacaaagaagtttctgagaatgcttctggctagtttgtgtgtgaatatattcccatttccaacaaaggcttcaaagcgctccaaagattcwcctgcaattgttcaaaagagtgtttcaaaactgttctgtgaaaagaaatgttcaactgtgttagttgaatgcccacatcacaaagaagattctgagaatatttctgtctagtttttattagaagatattcccgtttccaccaaaggacacaaagcgaagccaattatccgcttgcagatcttacaaaaacacgtttcaaaactgctctatcaaaggaaaggttcatctctctgggttcaacgcacacatcacaaagaagtttctgagaatgcttctggctagtttgtgtgtgaagatattcccatttccaacaaagccttcaaagcactccaaagattcacctgcaattgttcaaaagagtg

SEQ ID NO: 347426 - DNA, 531 bp, Homo sapiens
gacacaacgcgaagccaattatccgcttgcagatcttagaaaaacacgtttcaaaacagctctatcaaaggaaaggttcatctctctgggttcaacgcacacatcacaaagaagtttctgagaatgcttctggctagtttgtgtgtgaatatattcccatttccaacaaaggcttcaaagcgctccaaagattctcctgcaattgttcaaaagagtgtttcaaaactgttctgtgaaaagaaatgttcaactgtgttagttgaatgcccacatcacaragaagattctgagaatatttctgtctagtttttattagaagatattcccgtttccaccaaaggacacaaagcgaagccaattatccgcttgcagatcttacaaaaacacgtttcaaaactgctctatcaaaggaaaggttcatctctctgggttcaacgcacacatcacaaagaagtttctgagaatgcttctggctagtttgtgtgtgaagatattcccatttccaacaaagccttcaaagcactccaaaga

SEQ ID NO: 347427 - DNA, 511 bp, Homo sapiens
cgtttcaaaacagctctatcaaaggaaaggttcatctctctgggttcaacgcacacatcacaaagaagtttctgagaatgcttctggctagtttgtgtgtgaatatattcccatttccaacaaaggcttcaaagcgctccaaagattctcctgcaattgttcaaaagagtgtttcaaaactgttctgtgaaaagaaatgttcaactgtgttagttgaatgcccacatcacaaagaagattctgagaatatttctgtctagtttttattagaagatattcccgtttccaccaaaggacacaaagcgaagccaattatccgcttgcagatcttacaaaaacacgtttcaaaactgctctatcaaaggaaaggttcatctctctgggttcaacgcacacatcacaaagaagtttctgagaatrcttctggctagtttgtgtgtgaagatattcccatttccaacaaagccttcaaagcactccaaagattcacctgcaattgttcaaaagagtg

SEQ ID NO: 347428 - DNA, 511 bp, Homo sapiens
cgtttcaaaacagctctatcaaaggaaaggttcatctctctgggttcaacgcacacatcacaaagaagtttctgagaatgcttctggctagtttgtgtgtgaatatattcccatttccaacaaaggcttcaaagcgctccaaagattctcctgcaattgttcaaaagagtgtttcaaaactgttctgtgaaaagaaatgttcaactgtgttagttgaatgcccacatcacaaagaagattctgagaatatttctgtctagtttttattagaagatattcccgtttccaccaaaggacacaaagcgaagccaattatccgcttgcagatcttacaaaaacacgtttcaaaactgctctatcaaaggaaaggttcatctctctgggttcaacgcacacatcacaaagaagtttctgagaatgcttctggctagtttgtgtgtgaagatattcccatttccaacaaagccttcaaagcrctccaaagattcacctgcaattgttcaaaagagtg

SEQ ID NO: 347429 - DNA, 528 bp, Homo sapiens
gaacagccgcgaatttcaacatcttattccaatcttatgaatcactttatggaagaggacaatgtatacttttttttctgtttaatatgggactattcaaactttaaatagtagagatatttaaatataaggacatccatatttttgtgatataattgaattttcccatttggttattgtatgtgtttcaaacgggaaatgagtggataccatttctttttcttcacctttttttcagctttgatgccacaggaagccagcttgctagctccctgttacctgatagttccctgactaaaaagactcttcagtgaggatcagcattttaccctagacaggagtcgtgaattttctttytaaagatacacatatctcttaaaagggtccagaatatttcctgcaaaactgtctctgtcatatgagcacctattagagccactataagaaaagctaaggaaacaaatccatctttcctgcaacagaaaaaacacacaccctaaaatgggccaagaacttgaacatcagcaa

SEQ ID NO: 347430 - DNA, 419 bp, Homo sapiens
gagaaaaagaagccatcctgccagaggagagatgccttttattaaagctgacaagacaaatagagcaagctttccagttgtgatggtgttaaaagccagtctcattatgttggttagttttttttccccgtttgtgctttattaggcagcatatacgaagcagaaatttgtatctctgaactttagcaccttattaaataaagcaacactgaaatagtttctttgaatttgggatatcttgctctcggttgtcttttctttcccacaccaagctccacattgtgatctttttctcatggcattcatttatttggatacttgggtgttccagtcttcctgggttaaaacggaaagaaccagmaacacccctactttaaccccccttcttaacctgtcaagctagtctgagttagtttgag

SEQ ID NO: 347431 - DNA, 609 bp, Homo sapiens
caggactctgctcacaagatatacatgggtcacattaagtagatttgcactgcagcctgaatatggagttttaagactgcartaatcagtgttggaagacgattggtttttcttgttataaattgctaattagtattgaaaatctaacctgttttgttgaacagcctctcttattttctctgagaaagtggtttggacagtaatctatttatctccatacccctcttccctctagttaaaataaaatctagaaacctctggggactccccctgttgagttgtgcttggaaggagctttaaaacagtgcctccaaactgaagtaaatattgactgggtctggggcttgagccctgctcaaagcctcctattgttcctccttagtcagcactccagagcgggctcaagtatgcatgtgttaggaagagaagaaaggctgtggagggaaattaacagggcccacagccgaactcataaatgcaccatatagaggaaagggaagctgactacaaagccagctggagcttacactgggttatggagaacttaggagactgaagtgcagaaacgctgaccagtctgtctgctttagtgaagtttaaggtacacaa

SEQ ID NO: 347432 - DNA, 576 bp, Homo sapiens
tttgcacataaaactccattatcgtagtacttattttatattgtaattatttrcctgtatttttttcctttagcctgtaagttaataggagggacttttcaactctattttaccccatcctattttcttaattatgcatggtagggggcacttagttcatacttaagaaatattcactaaagagtacatatcctgaaataattaactcttggaatacattgaataagggtcttttgcagtgttatcttatgttgcatttgccaaatatagtgaaaaacaatttgctctcttgaaaaggaagcaatactgaaaatacagaacccattattaagtcagaaaaaaatgtattttttaaccatctcttttagctgacttggtacttctctcattgggagactgtatgtatagacttaggcaaaagagaaatgaatcttaactttctgtgtataacgttcataaatatgtaaatgcacaatcagtttgaaataagtaagttagagtatttggtaatttacggtacaaatattgacagattgctgctgaattggtggtgaaagtaaatgaaacgtggccagc

SEQ ID NO: 347433 - DNA, 576 bp, Homo sapiens
tttgcacataaaactccattatcgtagtacttattttatattgtaattatttacctgtatttttttcctttagcctgtaagttaataggagggacttytcaactctattttaccccatcctattttcttaattatgcatggtagggggcacttagttcatacttaagaaatattcactaaagagtacatatcctgaaataattaactcttggaatacattgaataagggtcttttgcagtgttatcttatgttgcatttgccaaatatagtgaaaaacaatttgctctcttgaaaaggaagcaatactgaaaatacagaacccattattaagtcagaaaaaaatgtattttttaaccatctcttttagctgacttggtacttctctcattgggagactgtatgtatagacttaggcaaaagagaaatgaatcttaactttctgtgtataacgttcataaatatgtaaatgcacaatcagtttgaaataagtaagttagagtatttggtaatttacggtacaaatattgacagattgctgctgaattggtggtgaaagtaaatgaaacgtggccagc

SEQ ID NO: 347434 - DNA, 591 bp, Homo sapiens
ctcatacccctttccaatcaactgctgtcccccttagccagtcactattctgacattttcaccataaattagtttggcctgttttagaaccactctatctggaatctttgtgtaasgattctttcactcaatatttagtttttgtgtttcatcagtgctcctgtaattggcaagttttttcccttgtattgctgagtaatattccattatatgaatacagcacagtttatttttatgttattaatagactctttcggttttaggtattatgaataaagctgttatgaacatgatgtacaaggtttgtgaacacatattgcaaatttcttttgggtaaaatacctagaagtagcgttttcgggtcataaaatagcttgcacatcctccaggttgtaccattttttttacctctaccaatagtgttggagatttctaatcactccatattcttgccaattttgggtgctgccgagtctttttcattttagccttcctatggatacatgttgctatttctttatggttttaatttttatttccccaatgactaatgatgttaagcatcttttcatgtagttattggccacacat

SEQ ID NO: 347435 - DNA, 558 bp, Homo sapiens
tctgattaaagataaagtaccacataaaataaaatcttataattcgctttcattctccaaacttctttattgaaattaaatcctattgacttcatcaaagatgctacatggaaaggttttattgaacttgggttactgatttcaatataatacttattagaatccaaaacatagttttctgtctctctaaccccctgcttaaaatataataccagatcttgaaatgaaatataatttgaagaataatttataaatgcagaattgttctttcttgttttggatattaagtatctttgggttttaaccatagtctatttatctttcttattttatgtaaacaaggtgtgtgtgtctaacttctgacccattcattcagtgtaaaatacagcttttgctgtaactggagggaagaraagatggacgagcgacccctccctttgtgttgattatatctccaactgactgaggtttctcgtcatgagctaaaagaatgattagtcagattttaagtgaagcaagcttttagagtgcaagagaatttttttgtttgtttgtttt

SEQ ID NO: 347436 - DNA, 463 bp, Homo sapiens
cagtgaagaaactgctctttttaataaactcttagccatatagggttttagccaagggcagaatttatttttaaatggcagatttgaaatgtgttcttaattcttggctaaaaggatcatttttttactctgacaaaaggtatacaaccttttaattttgcaatgaataattttctgcaaagacaagtaaaaaacgcacctaaatgcttcactatagaatattttgtcctcggaaggagtgagaagatttttctcattttatcaycagacaattgtttcctctattgagtgctttttacaaataatatagatgcagagtctacctgatgtttttcttctttattcccttcctcctcctctgcatcacctccaccctcagcattgtcaacaccgtagctgacatttattgagcacttattctattcccctgatcctatgctaagggctttattttatgtcactg

SEQ ID NO: 347437 - DNA, 573 bp, Homo sapiens
tgctctttctgacgcaaagtatcaggcacatcctgaaaccatcttcatatacttctcaaaattctgcaattatgcagttctgaagacatctggaaaacaaagttggttcagtgggtttttgcattacatgtggttttatagccaaagtaatttaaccttccctttttctcttcacagtggtaaactattttcacagtgtctcaggatttctttatacactatgcatgtcttattcaagtcctaagatacctttatgtataactcaaagtaaagattgtcatgccccactgatttctatcatccaaacatgttgctgaaattccaattatgatggctttttctgatttagccatataaattcaacmctatggtttggatttttaaatctcactattagcatagagagagttattaatatattttacattaagctatatctaacacttggtactgagcttgttgttttgctaggaatagagcatatgcctcattatccttgctcctgggaatacaaacttttctttaaaaaggatacacaaatgcgtgcacacgtgcgcgtgcacacacacatgt

SEQ ID NO: 347438 - DNA, 588 bp, Homo sapiens
gttgctctttctgacgcaaagtatcaggcacatcctgaaaccatcttcatatacttctcaaaattctgcaattatgcagttctgaagacatctggaaaacaaagttggttcagtgggtttttgcattacatgtggttttatagccaaagtaatttaaccttccctttttctcttcacagtggtaaactattttcacagtgtctcaggatttctttatacactatgcatgtcttattcaagtcctaagatacctttatgtataactcaaagtaaagattgtcatgccccactgatttctatcatccaaacatgttgctgaaattccaattatgatggctttttctgatttagccatataaattcaaccctatggtttggatttttaaatctcactattagcatagagagagttattaatatattttacattaagctatatctaacacttggtactgagcttgttgttttgctaggaatagagcatatgcctcattatccttgctcctgggaatacaaacttttctttaaaaaggatacacaaatgcgtgcacacgtgcgcrtgcacacacacatgtaaactctgataca

SEQ ID NO: 347439 - DNA, 548 bp, Homo sapiens
gggttcagggacctctgagaagtacagcagagaggaaaggataatgttgggaggaaacygggaaaaagctgtcgtgtcctgcagttcacctgtgggctcagctcacaggaaaacacaggcctagaggtgcaatgtgcccccaaacccaggccttgtaagtgaccagccagaggataaaccactatctagatcaatgcttctcaaactttagcctgcattagaattaccctgggaacctgttaaaacaaatttcctcagccacacctcctagaaattctgattccttaggactgaggtgagactcaaaaatgtgtatttctaacaagctcctaggtgataataattgtgtaatttacggactatactttgagaagaactggtttagatgtcatcagcaaagcacctcaaagaacatataatggtgtcatgtaaaggagagaatcagctttgtatatccattatacttcgaaggcatcagcacttttaactgtgtcagccacgttcccatagtctcttcttcctcagcccagcactaagtcatgggaaac

SEQ ID NO: 347440 - DNA, 563 bp, Homo sapiens
ttggaataaaattcatatcctttactcaaaatccaatgccctccaaagtctgcaccccttcatttagtcactcatcaaaactacactgtgtgttatgatttgaaggtgtgccctccaaaattcatatattgccagtgtgatagtattaagaggtaaggcttttaagagstgattcgttcttgagtgctcctccctcatgaaagagattaagacccttatgaaagagtcttcatacagccttcaactagcttgcccttctgttttctggcatgtgaggatgttgcaagaagtccctcccaagacagcaaatgcagtgccttgatcttggacttcccagcctccagaactgtgagaaatacactctttataaattacacagtctgtgatattttattatagtagcacaagtggattaagatactgtatatgtattatgctgcctggaaagacaaaggtaaaataggacactttctgacctcaagttataatagtgagaaacaggcaaattctctcctttctcttcttcagggaaaccttccctagccttccctgatcttggtgat

SEQ ID NO: 347441 - DNA, 653 bp, Homo sapiens
ttttcttgcccagatttctgtggtgagtgagtttgaagtctgttggccagctgcagaatggagaatactcattactcagccctatagaaataaacatctggtgataccttgtttatccaagcatagcatgctttcaactgctttataactagagattttatatatgtgcakgtatagacattattctgtatctatacatatatatggttgatatatgtatataaatacatagaaggtaattggttgtataaatatataatgtgaataatccttgagaaaaacaatatgttcagaagatactgtggaacctacattgagaagtaaaatatttttcttgaatatggaaaatatctgttcattctttttcttttggtatctgtgaggcttttaaaataatctgtgagtttgtataatttgggtagaacagagtgcagctccgtcatcaagggcaggcatgtgacccagggctagccactcagattatccctgggtttggtttagagatggctcatgatctagtcagggacaatgcaactcagttctaagaggttagaggagctgttggggaaagaagctctgtagctggtgtagccatcttggctctaagagtgaagaggctgcataagaatgggactcatgcacagggtggtaga

SEQ ID NO: 347442 - DNA, 502 bp, Homo sapiens
gggtggaggatcaccaggttgcctaaggaggagtgaaccagtccaggtcagaaatggagcaggtcaaagctccagtgctggttaatagtgggatggtgcctgtaagtagccactgcatcccaacttgagcacacagcatacccggtgtcttttttttttttwaaaaaaagaagagctccagggtatgttttagaataggaaagaatgggggagaaaagaaagggaggaaatttaatttggattatagtaatcactcaagagtaaacccaaaatgcatttttcacataattacctggctttagtacaaggaatccatggatttgtgttatcaaagacttttcatttacctgcatttcatttcctgccacattctgatcccacccattttcccaccacaggctgatggaagtcttatgggaaaaactaccacattcctaaccaagaggatatgtggtttcataccatgatatgtttgaatctgaattctattgggtgaacatag

SEQ ID NO: 347443 - DNA, 502 bp, Homo sapiens
gggtggaggatcaccaggttgcctaaggaggagtgaaccagtccaggtcagaaatggagcaggtcaaagctccagtgctggttaatagtgggatggtgcctgtaagtagccactgcatcccaacttgagcacacagcatacccggtgtctttttttttttttaaaaaaagaagagctccagggtatgttttagaataggaaagaatgggggagaaaagaaagggaggaaatttaatttggattatagtaatcactcaagagtaaacccaaaatgcatttttmacataattacctggctttagtacaaggaatccatggatttgtgttatcaaagacttttcatttacctgcatttcatttcctgccacattctgatcccacccattttcccaccacaggctgatggaagtcttatgggaaaaactaccacattcctaaccaagaggatatgtggtttcataccatgatatgtttgaatctgaattctattgggtgaacatag

SEQ ID NO: 347444 - DNA, 646 bp, Homo sapiens
atataaaccattttcatgtgaactgtaacatttgatcttcacaaaaatttataaagtagatgacttaggtattagtttccctttacaaatgaagggataacagtttataaatgcttactgatttaccaaaatcttattggcaggaagggccagagccagggactgaatctgatcattttacacaaaattacacgaactttctactatatccactgtacataggtgaktgtgtccaatacactattttccttaataattagagcatctctggaaggaagggaccattgcaaaatgaagaaactgtagctcagaaaattttactcaaaatcaggtaaatcatacctgtaaccctagcagtttaggaggctgaagtgggaggatcagtttaggccaggagtttgagaccagcctgggcaacatagtgagaccctgtttcaacagaaacatcataaaacttagccaggcatggtggcacacaagagtagtcctcgctactcaggaggctgaggctgagtccaggagtttgaggttacagtgaactatgattgcaccactgctccagcctgggcaacacagtgagactctgtctgtaaagaagataaaataaatagacaataaattttaaaaaatgggcaaataacaagtg

SEQ ID NO: 347445 - DNA, 588 bp, Homo sapiens
cgtgctgccacacccggctaatttttgtacttttattagagatggggtttcactgggttggccaggctggtcttgaactcctggcctcaggtgatctgcccacctcagccttccaaagtgctgggattgagggcgtgagcctgtaggattcttaaaaatagtaagccaatgctggaaaattcagtagcagttctgctctgaggactattttttcctgttgagctctgcagaggctcctgcagtctccaaaactcagctttgatttgcagggaaatgctgccagcagtggagccagactcaacagcatgccaycttcatgtccatgtattaaaagctagagatcagggtaatggttcccctgtattatgattgaccacatttgatagacaggcatgatgtaaggagaatatgtcctagttcctctgtacagacaacatccctcccaggataaacaaaatcctctgactagttcttaacttttcaaactctcttggaacatctgtaatcaaactcaggaactgtggttctcaatcctggttggacttaagaagcacctgaggaacttaaacaatgatgtctgagccaatt

SEQ ID NO: 347446 - DNA, 461 bp, Homo sapiens
atgctgcagagaaatctttcatgaacagaagagtcaatgtggtaaacttcatcgctgtcttattttaagaaattgccacagccacccccaaccttcaggaaccacctccctgatctatcagcagccatcaatattgaggcaagatcctccagtaacaaaaagattacatattgccaaaggctcagataattgctagcaattttagcggtatttttaaaattaaggtatgtacatttttaaaagacataatgctattgcacacttaatagactacagtacrgtgtaaatgtaactttcacatgcactgagaaaccaaaaaatttgtgtgactcactttattgcgatattcattttattttggtggtctggaactgaactcacgatatctctgaggtatacctgtatgtgcgtagaaaatcgaattgaagttagtaaacctagtatttaccctgacctaaaat

SEQ ID NO: 347447 - DNA, 523 bp, Homo sapiens
tgttagactctttcggccttgcagaccctggcaagtccttttaacgatgctccctcactggttcccaggacttcccaagtcttgagaatcgatttcttatggagtttgttgttcaaatcttattggtaacatttcaaaaaattgcaatcatgcaaagtgactgatccattatctttcactcataacatagcaataatcatccaaagtagataattatatcattatttggaacatgatctctgaatagagcaggtgcagttagaagggggcacagattagtgtaacagcagaagatctgctcagggatcaacattaaaaagaaaaaaatgcctacttcataaatattagcacctgcagataatcagaaaaatatagccaattacatccattatgctctatttctcttctggtactcacattatttcttctgtaatgaaaaaaaatttgttttggtttatataaccaatctaaacacaatgtattaygtattagcattaacgggaaattacatatacttttattt

SEQ ID NO: 347448 - DNA, 449 bp, Homo sapiens
gctcctctctgaactggttattctggttagcagctccagtaatgttttatcatggttcttagcttctttacattgggttrgaacatgcttctttagctcagcaaaactggttattactcaccttctgaagcctacttctatcaattcatccatctcatcctctgcccagttctgtgcccttgctggagaggtattgcaatcatttggaggagaagaggcattctggctttttgagttttcagtgttttatcattgattctttctcatctttgtgagtttatctagctttgatctttggggtagctgatctttggatggggtcttggtggggacttttctgttgatgttgttgttgttgctttctgtttgtttgtttttcttttaacagtcaggcccctcttctgtagggctgctgcagtttgctgggggtgcactccagaccctattca

SEQ ID NO: 347449 - DNA, 601 bp, Homo sapiens
tccttccctccagaagcaccaggggatttttcttacatatttaccatgagaacctaatagagctccaggtggtaggactcacaaaagtgtggggcttctctgtgattgggtcctcctggagtttttaactctgaggcttgtctacaccaagcctccagcatttcatcggttacactttaggttttcctaccccagcactgcttcctacagaggctctgtctcaggtaagttgtgattctctgtgtctacctttctgtctctccagttctgggggyagcagtttgccctgtgacctcatttccctgattaatctaagaattattgatttttcagtttgttcagctttttacttgtttggacagactggcaactgctaagaatcttacataagtgatgagaaacttccagttttggtcctactttcatggggaaatctagaattgtctctagataacgtttaagggaagaaggtcatgtttttatttattaaaggtaagtgaagaacatttatcagtcttgtagtcctaaaacatgtacttgcaaagctgctaaatttcatgtgtatttttacatcctggtgactatgatggctaataacaca

SEQ ID NO: 347450 - DNA, 495 bp, Homo sapiens
agggacaaataaagagaaaagtttccgataataagggaggagtgttgccctggaagcgcatcccaaaatataccacacaagcaaaataaaaatctaaagctgagagctctgtggagctaaattcaacactttccagactgtaggctgtagatctgattttgtccttaaccagatgtgccatcacaggaagttccgtgccctctttcacctccaatttccaatgaaaacagtaatcaytttgttatttattatttactcatgaaattcatgagtttgttgtaaaaatgtaatgtggtaattcttgtcaagtgtctacctactccctgaatgtagcaagtactataattaatggctatgattactgttgtcaccttactgtacttcttagttgcattggatattgttgtctattttctacttcttaaaatacttgcttcttctggcttctataatgccattttctagtccttttttgcccttatttctacatttcta

SEQ ID NO: 347451 - DNA, 569 bp, Homo sapiens
ttttgttcaaaaaattatagtggccaattataggtgaagaaatagttgttatgaagtgtgatgaatgagtatatgtggcatcttgactgggccataaggtgcccagatatatagtctaacattattctggatgtatctatgagggtgcttctggctgagattaataattgaatcagtagacccaggcaggcagatttgcccgtctctcccagtgtgggtgggcctcattcaatcaattgaaggtttgaaaagaatacaagactgagtaagaaaaagttctttctctctgacagttttccagctgggacatagtttttcttctgtctttccacatggattcgaactaacaccatcagctcgcctgcttctcagaccttcagactcagatggaactacactataggttctcctgggtctggacttctcagcctccataatcatgtaagccagttccttgtaataatctctctctctctctctctctmtatatatatatatatacacacacacacacacatacacacatatgtatgtgtatataactatatataatgtatgtgtatacatat

SEQ ID NO: 347452 - DNA, 662 bp, Homo sapiens
tgcttttcgtgccctttaggaaattttttctactataggatcatggatatgttctcctataaattcttctaaacacttcatttttttataattaggtgtatgatccatctttaactaattttgtgtatcttatgagatagaggtaaaggtttacttttttcacatacatattcaaatgatgttttcctcagtctccattggtcttctgcacacactacctagcattcaatcaaagataataagacacaaaaaagcaagggaaaagcaacctactatcaagagataaagcggtccacagaaatagacatcaagagtgatgccgtaaaatctaattggaagttctctgtacatggataggatgtgtagacagttaggcactttgtgggcttcaggtattcagctggcttttatataggaacccatgatgtcagttagtgcaagtattgttttaaggagattcagtttctgccataaagwatcttccaatcctctgccccacttgaaggggtaaaagggagctagtagcctgtgttttctttctagtctttcacctaatcactctgttttagtcctgtcaatcactccttctaccttccagtgaaagtgcccccaattacagagccttttcaaggtttggaggggcaatttagcttgtttgtcat

SEQ ID NO: 347453 - DNA, 535 bp, Homo sapiens
tgtgtattacataccattaagaattttaatatatgaacagattttctttattaattaaaaaaataaaaccttgtgcttagagttgaagaatgtttaatctcttccctggtattatttttccttctccctctctaaaataacttctgtcctgaagtagaagtatattctgaccatttattgtctatatttttactatacttatatgaatccctaattggtatatagtattttttcgtgagaattttattttctacatcttattttcattcaatattttatttttaagatctacccatatcamtacatgtggattaagattttaaaaaatttaatagatatggaacattccattactattgacttatcctattccattattatttacttatccattattttaataatatgcatttaggttgcatccaatttttcacagctgtactgtgcagcatgtctccttatgcataaatgttcaaatttctttaaagtctataacaagaattagattttctggatctagaatatatgcatcttc

SEQ ID NO: 347454 - DNA, 535 bp, Homo sapiens
tgtgtattacataccattaagaattttaatatatgaacagattttctttattaattaaaaaaataaaaccttgtgcttagagttgaagaatgtttaatctcttccctggtattatttttccttctccctctctaaaataacttctgtcctgaagtagaagtatattctgaccatttattgtctatatttttactatacttatatgaatccctaattggtatatagtattttttcgtgagaattttattttctacatcttattttcattcaatattttatttttaagatctacccatatcaatacatgtggattaagattttaaaaaatttaatagatatggaacattccattactattgacttatcctattccattattatttacttatccattattttaataatatgcatttaggttgcatccaatttttcacagctgtactgtgcagcatgtctycttatgcataaatgttcaaatttctttaaagtctataacaagaattagattttctggatctagaatatatgcatcttc

SEQ ID NO: 347455 - DNA, 443 bp, Homo sapiens
ttcatagttaaagtatgtcttcccttgaggatcacacagccatttaatttctgttctggcatttgacctattgtgtttatgaggttctactgagaratggaattgatgatttcttccataaccacaaagaaaaaattgagagttactgatttcaaaccactattataacctttcaagtttttctggaaaaatgttttctttccaaaatgaaaagaaaaggaactccttattaaatgtctaacttttctgtatcatcacatctttcaatatgttaaattcacctcagacttggctggaggaaagttggagttcctcatctgtagtttggaatctaccaggagatgtcactggctggcctaatctctattggttcctgcctgttcaggcattattttcaaggagaagagtggattttccatctggggcctacccctcctgtcctc

SEQ ID NO: 347456 - DNA, 520 bp, Homo sapiens
gagatgtcactggctggcctaatctctattggttcctgcytgttcaggcattattttcaaggagaagagtggattttccatctggggcctacccctcctgtcctccacaataactttcttgtcagtatatattcactgttcatgcttcaaagactgtccttctcaacccccagatgccgctgaggactcagaagaagccagtgctaatgctttctccagtttctctcctcttgtgtgaactgtgtgaactgccactttaagactctcttggagaatcataatccaagttgcgaagtccaacaattcctctggagaaatggttctcaactgggggcaaatttgggccccaggagacatatggcaatgtctgacaatgtttttttgattgttacaaacaggttggggagagagtcctgctagcatctagttggtagaggccagggataatgctgaacagcctgcaggacaccccgaaccccatcaaagacccaaaacgtcaatggtactgaggttgaaaaac

SEQ ID NO: 347457 - DNA, 551 bp, Homo sapiens
tgtttgattttcttgctttttattttttatttatttgttttatttctttttttttatttcaagttaacatgagacttgccaagactatcttataacccactattttaaactgaggacagcttaacactgattgtataaacagactgataaacaagcaaagagaaagctagtaaaaactatatgctttaactttatctcgctgctttttaagtttttgttttttctatttatatcttattatacaatgtcttgaaaagttgtagtaggtattatttttgataggttcatctttcagtctttctactcaagatatgaagtwtacacaccacaattacagagttaaaatagtctgtatttttctgcatacttacattaacagtgaattttgtaccttcagatgatttcttattgatcattaatgtacttttatttcagattgaagaactctattttttcttgcaggacaggtctggcgttgatgaaatccctcaactttcatttgtctgaaaaagtctttatttctccttctttcatgtttgaaggatattttt

SEQ ID NO: 347458 - DNA, 553 bp, Homo sapiens
ttttaatctggttcactgatgaattcctagctcctggaacagtgcctggcatatagtaggtgcccaataagtgttttttggttgcatgaatgatgacatcttctatttttatttgtcaactctggaaaccctactctccagcgtagtaaaatttctcaaacctatatccacataactcaaaattccaaaaragggcaggcccttgcaatcccagctccttttacaaatctcaacaagtaccctgagaggcctaatttagtaacatactctcccctgtagtggtgatagggctgtggtggtgttgcagggtgctaggccatggcaatggataacttcactaggatcagaaagataggagaaaaagttctccaactgaaggatgttaagcaggcaggcagcgttagttcacaataggatccaacacttttataataaattgcttttttaattgtctgtgctacctgttagactgtaatataagctctgtgaagttagggaacagcttggtattgcttgccattatatcctaaaagcatggcacacgttagaacat

SEQ ID NO: 347459 - DNA, 583 bp, Homo sapiens
tggcccgtcagttctccaggcctgaaagaggtcccagtcctggaactagtacctaagcccctgaagatctggacctgcttcctttccagcctcacctcctgtgaccgctggcacgacttccttgccccaggggtaaggaactacactggagggaactgggcagcccctgcttctgactgcactcaggatgaaacccaaacccctccactccagttccaggctcttcaccgtgccctacctcctgccctgcctcaccccctccccttccatctccccacctcccgaccacacggaactctgtgcacatttttggcagtccacactcctccctctggactttcacacatgctgctcccttgggcttggaacaaatccttcccctgcacaccccagcaacctggccaaygcctactgactctctacgtccagctaaaatgtcacttcttctaggtctttccagactacaaccaccatggctgcccttcctacataccgctagcatggcacttaaaagaatgtgctggaaaggatatctgacctgagtttcttccccacattgtgagttccatgagggaagaagaca

SEQ ID NO: 347460 - DNA, 573 bp, Homo sapiens
tcaaaacagtagcctcctggctggtctgaaggtagtgagttacctcaaccgattgttcgcagtcagttacakatcaaaccccttgttcagctctttccacccttctcactactgcactcacaacaacagcaacaaacaatggcctcctatatttttttttttttgagagagggtctttctctgttacccaggctggagtgctgtggtgcgatcatggctcattgcagcctccaccttcctggctcaagcagtcctcctacctcagcctcctgagtagttgggactacaggcgaatgttttttgtagagatggggtttcatcatgttacacagtctggtctccaactcttgagctccagtgatctgtccccctcccaaagcgttgggattacaggcgcgagccaccacacctggccatcctcctctaatttttatttagcaagaggtagagagagcatccatttccagtgaattaacctacaagcacatatactgaactgtgaactataataagtagagccgtatttcttggatggttcgggagacatttgggtttcacagtgcttatgggttc

SEQ ID NO: 347461 - DNA, 596 bp, Homo sapiens
gccccatattcaaggaggggacaattagactccaccttttcrtgggaggagtatcacagaatttgtggatgtattttaaaagcagcacaattgatgttctagcccaaatattacatgtttccttcatgcaaaatacacttgcttcatcccaggacttgcaaagttgtatctattaagagatcaggttaaggtttgaggcccagggtcttgtaatctaaatcatgttcccacatgggtgaggctccttgcgggtagttcctcgagtgtagatcatggaagatcattttcttgatctgaagatctatgtactaaggagacaagtcttctgtcctgctgatgccacatgcagtggtgggtctggcataagataactgctatagacactctaactcacacagtggggagaaagaagcacacagaactccttggtccatggcacttctgaaatccagctggacacacatggctagtgccttgatgaaggctcagttccagcagctgggaaactgggaatcatcctccatggtttcttggatatatcctctgagtcaacttttctttttctataaaatgtagccatgtttgcagcagattag

SEQ ID NO: 347462 - DNA, 596 bp, Homo sapiens
gccccatattcaaggaggggacaattagactccaccttttcgtgggaggagtatcacagaatttgtggatgtattttaaaagcagcacaattgatgttctagcccaaatattacatgtttccttcatgcaaaatacacttgcttcatcccaggacttgcaaagttgtatctattaagagatcaggttaaggtttgaggcccagggtcttgtaatctaaatcatgttcccacatgggtgaggctccttgcgggtagttcctcgagtgtagatcatggaagatcattttcttgatctgaagatctatgtactaaggagacaagtcttctgtcctgctgatgccacatgcagtggtkggtctggcataagataactgctatagacactctaactcacacagtggggagaaagaagcacacagaactccttggtccatggcacttctgaaatccagctggacacacatggctagtgccttgatgaaggctcagttccagcagctgggaaactgggaatcatcctccatggtttcttggatatatcctctgagtcaacttttctttttctataaaatgtagccatgtttgcagcagattag

SEQ ID NO: 347463 - DNA, 596 bp, Homo sapiens
gccccatattcaaggaggggacaattagactccaccttttcgtgggaggagtatcacagaatttgtggatgtattttaaaagcagcacaattgatgttctagcccaaatattacatgtttccttcatgcaaaatacacttgcttcatcccaggacttgcaaagttgtatctattaagagatcaggttaaggtttgaggcccagggtcttgtaatctaaatcatgttcccacatgggtgaggctccttgcgggtagttcctcgagtgtagatcatggaagatcattttcttgatctgaagatctatgtactaaggagacaagtcttctgtcctgctgatgccacatgcagtggtgggtctggcataagrtaactgctatagacactctaactcacacagtggggagaaagaagcacacagaactccttggtccatggcacttctgaaatccagctggacacacatggctagtgccttgatgaaggctcagttccagcagctgggaaactgggaatcatcctccatggtttcttggatatatcctctgagtcaacttttctttttctataaaatgtagccatgtttgcagcagattag

SEQ ID NO: 347464 - DNA, 577 bp, Homo sapiens
gcgcattgtcaatgagcagtaatattttgaaagaaatatttttctgtacaacaggtctcaaaagtgggcttaaaatattcagtaaaccatgctgtaaacagatgggttgccatctaagctttgttcctccatttatggagcacaagaagagtagacttagcatcattctgaaaggctctatgattttcagaatgttcagaatgataaatgagtgttggctttagtcaccaactgtaattgcccctaataagagagtcagcttgttgtttaaaactctctttcttcttgaatctaaaatgctgacttttttctggatgtaacactcctggcagccaaatatgtctagttataaagagaarattttggggccagttcttgtgggtctggagacagaaacattggataaagtcatcaagatcataaataacaacccatatggaaatgcaaccgacatcctcaccaccaatagagctacaacttggaaacattcccactcgtgtggtggaagtcagagaagtttgtggacaaactttcagaagattcttaaagccattcaccatctcttcagtggagatag

SEQ ID NO: 347465 - DNA, 523 bp, Homo sapiens
cataattggtaatagataccaccgagatatcagctggtttttttttttttttttttttgagacagagtctcactctgtcacctaggctggagtgcagtggcgtgatctcggctgagtgcaacctccacctcccaggttctcctgcctcagcctccctagcagctgagactatagacacgccacaacgtccagstaatttttgtatttttagtagaaatggggtttcaccatgtaggccaggctggtcttgaactcctgaactcccacctcagcctcccaaagtactgggattgcaggcaggagccactgcgaccggctgatatcagcttttaatagcagagagaagtaaaccttttgagtgcctcagtacccaaaaacagatacttttaagaagagattgaaactttgtatcatgggggaatgatattcgggtagacatgaatgacactgagaattctgaatcttgaaatttctgaaaacatctttggctgagaaaacagacccactccattaaatctgaggg

SEQ ID NO: 347466 - DNA, 556 bp, Homo sapiens
gatgtcagtagtggatagagagtgtgtacaaggtaaataaagtatttccctgatcttgttgctttcaggagctatagaccagaggcagcacctcagtgggaacatggaccaggaaaacccagtgaaaggacccatacacatgacttgagaccacaagtcggaggtggtctttaggtaatccagaatcctcatctcttctygtgtctgacatgagtaaaagtcatctaaattcattatttcggcactatttatgcagctaattttctgcagcttcatgaaagacattctgttctggccgtggaatgcaaacaatcatcttaccaggtttcccttctggaactgggcctggtgttgggactttgactgggaccaccccaaaaacataattctgggactgtgttgggaaatctgttggatcctatatatggagacacagtgtcagagagctctattatggatccaggtctgggcttgcactgccccacgtggatatccctgctggctttggctaatctcaaatgctggagaggaacttcaatatttttagaaagacact

SEQ ID NO: 347467 - DNA, 556 bp, Homo sapiens
gatgtcagtagtggatagagagtgtgtacaaggtaaataaagtatttccctgatcttgttgctttcaggagctatagaccagaggcagcacctcagtgggaacatggaccaggaaaacccagtgaaaggacccatacacatgacttgagaccacaagtcggaggtggtctttaggtaatccagaatcctcatctcttcttgtgtctgacatgagtaaaagtcatctaaattcattatttcggcactatttatgcagctaattttctgcagcttcatgaaagacattctgttctggccgtggaatkcaaacaatcatcttaccaggtttcccttctggaactgggcctggtgttgggactttgactgggaccaccccaaaaacataattctgggactgtgttgggaaatctgttggatcctatatatggagacacagtgtcagagagctctattatggatccaggtctgggcttgcactgccccacgtggatatccctgctggctttggctaatctcaaatgctggagaggaacttcaatatttttagaaagacact

SEQ ID NO: 347468 - DNA, 556 bp, Homo sapiens
gatgtcagtagtggatagagagtgtgtacaaggtaaataaagtatttccctgatcttgttgctttcaggagctatagaccagaggcagcacctcagtgggaacatggaccaggaaaacccagtgaaaggacccatacacatgacttgagaccacaagtcggaggtggtctttaggtaatccagaatcctcatctcttcttgtgtctgacatgagtaaaagtcatctaaattcattatttcggcactatttatgcagctaattttctgcagcttcatgaaagacattctgttctggccgtggaatgcaaacaatcatyttaccaggtttcccttctggaactgggcctggtgttgggactttgactgggaccaccccaaaaacataattctgggactgtgttgggaaatctgttggatcctatatatggagacacagtgtcagagagctctattatggatccaggtctgggcttgcactgccccacgtggatatccctgctggctttggctaatctcaaatgctggagaggaacttcaatatttttagaaagacact

SEQ ID NO: 347469 - DNA, 556 bp, Homo sapiens
gatgtcagtagtggatagagagtgtgtacaaggtaaataaagtatttccctgatcttgttgctttcaggagctatagaccagaggcagcacctcagtgggaacatggaccaggaaaacccagtgaaaggacccatacacatgacttgagaccacaagtcggaggtggtctttaggtaatccagaatcctcatctcttcttgtgtctgacatgagtaaaagtcatctaaattcattatttcggcactatttatgcagctaattttctgcagcttcatgaaagacattctgttctggccgtggaatgcaaacaatcatcttaccaggtttcccttctggaactgggcctggtgttgggactttgactgggacmaccccaaaaacataattctgggactgtgttgggaaatctgttggatcctatatatggagacacagtgtcagagagctctattatggatccaggtctgggcttgcactgccccacgtggatatccctgctggctttggctaatctcaaatgctggagaggaacttcaatatttttagaaagacact

SEQ ID NO: 347470 - DNA, 584 bp, Homo sapiens
catggttcttgttcttatgtgactgttgggctagtagaaaaaaaatacaatgaaaacaaaatcagatagaaaagataattttgaaaagtgataccaatcttaaaaaataattaaatgaggcagtttgaaggtaatgaagtctaaaaaggagggatagcctgaaaaagctttctggaaagagagacatctgagctaagacatgaactgaaatagccaaccatgcaaagataaagatcctctcaggcaaagggaagataagtttcaaagtctctgaagcatgggtaaactaggtttgttcaagaagcagaaacagtaagtcagaggcataatmaaaagaaaactggtaggaaaagagattgaaatggaagggagggcctaggttttgcagaatattatttctattttcacaaattattctttatatagtcctgcattgacagctcctttgaatatatcacaccagcccaactctttctctttgttgtgttagaagaatcagggtggtttcgtttcctctcataatccataacccttacttgtactgaatgttccatttaggtgtttcttccatttatcatgaacat

SEQ ID NO: 347471 - DNA, 584 bp, Homo sapiens
catggttcttgttcttatgtgactgttgggctagtagaaaaaaaatacaatgaaaacaaaatcagatagaaaagataattttgaaaagtgataccaatcttaaaaaataattaaatgaggcagtttgaaggtaatgaagtctaaaaaggagggatagcctgaaaaagctttctggaaagagagacatctgagctaagacatgaactgaaatagccaaccatgcaaagataaagatcctctcaggcaaagggaagataagtttcaaagtctctgaagcatgggtaaactaggtttgttcaagaagcagaaacagtaagtcagaggcataatcaaaagaaaactggtaggaaaagagattgaaatggaagggagggccyaggttttgcagaatattatttctattttcacaaattattctttatatagtcctgcattgacagctcctttgaatatatcacaccagcccaactctttctctttgttgtgttagaagaatcagggtggtttcgtttcctctcataatccataacccttacttgtactgaatgttccatttaggtgtttcttccatttatcatgaacat

SEQ ID NO: 347472 - DNA, 600 bp, Homo sapiens
gtggtttcgtttcctctcataatccataacccttacttgtactgaatgttccatttaggtgtttcttccatttatcatgaacataacacttaatgtgatgcttcaaaacataaatttccattttcacccctttcttgagctctttttaataactaagatggtgtttttgatacctttgcattatttyaattatgtagcccattttaagtactctgagaatctttaataatgaggatctttaataatttttgataagaaaatcaattaattaatatacaaaacaaagaaaaaagataatgtgagcccacaataaaccactttgtttaatataactgttttgattaagcaactcaatatcttgatatttaacccctttgtttgaaccaatttctcccatttggaacaggaccatttacccaatgcctgtacccccattgtatcttggaagtagctaactttttttttttctattttacaggcttataggcataagggacttgtcttttctcagatgagactttggactgtggacttttgagttaatccatacttttagaaccttgttgtcaatacataccactagatgcatctttttttctc

SEQ ID NO: 347473 - DNA, 560 bp, Homo sapiens
gtgtttttgatacctttgcattatttcaattatgtagcccattttaagtactctgagaatctttaataatgaggatctttaataatttttgataagaaaatcaattaattaatatacaaaacaaagaaaaaagataatgtgagcccacaataaaccactttgtttaatataactgttttgattaagcaactcaatatcttgatatttaacccctttgtttgaaccaatttctcccatttggaacaggaccatttacccaatgcctgtacccccattgtatcttggaagtagctaactttttttttttctattttacaggcttataggcataagggacttgtcttttctcagatgagactttggactgtggacttttgagttaatccatacttttagaacctkgttgtcaatacataccactagatgcatctttttttctcttcagtagaaattttcagagcaaaacacacaatgctctgacaagataaacatttatatatacaaataaagaaattgaagtataataatgttttgaaaaatgattgccatattgatatggt

SEQ ID NO: 347474 - DNA, 608 bp, Homo sapiens
agtacaggctgagatggtctcagatggagatgaggaacttacttggatctggactaaaggtcacttttcttatgctttagcaaaaagattggcagccttgtgtccatgctttggagatctgtaaaactttgaacttgagagagatgatttagagtatctggcagaaaaaaattctaagaagcaaagtgtgcaagacatggcctggccgcttctgaaagcctatgctsatttgcataaacagagagaaaatttgaaactagaacttatatttaaaagggatgcagggcataaacatttggaaaattttgcagcccaaccatgcagtataaaaggaaaagcaattttctggaggaagaattcaaggctgcagaaatttgcagaagtaaataaagagttgaatgttaatagccaagacaatggggaatatgacttcaggacatttcagatagcttcatggcagccccttatatcacaggcttagaggcctaggaggaaaagaatggttttatgagccagacccagggccctgatgctctgtgcagcctcgggacatggcacccttcatcctagccactctacctccatttgtcactaaaaagggccaaggt

SEQ ID NO: 347475 - DNA, 557 bp, Homo sapiens
ttcagacaacttcattgtaagatacatcaaagttttattgcaaattgccaaagaaaagacggaagraatgccttaaaaagtcattttattgtttattcttcatagaggcatttatgtacaaaaaacaacatacaaacaaacaacaacaacatgtgatagattaaataaatagctgtttaaagattgtaagaatggcctttccactgaatgtttatttctaattttttttagaatgaattcttaatctctttaaagtcagaaaaatccctagaacactttaatagcaatattattgttctcctgagaaagttataaagtatatcagaaaaacattatcccagacaaaatctgagatgagagatttttaatagattctaggctgcattttatacaaaaacatacttcacaattagatattattttttctgaattttctctgtatatgccatttacttagttcaaatccatttgcaaagttttcacatttacaactgcaccagatataaagcattgaatattttcattctcacattgccaaccactagcagtgattccag

SEQ ID NO: 347476 - DNA, 589 bp, Homo sapiens
cactctgctttctaattacaattgcacatggtttgtacaaatcctggtaaagacattgtttgaatttctatataatatgaatatattctggactatgttatctagcttagaaatcttttaatagtgttaagtaccaaagtggtttctatttttttgcccttcatttataaagagataacattttcaagagttgagcttctcttyggtgtttctccctattcctgctgctatggcttatcctctaatgacaacattccacaaggtaccactttcttatgacttaaaaaaacatttggttacttggacttcaattgtaaccatggccacagtatctctgtagtgggtttgacactaatttcttctttacaattcccctccccattctctaccttcagaatgttatactacattaaataaaaggccatgtgtggctcaaagtttctctggttctctggtgctaatcaagaatacagaaagtatactagttattctaacacaggtaagatgccataaagaattatttgaactggtaatggagattgcaaagaacaaaataaatgagatggacaccaagatattagagagttac

SEQ ID NO: 347477 - DNA, 632 bp, Homo sapiens
tcactgtgtggtggcagaattgctttttattaccatygctttcaattaccaattgcaaaatctgtgctcctcaatctttttcatctatgaggttttatagctgataacacctatagggtggggggaaggaatcctttccatgaactaatgctatggatgctatcatgtcactttagactttaaatactgatgctagatcatcaggcaaagaaagacattattctactagtgggcaaattttctagaatgttatgaagtactaggaatgctgcaacatgatgaggagaggaaagagtaagtatggaattcgattaattcaatgagctgcctctgggtacttccaaacttggtgacagtagtcacctgccagctgcggtgaccatggcctgacaaggcaaggtaactagatgaccaaaagttttgagaatctatgtctacaccactctagtggacaagtaaaccaaccagctgacattctaagattggttaagaaagatgaatattaactaaggtcttaggagtaattgctgcaggaggagctatagcttattccactagacttctggtatcacaacatttttagacattatgatcagctgttacttcaaagcatccataacagagtagactag

SEQ ID NO: 347478 - DNA, 632 bp, Homo sapiens
tcactgtgtggtggcagaattgctttttattaccatcgctttcaattaccaattgcaaaatctgtgctcctcaatctytttcatctatgaggttttatagctgataacacctatagggtggggggaaggaatcctttccatgaactaatgctatggatgctatcatgtcactttagactttaaatactgatgctagatcatcaggcaaagaaagacattattctactagtgggcaaattttctagaatgttatgaagtactaggaatgctgcaacatgatgaggagaggaaagagtaagtatggaattcgattaattcaatgagctgcctctgggtacttccaaacttggtgacagtagtcacctgccagctgcggtgaccatggcctgacaaggcaaggtaactagatgaccaaaagttttgagaatctatgtctacaccactctagtggacaagtaaaccaaccagctgacattctaagattggttaagaaagatgaatattaactaaggtcttaggagtaattgctgcaggaggagctatagcttattccactagacttctggtatcacaacatttttagacattatgatcagctgttacttcaaagcatccataacagagtagactag

SEQ ID NO: 347479 - DNA, 632 bp, Homo sapiens
tcactgtgtggtggcagaattgctttttattaccatcgctttcaattaccaattgcaaaatctgtgctcctcaatctttttcatctatgaggttttatagctgataacacctatagggtggggggaaggaatcctttccatgaactaatgctatggatgctatcatgtcactttagactttaaatactgatgctagatcatcaggcaaagaaagacattattctactagtgggcaaattttctagaatgttatgaagtactaggaatgctgcaacatgatgaggagaggaaagagtaagtatggaattcgattaattcaatgagctgcctctgggtacttccaaacttggtgacagtagtcacctgccagctgcggtgaccatggcctgacaaggcaaggtaactagatgaccaaaagttttgagaatctatgtctacaccactctastggacaagtaaaccaaccagctgacattctaagattggttaagaaagatgaatattaactaaggtcttaggagtaattgctgcaggaggagctatagcttattccactagacttctggtatcacaacatttttagacattatgatcagctgttacttcaaagcatccataacagagtagactag

SEQ ID NO: 347480 - DNA, 535 bp, Homo sapiens
ttatagtcagtgtacatatatagactcaaaacagagttgtcattcataattttaatataattttctatcaaaattagatttctataaactcccgattaagctattatcatgtctctgattacaaaataacatattattagaacatgctaatatttacattgagaaccgtcattaataacctgattttacccattcatgcattcttaatgggatggttattgacagcaatggactttcctttaaatttgttcggtttttgagagattagttcccggtcttagtacgtgattttcgatccctttttcaaaaataaactaaaagttaaaagcagcaattttaacattatgtccccaaaacaagaggaattactacttttatattaaaagatgaaatgttataatgatataactatacctgttagagacaaatcctaaatgtggctacatgggattttgaatatttcactttgcacagtatggggaggtctgacatgagacattgaaattgcraagaagaaagcaaaaaaactatgtgc

SEQ ID NO: 347481 - DNA, 534 bp, Homo sapiens
tgtcggggagttgggggcaagcagagggagagcattaggacaaatatctaatgcatgctgggcttaaaacctagatgatggttgataggtgcagctaaccaccatggcacatgtatacctatgtaacaaacctgcacgttctgcacatgtattccagaacttamagtaaaattaaaaaaaaaaaatacagaaatcttttgctaagaatatactttttctgcaagtgtccttcctaacttccttcttagaaagagagaagcagaaatattccttggtgataaaatcaaataattaaagtattctcaatgaagggatatatgctttaaatttgtaggaattaaaatgaaatatcagatatggcccttgatctaaaggagatgaaaatctaggtgaaacaatctgttttatttacacatcaaataacaagatgattattataatttatgtacccaagtagtttccactaacggaatgtaagatagttgtccttggctttgaggaactcgggatcattccagaagcagacagtagata

SEQ ID NO: 347482 - DNA, 542 bp, Homo sapiens
atttacacatcaaataacaagatgattattataatttatgtacccaagtagtttccactaacrgaatgtaagatagttgtccttggctttgaggaactcgggatcattccagaagcagacagtagatacactccagggagggaaacaagcaaacaaacaaacaaacaaacaaacaaacaccacaaccactcttttaccaaatgcaatttttttctagtgttatacagaaggtaatggattaatacggggatgtccgggagtgccacaattccttgtcacctttacccttggtaagccaaaaatattctgttctcccatgacgcatcacagacacggtgcagcttttggtggagggattttaccatgtcagagtggcttctgactgcactcaaacgctcagaacagggttctgtaggatcaacatcttccctgcttttaaaccacagcctattaattgcatacagtcaaagagcctaaaatttggatgattcaggaatctgtttttatcctaataaggttgacgatggaggtggataggatgg

SEQ ID NO: 347483 - DNA, 542 bp, Homo sapiens
atttacacatcaaataacaagatgattattataatttatgtacccaagtagtttccactaacggaatgtaagatagttgtccttggctttgaggaactcgggatcattccagaagcagacagtagatacactccagggagggaaacaagcaaacaaacaaacaaacaaacaaacaaacaccacaaccactcttttaccaaatgcaatttttttctagtgttatacagaaggtaatggattaatacggggatgtccgrgagtgccacaattccttgtcacctttacccttggtaagccaaaaatattctgttctcccatgacgcatcacagacacggtgcagcttttggtggagggattttaccatgtcagagtggcttctgactgcactcaaacgctcagaacagggttctgtaggatcaacatcttccctgcttttaaaccacagcctattaattgcatacagtcaaagagcctaaaatttggatgattcaggaatctgtttttatcctaataaggttgacgatggaggtggataggatgg

SEQ ID NO: 347484 - DNA, 542 bp, Homo sapiens
atttacacatcaaataacaagatgattattataatttatgtacccaagtagtttccactaacggaatgtaagatagttgtccttggctttgaggaactcgggatcattccagaagcagacagtagatacactccagggagggaaacaagcaaacaaacaaacaaacaaacaaacaaacaccacaaccactcttttaccaaatgcaatttttttctagtgttatacagaaggtaatggattaatacggggatgtccgggagtgccacaattccttgtcacctttacccttggtaagccaaaaatattctgttctcccatgacgcatcacagacacggtgcagcttttggtggagggattttaccatgtcagagtggcttctgactgcactcaaacgctcagaacagggttctgtaggatcaacatcytccctgcttttaaaccacagcctattaattgcatacagtcaaagagcctaaaatttggatgattcaggaatctgtttttatcctaataaggttgacgatggaggtggataggatgg

SEQ ID NO: 347485 - DNA, 553 bp, Homo sapiens
tgctctctgaagtaggtaaccacattttaaaattattattttctactattatatgtatgaataaagtgtccgtatatgtatgatatatatcatctctctaatatatgggtacttatctggtaaatcttaagctaatgtatccctctcaagataaaagtttatcaagtttgccttgctcagttctacctttttaatgcagaagattaattgttcttattgtttattagtatctagctacaatgaaaatgtgaatacatgctgcctagtgtaggttcactggtcatgaaaaggaattttttcctctagtattttgaagttagaatttgatgatatgtcttaataaayactgttgaaaatattattaggatattatgctggatgtgactcaccaatatctatttgaggtttcccacaaattggtaggacctaaacaaaaacagagattcccattgacacaccaaaacttatcccctatacctaataacttggtagactcaagaagtcaggctcactgaactactcctcactgatgctagtatctaaagctgaggct

SEQ ID NO: 347486 - DNA, 557 bp, Homo sapiens
aattatccttaaatgtactcatattatctgatgtaataacactgcagtatatctctaaatataattctctgatagtcactcgagtcatgtaagttcaacattctatatttgcctccaaacactctctgagccaatatcatgtacctggttgactattatttattcatttgttttttcttctttaagttcaaggcttgcattctctggaaaaagtttttggatatcctctgtgacttagggttctgtgtgttacctatatcacctagcatacaaggtattacactgtgttttaatttatgacttaaataggtaagctcattgaggctggaggtaatttactactttttttctcttaggtttatctgtgactacttataaaggcacttcagaatctcctrgtacacttgcaaaatttgtttaaaataattaaactgtattatttgaacacaaatcaaaagttctttcagtagcactttcctcacactgattaatattacactttggcctaaaagtatgatttttccagtaacactgagtttaaaatgaaggaatatata

SEQ ID NO: 347487 - DNA, 581 bp, Homo sapiens
cagcccacctctggcgtcttgtgcccctttcccatgaatcttcccttaagttgggctgcccacaaatgcagtgccctccttacayttgggaagtgagcatgcgcagtgtgcttaggaagttctacgcatgtccatctgaggctttcttcccttttttttccagtggagtgcccctgaaaggtcatactcctccattttgtcttttaatgttgatgccccgggagttacttcttcctggtatcttccttcaattaacactttaacgtgacagctgtggaccatcaggagattgtcgctccctggcagtgacagccaaattatcatttttagagaggcaacgcgataactgtcaaatcatcctccaataatcaccttagggtcctggtgggttggggagagagccctctcctcccctactcatggcctgtctaactctctgcaacaagttgctttattgcaatatttgttttattgtgttggtctggaactgaacctgcagtatctttgagggttgcctgcattaaagaatttctatggtatggaactgagaaaacctataaagagaagggaatatatttaac

SEQ ID NO: 347488 - DNA, 581 bp, Homo sapiens
cagcccacctctggcgtcttgtgcccctttcccatgaatcttcccttaagttgggctgcccacaaatgcagtgccctccttacacttgggaagtgagcatgcgcagtgtgcttaggaagttctacgcrtgtccatctgaggctttcttcccttttttttccagtggagtgcccctgaaaggtcatactcctccattttgtcttttaatgttgatgccccgggagttacttcttcctggtatcttccttcaattaacactttaacgtgacagctgtggaccatcaggagattgtcgctccctggcagtgacagccaaattatcatttttagagaggcaacgcgataactgtcaaatcatcctccaataatcaccttagggtcctggtgggttggggagagagccctctcctcccctactcatggcctgtctaactctctgcaacaagttgctttattgcaatatttgttttattgtgttggtctggaactgaacctgcagtatctttgagggttgcctgcattaaagaatttctatggtatggaactgagaaaacctataaagagaagggaatatatttaac

SEQ ID NO: 347489 - DNA, 581 bp, Homo sapiens
cagcccacctctggcgtcttgtgcccctttcccatgaatcttcccttaagttgggctgcccacaaatgcagtgccctccttacacttgggaagtgagcatgcgcagtgtgcttaggaagttctacgcatgtccatctgaggctttcttcccttttttttccagtggagtgcccctgaaaggtcatactcctccattttgtcttttaatgttsatgccccgggagttacttcttcctggtatcttccttcaattaacactttaacgtgacagctgtggaccatcaggagattgtcgctccctggcagtgacagccaaattatcatttttagagaggcaacgcgataactgtcaaatcatcctccaataatcaccttagggtcctggtgggttggggagagagccctctcctcccctactcatggcctgtctaactctctgcaacaagttgctttattgcaatatttgttttattgtgttggtctggaactgaacctgcagtatctttgagggttgcctgcattaaagaatttctatggtatggaactgagaaaacctataaagagaagggaatatatttaac

SEQ ID NO: 347490 - DNA, 581 bp, Homo sapiens
cagcccacctctggcgtcttgtgcccctttcccatgaatcttcccttaagttgggctgcccacaaatgcagtgccctccttacacttgggaagtgagcatgcgcagtgtgcttaggaagttctacgcatgtccatctgaggctttcttcccttttttttccagtggagtgcccctgaaaggtcatactcctccattttgtcttttaatgttgatgccccgggagttacttcttcctggtatcttccttcaattaacactttaacgtgacagctgtggaccatcaggagattgtcgctccctggcagtgacagccaaattatcatttttagagaggcaacgcgataactgtcaaaycatcctccaataatcaccttagggtcctggtgggttggggagagagccctctcctcccctactcatggcctgtctaactctctgcaacaagttgctttattgcaatatttgttttattgtgttggtctggaactgaacctgcagtatctttgagggttgcctgcattaaagaatttctatggtatggaactgagaaaacctataaagagaagggaatatatttaac

SEQ ID NO: 347491 - DNA, 566 bp, Homo sapiens
gcaatataacaaactcatcctaaaacttaatggcttagggttttatgggttggactgaacttagcgagactagttcatttgtgctacttagcctcacctagcatagcttgatttgggctggaaattatactttcataaaggttcactcacttaaatggcaagtgatgataattgttagttgggagctcagctgtggcaactgaccacaagtctctgttttctgcaggtgatatctcttgatgtgatagctctatttttcttataatatggcagttgaatcccaaagaaaaaacagtttcacaggacaatacctcaagtaagatctcttattttctcctgtgacgctctctaatgtcccattgaccaaaccagtcatatgaayaggctcactgtgaaagtgtgacaggactgccccaagcatgaaatctgggagacatggatcatggtgagcatcaaaataacatcaatatgaaaatatttctacaattttggtgggaaagtgtaagaaaaagatatttattatttattcgtggatgaacattcaagagtagtaagaaacaaagtgc

SEQ ID NO: 347492 - DNA, 678 bp, Homo sapiens
caaatgagagaaggcaagatcagagttgtaagaacaggggcggaagggcaaatatgtggcatcatctatgtagcataagtgtaggctattctatggatttggctttgagacatactgttaactatttaagggtttgttcatagattaaacatttaatttgagatatttgtcatgaataattccaagattttttgaagaaatgtgtccaaagtcatgcaaaggaagacrgaatatgtgtgtatagatgagaaaatgaatttaaaaaattagaaaagaaaattaagtgacatatttggaatgattagtaaaatgactagcacagaaagaagcaaaactactatacttgtggcataaataaaaatgaacataaacataaatatgaataaaattgcttagctccataaaaaagtaacaaatttaaataagcacaaaatatgtcattttcaaataagacaaaatattatatatctccacataaagttatgtggactcatcttgaaatcttttatcttttcatctttatttgaaatttagaaattctaattctaattcttacatgtatttcttctttagaaaaagcttactgatttctgtaagttaataggaaccctctgtctctctgtctctctttctttttctatagacacatataaaatacacacaaatattttacttgta

SEQ ID NO: 347493 - DNA, 627 bp, Homo sapiens
gccttgtgaagctatattgaatatcaaatataaagaaatagtagcattcaggcaaagaaaataaaattttcctcaaagtctttttttagtagttttaggtgtcagaaaagcagataaaaaaatttcctaaatcaaataaacaattactagaaccgagtaaatttaaactttacataatacaaagttaatgtacaaaatttaattgaatttttatatcctggaaataaatcaaatatgtaaacatctgataaggggatttaaaatgacagtagttttgagattcaataaacattgccccagaatattatacctgagacaaaaggtcagtagagccaatagccaagatcttacaccaaattatattaaaatgcatttgcaacatacacctattataggtatatatttctctgtaactagaaaaccaaaatgtgtgtatgctcaggctaagtataacattgttttctaaagaacagagttagctttgcccagtcataaattcacttccttcccagagcatcaaaatattaaaataagcaagaattatcaacttgrccttaaagatctctattagaatgtttctgaaatcaaaatcctagaaaatccagccaccaaattatagtaagcttc

SEQ ID NO: 347494 - DNA, 581 bp, Homo sapiens
aaataattacaaaggcaaacacacttattttaaaattgcatctatcacaaattatttgcatttttaatgcagggatgatttttaaatttcagataattattttaattattgtttttataatgcattttaaaatattattgatattcagacagcaatcatgaactataatacataacaaagtatttgctattctatacatggttctacaaaagcagatctattaacttttgattttattcatgtaaagtgacatattgttaagattccttagaaataggctgggcatcgtggctcacacctgtaatcccagcagtttgggaagccgaggmgggtaaataacctgaggtcagaagttccagaccagcctgaccaacatggagaaaccccgtctccactaataatacaaaaattagccagagatggtggtgcatgcctgtaatcccagctactcgggaggctgaggcacaacaattgcttgaacccaggaggtggagatggtgatgagctgagatcatgccattgcactcaaacctgggcaactagagtgaaactccatctcaaaaaaaaaaaaaaaagaaaga

SEQ ID NO: 347495 - DNA, 591 bp, Homo sapiens
gaagtgccttcatcagatattggatctggtgacaccttgatcttggacttaacctccagttatgagaaataaatgtttattgtttaagccaccacatctattgtattttactatagcaacctggactgaatgaggcatctatcttgacttcaactataaatttaacatacacaaggatttaagtagcactgaaaacaataatgcaagtcctttagcacaatatttcatagcatggaggctgtgttataaaggttgctaaaaatgtatcaaccttatggttccagatttaaattactaagattccccacacagaaagaatgggtatgggcagatgctttttactcacattggttctgttgctttttggtgtgtttcctctctggtctcaaaatagttttgtctccttcctggtaaactaatattacttacagaaactacgactttycccttgcctaaacattggtgttgctatgatatgcattccctataagctgacagaaataaaatttaaaagaaaggaaagaatgcagacgcttacccttagccttggatatcaacttacagagacaaaatcatatttcgctacaaaga

SEQ ID NO: 347496 - DNA, 581 bp, Homo sapiens
aaccactatctgaaaaatctgtttttttgagacagagtctcgctctgttgcccaggctggagtgcagtcacgtgatcttggctcactgcaacctctgcctcccaaattcaaacaattctcctgtctcagcctcctaactagctggctctacaggcacacgccaacacacctggcgaatttttgtatttttaaagtagagatggactttcaccatattggtcaggttggtctagaatgtctgacctsgtgatccacctgcctcagcctcccaaagtggtgggattacaggtgtgagccactgcacctggcctgtctgaaaaatcttaaacctgtattttctagaataagatatctagacagcctaaatctgattttatttatagtctttataaaaataacatcctgcattctcatacttttctgttatggtaagcctgctcaataggcagtgttttgctgactttgggaagcagtatatatagacaaatattgtgtgcatattcagaatttgaaatcaggtcctggttcacttacaagaattttggtggacatctaattctacataataaaaaaaaaaatca

SEQ ID NO: 347497 - DNA, 589 bp, Homo sapiens
aaaaataaagttcctcctgaagttatatctgctacctgattattttggacttctcatactaagagaccagaagtgtgtgtttatggatttcatamtgaaaaactggaagttaccaatataaaaacagcagtaatagttgtgtgtggtagaaaatatcaaccaaataaaaaagtaaaaacttaatgaaaccattgttacttttatttcaaagggctaatctttctgaaatagaatgtgtattatgtacatattgtaatgcattataaaatatttatatattgtaataatatattctttattacatattgtatatacattatactgtgtatatatacattgtgtttataatgtatataaatatatatgtaaaattcaaaataaaatggagaaaatactggaagagatggttccccataatgcaaaccaaatggtagtgattcctcctatataaacacttaaaatcacatgggaagtcttcctcctagaattacaaattcaaaattcactggctccctatttctcatctataatattgaaactaatataaaaatctgacatcacactttgttactaaacctgaaagtaacaa

SEQ ID NO: 347498 - DNA, 498 bp, Homo sapiens
ggataaaatggcagatgggagacagcactaatgtgcagctcccacttggatggacagagcaacatctggagactcacattgtgaacttttgctctaagaaccactgcaggaacataccaggaaaactgaaagaattcacaaaygctttgaaagaaacagtttgctgctgcaagtgccacaagacagccaaaaaactgtgagttttcaaagtgtgagagggggaaaagttagcctctgaaaacacatccccactggggaacctgaaaatccacatcaagggagaagggtttaaacttacctagagctgaaatggatttagggagccaagtgaaatataaaagtagaacaagcagtgggaagaaccttgtgggcactcccagtccccagctagaacccagggaagccattcctggccttattttacagaggtcctcggggaatggaaggcagccaggaaaactggggaggggccacagggtgaaagaagcttctagctga

SEQ ID NO: 347499 - DNA, 522 bp, Homo sapiens
ccatattaaaagcagatttctcagcagaaaccttgcaagccagaagggatttgagtcctatctttagcctccttaaacaaaataatcatcagacaagaattttgtatccagtgaaactaagctttatacattgagagataaaatttttttcagacaaagaaatgatgagagaattcaccactaccaaaccagcactaccagtaatgctaaaaggagttctaactcttgaagcaaaacctcaaaatactccaaaatgaaaccctgttaaaacrtaaatctcacaggacctataaaaaaacagtaacacaatgaaaaaaatatcaaggtattcaggcaacaactagcatgatgaatagaacagtacctcatatccccacactaatattgaatgtaaatggcttaaatgctccacttaaaagatacagaatggcagaatggataaaaatccaccaatcaagtatctgctatcttcaggagactcacctaacacagaaggactcacataaacttaaggtaaagggg

SEQ ID NO: 347500 - DNA, 522 bp, Homo sapiens
ccatattaaaagcagatttctcagcagaaaccttgcaagccagaagggatttgagtcctatctttagcctccttaaacaaaataatcatcagacaagaattttgtatccagtgaaactaagctttatacattgagagataaaatttttttcagacaaagaaatgatgagagaattcaccactaccaaaccagcactaccagtaatgctaaaaggagttctaactcttgaagcaaaacctcaaaatactccaaaatgaaaccctgttaaaacataaatctcacaggacctataaaaaaacagtaacacaatgaaaaaaatatcaaggtattcaggcaacaactagcatgatgaatagaacagtacctcatatccccacactaatattgaatgtaaatggcttaaatgctccacttaaaagatacagaatggcagaatggataaaaatycaccaatcaagtatctgctatcttcaggagactcacctaacacagaaggactcacataaacttaaggtaaagggg

SEQ ID NO: 347501 - DNA, 599 bp, Homo sapiens
ccatcaaaataccattatcatttttcacagaactagaaataaacaatcttacaatttatatggaaccaaaaaagaccccagatagccaagcaagactaagcaaaaaaaacaaatatgaaggcatcacattacccaacttcgaactacactacaagtctatagttaccaaaacagcatggtattggtataaaaataagcaggtagatcaatggaaccagatagagagcscagaaataaagccaaatacttacagccaactgatcttcaacaaagaaaacaataatataaagtgcagaaaagacaccctattcaacaaatggtgctgggataattggtaagtcacacatagaataatgaaactggatcctcatctttcaccttatagaagatagaagataacatctgaaaaactctgctagacattggcttaggcaaagaggttatgaccaagaatccaaaagcaaatttaacaaaaacaaagataaatagttgggacttaattaaactgaaaagctgatgcacagcaaaagaaataatcagcagagtaaacagacaacccacagagtgagataaaatatttgcaaattatgtatttgcat

SEQ ID NO: 347502 - DNA, 599 bp, Homo sapiens
ccatcaaaataccattatcatttttcacagaactagaaataaacaatcttacaatttatatggaaccaaaaaagaccccagatagccaagcaagactaagcaaaaaaaacaaatatgaaggcatcacattacccaacttcgaactacactacaagtctatagttaccaaaacagcatggtattggtataaaaataagcaggtagatcaatggaaccagatagagagcccagaaataaagccaaatacttacagccaactgatcttcaacaaagaaaacaataatataaagtgcagaaaagacaccctattcaacaaatggtgctgggataattggtaagtcacacatagaataatgaaactggatcctcatctttcaccttatagaagatagaagataacatctgaaaaactctgctagacattggcttaggcaaagaggttatgaccaagaatccaaaagcaaatttaacaaamacaaagataaatagttgggacttaattaaactgaaaagctgatgcacagcaaaagaaataatcagcagagtaaacagacaacccacagagtgagataaaatatttgcaaattatgtatttgcat

SEQ ID NO: 347503 - DNA, 564 bp, Homo sapiens
ccctctcctggactagatcagaaccctggttatcactgatctctcatagctactccctgtgctgttcttacccagtgatgaacacactttgtttttatatctttcagtaattttttttaaaaataacctctgttccagtctactctgtaggctccaagagagcaaaggctgtagtttttgctttccactgtgaatacctaattcttagtgacgcacctggcccatgggaaccacacaggtatgtatggacctggataaattaatccacagcaccatgtgccactgatsactacctgaagcatttgtcagaaacacaggagttcccctgccaccttcaccttggactcccttgtggattcccgccccatgtcctcgcctggctgaatttggtgttgctccttggttgctctcatacctgatcccagaccttctctaaccttccacccctaagctttgagtgaagtcacttcccttctcttttccatccagacctgacccaacgctggttaatggctccaccacactccccccgccaccatgcaggtcctccttccctagcgatgc

SEQ ID NO: 347504 - DNA, 580 bp, Homo sapiens
ccaaaacgtctgcatggtaaaagaaataaaaagcagagtaaacagataacccacagactgggagaaaatattctcaaactatgcatctgagaaaggactaatatccagaatctacaaggaactcaaacaaatcagcaagaaaattataaataatcctatcaaaaagtgggctaaggacatgaatagaaaattctcaaagcaagatacacaaatggccaataaacatataaaaaaagcccaacatcactaattatcatggaaatgcaaatcaaaaccacartgcaataccactttactcctgcaagaacggccataattttaaaatcaaaaaatagtagatattggtgtggatgtggtgaaagggaacacttttacaatgctggtgagaatgtaaactactacacccattatggaaattccttaaagaactaaatgtgggttttcttttttttttttttagaactttctggcacataagatgctccaggcttatctggtgtatttcctgctccaagtctttaaatccaggaagacctagcttcctggtacccataatctgggtaccaggtgcactggttgc

SEQ ID NO: 347505 - DNA, 548 bp, Homo sapiens
gggggagaaaggagaaatagtaacattgatttatttgggatggaaagatccacagactggggaaaaaggtagagagcaatcataaaactggctcagttctgcaacctgctgtgagcagagactgtcacagtgcataatagcaaaggcagatgaaatggacacagggagtgcaaccccttcctccctatcacagaacaataaagctagaagtcaaggatgaaataggtgggctgaccaatagtacattggccaattgaaggcctggcatctaccttcgaaaggctgcctgtgttgggattgatgtgctcactgtgactgcagtgctctgcaggaactgtttgataacaaacagggtggcagacaggcttgtccyttcatattaaccccatcgctcagctgtcatctcagtcaatgccccaaactgcccaatgcccacctcaccttcttctcctgaggggccacctgggctggaaggggtggagctcaccagctgggactcctgggtggcatctgtctccaggaccaggtcatcttaggacagctctggg

SEQ ID NO: 347506 - DNA, 600 bp, Homo sapiens
gactatgcagggcaatttcttctctcgttgaaggcgggagtgcaatacgcaagtctagctgttcaagtatgtttcaaacatctgactgcatcatgtctgttaacatctcattgaccaaactaagtcacacggccatcacaaagtctagtgaaggggaagtattcttgtcctaccatgaggctgtggtaagaatgtggtggatgatattcctccagggtagcaaagaattggggtcaataattcratcatcacatctcttaaatgaagaaacattccaactggtcagggtagacatgggtgtccttggccctgctataagtaagtacttcaagggccaaggtagtgtctgcctcacctctctatattcactgtgactagcctatgatatgcatttagtagatttttgttgaagaaatgattgggacttgttagtggttcacattttagcctattgttttgttgctagtcaagagattccttgtataatatttacttcttctcatctatgtttataatcagctcaacaggctccagaaaattgctttttagtgacagtaagaagggtggaacaatgagcacatttgtacccaaggaaaggtt

SEQ ID NO: 347507 - DNA, 600 bp, Homo sapiens
gactatgcagggcaatttcttctctcgttgaaggcgggagtgcaatacgcaagtctagctgttcaagtatgtttcaaacatctgactgcatcatgtctgttaacatctcattgaccaaactaagtcacacggccatcacaaagtctagtgaaggggaagtattcttgtcctaccatgaggctgtggtaagaatgtggtggatgatattcctccagggtagcaaagaattggggtcaataattcgatcatcacatctcttaaatgaagaaacattccaactggtcagggtagacatgggtgtccttggccctgctataagtaagtacttcaagggccaaggtagtgtctgcctcacctctctatattcactgtgactagcctatgatatgcatttartagatttttgttgaagaaatgattgggacttgttagtggttcacattttagcctattgttttgttgctagtcaagagattccttgtataatatttacttcttctcatctatgtttataatcagctcaacaggctccagaaaattgctttttagtgacagtaagaagggtggaacaatgagcacatttgtacccaaggaaaggtt

SEQ ID NO: 347508 - DNA, 299 bp, Homo sapiens
tgggaatgtatatgatgtagataacattatgtatatgtgtgtacctgtgtattgagagagagagattgagagagagagagaaaccataaagggctgtaaaatagaggaaattgctattctgatgatcacaggttctagggttggtaaggagatttcctcagcttagagaaaggctgtgctctgagggccatggttcragtgagaacctggcggcattttgaatccgctttctaaaatcacactcttgtttcccagccccctaggtcttctctctgtagcttcccttcgtactcaggggg

SEQ ID NO: 347509 - DNA, 585 bp, Homo sapiens
cctcatgcatctgtggctaatgactagtcagcttagaggatctgctgtggcgtgttggctggcyatcaactggcacaatggggcaactggatagcctgtatctcattctccagcaggcaagcttgaatttgttcccacaccaactgggcagcacagctacctagagcatgaagatttcttgaagcttatgctcaaaactggcacaacatcacatatgtcacattcttttgcacaaacaaatcacaagcccagcctagattcaagagataggtacacagctttacctcttgatggaaggagcttcaaagtcacatgagcaagggcatgcattatggaagagttgagaattgtagctatttttgcaatctaccaaatagtgtaacagtttgttctttttgaattttttaaaattttcagtgcagtactcaaattatcttctcctaaagaaaacaaaatctacgctttttatgtttatcagggaaaaaaaaatcatggactataatcatcccaaaatgaaaatgtccaatccatgaatggcaatgacattgggtgatcatatcatgacatcatgaaggtaaaggtaga

SEQ ID NO: 347510 - DNA, 585 bp, Homo sapiens
cctcatgcatctgtggctaatgactagtcagcttagaggatctgctgtggcgtgttggctggccatcaactggcacaatggggcaactggatagcctgtatctcattctccagcaggcaagcttgaatttgttcccacaccaactgggcagcacagctacctagagcatgaagatttcttgaagcttatgctcaaaactggcacaacatcacatatgtcacattcttttgsacaaacaaatcacaagcccagcctagattcaagagataggtacacagctttacctcttgatggaaggagcttcaaagtcacatgagcaagggcatgcattatggaagagttgagaattgtagctatttttgcaatctaccaaatagtgtaacagtttgttctttttgaattttttaaaattttcagtgcagtactcaaattatcttctcctaaagaaaacaaaatctacgctttttatgtttatcagggaaaaaaaaatcatggactataatcatcccaaaatgaaaatgtccaatccatgaatggcaatgacattgggtgatcatatcatgacatcatgaaggtaaaggtaga

SEQ ID NO: 347511 - DNA, 585 bp, Homo sapiens
cctcatgcatctgtggctaatgactagtcagcttagaggatctgctgtggcgtgttggctggccatcaactggcacaatggggcaactggatagcctgtatctcattctccagcaggcaagcttgaatttgttcccacaccaactgggcagcacagctacctagagcatgaagatttcttgaagcttatgctcaaaactggcacaacatcacatatgtcacattcttttgcacaaacaaatcacaagcccagcctagattcaagagataggtacacagctttacctcttgatggaaggagcttcaaagtcacatgagcaagggcawgcattatggaagagttgagaattgtagctatttttgcaatctaccaaatagtgtaacagtttgttctttttgaattttttaaaattttcagtgcagtactcaaattatcttctcctaaagaaaacaaaatctacgctttttatgtttatcagggaaaaaaaaatcatggactataatcatcccaaaatgaaaatgtccaatccatgaatggcaatgacattgggtgatcatatcatgacatcatgaaggtaaaggtaga

SEQ ID NO: 347512 - DNA, 330 bp, Homo sapiens
tcagggaaaaaaaaatcatggactataatcatcccaaaatgaaaatgtccaatccatgaatggcaatgacattggstgatcatatcatgacatcatgaaggtaaaggtagattctgttctactccaacccaatgggactgtacttggagcagtgttttggctcagggaggggaatcacaagaatagcattgtcaacctgggacatttggggaagaaagaaatcagttcagaccaggactcaatttcacatcataagagagatggttgaaggaatcagcactgtttatcttagagaagagaatgcattagagacaaaccagccagcttcaa

SEQ ID NO: 347513 - DNA, 598 bp, Homo sapiens
actgggcagcacagctacctagagcatgaagatttcttgaagcttatgctcaaaactggcacaacatcacatatgtcacattcttttgcacaaacaaatcacaagcccagcctagattcaagagataggtacacagctttacctcttgatggaaggagcttcaaagtcacatgagcaagggcatgcattatggaagagttgagaattgtagctatttttgcaatctaccaaatagtgtaacagtttgttctttttgaattttttaaaattttcagtgcagtactcaaattatcttctcctaaagaaaacaaaatctacgctttttatgtttatcagggaaaaaaaaatcatggactataatcatcccaaaatgaaaatgtccaatccatgaatggcaatgacattgggtgatcatatcatgacatcatgaaggtaaaggtagattctgttctactccaacccaatgggactgtacttggagcagtgttttggctcagggaggggaatcayaagaatagcattgtcaacctgggacatttggggaagaaagaaatcagttcagaccaggactcaatttcacatcataagagagatggtt

SEQ ID NO: 347514 - DNA, 600 bp, Homo sapiens
cttggtaattctgccccctgccttccaccaggagtgtgtgcagctctgtgcctgtgtccagcacaccctatgtgctaaagtttcctaaccttagcrggggtatgaactgtttgcccaggaatgaatggagatgtgatgtgaactatattttgtcccaaacaagaagagaaatctcagcacaagagaaacaaattatctcacaaataagtgaatctattctagtaattgagcagaactccaagagaaaatcttcacgatcttactggaaagctttttacaaagaataagtgtaagattgccagtagagaatgccaatctgtggagatgcccagcccctatgttggcctgtccatcatggttagctctgattgggactgtgccgaaaagaagggtaagcaggtacagatgacaagagtccaaggcctgtgacttggggacaataagcattataattgcatacaattactgagcactcactctgtcccagacatattttatatacatcaattcatttgatgctcatgttaggtagctgctgttactggccaggatttcaaagtagctactcctattgtcctcatttttctgatgagagaatga

SEQ ID NO: 347515 - DNA, 541 bp, Homo sapiens
cagtgacccctcgcagaaggaaagtgcctgctttcatgtgatgtctgtgcattagttccagggaagagctctgggcagcccatcttgagtaacatgctctcttctcggactagccaccaggggcattgtggattatgattggcctgatctgggacccttgccatcaccaaggggagtggcttagggggctatgactgacagcctcagaatgacaagtggtggatgtagggcaggcaaatcagccgatgtccattactgaaaggatgctgtattttcctgctgggataacaagtataaatattaggttggtgcaaaagtaattgcggttcttgacattactttcagtggcaagagagacactgggagtagagagtgaggttggtgaaccttgcaagttgaagctttctctcctcagaatcacttagcctgtgcctttttctcagaaagaagagaaaacaaccccctaggcatgaaggattatgtgatttgggcagcatgagatctagatwaactgtgggaacaacttcaaggaccactggag

SEQ ID NO: 347516 - DNA, 494 bp, Homo sapiens
ccagcagcagggcattgcctggaagcttsttagaaatgtgatatcagtcccctccccagaccttctgcactggactctgcattttaccaagatctccaagtgattggtgtgcacagatgaagtttgggaaacattgttccaagctacttgagcagcaagtttgcttcctaagaattattacataatgttcttcatttttacagcattttgcaagttacagagaactaaaccacaagacccctgggaggaggaataggctcttttcatttctgtatagtagggcctgtggcagtatccaacaccaaatttgctctccaatgctggatgaatctggaataagttctgacatggcccaacctaaggaggtgacttgggaagtaaagggaaaggattaatgtttgttttatacgtactatgtatcagacactattattatagaagtaagatattttagtcacatttataattgagggaattcagttcagagaggccaa

SEQ ID NO: 347517 - DNA, 629 bp, Homo sapiens
taagatttgcatcaggaacacaataaaaatgagtttgctatgtcagtttccagtttctttctctcaggtcagatgtcagcatacctagcgcgggacaactgaggaatctgcattctcaaagagaagccttcatggtgccactcctctccacttcccatgccttgtttatgtaggtggctccatgctttgagaaatactgcaacaggggtaagagagtctatgaatagaatttaggattctatgaacgtggatgggaaagaattttgcagcctcattttcaacatcttcaaattgaaaattagcatttcccttaataataaatataggccacaaacgacagttgtactaacagtgcctgtgactttgtcaccaatgcaactcatacttttctatcacacaagttttgcagttatctcaaaatatcttttacattcacyagttcttcaaaattgtagttgttatgagacttgctgctagatctcagcaatatgttaatttaaaaacacagcacaaattttgtttaatattctaataattgtaatttaatagaattggctgcctttgtaatccaacattattttttatttaaaagcgtgatgctgagaagatgtccctggccttcaccagac

SEQ ID NO: 347518 - DNA, 427 bp, Homo sapiens
caggagagggtaagtaaagaggttgaaaggatgagagttaaaatgagacagggcacaagtcaatgagtctcctcagctggtcatgaatggctggtcctatgggggctgtcctgaaagtctacaattagggctccacacatattgaaggagctgaggccatgttgaaaaaagcagtgcttcttaatttttaatatccacaraaattacctggggatcttgttaaagtggagattctgattcagcaattctggggtgggctctaaggttctgcatttctgacgagtgtctaagtgatgctgatgctgctggaatgtggcccacattttgagcagtgttaaagagaaattgcaccaaatacttgtgaaaaatgtcaaggaagactttattcaagactattgcaattggggagagagattgaactcaactt

SEQ ID NO: 347519 - DNA, 516 bp, Homo sapiens
aaaatgtcaaggaagactttattcaagactattgcaattggggagagagattgaactcaacttcaaatataaaagggacagctggggacttaaagccaacaggcagggtgagggagaggatagaaaagtattaagaagatcttggttaggtatycagggttagggaagaggaactggattagatgtcaagggtgggagaattgttgctaaatggcttagcaggattcttggtaaaactgggtccaaaggccaagggcaaggctcagtcaagaagagggttctgtgaggggcctggctaaagtttggtcaaggaggcagtacttgttagtagcaagggaccagagtagagaagtttctaacaaacttctctactctggtggatggtctcccccatgatgttctcatgataacgggtgagttctcatgagatcttatggttttatgagtgtttggaagttcctcctttgttcttctctctccttgcttcccctttatcttccaccatgattgtaattt

SEQ ID NO: 347520 - DNA, 614 bp, Homo sapiens
ggccaccttctgtagcctgaaagtcccctgtgactctttctttttctgcatttgccaaacatttattttgtccctttatttaaaacttcagtgttgctttgttgctttttaaattagaagacaatgattttcttctttgygaggcagagagagaagatgtggaaagaaaagctcccaggatttagagcatggatattaggatacttcttcatcacgtctttcttgaagatgtgggtatgagccatggtaaaattaagagtggtcccttccagatgacctctccagtgaccttgggcacttaaggcactctccttggctctagcgtttttatttgagaaacgggtagaaatcatttctgtctgctcacatcagagaaataggtgggaaatgctgaatggaatataaagtgctaatcacaggttggtggttgttattattgatgttgtttttacttctgctgccatgagcagtgttatagggagaaaacatatgtttttaacaagttttttatttttcaaataagacaaagaaatggtaaaaatatagtataaaggttatacagtgaaaactgtctccttcccactatcagtcccttctcagaacagtagatacct

SEQ ID NO: 347521 - DNA, 614 bp, Homo sapiens
ggccaccttctgtagcctgaaagtcccctgtgactctttctttttctgcatttgccaaacatttattttgtccctttatttaaaacttcagtgttgctttgttgctttttaaattagaagacaatgattttcttctttgcgaggcagagagagaagatgtggaaagaaaagctcccaggatttagagcatggatattaggatacttcttcatcacgtctttcttgaagatgtgggtatgagccatggtaaaattaagagtggtcccttccagatgacctctccagtgaccttgggcacttaaggcactctccttggctctagcgtttttatttgagaaacgggtagaaatcatttctgtctgctcacatcagagaaataggtgggaaatgctgaatggaatataaagtgctaatcacaggttggtggttgttattattgatgttgtttttacttctgctgccatgagcagtgttatagggagaaaacatatgtttttaacaagttttttatttttcaaataagacaaagaaatggtaaaaatatagtataaaggttatacagtgaaaactgtctccttcccrctatcagtcccttctcagaacagtagatacct

SEQ ID NO: 347522 - DNA, 553 bp, Homo sapiens
ctatgacattgtcctctaggacaatggatggttcattattaagtcaaccaaaatgtaatttccagtatcctttccatccctcctagtctataaatccaagactccagcaatttgcctactcctgcccatcccttaaaactcagctcagctgccaaaaccctagtgaaggcttcctctctcctgtgagcattgctaacgtttcttttctcctagtctccctttatcttctgctttctctcgtctggcctttctcaagccatattctaattgttattaacccttctgtctttcgccttagtgaggtcctaagagataggagccaagtttattcaccttgtatcccagggcctrtagttcttggtatacaggatatcctcaataagtatttgctgaacgggaaaggaaagaatgaatgtgggaagggtggagtatcttggcaggtgcttgctactcaaagaactagagctccatggtgcagcaagggaaaaggtctctgcctcccagcagagggcagcagagagcttaggagcagaaactccctgcaggatgatta

SEQ ID NO: 347523 - DNA, 553 bp, Homo sapiens
ctatgacattgtcctctaggacaatggatggttcattattaagtcaaccaaaatgtaatttccagtatcctttccatccctcctagtctataaatccaagactccagcaatttgcctactcctgcccatcccttaaaactcagctcagctgccaaaaccctagtgaaggcttcctctctcctgtgagcattgctaacgtttcttttctcctagtctccctttatcttctgctttctctcgtctggcctttctcaagccatattctaattgttattaacccttctgtctttcgccttagtgaggtcctaagagataggagccaagtttattcaccttgtatcccagggcctgtagttcttggtatacaggatatcctcaataagtatttgctgaaygggaaaggaaagaatgaatgtgggaagggtggagtatcttggcaggtgcttgctactcaaagaactagagctccatggtgcagcaagggaaaaggtctctgcctcccagcagagggcagcagagagcttaggagcagaaactccctgcaggatgatta

SEQ ID NO: 347524 - DNA, 553 bp, Homo sapiens
ctatgacattgtcctctaggacaatggatggttcattattaagtcaaccaaaatgtaatttccagtatcctttccatccctcctagtctataaatccaagactccagcaatttgcctactcctgcccatcccttaaaactcagctcagctgccaaaaccctagtgaaggcttcctctctcctgtgagcattgctaacgtttcttttctcctagtctccctttatcttctgctttctctcgtctggcctttctcaagccatattctaattgttattaacccttctgtctttcgccttagtgaggtcctaagagataggagccaagtttattcaccttgtatcccagggcctgtagttcttggtatacaggatatcctcaataagtatttgctgaacgggaaaggaaagaatgaatgtgggaagggtggagtatcttggcrggtgcttgctactcaaagaactagagctccatggtgcagcaagggaaaaggtctctgcctcccagcagagggcagcagagagcttaggagcagaaactccctgcaggatgatta

SEQ ID NO: 347525 - DNA, 520 bp, Homo sapiens
ttcattcaacaaatattaaagagcacctactatgtatcatgcactagagatacagggtgaacagaacatacaaactccctgctttcatagaacagacactccagtggagtgcggatgacactacagaaaagagtgatgaggaaaatatcatcaggtagtgagacagtgccgatgattctcaaagagtgatcccagattaacagtgtcagcatcacctgggaacttgttagaaatgcaaattctcagcttctgccctagacttgctgaatcagaaactctaggggtggacgcaggaatctgggttgtaacagttctctgggtgattctgacgaatgttcaaggcaaacaaccaggcgctatgcatggaagtcaaattgcagaacgtaggtgagactgctcaagcatttcatttgtattgggtatgtagagaaggcctctgtgcagagctgatctgaaaataaagatttgaatgtcaagraaacccatccatggttgtggagagagggaacagagaggacag

SEQ ID NO: 347526 - DNA, 508 bp, Homo sapiens
actgcacaggatgctctggggtgatgaaaagttccagattgggccatccagggttccagtcagcagccattagccacgagtggctgtgctcttgaagggtggctcagaagcctaagagctgcatgtgtatcttatgtgatctgaattgaagtgtaagcagacacctgtggtgagcagcttccgaggtggactgcagccctggggagtatycccctgcttccaggctgtgctccctgagccccaaaggttccagcaggtgctttcggggttgcaccttagaggcagaaggcaggaaaggtcggtcggcagggctttgtggccccaccttctacagagcacgtgtgtcctcatccacgcaccatgctgtttgaagaaagcttaggaaaggaatgatgagacccgtgacttcagtcaagcctttgctgaacatataaggaaacagagagggtcatgaagtggaaggactcacacagccacccctccttcagtggggaaagcgagcctggga

SEQ ID NO: 347527 - DNA, 587 bp, Homo sapiens
agtcatacactttctgatttcaaaagttactagaaaactatgacaatcaaaacactgtggtcctgacctacatacagacagacagaccaatgggacagaacacagagcccagaaagaagccctttgacttatttgacattcaagtgtcttgagccaagacccttcagtggggaaagggcagtcttttcaaaaaatggtatttggaaaactgaataccacatgcagaagaatgaagttgagcccttctcttacaccagatacaaaaaattaactcaaaaaggatcaaaggcattaccataataactaaatgtaaaaaaactacaaaactcttagaagaaaacatagggggaaagcttcacaatgttggactcggcagtggcttcttggccacgacacccaagaacaggcaagaaaaggaaaaacaattaaatccatgcraacacgtgtgcacaaatgtcctcagagcgctattcctaacagccaaatgctgagagcaacgaaaatgttcattgacaggagaatggataaacaaaacgtggtccatccatacagtggaatattattcagccttaaaaaggaaggaagtt

SEQ ID NO: 347528 - DNA, 557 bp, Homo sapiens
ccattcacatggatggatttccttggttggctgcagggaagtaccctgaggaagaagtggggtttggggtggccagagccccactccagaggcccccattctcagctctgagtttaaaaccccgctaatgcaggaagggtcccagaggtggagaagrgttccgtcctgaccctggcattagctctggccttgagcaaatgatttaatctctcggtgcctcagtccccatccacagagctgacatgaggaccagggaaggaacacctgaagtgcgtcttgcagggtctggcaggggtgggggtggggggatgggcaccgtaaactcaaaccatggccgaattgttaaacaaacaaatatagctattagtgattgggagtgtgggtcccacctggctaagactccgctccactgctgtgtgacatggggacatgggctggtggctttgtctctctgtgcttcgttttcctcatctgcaaaacaagaacaatgacagcacctcctttctgggtggctgagctgattaaattagttagcaattgttagctgtggttgttat

SEQ ID NO: 347529 - DNA, 557 bp, Homo sapiens
ccattcacatggatggatttccttggttggctgcagggaagtaccctgaggaagaagtggggtttggggtggccagagccccactccagaggcccccattctcagctctgagtttaaaaccccgctaatgcaggaagggtcccagaggtggagaagagttccgtcctgaccctggcattagctctggccttgagcaaatgatttaatctctcggtgcctcagtccccatccacagagctgacatgaggaccagggaaggaacacctgaagtgcgtcytgcagggtctggcaggggtgggggtggggggatgggcaccgtaaactcaaaccatggccgaattgttaaacaaacaaatatagctattagtgattgggagtgtgggtcccacctggctaagactccgctccactgctgtgtgacatggggacatgggctggtggctttgtctctctgtgcttcgttttcctcatctgcaaaacaagaacaatgacagcacctcctttctgggtggctgagctgattaaattagttagcaattgttagctgtggttgttat

SEQ ID NO: 347530 - DNA, 597 bp, Homo sapiens
agctctgcccgtgtcttccgaagataccaagtgaaatacatgtagatgggatttacatctgaaaaaccaaggcaagaggccatgggaagggacggaggtggaacaggactggacagaagctgataaatggttgttgctgagtactgggcagataggggttggttatcctattgtctttactttcatatattttattttttctgtaataaaacaaattaaaatcacctgtcgtgacctcacaggggccagtgtgggttgtggcgtgaggcaggaagctctgcagagttccttggtcaaaaggattaattacaraagaactccacgaacaccgagaagaagagaagggaatcctggcatttaaagccacaaagaaacttgatatggtcttgtctccttctctcaattgacagtgagaaactgaagaccagagagggtgagtggtttacccagtttggcacaactgaccccaacctagccctccatgaggactgagcgcatgagagatcctgagccacagccgcccagccctgctcctctcgaatttctgacctacaggaactgcaagaagtaatgaaagactgctgtttaaagccactg

SEQ ID NO: 347531 - DNA, 597 bp, Homo sapiens
agctctgcccgtgtcttccgaagataccaagtgaaatacatgtagatgggatttacatctgaaaaaccaaggcaagaggccatgggaagggacggaggtggaacaggactggacagaagctgataaatggttgttgctgagtactgggcagataggggttggttatcctattgtctttactttcatatattttattttttctgtaataaaacaaattaaaatcacctgtcgtgacctcacaggggccagtgtgggttgtggcgtgaggcaggaagctctgcagagttccttggtcaaaaggattaattacagaagaactccacgaacaccgagaagaagagaagggaatcctggcatttaaagccacaaaraaacttgatatggtcttgtctccttctctcaattgacagtgagaaactgaagaccagagagggtgagtggtttacccagtttggcacaactgaccccaacctagccctccatgaggactgagcgcatgagagatcctgagccacagccgcccagccctgctcctctcgaatttctgacctacaggaactgcaagaagtaatgaaagactgctgtttaaagccactg

SEQ ID NO: 347532 - DNA, 608 bp, Homo sapiens
attgtgtatgatggatgggaggagtctggcttcctgagcttgatgatcgctgcatgaaatctacccttaggtggcattcgtagcctctggcttatcagatagggttatgctagctgctagaataaatgagttctcacatctcagtggcttatctcagtggatctgtgtctcttgctcatgtagctattcagtgcaggtatctaggaagccattaggcgacccaggctccttctactttgtggtgctgtctccctcgtaggacgttgaagtcctctgcaatccgcgagcagatgaggaaagagtgttgtgaaggcagcacatgcctcttgcatccttacgtctcaacaccccttccacttacattccactggtgagggctgatcatgagcaatcccacctacttgcctcttgggccaggaagtgtagttcctggctgggcagccctttccctgcagcaaagctgctccaggcagaagtaagccagtgtcggtgcacaatgagctggctttggcgcgctggatcggtgatagcatagcaaaaaagcccaaggaaagggacstcctcccacacaatgccccccagcaccagatactgtttgttgagtaccg

SEQ ID NO: 347533 - DNA, 560 bp, Homo sapiens
tactgatttcacctacctttcaagggcattggygggagcttgatttccagttcccacacctcctcctccctcttcctctccaataacattcctgcaatgctcacgttgactacaacattggctgaaattcctcaccagtccccagatccactacctttgtcgtaagacattgcagttccccagcaccacaaagacagaatgtatttccccgcctcttaactttgagctcatcatgtgacttgctttgttcaacagaaagtggtagaagcagtggcatgctggttcccagcccaggcctcaagggttccaagcccaggccttaaggggcctcgcatgctgctccggtgtgcctctgctattgccatgagaggaacacactcaggttagccaactgaccccaggggcaggatgagccatcccagctgagcccaacctggattagcatgctgctaagatattgtggttgtttcttgtgcagcattttatgagccatagggaactgctacaatttttattgtaggaaatttgattattatagaatagaatgaagaagaccaagt

SEQ ID NO: 347534 - DNA, 594 bp, Homo sapiens
gggctttgcaccattttcccatttccctgcaggagggagctctcttcacccagtggggcagccgcmtgaacaacactctgagtgcggggctggcttcacctctgtgctcacaccccagtcccctggggtgtcccctgcacctcccaaataaatgacttgtgcttgaattcttgcctgctcctggaagaaccccaaactcagatgctgctagggatttaactgtgtcccccaaccccaaatctccgtgaatgtgactttatttggaaacagggtccttgcagctggaatccagttaagacgaggttacattgtaccaggaagggccctcagccactggctggtgttctcataagaggtttgtggaggcgaattcttagggagtaagaatggtttgggaatcatgtaaaaggctgggaagatctacatgagctgacagaaaagatgttcatgcaggactcggcaagggaaaaaggaagttgcaggaaatacatgcatgatgtgacaccatttctggtcaaataaataccgtgcgggtgtctttccgtatgaataaaacagtaggcaaggcaggacacacaggcactgttgagcaag

SEQ ID NO: 347535 - DNA, 594 bp, Homo sapiens
gggctttgcaccattttcccatttccctgcaggagggagctctcttcacccagtggggcagccgcctgaacaacactctgagtgcggggctggcttcacctctgtgctcacaccccagtcccctggggtgtcccctgcacctcccaaataaatgacttgtgcttgaattcttgcctgctcctggaagaaccccaaactcagatgctgctagggatttaactgtgtcccccaaccccaaatctccgtgaatgtgactttatttggaaacagggtccttgcagctggaatccagttaagacgaggttacattgtacyaggaagggccctcagccactggctggtgttctcataagaggtttgtggaggcgaattcttagggagtaagaatggtttgggaatcatgtaaaaggctgggaagatctacatgagctgacagaaaagatgttcatgcaggactcggcaagggaaaaaggaagttgcaggaaatacatgcatgatgtgacaccatttctggtcaaataaataccgtgcgggtgtctttccgtatgaataaaacagtaggcaaggcaggacacacaggcactgttgagcaag

SEQ ID NO: 347536 - DNA, 601 bp, Homo sapiens
catgtgtatgtaagtgtcttttttgtataatgacttctttttctctgggtaaatacacagtagtgggattgctggatcaaatggtagttctacttttagttctttaagcaatctccatactgttttccatagtggttgtactagtttacatttccaccagcagtgtagaagtgttcccttttcaccacatccacgttaacatctattgttttttgattttttgattatggccatttttgccraaacaagatggtaactcattgtggttttaatttgcattttcctgatacttagtgatgttgagcatttttttcatatgtttgttggccatttgtacatcttttaagaattgtctattcatgtttttgccctcattgtgatgggattattatttatttttttctgctgatttgagttccttgtagagtctggatattagccctttgtctgatgtacagtttgcaaatattttctcccattctgtgggttttctgtttactcttctaattatttcttttgctgtgtagaagctttttagtttaattaggtcccatctatttatattagtttttgttgcatttgcttttggattcttgctcat

SEQ ID NO: 347537 - DNA, 528 bp, Homo sapiens
ccttttttgtggctggattatattcaattttatgcatataccaccttttctttgctcattcatctgccaatgggcatttggcagaactatttacaatagctaagatttggaagcaatctaagtgttcatcaacagatgaatggataaaggaaatgtggtacatatacacagtggaatactatttggccataaaattagatccagtaatttgcaacaacatatatagaactagagatcattatgttaagtgaaaagagaaataagccaggaacagaaagacaaacatcacatgttctcacttatttgtgggatctaaaaatcaaaacactagaacttatggtcgttgagggtttttctttttttttgagaggaggtttcrctctgtcacacaggctggagtgtaatggcatgatcttggctcatggcaatctctgcctcccaggtttaagcaattcttctgcctcagcctcctgagtagctgggattacaggtgcccgccaccatgcccggctaatttttgtattttta

SEQ ID NO: 347538 - DNA, 528 bp, Homo sapiens
ccttttttgtggctggattatattcaattttatgcatataccaccttttctttgctcattcatctgccaatgggcatttggcagaactatttacaatagctaagatttggaagcaatctaagtgttcatcaacagatgaatggataaaggaaatgtggtacatatacacagtggaatactatttggccataaaattagatccagtaatttgcaacaacatatatagaactagagatcattatgttaagtgaaaagagaaataagccaggaacagaaagacaaacatcacatgttctcacttatttgtgggatctaaaaatcaaaacactagaacttatggtcgttgagggtttttctttttttttgagaggaggtttcactctgtcacacaggctggagtgtaatggcatgatcttggctcayggcaatctctgcctcccaggtttaagcaattcttctgcctcagcctcctgagtagctgggattacaggtgcccgccaccatgcccggctaatttttgtattttta

SEQ ID NO: 347539 - DNA, 612 bp, Homo sapiens
gtttccctggttcttctatgtgtgatgttaggttgttaatttgagatatttctaaattttgatgtgagcatttagtgctataaagttccctcttactgctttgtctgtgtcccagagattctgatgtattatatctttgttctcattaatttcaaagaatgtcttgatttctgtcttaatttcattgtttacccaaaagtcattctggagcaggttgtttaatttttatgtaattgtatggttttgaacaattttcttagtattgatttctatttttattgcactgtggtacgagaatgtgtttggtatgattttgttttgtttcgttttttgaatttkctgaggattgttttatggccaattgtgtggtcggttttagagtagatgctctgtgcagatgaagagaatgtatgttctgttgttttgaggtggagagttctgtagatgtctacttggtctgttctgtagatgttcatttggtcaaatgttgagttcagatcttgaatatctttgttagttttctgcctcaatgatctaataccatcagtggggtgttcacatctcccacaattattgtatggttatctaagtgtctttgttggtctctaagaa

SEQ ID NO: 347540 - DNA, 612 bp, Homo sapiens
gtttccctggttcttctatgtgtgatgttaggttgttaatttgagatatttctaaattttgatgtgagcatttagtgctataaagttccctcttactgctttgtctgtgtcccagagattctgatgtattatatctttgttctcattaatttcaaagaatgtcttgatttctgtcttaatttcattgtttacccaaaagtcattctggagcaggttgtttaatttttatgtaattgtatggttttgaacaattttcttagtattgatttctatttttattgcactgtggtacgagaatgtgtttggtatgattttgttttgtttcgttttttgaatttgctgaggattgttttatggccaattgtgtggtcggttttagagtagatgcyctgtgcagatgaagagaatgtatgttctgttgttttgaggtggagagttctgtagatgtctacttggtctgttctgtagatgttcatttggtcaaatgttgagttcagatcttgaatatctttgttagttttctgcctcaatgatctaataccatcagtggggtgttcacatctcccacaattattgtatggttatctaagtgtctttgttggtctctaagaa

SEQ ID NO: 347541 - DNA, 598 bp, Homo sapiens
tctttgttcttctttggtcaacactttgtaatttttagcataatagtcctgcatatgtgttttttgattcataactaagtatttcattttgtttggagtaattgtaaatgtgattgtattttaaaatttggtttcatgagttcattgttagtataaaaatatggttgatttttatatgttgaccttgtatcctatgggcttgataagctcacttattagttctaggaccttttaagattccttgtaatttctatataaataatgtcatctgcaagtacgcacagcctactcaagaagaacaaccccaagacacataattgtcagattcaccaaggttgaaatgaaggaaaaaatgttaagggcagccagaaagaaaggccgggttacacacaaagaaaagcccatcatactaacagcagatctctcggcagaaaccctacaagccagaagagagtggggaccaatattcaatattctttaaaaaaatttttttaacccagaatttcrtatcaagccaaactaagcttcctaagtgaaggagaaataaaatccattacagacaagcaaatgctgagagattttgtcactgccaggcctg

SEQ ID NO: 347542 - DNA, 548 bp, Homo sapiens
ctttttgacccaatccaatttcttgcagaaatcagagtaattcctctttagatacgagcatgaattagaggactrgtctccagtgaatgtctttgctgaatcttccacatgaagcatgaaatattattttatacatgaggttatttttctaccatcgttatgaaaggaatatttgtgctaacttgaagtgtcttggtaatgagatacacatttcattcttaattaaaatatatacttcttagacatttttctgcaagagaaatgaagctaagaaaaacattagattgaacaaatctttcttttccttgtactttcaattttctgaataatttttctcttcatttcctgcattatttccttggttatataacattttccacagttttgtctccttcttcttccctttttttttggtaatgtgttcaatgaacacatgtttatcaagtatcttctgttaacttttctctcattgcttccacaaataataattaacattttatatgggccaagcattttagtaggcttagactaataaccaaatcaggtat

SEQ ID NO: 347543 - DNA, 533 bp, Homo sapiens
aattataacagtagagttttatgtaaagtgagcactagactgaatgggcctcaggagacaaaggtattaatcatagatatgctgcagactaaagttgccaggtttaattcagttaaatttgaattttagataaagatcgaataatatttcagtgttaaatatgtctcatatgctatttgggacatacctattctaaaaataaattcattgttttttaaaaattcaaatgtaataaacatcctgtatttcatctggcaactctttctcagattactctgactttaagctactttacatctacatttttttttcttatcagtaaaataatgaatatgaatttccccagctgacaccctagtcastctatgaatcaaatgtcaatatacctaaccttgggctaaatgtcagggaaaatgagaaagattaagttattagagccttcgaagagaaatatgtgcttggtacaattgatgtgaacaaggagagctttgaggaaacttctcaagggcaaaattggatcattttggttagaa

SEQ ID NO: 347544 - DNA, 604 bp, Homo sapiens
atcttcaaacaacaatcatttagtagctgagaattctatgacaagtaaagttgggatcagccgggcagttgttctgctgtttccttctgggctgagtcatgtggctatagcaggctgcctgctctctcacagctagaaggtctagaacacrgctttctgataccacagacgctgggcacatgtggctatttagtacttagatagaaggtgatatgctacaagtgtaaaacacacatcaggctttgaagacttaatacaaaaaagtaaaatatctcaaatatttttaatgttaagtgtgtgtttaaatgctaatatttgaatatgttggcttaaataaaatatgctattaatttcacttatttttacctttttttatttttacctttaaaacatatggtaaaatacacaaagcatatttaccatctttaccacttttgagtctactgtctgggcatgttaattacattcatattgttgtacaaccaatctcctcaattcttttcatttgcgtaataggaactctacatccattaaacaatttccatccctcctttttcccagccctttgaaaccaccattctcctctttgtctctataaagttga

SEQ ID NO: 347545 - DNA, 468 bp, Homo sapiens
tctaacctgattacctccaatatagttccccagactggtcttttcatattaccttctacaatctattctattttaaatggagacaccctttgaaaaatgtaaatcagatcacatttytaccctgctcaaaaacatccaatatacttagaatgaagtccacacagcctaatgatagcctataaaacttagcatggtctggccttggcccacctttccaacatctgctattgctctcttctttgctcactagggtgcagccatgctgttttcctatgcagtgccttgaccaggccaacctcatttgtgccttgaagcctttgaatttgttgtatctataattgggatattctttgtttttttttttttttttttcagccttcgggtctcacattttattgtagtcagccctctgtcctatcttgagtggcaccatcctcccattcctagtcaatatgacttaagacattt

SEQ ID NO: 347546 - DNA, 468 bp, Homo sapiens
tctaacctgattacctccaatatagttccccagactggtcttttcatattaccttctacaatctattctattttaaatggagacaccctttgaaaaatgtaaatcagatcacatttctaccctgctcaaaaacatccaatatacttagaatgaagtccacacagcctaatgatagcctataaaacttagcatggtytggccttggcccacctttccaacatctgctattgctctcttctttgctcactagggtgcagccatgctgttttcctatgcagtgccttgaccaggccaacctcatttgtgccttgaagcctttgaatttgttgtatctataattgggatattctttgtttttttttttttttttttcagccttcgggtctcacattttattgtagtcagccctctgtcctatcttgagtggcaccatcctcccattcctagtcaatatgacttaagacattt

SEQ ID NO: 347547 - DNA, 602 bp, Homo sapiens
atccatggatattcattattcattgggcattcatgaaattaatttttcataggaatgttgagtacagaagcctagccctggtcaatgcgtccaatgcatttgcaagcagttgttttgcaaagagttatccttgttaatgttgccttgagtcagaaaccctggttgcattccttgattgtgtcatccatcacagttaacaacataactttacaggaaatagatcctccctgatcagagttgactttcactgtccagttacaatcctattgggactttgctaaatgaaatgtctgaaaactccctggatgaatgaaagaactattcttttccaaacacaacagactatgacaagaagacaaatttaattttgtattagttatatttggtctggttaaaayattttatttcctttcagatagatagacttccatagaaactgttttgatgagtgttcccattaggtctttgaagcattcttaattggtaagtccaagttaagaatgcatttaatcaaattactaaattttgagtgtataaaggctctggcaaggtttatacaccaatctctaaatatgatcctcaatatatataccactggagat

SEQ ID NO: 347548 - DNA, 566 bp, Homo sapiens
gtaagaatagcagaaaaaaacttcctcatagggtcctgtccagattgcagatatatgagcaaaagtcatgatgttttgttgaaaccaccagatgggagtggtttattacatagcctcagcacctggaacttggtcacaggtgactcagttgagtctcagaaatatttagccttggctttcacagatctgactagtgcagagccagaagctgaatactggttttgcttccaccaatgcttctgccttttcatcagactacatagaccaatattttttcatttcagctgcaaacccatgatttcctgcttccctaatgtgctgtctactgcagtacagtctgaatgtataactaamagattcctgttgactctcaataacagtcacaaagctgttatctggatgcaaagtctctgtgcaaagaacctgcgacactgataaaatagacaatataacattggtactttaaatgaatcatacctttggcagctaatctccagataatttcctatatacacatgctactctgccctttaagaggaaacatatatcctctctccttggtatcc

SEQ ID NO: 347549 - DNA, 566 bp, Homo sapiens
cctggcaccttggaattattcaatgtatgataattatgaattaaaattttttccctattggacgtccatttcaatttttatacttgaaaatgctttccttgataactctcagttacaaaataaaacaacacttttgtggttctgaatgtccagtctctggtgcaaatggttacaaataggcagttggtaaactaaagttattttaaaaggacaagggacccacactccgaaaaaaagacatatctgcctccatgtatttcaaaaatacttttttcgatgccaacaatcactattaatttgaaatggaatgaaaaactgtgaaaagttatgagcaataatttcattcacaaaacggtagatagccaacattggatagccaaggacaactggacattgtttcaggttcataggtcattgccaaagatcctttcatcatctgggtaatttgactttctccctcttggaaaaytgacactggttctctgttgtatgttctagagctacacaggggagtcagtttttgtatcattcattggtttgtctcttcactatattcagtgaaaatg

SEQ ID NO: 347550 - DNA, 495 bp, Homo sapiens
attggctgtgtgcccagccctgtactaaaactgttatttctcattgcttaaccttatcaagaggggtctgcaacattttgtctggaagcactgtggaagttaaagaaacacagtccagccaaaaaaaaaattgccgaatattmccatttactttcatttttaaaaatatgtgggagattccgttgtattttccacagaggcatttcattttttttttttttttttgctttcccttttaaaaatacatgtccatcatataccacacaccaccataactgaaacatctttttcccaggagcctccaattgctcctcagagccaagccgcacatcgcttttttctgctaatacccatcccctttctccatttttaaaagtagaactactttgcctttcattagcaagaaagaatgttatttcttgaggaagcatagtgacaggaggtgaagggggtaggaattgatgtggaaattgctcagttctctttggtaattgg

SEQ ID NO: 347551 - DNA, 556 bp, Homo sapiens
ttttaaaaatatgtgggagattccgttgtattttccacagaggcatttcattttttttttttttttttgctttcccttttaaaaatacatgtccatcatayaccacacaccaccataactgaaacatctttttcccaggagcctccaattgctcctcagagccaagccgcacatcgcttttttctgctaatacccatcccctttctccatttttaaaagtagaactactttgcctttcattagcaagaaagaatgttatttcttgaggaagcatagtgacaggaggtgaagggggtaggaattgatgtggaaattgctcagttctctttggtaattggaggaaacacatccaaattaccaatttttcttcagtcacatccagtttactgtcttaaccatctatgaagtagtattaccactattttattgatgaggaacttgaattttcaaaaaaaactttaatctatcaagccatcaatctggattttaatccctagttcataacatttgcaaagttaatgtttttctcactggactatttcacatgattgttacc

SEQ ID NO: 347552 - DNA, 556 bp, Homo sapiens
ttttaaaaatatgtgggagattccgttgtattttccacagaggcatttcattttttttttttttttttgctttcccttttaaaaatacatgtccatcatataccacacaccaccataactgaaacatctttttcccaggagcctccaattgctcctcagagccaagccgcacatcgcttttttctgctaatacccatcccctttctccatttttaaaagtagaactactttgcctttcattagcaagaaagaatgttatttcttgaggaagcatagtgacaggaggtgaagggggtaggaattgatgtggaaattgctcagttctctttggtaattggaggaaacacatccaaattaccaatttttcttcagtcacatccagtttactgtcttaaccatctatgaagtagtattaccactattttattgatgaggaacttgaattttcaaaaaaaactttaatctatcaagccatcaakctggattttaatccctagttcataacatttgcaaagttaatgtttttctcactggactatttcacatgattgttacc

SEQ ID NO: 347553 - DNA, 567 bp, Homo sapiens
aggcaaagttatagggtgcttctaatgatctgtgccttcatctgggcacagactgaactggtatgttctatcagtaaaattgtatcacattgtgcacttttcatacctatgtctttcggtcggtgaatcattctttaataataagtgaaaaaagaaagaaaatagttactataacaacaacaaaaaaacacttttygcagctaatggtgtccatgtggtctactttgagatattaagatacaagcagcattctacaggatgggactttgtggtaagaccattgttttccggatagaagactcagaccatgacttttgacttttatcctcgtccattccccgttcttcattcctgagagttgggcatgaatttagaggtagatcaagtactttataagtataagaataaaaattatatgctaaaataaaaaagctggaagaaacctaggccttgattctgagcaaggtaatttgtcctggattgtgacttccggacttcttgttatttgagaaatacatattctttttttcttttttgcttttattattattttaattgacacaatca

SEQ ID NO: 347554 - DNA, 567 bp, Homo sapiens
aggcaaagttatagggtgcttctaatgatctgtgccttcatctgggcacagactgaactggtatgttctatcagtaaaattgtatcacattgtgcacttttcatacctatgtctttcggtcggtgaatcattctttaataataagtgaaaaaagaaagaaaatagttactataacaacaacaaaaaaacacttttcgcagctaatggtgtccatgtggtctactttgagatattaagatacaagcagcattctacaggatgggactttgtggtaagaccattgttttccggatagaagactcagaccatgacttttgacttttatcctcgtccattccccgttcttcattcctgagagttgggcatgaatttagaggtagatcaagtactttataagtataagaataaaaattatatgctaaaataaaaaagctggaagaaacctaggccttgattctgagcaaggtaatttgtcctggattgtgacttcyggacttcttgttatttgagaaatacatattctttttttcttttttgcttttattattattttaattgacacaatca

SEQ ID NO: 347555 - DNA, 561 bp, Homo sapiens
aggattagtatattttaatttatctaattattttctgagtaaaatataagctccctgatagcaataatttagcatattttatttactccataaaaatggactgaataggctgggcatggtggctcaggcctgtaatcccagcaatttgggaggccgaggcgggcggatcatgagttcaggagtttgagatcagcctgaccaacatggtgaaaccctgtctctacaaaatacaaaaattagccaggcatggtggtgtgtgcctgtaatcccagctactcaggaggctgagacaggagaatcgcttgaacccgggaggtggaggttgcagtgagctgagatcgygcctttgcactccagattgcaccccagcctgggcaacagggagagattccgtctcaaaaaaaaaaaaaaaaatgggctgaataaataaattctttaaggaatgaaaaagataaaattctgcttcatttttagacatttgtttaattattggagcaaaagttgggtggggttggggggagagaaaagaaagaaacattgaagaaatctgcttccctggaa

SEQ ID NO: 347556 - DNA, 561 bp, Homo sapiens
aggattagtatattttaatttatctaattattttctgagtaaaatataagctccctgatagcaataatttagcatattttatttactccataaaaatggactgaataggctgggcatggtggctcaggcctgtaatcccagcaatttgggaggccgaggcgggcggatcatgagttcaggagtttgagatcagcctgaccaacatggtgaaaccctgtctctacaaaatacaaaaattagccaggcatggtggtgtgtgcctgtaatcccagctactcaggaggctgagacaggagaatcgcttgaacccgggaggtggaggttgcagtgagctgagatcgtgcctttgcactccagattgcaccccagcctgggcaacagggagagattccgtctcaaaaaaaaaaaaaaaaatgggctgaataaataaattctttaaggaatgaaaaagataaaattctgcttcatttttagacatttgtttaattattggagcaaaagttgggyggggttggggggagagaaaagaaagaaacattgaagaaatctgcttccctggaa

SEQ ID NO: 347557 - DNA, 561 bp, Homo sapiens
aggattagtatattttaatttatctaattattttctgagtaaaatataagctccctgatagcaataatttagcatattttatttactccataaaaatggactgaataggctgggcatggtggctcaggcctgtaatcccagcaatttgggaggccgaggcgggcggatcatgagttcaggagtttgagatcagcctgaccaacatggtgaaaccctgtctctacaaaatacaaaaattagccaggcatggtggtgtgtgcctgtaatcccagctactcaggaggctgagacaggagaatcgcttgaacccgggaggtggaggttgcagtgagctgagatcgtgcctttgcactccagattgcaccccagcctgggcaacagggagagattccgtctcaaaaaaaaaaaaaaaaatgggctgaataaataaattctttaaggaatgaaaaagataaaattctgcttcatttttagacatttgtttaattattggagcaaaagttgggtggggttggggggagagaaaagaaagaaacaytgaagaaatctgcttccctggaa

SEQ ID NO: 347558 - DNA, 603 bp, Homo sapiens
ccaaacagcaattctggagaagcctctagtagtatctagataatgaaccattgcagctgtaatttagaagcaaaagcaattattgaagggtatgaatgtgaggaggcagttttcatggtgaattaaagtgctttgataatgaaatagttatttcaagttaaattaaccattaaagcatttcagattttatatctaaagttacagtgaaaaatataaagatctgcagctatatttttctagaataaatatatttgctagaagcaaaaaggaggaggtagtatatgatctggcaaaaacaaaacgaagacaagattgaattggaccatcagaaatctcatcttgactacagcgatagtctaggtgaccttgggaactaataatgatctaatattagctaacatctatgcagttccttgttgttctctttctctcctttcacactctgtttataacacatctattcaccaatataattgtctaygccccaagcctcccttcttggtacatacctgttaaaattgctatggaaaataacttagtcaaatgcttaaaaacatagactttggagctacaggttcctgaattccaaaacattcaggatct

SEQ ID NO: 347559 - DNA, 658 bp, Homo sapiens
cattacaacattctatcaatagcaatatagtttgaatgtttgtcccatccaaatctcatgttgaggtataatcagcaatattgggggtgggacgtggtgaggagtgtgcaggtcctgggggcagatctctcatgaatggcctggtgctatcctcatgataatgagtgagttttcactctgatagtttatgcgagagctggtgacttaagagcctgggacctcccacttctctctcttgtttgcactcacaatgtgatgtgcctgctcccacttcaccttcccccatgagtaaaagctccttgagtccccaccagaagctgaacrgatacctgaaccatgcttcttgtacagcctgcagaaccctgagccaattaaaactcttttattcatatgttacccagtctcagatattcctttatagtaacacaaaattgttaaggaaagagattttgcacatcatcgtatattccttctaaaattacttaacaaattgagtaatcaattgacttcacaaaaaggcaacctaggccctaaatatgggccttctgtagggaagactcatattgaagacaacatttaaaagtggaatattggaaagaatacacggtagtttcaagcaggtatctgagccctcataataaaaatgtatttgtttttc

SEQ ID NO: 347560 - DNA, 568 bp, Homo sapiens
cgtgtaagttaaataaaatgtttcatctaaacaattatgttagcctaatgatggccaattgggtaaatttcccacttttcactcagacactcagatgttttggtcttttatagaagacattgtataaagataaattggcccagaaatgaactagagaatttagtatgttgagaataaatagcttgggaccagtgccatggctcatgccggtaatcccagcgatttgggaggctgagacagttggatcacctgaggtcaagagttcgagaccagcctgtccaacacggagaaaccccgtctctactaaaaatacaaaaaacagccgggcgtcttggtaggcgcctgtaatcccagctactcggtaggctgaggcaggaggattgcttgaacccaagaggctgaggttgcagtgagctgagatcacgccaatgcactccagccygggtgacagagcgattctcaaagaaagaaaaaaaagaaaagagaaaaaagaaaaaaaagaataagcagttcaaatatttttaattttttcatttgcattaatgatgggcaggggtatacagtctct

SEQ ID NO: 347561 - DNA, 233 bp, Homo sapiens
ggaattaattttagaagaatgtaaggcaataagctcttatgacttcaccatttttatttataaacaaagattacaaaatttttcaatgctcagcmgttgtgtgaaaggaaacaaatatttgaaaggaagaaaacaagatttaaataaatattatattctaaataataattagtaaaataattgatgtaattttaaccacataatcaagtccatactatgtttaattgtgaaaa

SEQ ID NO: 347562 - DNA, 658 bp, Homo sapiens
tgcaatggaagcacaggcattggtaaatgctcccatttcaaatgggagaaattggccaacacaaaggggcatcaggccccatgcaagttggaaacccagcaggacagtcattaaatcttaaatctccaaaataatctcctttgactccatggttcacgtccaggctatgctgatgtgaggggtgggctccaaagtccttgggaagctctgctcctgtggcttttcagagtacagcccccacagctgctttcacagtctggcattgagtgcctgtggcttttacaggcacagggtgcaaggtggtctgtggtctggaggatgatggccctcttcttacagctctactaggcagcgttccagcagggagtcagtgtaggggctcgaacctcacattttcctgttgcactgccctagtagagattttccagaagggctccacccctacatcagacatctgcctgaacatccaggtgtttccatacagtctctgaaatccaggcagaagctccctaatttcagctactaccttctgtgcacccacaggaccaagaccacatgtaatccactgaggcttggggcttgcaccctctaaagcaatggcccaaggtgcccaccttggcctcccraaatgctggtattacaggccaccacacccagc

SEQ ID NO: 347563 - DNA, 508 bp, Homo sapiens
ttatttttcaacaaacaaggatgtcgtggcacataaaaagaattggtaaacaactttctatgtgtctcargattgtcttctctccaacaggtcaaagaactatggtgtaaaaagccaggcagaaaatttgcagccttaactttgggagcatctgccacattgccatcacctctaaagctctgttggacagccttggtgtatacatcttccccaagttttacaataacatggctaaattaaattccttgtccctaataccactaagatgtaggtgtgcttggaaccccttatctgtctgaaaaactgtgctctgtccatcatgctgtctctaagatcaggctgttatgcggaacattttgggaggtatagttgcatgaatagtggccacccaaagatatcaagtcctaatccttggaacttgtaaatgctgccttatttgggaaagggatcattgcagatataattaagttatggatcttgagatatttcctttgattatgtagatgga

SEQ ID NO: 347564 - DNA, 637 bp, Homo sapiens
gtaagattcttgtggaaactaaatgggaaattcatgtaaagtttttctctcacaatagctgttcaatctattgcaatgttcttgctattattactactattattatgaaaatgtatccagtctcctctaatatcctctaaatagtcattttttcctgttgccaactgcacttaagttctatggtcatttgtaatccctcctaatatgttgaagatgtagaagtttccaaaatagatacttaaaaattgtttaccttttgcttatttgttatttattcgctgctgcttgtgaatgggattgaatatgtgggggccatttcttttcaagcagaacactcttgccttatgggtgtccctatttagagaacatatccagggcaaagggctacactctctttrtactaatccagcacgtgctcctctttcctcctctcttttatttacttctttaatctttgcccggttttgtgccacaggtgtcctagaagaagagaccctacactgggcttgtgaccagcggaaactgaatcaatgctggagacacattctaacagtcgaatgggcagctcacaggaggtaatgactttcagttacaatttgtatgaggctcaatgccatgcttcaggttgccagttcat

SEQ ID NO: 347565 - DNA, 587 bp, Homo sapiens
aatccatgaattagaagaaatagcataatgaataaataaaaattgaggctgatgccttcaacaaaatttttaaaatattgatacatgctgcaacatggataaaatctcaaaaacattgtgctaagtaaaagagggcagtcacaaaggacaacaaattgtatgattccatttatagtaattttccatatcagaaagtatgtcagtaattgcatggggctagaggtgggaataagattggctgaaaatggtatgaggggttatgggtactggggttatggaaaagttccaaaactggattttgstgaaaattaaacaactcagtaaatatactaaaagaaatgctgacatgtacatttaaaatgtgaaattttcacaatgtatattatatctcaataaagttgttttttaaataagactaaaatatcttaagaatagaaatcttctagtatttaaatgtaattatataaaaaatatatttaccaaacctcattttttccatgatcaccctttcatgagtttacagaaggaaaattaaggaaatgaaaaatatgtttgtatggtatttttcaatggtccagaatgtaacc

SEQ ID NO: 347566 - DNA, 567 bp, Homo sapiens
tttctgcacgtttttccacctattctctctctagtactcatataatagtaataaaaaaaattgtcagcttaatgatcccacaagccttttaggatttcttctttccttgtttttaattcttatttctttatttttcctctgattgcattatttcttttggttgatataatgtgttgttgaagctcttaattttatttatctatttatttattttgaagccaactgaatggcatgatgttcttggcttttgccttccagtgtactgtcagacacactgtggaaaggccctcaggtttctgtcacctccatatcattctcactatcctccccttctttccaaggatcccatgtcctgggattccacactgtcttgctcagaatcatccagattttaggccataactcttttgccacccccsacgtggagggattgtctggttagagtctctgtattctccttgcttttatccccctcccttttatctagcttcttcacaaaattcccatgcagggcaacatgaacgctcacatatcagtctctctatcaattgtattttaaaacttaat

SEQ ID NO: 347567 - DNA, 495 bp, Homo sapiens
ttgttttgtgtagatgtgtatgctttattcagtcaggtgatttgactttggttacaggtgggcacagtactgtagccttcatgtaatttatttggctgtaatcaatttcagtggtatctacaagtgcctcagtggactagattgtttgtggaggcagaagtgtggctttgctggaggcagtgaccacctggaaggatggttttcaggccctgcagagatgcaagctgagtgcagttgctctctggtcataggggatgacattgctagtggcagtgggcactggctgtgccagctcttgggccccagcaggcacacatgacacatggtggctccataagtggtgggagcagtgtggccagtagcaatgsgtttaggccaggccagttcttaggccacaggaaactcatgtagcatgaaacacatggcactgaaccttatttgtcataattttagggacttgaacagtgccttttagtagttattcaatgcattcat

SEQ ID NO: 347568 - DNA, 584 bp, Homo sapiens
aaagtgttaattctctgacttgactttctcacattccaatctctttcacccattctaatcttgttcccttctctgctaaatcttgctgtgttcacaagtgacctagttgctgaatcaaatccatactttttagtcctcattcttcattaattgtgtattgcatatttcagttgcctatttagtactcttattactttcttccttcctaacaggattctagttaatctgggcaaataacccatcgccacctagccaggtgccttaggagatgtcaatcctacactcagcagcattggaattagtcaattagcatgatamcccttctatggcacatgcagaaatgagcaagtgtcccaattgtagtgaacagaacataaggagatgttagtaggtttaaaaagatatatattttttcaagggatgcatactcatataactctattttccactgtcaagaggggcagcaaacttaagaaaatttatactgtggatggcaaagaaaagagccataataattatgctcctttatatccttgttgagatgctacattaataaaccctagcatgttgatatcctttgaaag

SEQ ID NO: 347569 - DNA, 579 bp, Homo sapiens
gctatttttgtgataataagtttgtctcataagatctgatggttttataagcgctttgcatcccctgcttgcactcattctttctcctgctgctctgtgaagatgtgccttctgccatgtttgtaagtttcctgaggcctccccagccatgcagaactgtgagtcaattaagtcccttttctttataaatcttgggtatctcttcatagcagtgtgataatggactaattcactcactatatggcgagtcctagtaaatttgttcttgacaattttcacttatttttagaagttaagttttcaagaggttatgtttgtcaggtgaaatgataaagggtttccctcacattaaagaagtttgaattaaaaatatgcaagtgtagtaacctaactgtttcctatatccttttggcctccacataatgagattgaacaagctatcccagtgctgcagcaaaggttaaagaactcagaggcaactatatgagggagaaaaamacttttcattagaagagagttatagttagatcaaaaaggctttggaaattccctggggaaaatgccttaattagcaaggtc

SEQ ID NO: 347570 - DNA, 642 bp, Homo sapiens
cattctaatatttctaagtattaaacttaaattatatcaccaacaggcatcacatatggactgtatttatttatagttatttctcttggaaatcagttactgagataaatcawctttgaccttcattaaaataaccatcttcaagggacccaggggctgattgtaagtcaaaagtgtatccagaattgtgtgggatggtgccaatttactacaatctagcatccccttttattcattgatgtgtcctggttcagatgttgaattattcagtcagttggttgtgtattgccaaagacagatcttgtataaaatgaccaaaattccccagtgtcacacaaataagttggtaagattcagttgattctgaatctggatcatctgggcaagatgatatttcttaggctaggtcacacatctgtggtcagtaagagattggctatgaggctcatctgatgttggttgaactcaatcagatgcccaggggctggaggactactggctgatgtaggatggctttggttgggatcactggagtgactcagttctattctctctgggctaacccaggaatattctcctggttttggcagagaagcaagactgagcaagttcaatcacacagttcctcttcaagttcctgct

SEQ ID NO: 347571 - DNA, 630 bp, Homo sapiens
ctattgtccaattcagctcagtccaaaccacttcctgttgttttccacactgaggccaaatatcagtagtcatttgttattctccagccattcatttaatttaactattggcccatttaacaaatttacataattcttttaccccattctaatatttctaagtattaaacttaaattatatcaccaacaggcatcacatatggactgtatttatttatagttatttctcttggaaatcagttactgagataaatcatctttgaccttcattaaaataaccatcttcaagggacccaggggctgattgtaagtcaaaastgtatccagaattgtgtgggatggtgccaatttactacaatctagcatccccttttattcattgatgtgtcctggttcagatgttgaattattcagtcagttggttgtgtattgccaaagacagatcttgtataaaatgaccaaaattccccagtgtcacacaaataagttggtaagattcagttgattctgaatctggatcatctgggcaagatgatatttcttaggctaggtcacacatctgtggtcagtaagagattggctatgaggctcatctgatgttggttgaactcaatcagatgcccaggggct

SEQ ID NO: 347572 - DNA, 642 bp, Homo sapiens
cattctaatatttctaagtattaaacttaaattatatcaccaacaggcatcacatatggactgtatttatttatagttatttctcttggaaatcagttactgagataaatcatctttgaccttcattaaaataaccatcttcaagggacccaggggctgattgtaagtcaaaagtgtatccagaattgtgtgggatggtgccaatttactacaatctagcatccccttttattcattgatgtgtcctgrttcagatgttgaattattcagtcagttggttgtgtattgccaaagacagatcttgtataaaatgaccaaaattccccagtgtcacacaaataagttggtaagattcagttgattctgaatctggatcatctgggcaagatgatatttcttaggctaggtcacacatctgtggtcagtaagagattggctatgaggctcatctgatgttggttgaactcaatcagatgcccaggggctggaggactactggctgatgtaggatggctttggttgggatcactggagtgactcagttctattctctctgggctaacccaggaatattctcctggttttggcagagaagcaagactgagcaagttcaatcacacagttcctcttcaagttcctgct

SEQ ID NO: 347573 - DNA, 619 bp, Homo sapiens
agccattatatcatataatctacttgacagtcctctctgaaaagtactgccatgctcccatttagaactgagaaaagaggtttaattactttacggttttgcccaaggtcacatagttagaaggtgttgaatctggtagtcggattgagatctatctgattcaaaagttttcccctaaacactatgttacgcattaaagagacgtgtgagacaaatttaattcttatgctgccaaattccgtgttgtgcttgtcatacctttaactttygcatcatcctttgatgactatatagttcctacattcaactgcactgggtctaggttcaatgaattgtcatggagcttagtaatgagtggtttatcatctgaaaactatgactggctttgcctatacactcatctgcactgtcattgacacattaccctacttgccccgctatccatcagccctaagcagattttggcaagtggaaccctgctcctattgtggcagctggatcacatcataccttgtatgctacagtggtggtgatttggaaggcaggaacttgggcatgttgaaatcagaagaaaaaagagaagaagagctgcaaaaggtgggagaggtgatgctaaaat

SEQ ID NO: 347574 - DNA, 619 bp, Homo sapiens
agccattatatcatataatctacttgacagtcctctctgaaaagtactgccatgctcccatttagaactgagaaaagaggtttaattactttacggttttgcccaaggtcacatagttagaaggtgttgaatctggtagtcggattgagatctatctgattcaaaagttttcccctaaacactatgttacgcattaaagagacgtgtgagacaaatttaattcttatgctgccaaattccgtgttgtgcttgtcatacctttaacttttgcatcatcctttgatgactatatagttcctacattcaactgcactggrtctaggttcaatgaattgtcatggagcttagtaatgagtggtttatcatctgaaaactatgactggctttgcctatacactcatctgcactgtcattgacacattaccctacttgccccgctatccatcagccctaagcagattttggcaagtggaaccctgctcctattgtggcagctggatcacatcataccttgtatgctacagtggtggtgatttggaaggcaggaacttgggcatgttgaaatcagaagaaaaaagagaagaagagctgcaaaaggtgggagaggtgatgctaaaat

SEQ ID NO: 347575 - DNA, 608 bp, Homo sapiens
atctgaaaactatgactggctttgcctatacactcatctgcactgtcattgacacattaccctacttgccccgctatccatcagccctaagcagattttggcaagtggaaccctgctcctattgtggcagctggatcacatcataccttgtatgctacagtggtggtgatttggaaggcaggaacttgggcatgttgaaatcagaagaaaaaagagaagaagagctgcaaaaggtgggagaggtgatgctaaaatcaagttatcacccatcatcaaagtttttatttgccgtgaggtggattgtccataaactaagcattatgtttttcaggataattgttagtacactgaaagaatgattataccttcagccagcagttagttatatttcacctatttctttactacttggtgctatagactctgatcttgcctccaggcaacctaaacaattataagaacyggtaactgctttctttgaggagtgttttcaaggactagcaacttttaaatgccagtgttatttccatttttaaagctaagtattgttgatgttgcttatgttaattgaaataaaatgagttgatatttcactaatataatgcttt

SEQ ID NO: 347576 - DNA, 547 bp, Homo sapiens
atgtatgctagacactttcaaatgcttattacatgtcatcctcatgattaccttgtaagggagataccatcagtaccatttggataaatgaaaaactgagactcagagagattaagtggcttagccaaaactccccagacaataagtgcagaagcaaggatttgaattcaggcctgttgggtttccagtccagaagcttccccactgtaccacactgcctctccaaaagcataaggaacctctacaactgacattgcaccaggtcctgagctgctgcctcccgaactcccgccaggctgtacccaataggtgaagccagccagaagggagaggagtaagtaagaaggtcccagaggcaacttgcacctggccctgtccaagagtgcagtgcaagcactcccctgtaggggttattatgatggttaatattgagtgtcaacttgattggatygaaggatgcaaagtattgctcttgggtgtgtctgtgagagtgttgccaaaggagattaacatttgagtcagtggactgggaaaggcagactcactc

SEQ ID NO: 347577 - DNA, 643 bp, Homo sapiens
tctaaaattagtgaatggaactgaattccaaaatttttattatctgagttgactgatcttgtggatgtcattcccctcttccacacccacccccagcacctgccaatttccactcccaatttgttaggtggagcaaacattgccagactcaagtcttgctattatttcaaggaaattactcacattgtgaatactttccactattaatagttcttttttgacaaattgatattcattatgtttcctttggaraaatgcattcaaatttataaaagttctgaaaaacacctttagctggttttattttctttctcaccatgtactcaggccccttctaacacagtttgtacaaaagcatttgcttttttgtgatagttctaaaaagcaatactgtttttaaggagaaaactttgcttttaacaatttcagctgagctcttaccagttcttgagtaaatgatctgtataatgaatactggatatttcatcagacctaggatctagtttaggttcttctaacaagtagctgtttgaaaatagaaaactcatttacttttactgagttttaatttaaaatccagtagtgtgggaagacaaagatctcctgggtcatttccatttctaactctgtgcattggtgtatg

SEQ ID NO: 347578 - DNA, 573 bp, Homo sapiens
aagttttatggctatgcttggttctttaaatttccatataaaatgtaagatccacgtatcaatttttacaaactaaaagcctacaaggattttgaaaaaagaatgaatggaatttacacatcaatatgaggggaatayttctttatcaatactgagtcttccaacttgcaaaagtgaactatctttttatttattttagattatcactaatttctttcagctatgtattgtaattttcagtgtatgagttattatttgttattataactcagaattttattatttttgattctattataacaagtactgcttttgtaatttctttatcaggttttttattcttacaatagagaaaaaattgatttttgtacattaatcttgtatcctgcaatatgctaaactgatttacagtcctagtgccactcctccttccccataaaaacttcagaattttgttcagagtatcagtatcataaacacattttacttgttcctttccaacctgaatgcatctctacctctatttctatttatttttctctctttctctcactttttgcctttttcactggt

SEQ ID NO: 347579 - DNA, 519 bp, Homo sapiens
attactattaattcatgaattaaaaacatttgacgagtttcaatctggtgcaaatattgttgtttttaatgtttaaattgtcccaatttttgctagtgggactcctctctaagttgactcttttgatgtgatacaggcattccttgattrtcttataaactctctggtataatgatacatttcaggcttaaattgtgcattttctgatccagatttcaaatcagtcttttagctaagaaatatgaagtattttaataagaaatgatattttaggctggcgtggtggctcacacctgtaatcacagttctttgagaggccaaggtgggtggatcatgaggtcaggagatcaagaccatcctggccaacatggtgaaaccctgtctctactaaaaatacaaaaattagtggggcatggtggcatgtgcctgtaatcccagctactcaggaggcagaggcagaagtatcgcttgaaccagggagctggaggttgcagtgagccgagatcatgccactgcact

SEQ ID NO: 347580 - DNA, 519 bp, Homo sapiens
attactattaattcatgaattaaaaacatttgacgagtttcaatctggtgcaaatattgttgtttttaatgtttaaattgtcccaatttttgctagtgggactcctctctaagttgactcttttgatgtgatacaggcattccttgattatcttataaactctctggtataatgatacatttcaggcttaaattgtgcattttctgatccagatttcaaatcagtcttttagctaagaaatatgaagtattttaataagaaatgrtattttaggctggcgtggtggctcacacctgtaatcacagttctttgagaggccaaggtgggtggatcatgaggtcaggagatcaagaccatcctggccaacatggtgaaaccctgtctctactaaaaatacaaaaattagtggggcatggtggcatgtgcctgtaatcccagctactcaggaggcagaggcagaagtatcgcttgaaccagggagctggaggttgcagtgagccgagatcatgccactgcact

SEQ ID NO: 347581 - DNA, 583 bp, Homo sapiens
cagaaggtaagctttcaccataagaatgaactagagctaaagcacttctagaaaactcagaccctttgaaaggctcattcatttattataaagtttgaacatattttacagtgttatttcagtgaagaatctcccttcctcaaaatgagtatatattttacttacgttttaagatgtaagaattgaaagggacccataaagatagttaactcaaagacccaaatgaaatagtacttaatacacctctgacatgtagttttcacttctgtctttataacaagaaaaacagaaaacaatctgaggagacagtagaattcagatagttgtartagagattggcttacctggagcagaagctactgaagtcacgaacttttaggaatagttagatcacaattttgacagattgttggaggctctgtatgtactaacatgacagtgagaaactcctgaaagtcatagttttagagatgccctcttactttttgtggttttaacttttaagtatctctccaagttctcactgtaaagagccaataaaatcccctcatgtctctggcagaggtagagtaagagtaataac

SEQ ID NO: 347582 - DNA, 583 bp, Homo sapiens
cagaaggtaagctttcaccataagaatgaactagagctaaagcacttctagaaaactcagaccctttgaaaggctcattcatttattataaagtttgaacatattttacagtgttatttcagtgaagaatctcccttcctcaaaatgagtatatattttacttacgttttaagatgtaagaattgaaagggacccataaagatagttaactcaaagacccaaatgaaatagtacttaatacacctctgacatgtagttttcacttctgtctttataacaagaaaaacagaaaacaatctgaggagacagtagaattcagatagttgtagtagagattggcttacctggagcagaagctactgaagtcacgaacttttaggaatagttagatcacaattttgacagattgttggaggctctgtatgtactawcatgacagtgagaaactcctgaaagtcatagttttagagatgccctcttactttttgtggttttaacttttaagtatctctccaagttctcactgtaaagagccaataaaatcccctcatgtctctggcagaggtagagtaagagtaataac

SEQ ID NO: 347583 - DNA, 414 bp, Homo sapiens
caaaaaaaaaacaaaaagaaaaacaaatttatttctaggcatatcatattcaatccactgaaagccagagccaaagaccataatgaaagagaccagaggtcggggaaaatacctcacctatagatgaacaaggatgagaattagggcagatttcttgtcggaaatcatgcaaataagaaaagaacagagttaaatatagtcatgcaccacataacaatattctagacaagaacagactgcatgcatatatcatggcattcccataagattataatactgtatttttactgtaccttttgtatgtataagggtttagatacacaaacaccattgtgttataactgcttagrgtactcagtacagtaacatgctgtacaggtttatagcctaggagaaacaggctacaccaaatag

SEQ ID NO: 347584 - DNA, 627 bp, Homo sapiens
gtaacacattaaaaattcactcactagtttttgcatctagtaataattttctaccttcatcattccttctgtattttttatttgatattccctgtaaggaagagctttcatctttgtgtatttatgtattactgtttaattatttatttatttactataggcctgaggatttttattttattcaatgagctataatacattgctgacattattttgattctcaagtttttccagttttggccaagagctccctaagtgttcatagttcctgtgtcttattggtagactctcatcatgcataagtactttcttaatttctggtctagtaagatgctcagacaccttgcctcaatcttggatttaactttttctccaaggatctatagttcttgtcactggagagggggattayaaaccaagatttgagcactagtttttcacattattaatgacttgccaatggctctattccccctcaacatacagagctggaatacacatgcaaatacacacactcatgtgtatataaatatatgcatatatgcacatattaaaatattttcttatttctatctctttctctgttatatgtttacatgtttatgcagaaacataaaatgattaatt

SEQ ID NO: 347585 - DNA, 623 bp, Homo sapiens
gagtttgaggatgttgcgccataaaaagttacaatcccttacacaatgtccagtcttaagccgtttttcaagtcctgacatcactgatggaagagcttgccacaaccctaagaggaagacaaaggaccttgcaacaccgtgaaaagcagatgctgtgatggaaagcaggactgagacatcacgactgagacatcatgctttgtgtctcgcctcttagaagggctcctgtgggtgccaggtaataaatggatccctggatgaagtttggctcacagtcagctcactgtatgtgtagacccaactaagtgatgtgtgggccaaggcctcgggtcccctaaaggtctgttgagaaatgactgacatgaggcagattgattaataggagaaaaggcatatttatttaacatgtatacrcggtggtcttcagaatgaaggcttaacccgctggtgaggtatagaagcttatacaccatcctgaggttacagagagaatgcatgctcagagcacagccaaaaacacgttttagtggcaagacaggtcataggagagagaaaggaagagtcttggctggcaaaggtggccttatcatgtgaatgaagcctctcaggtagcatcccacagg

SEQ ID NO: 347586 - DNA, 623 bp, Homo sapiens
gagtttgaggatgttgcgccataaaaagttacaatcccttacacaatgtccagtcttaagccgtttttcaagtcctgacatcactgatggaagagcttgccacaaccctaagaggaagacaaaggaccttgcaacaccgtgaaaagcagatgctgtgatggaaagcaggactgagacatcacgactgagacatcatgctttgtgtctcgcctcttagaagggctcctgtgggtgccaggtaataaatggatccctggatgaagtttggctcacagtcagctcactgtatgtgtagacccaactaagtgatgtgtgggccaaggcctcgggtcccctaaaggtctgttgagaaatgactgacatgaggcagattgattaataggagaaaaggcatatttatttaacatgtatacacggkggtcttcagaatgaaggcttaacccgctggtgaggtatagaagcttatacaccatcctgaggttacagagagaatgcatgctcagagcacagccaaaaacacgttttagtggcaagacaggtcataggagagagaaaggaagagtcttggctggcaaaggtggccttatcatgtgaatgaagcctctcaggtagcatcccacagg

SEQ ID NO: 347587 - DNA, 623 bp, Homo sapiens
gagtttgaggatgttgcgccataaaaagttacaatcccttacacaatgtccagtcttaagccgtttttcaagtcctgacatcactgatggaagagcttgccacaaccctaagaggaagacaaaggaccttgcaacaccgtgaaaagcagatgctgtgatggaaagcaggactgagacatcacgactgagacatcatgctttgtgtctcgcctcttagaagggctcctgtgggtgccaggtaataaatggatccctggatgaagtttggctcacagtcagctcactgtatgtgtagacccaactaagtgatgtgtgggccaaggcctcgggtcccctaaaggtctgttgagaaatgactgacatgaggcagattgattaataggagaaaaggcatatttatttaacatgtatacacggtggtcttcagaatgaaggcttaacccgctggtgaggtayagaagcttatacaccatcctgaggttacagagagaatgcatgctcagagcacagccaaaaacacgttttagtggcaagacaggtcataggagagagaaaggaagagtcttggctggcaaaggtggccttatcatgtgaatgaagcctctcaggtagcatcccacagg

SEQ ID NO: 347588 - DNA, 627 bp, Homo sapiens
ggcaacaatgtatctttatttactttgtattctcagtgctttcttttcttttatctccctttcgctgttgttgcccaggctcttttttctccgtttcactcttgttgcccaggctggagtgcaatggctcaatcttggctcaccgcaacctccctctcctgggttcaagcaattctcctgcctcagtctcccaagtagccggggttacaggcatgcatcaccacacccggctaaatttttatttttagtggagacagggtttctccatgttggtcaggctggtctcaaactcccaacctcaggtgatccgcccgcctcagcctcccaaagtgctaggattacaggcrtgagccactgcgcccagcctattctcagtgctttctacggctgctttgccatataagcaaaccagcaacaagcacagcttggtgatttactggattaaattttaaatgttctttttaattgccaaataatagttatatatctctgtgtgtgtcgtgtgtatatacatacacacaagattctcattcttataagaatgaatgggccggctaaggaagaagaaaaatgaaaaataagcatagatgtttcagatggtaataaatgctattaaaatgatgaaga

SEQ ID NO: 347589 - DNA, 627 bp, Homo sapiens
ggcaacaatgtatctttatttactttgtattctcagtgctttcttttcttttatctccctttcgctgttgttgcccaggctcttttttctccgtttcactcttgttgcccaggctggagtgcaatggctcaatcttggctcaccgcaacctccctctcctgggttcaagcaattctcctgcctcagtctcccaagtagccggggttacaggcatgcatcaccacacccggctaaatttttatttttagtggagacagggtttctccatgttggtcaggctggtctcaaactcccaacctcaggtgatccgcccgcctcagcctcccaaagtgctaggattacaggcatgagccactgcgcccagcctattctcagtgctttctacggctgctttgccatataagcaaaccagcaacaagcacagcttggtgatttactggattaaattttaaatgttctttttaattgmcaaataatagttatatatctctgtgtgtgtcgtgtgtatatacatacacacaagattctcattcttataagaatgaatgggccggctaaggaagaagaaaaatgaaaaataagcatagatgtttcagatggtaataaatgctattaaaatgatgaaga

SEQ ID NO: 347590 - DNA, 534 bp, Homo sapiens
gctgcacacaggtcagttctttttatttttttatttttgagacacaatctcgctgtattgcccaggctggagtgcagtggtgcgacctccgctcactgcaacctctacctcccaggttcaagtgattctcctgcctcagcctcctgagtagctgggattacaggtgcgggccaccaggcccagctaatttttgtatttttagtagagttgggatttyaccatgatggccaggctggtcttgaattcctgaccttaagtgatccacccacctcagcctcccaaagtgctgggattacaggtgtgagccaccatgcctggtcacacacaggtcagttctgaaggcagactttcagatcttcagggtttgctgattctgtcactgagaaagccctcttaggatatgtggatcagctggtccatgcagtggagcaaatgttgcatgggaatctcagatgtggagtgaaaccaacctgtcaggaaactcaggcccatgcctcactttgagctctgcaatgcctttgtctccgtgatcca

SEQ ID NO: 347591 - DNA, 531 bp, Homo sapiens
cattattgatttagtaacagctttataggtataagaaatactactctactaaaggtaatatattttattatggtagtgtgtttgtttatgtataaaacaatgctagaaaactaatgtgaaaatatgggcaattcagagccaaataatatactttattcttccttcccacttttcacagctacagccattcaaacctctaatccttggaatcctggtgtgggaaaactcaagtgaaaatgcccaggaaattctgattgctgcagagacattgagggaatcagcgaatctggcaatgaggttcttactgcaacccctagaggcagctgtcttaatgaagatgtgggaacagggaggcctattgcagagaaaaaaggtggttgctatggtttggctgtgtccccacccaaatctcatcttgaattgtagttcccataatcctctcatgtccttggaggsacccagtttcatggggtaatcgaatcatgggggcagtttcccccatgcttttctcatgacagtgagtgagttctc

SEQ ID NO: 347592 - DNA, 569 bp, Homo sapiens
ggtttcactttctttaggaagcaatagtccttggatgttgttcagtgatggtttgctcagttgattttgtcccgtgatctctttagagatttattaacctgaggatttttcagttgctgtcttatcattggatgaaatggtggtgtctgtccaggcaaaccttgagtccaaatggttggtagtgtttgcagaaggtgaaggacaggtgcccttgtttaaattagaaatgatgattagtgagcttttcaggttcgcgatgaagaaaagagtcaagtttacttcctacaccagcatcctctgaggggacagtgggccatatacaactctgtcctgtttgacagygatgatatcatcaagtgggtctgccaaggtatgcagctggggaaatcccaggactttggagactgcagttggccctctgcatttgcggttccaaatttgtggattcaaggaatctcaaattgaaaaatagtccccccaaaaacaatgaaaagtaacaatacaacaataaaaacaatgaaaatttaaaataatgcagcataaacaatatttacatagaataagtatgt

SEQ ID NO: 347593 - DNA, 322 bp, Homo sapiens
gtcttgaatctctctttttgtacaatctgcaagtggatatttggagcgatttgaggcctacatttgaaaatcaaatatcttcccttaaaaactacacagaaacattctcagaaattgtttgtcatgtgtgctttcmaattaccaagttgaacctatcttgtgattgagcagtattgaatctctctttttgtggaatcggcaagtggatatttttagccctttgcggactgtggtggaaaaggaattatcttcaaatccattctacacagaagcattcagacaaacttctctgtgatgagtgcattggtcacacagaattgaa

SEQ ID NO: 347594 - DNA, 322 bp, Homo sapiens
gtcttgaatctctctttttgtacaatctgcaagtggatatttggagcgatttgaggcctacatttgaaaatcaaatatcttcccttaaaaactacacagaaacattctcagaaattgtttgtcatgtgtgctttcaaattaccaagttgaacctatcttgtgattgagcagtwttgaatctctctttttgtggaatcggcaagtggatatttttagccctttgcggactgtggtggaaaaggaattatcttcaaatccattctacacagaagcattcagacaaacttctctgtgatgagtgcattggtcacacagaattgaa

SEQ ID NO: 347595 - DNA, 375 bp, Homo sapiens
cttgtgattgagcagtattgaatctctctttttgtggaatcggcaagtggatatttttagccctttgcggactgtggtggaaaaggaattatcttcaaatcmattctacacagaagcattcagacaaacttctctgtgatgagtgcattggtcacacagaattgaacctttcctttgattgagcaattctgaaacactcttttagagggtctgcaagtggacattttagagctttggggcaattgtggaaaagtaaatatcttcacataaaaactacacggaagcattctgagaaacttctttggaggtgtgcattcaactcacagagttgaacctatcttttcattgagcagttttgaatctctctttttgtag

SEQ ID NO: 347596 - DNA, 196 bp, Homo sapiens
tttgtcatgtgtgctttcaaattaccaagttgaacctatcttgtgattgagcagtattgaatctctctttttgtggaatcggcaagtggatatttttagccctttgcggactgtggtggaaaaggaattatcttcaaatccattctacacagaagcattcagacaaacttctytgtgatgagtgcattggtcacac

SEQ ID NO: 347597 - DNA, 269 bp, Homo sapiens
gactgtggtggaaaaggaattatcttcaaatccattctacacagaagcattcagacaaacttctctgtgatgagtgcattggtcacacagaattgaacctytcctttgattgagcaattctgaaacactcttttagagggtctgcaagtggacattttagagctttggggcaattgtggaaaagtaaatatcttcacataaaaactacacggaagcattctgagaaacttctttggaggtgtgcattcaactcacagagttgaacctat

SEQ ID NO: 347598 - DNA, 375 bp, Homo sapiens
cttgtgattgagcagtattgaatctctctttttgtggaatcggcaagtggatatttttagccctttgcggactgtggtggaaaaggaattatcttcaaatccattctacacagaagcattcagacaaacttctctgtgatgagtgcattggtcacacagaattgaacctttcctttgattgagcaattctgaaacactcttttrgagggtctgcaagtggacattttagagctttggggcaattgtggaaaagtaaatatcttcacataaaaactacacggaagcattctgagaaacttctttggaggtgtgcattcaactcacagagttgaacctatcttttcattgagcagttttgaatctctctttttgtag

SEQ ID NO: 347599 - DNA, 269 bp, Homo sapiens
gactgtggtggaaaaggaattatcttcaaatccattctacacagaagcattcagacaaacttctctgtgatgagtgcattggtcacacagaattgaacctttcctttgattgagcaattctgaaacactcttttagagggtctgcaagtggayattttagagctttggggcaattgtggaaaagtaaatatcttcacataaaaactacacggaagcattctgagaaacttctttggaggtgtgcattcaactcacagagttgaacctat

SEQ ID NO: 347600 - DNA, 375 bp, Homo sapiens
cttgtgattgagcagtattgaatctctctttttgtggaatcggcaagtggatatttttagccctttgcggactgtggtggaaaaggaattatcttcaaatccattctacacagaagcattcagacaaacttctctgtgatgagtgcattggtcacacagaattgaacctttcctttgattgagcaattctgaaacactcttttagagggtctgcaagtggacattttagagctttgggrcaattgtggaaaagtaaatatcttcacataaaaactacacggaagcattctgagaaacttctttggaggtgtgcattcaactcacagagttgaacctatcttttcattgagcagttttgaatctctctttttgtag

SEQ ID NO: 347601 - DNA, 269 bp, Homo sapiens
gactgtggtggaaaaggaattatcttcaaatccattctacacagaagcattcagacaaacttctctgtgatgagtgcattggtcacacagaattgaacctttcctttgattgagcaattctgaaacactcttttagagggtctgcaagtggacattttagagctttggggcaattgtggaaaagtaaatatcttcacataraaactacacggaagcattctgagaaacttctttggaggtgtgcattcaactcacagagttgaacctat

SEQ ID NO: 347602 - DNA, 610 bp, Homo sapiens
  misc_feature (1)...(610): n = A,T,C or G
tctgtcttcctggtctgacctcacaattgattgggggtagatgttgacttaaagttgcaggtgctacttatcttgggaaataacttcccacagtcctattattttaccctttcaagaaacttggaggcagctaggtcagaatattagtgtttcattttgcagataagaaccctggccattagaactggcccataaaccctcagtgaattgagggaagagctatgattaggatccaagccttcctcctattccatggttcattccaataatcccacatggaagtccaccactgcccttgggtcatgagaatgaggctgctgctacagctacaaaatgtagtgccagagaccattcagtcccttttcttgtgtcatccacaaagtgcagtggctggcttaagtattagagtcgttccatatgtgtaaagtagaggaaaccctaacatcagccccttgagctaagaaacccyttggtgttcgttgtagcacncagaagcttatgccagcaccatgtattttaccccacaaaaatggatgagaaaggagctgccgagctggggaggggagaagggaaatgagctatgtcatcaggccctgaaaccccagatcaa

SEQ ID NO: 347603 - DNA, 574 bp, Homo sapiens
aggtcttgctcaatcaatggccttgcattggccmtgagattctgattacagttgttttgcaaataatgagaaatttgaaaaatattgctgtcccctaaattgagccagtcctaacactcacaaaatccataatggtatagatacccagatagaccttaactgtgatttaatagtgctcactgtaatttagccccagggaaatgtgctttcaattaaccaatgtaagcacaatgtctacttatcccataaatgttctcctaaatgtgctaattaagacctagatccagtgcttctcatattacactctctttcctttctcctaaatgcctctctacttcaggatcactttatgcttatctggagtgtgggcatagtagtctattgtctgcctccaattttgccctatgtgccttaattcattctctacagggcttaaatctgttaacaacgaaaaacaaaaaacaaaacccctttagtgactcaccctgtttaactacactctaacttctggcctcctccatattatggcctctcacccacccttcctgtctcatcttctatttttcactaacat

SEQ ID NO: 347604 - DNA, 556 bp, Homo sapiens
taactacacttgtgggcaagttgttgaagataactagaaatacaaagacaatgtgacacaaaattctctggcaagtcggggaaggtgtagacatggactccagaggtctctgccatcagaattgctggttgttttggggaagtgctatgagagactgaaaaggctagtgggaggttgagattacttaaatgcactgtttaattttttttttcaataaaagtctaaaagccaggctttaagcctaaagtgctggaggctattagccacctgaggcaaggcagttaggcacaggtgtgccaggctgccaaattacaatgagtgcacatcccaggttcagaatatctgaaccactggsctctgtttgatgctaaaatgacccattttgaaaccaataaaagaaaatgccactttacacagtgagaaacaggcattaggaacatactgtccctttggaagagtccccgtggtataagcaacattgaccaagctccaggggttatcttcagggacagaagcccccaagagagggaggcatcagtcagtctgagtggtcgtt

SEQ ID NO: 347605 - DNA, 535 bp, Homo sapiens
atatggtatagtgggaagaacatacatttaggaggaacagagtggctctgcaactacataattgtatgactttaggctgttcattgaatctctctaagtctcwattttccaagttgagaaatggcgataatggagtctcatagtcctgctgagatgatggaataatcgtattttgaatacctgccagatagaggcaccttacctgttagaactctttctccccaccttcatctttctcatgcaatgtatatacatgattagaatgacctcatacatccagcatataaaataaaagcaagtgaatatcttatcgtatattgtgacaagggattgaaaattctaaagaggtgtttataaatacctgaaaaaaaagcttgtaaggatgaggccacattatttcagagtccctattgcctccaaccttgccaaaactgctattagcatttagctgtttagctaaaatgggccttttcttcattgtggacttcctcttatgactttcgtattggcgaggggactttggaaaattcatgca

SEQ ID NO: 347606 - DNA, 634 bp, Homo sapiens
tggtgtgacccactgtggactccagggctgggatgaagtaccacaggatggtgagcaggcagctggaaccagacsgctgtggcaacaaggtgtccattcactgttgcccacggcagagcaggggtgtggccagcaatgctttcctctgaatctggctcatgggacacatgatttctgtccctgctgcagtagctccctttagacacaagttgtaaatagggcatttgggaaaggtggtgctgctggttactgttgaggagaccagggttcttatttgcccagaggaaggccagggtatcggtcatctcatcaaggtgactcctgagaatttggatgtgaataatggcagggataaaagaaagaaaaggaggagaaaagggcctaccctgcgtactcatgcatcctctcctttaatttctcaccttgacctaggagagcaatacgctactctaggtaagccattgtccaaggtcatgtggtcagcaaacaaccctaactaggcagcgtgcccaactccgaggatcataaggtttctattccacttcctgtccccacctaaccagtaagttggcccttgggcttatcatgagtgaggacttcagactggttcactccatgatttctatggtaatct

SEQ ID NO: 347607 - DNA, 634 bp, Homo sapiens
tggtgtgacccactgtggactccagggctgggatgaagtaccacaggatggtgagcaggcagctggaaccagaccgctgtggcaacraggtgtccattcactgttgcccacggcagagcaggggtgtggccagcaatgctttcctctgaatctggctcatgggacacatgatttctgtccctgctgcagtagctccctttagacacaagttgtaaatagggcatttgggaaaggtggtgctgctggttactgttgaggagaccagggttcttatttgcccagaggaaggccagggtatcggtcatctcatcaaggtgactcctgagaatttggatgtgaataatggcagggataaaagaaagaaaaggaggagaaaagggcctaccctgcgtactcatgcatcctctcctttaatttctcaccttgacctaggagagcaatacgctactctaggtaagccattgtccaaggtcatgtggtcagcaaacaaccctaactaggcagcgtgcccaactccgaggatcataaggtttctattccacttcctgtccccacctaaccagtaagttggcccttgggcttatcatgagtgaggacttcagactggttcactccatgatttctatggtaatct

SEQ ID NO: 347608 - DNA, 634 bp, Homo sapiens
tggtgtgacccactgtggactccagggctgggatgaagtaccacaggatggtgagcaggcagctggaaccagaccgctgtggcaacaaggtgtccattcactgttgcccacggcagagcaggggtgtggccagcaatgctttcctctgaatctggctcatgggacacatgatttctgtccctgctgcagtagctccctttagacacaagttgtaaatagggcatttgggaaaggtggtgctgctggttactgttgaggagaccagggttcttatttgcccagaggaaggccagggtatcrgtcatctcatcaaggtgactcctgagaatttggatgtgaataatggcagggataaaagaaagaaaaggaggagaaaagggcctaccctgcgtactcatgcatcctctcctttaatttctcaccttgacctaggagagcaatacgctactctaggtaagccattgtccaaggtcatgtggtcagcaaacaaccctaactaggcagcgtgcccaactccgaggatcataaggtttctattccacttcctgtccccacctaaccagtaagttggcccttgggcttatcatgagtgaggacttcagactggttcactccatgatttctatggtaatct

SEQ ID NO: 347609 - DNA, 595 bp, Homo sapiens
cagactaattaccccctttgccatgactcagcgcccagtgctgcctgtctgccgccagctcatcatccagagactgtttacyatcacctccagccatacataattcatcagcctccctctttccggtagctgtcatccctcctcctcccgtaattcaggtggcaaagtccccttctgaggactctgaggacacaaaggtccccaccttactaaggaggctgccctgagagaagacacctttagactagaatggagagggtgggagggtcctctctccagatcctgagcaagacaagggtatatgcttggagaaaagcatcacacacacccctccttccttcctagccgctccctgcccgccaggaccttctccactcattgtccatcctggaaactgggaaagtcagaaagtgaagatgagcagggagaaggaggtggggttgacactgtggagagaagctggagggtgtggcagtgcctctgctgccttgccgcaggtagttagctttatgtgtgttatttcttcaagtgctgcccaaaatactttccatttgtagagggcttttaatgacttcaaggtgttaacttgctgcag

SEQ ID NO: 347610 - DNA, 496 bp, Homo sapiens
tgaaggtgagagagatgccagggcagtaattgaaggagtactcactttccaagagaaccaagaaaggctggggtagagagcaggaacagccctggagggaggtggggcccattcatgcttctgagatgggggaaggacaaatacaaaagaactgagaagcccctggcaaatgatgggctttcttaaagccaggcacacctgtaaaggtgtattgtcttcttgctcccaggtctcagatttgcacagctattgagcctcacttcttggattattggtcttgtcaccaataatccaagttcctcctaacccttcaaggaaatggagccatttaatttcattgctgatgcccttgacatctatctggcaggccgaggtgagggcagagcactgtccagtcatatgttgcctgcgtacgccagctgtgtttggtrctaacccttcaggttgagttaagacagccacagcagaccatatgaagagttctaaacatgatgga

SEQ ID NO: 347611 - DNA, 587 bp, Homo sapiens
cctctttgggtagagattccctcactgtgggtgtgccacattcagggctggccctaggcataactctggtgctgaccacctgacctgggttagttctgtcagcacatccctctttcagtctcagtctctgatttgcacagaaggaaactgtgacccagagagggaggaagcttggcaaggtttgtctgcatttgcagtctccttttctccagtgctggctggctgggactctttcattgtctgcgacggggcccaagtccccacagtgtgttatgagacctaaagcttgtgttaacacgcttattcttcatcaaaagtgacctgttctgtgttctctttttgaggattagccatgtggcaggagctagtcttataaactaatccttagtaaggygtgatgtgtgatcacagacaactaattgagcttttcacaccttagcttgagggagtggaaggtgcaaatttcaagcaataaaggatttttggatttttttgttttgttttgtttttccaaacagagaatgcttcttgatgctccttaaagcatgctgtatagtcagaaaccacatagctggaccagtcctacg

SEQ ID NO: 347612 - DNA, 573 bp, Homo sapiens
tttagttcagggatttctccattgcaaggaacataaacctagtaagacacccacaagcaacccattctagggctaaaagcatcatatggattcaaaagcaggaatcataccagagttctatgtgaactgyggctgagctactcattccatcccttttaggagccacctgataaagtcttctctccatcagggcttctcagccacgtggcccagaatggccaggctactgctgcaagctatgtggcctttcttcttccaactgctctatttctctaagcacagatattcaagacagatcatctgattgacttagctataagctggctcccttgaggtcagaggaccagtcctgggctgttcaggtgccacttgcgctcctgaacactctagggctctttgctcagggagaaagatgcaggaagtttgggttaagctggaaggggaagagctgcagtgatgtcatgtgagtcatctgagatagcctccctcccctgctctgagagctgggggcagtcttcatgctgcttggtgaaccactggtcttcaccaagtcttcaaccgctggtcaagaaa

SEQ ID NO: 347613 - DNA, 628 bp, Homo sapiens
aaaatgtttggaaaactcagaggatggcgagtctgactcagctaccgaagaggctgcatgttagctggacattgaaggatggggcctcttgctcttgcaaggcagagaatacaggaacagtatactgggtgaaggaaaaccttgaacactggtaaaaggtgtgacctgtgaagtttgttcagagagcagacagtatcgtggtgcagctcaagcatcaagcttaaggggctgcttgatgcaggagggaccagaaaggtggaggcatgctggtatgcacagggagttaaataccactttgtatttgccacggtctcccacctgctcccagttgcttttgccattgcttgaaactgagtaagcgggaattgtcagtgaagttttctgtgcagggatattgcatctattgtagcaagacatcatgtctgaccatagaggtacttggatraaggcacacagaactttcctatacacttaagcagtagtggaaagcaaaccaagacaattgtggaaaattattactttaattcaatcagtgatagccttttcaccttcctctcagaggcagaaaggatgggaagaaaagaggtaggctgttcaaagttcctgagctggtgtcagacataaagaa

SEQ ID NO: 347614 - DNA, 628 bp, Homo sapiens
aaaatgtttggaaaactcagaggatggcgagtctgactcagctaccgaagaggctgcatgttagctggacattgaaggatggggcctcttgctcttgcaaggcagagaatacaggaacagtatactgggtgaaggaaaaccttgaacactggtaaaaggtgtgacctgtgaagtttgttcagagagcagacagtatcgtggtgcagctcaagcatcaagcttaaggggctgcttgatgcaggagggaccagaaaggtggaggcatgctggtatgcacagggagttaaataccactttgtatttgccacggtctcccacctgctcccagttgcttttgccattgcttgaaactgagtaagcgggaattgtcagtgaagttttctgtgcagggatattgcatctattgtagcaagacatcatgtctgaccatagaggtacttggatgaaggcacacagaactttcctatacacttaagcagtagtggaaagcaaaccaaracaattgtggaaaattattactttaattcaatcagtgatagccttttcaccttcctctcagaggcagaaaggatgggaagaaaagaggtaggctgttcaaagttcctgagctggtgtcagacataaagaa

SEQ ID NO: 347615 - DNA, 566 bp, Homo sapiens
agataacagagccagtaagtgccagcacaggaacttgaaccaaagtcctttgaatctcgatcccaagtactttgaataatatgctcctctactcgtttagrcccatttttatttttttattttaaatatgtttgatatgaagttattttcttttaaagtagcacaattgagaatctttttctaattgaaacatttttctccttttttgtgataataaaatttcactgctctttactggaattcagagacctccattgagtggtattacaaaagctgggattatagcactcactcttaggtcctttaccctttcaaggagattgttctttaaaaaaaaaaaatccatccagttaagcattttcctgtgggtcaagcactttggcttgagtgaaatgagacagccaagagtttttattctgccatattcattaagcatcttcttagtgcacagatagaagttggggagggcaggtcaggaaaaagatttaaggagaggagcaagaaaatgactagcccagaagttcagaggtgaacttggctccccaaagtctctgaaatggggcttt

SEQ ID NO: 347616 - DNA, 507 bp, Homo sapiens
ttgccttaaccattcctgctcacttgggggcctgaggctccctgcctgggtaacagagattgggtgcagtgctgagagctcagacaggggagggtgagggggcagctagtctccgagctgggcaggtctgacttcccaggttaccccaggtgagcttacctgactgtgggcgccggcaggtgagggccagaacaacacccagtagggtgaggagggccagcagtgccaggatcaagagccccaggtgtctgtaagagactgagtcaagcaggatgaggccaagcccagttcctcagtgcccagcctccctcttacctccccctccccaagaactcaccatcyggacacaagaggtgcttccaggcaaactggacatctgaccgccacacctgagggcacagagccccccacccctatgagccaggcatcttctcctcccggggagctgagtgaagcatggagctgggggagaggggagtccccactggctagggaattcttcccagg

SEQ ID NO: 347617 - DNA, 579 bp, Homo sapiens
cttgtttaacagcataatacatgaggttcctgtagtcccagctacttgggaggctgaggcaggagaatygcttgaactcaggaggcggaggttgtggtgagccaagatcacgccactgcactccagcctgggcgacagagcgagactccatctcaaaaaaaaaaaaaaaaaaaagaggctcaatgaatttcggtaagatagatatggatacatagcaggttaatagtaatagagggatagaactctcaagtcaatgtttgaataccttttagaactatttaatgtatacataatactaaaacatttataataaatatttctgataaatcattacacatgtacaggcgatatgatgcaataggtaaagcaacaaacttgtttgtgaatcatcatctttccagagagtattgagtagctatgacgtgccaggttgtgaactaatgctggagttctaaacatgatacctttcctcaagaattaccttaatgggagaatgcaaataggtgtttcaccttggaaaataattgctgagtttggtaacggcagaatgaacaaggtactacgagagtgcagaggagg

SEQ ID NO: 347618 - DNA, 608 bp, Homo sapiens
tggtgcgtacttattaggagctcttcttttgcaacctctctcggtatttggggcccatgataatgtgaatacttaagggaaaagtgtgattagggatggtgtcgttcattcagtaaacatttcttagtgtttgatgtgactgaactgcgcgtcacatatgattttacacttttatcctttcaggcaactgacaggtctctaatctccatctcagaaccttcactcagcttgaactttggctcataaaggtcatttttgaaccrcttgggacaaagagccacgtccatgaaatcccacagagtcgatagatgcaataatagctttaggcacattttcttaagacccaaggggaaagacaatttcaataaatgtaaaactatgccatctacaatccacacgatatcttagcaaatctcataggaataaatcttctcttttcctccaggcaagaacctccttaacaataatgatgcaagatcttattaagagtataagatactaactatgccaaaacaaaacgcaacacacacacacacacacacacacacacactagcctcaaacacaaaaagaatattcataatttgatatattgtacttatctttcaa

SEQ ID NO: 347619 - DNA, 432 bp, Homo sapiens
ctatagaaacttataccaaataagccaaaaaatgatgtagccaccctggactgttctctggtgccaaagtaatcagtcctacgtgttcyttcatagtatgtaaaaaaccctattattgcacacagaaaaccagacatgagtggtagaaagtatagccgaatctagtccctggctctatctggccctgtacttgtataccacccagcaaacccagcagcacaatgtttactacacagaaaaagggtgatggtacagagggagggtctaatgccaccaccttctatgtaaacctactttgaacaccaaaggaagaaatgtcaatggctctcaaaacaacaaaataaaaagtactgtcaagaatcttgctctaaaaatggaagcagtgatatgcctagctttcaaagcttagtacgaagaaagtgaaagaaaaac

SEQ ID NO: 347620 - DNA, 394 bp, Homo sapiens
aaataacattcacctgattctgtaaaactcataataagaaataatgaagcatctggcagatagggaaaggtccaagaagaaacattttgaacggaaagtrtatcagtccctttggcaaagacttactggttggcaaagactgttgttgcttcaggaaacccttgcctgtcattttcagagtaagaatatatatttttccatgcattcagtgttgtcttcagagtggaattagttcttaggaccaatagtaaagcatgttcttggttcctttttccctcagaagtagtttagagtagtggttctcaaactttgctgtttattagaatcaccaagtatcttagaccacttgtgctgctataacaaatacgtcagactgggtaatttataaagaaca

SEQ ID NO: 347621 - DNA, 536 bp, Homo sapiens
tggaggctgagaagtcaaagatcaaggcattggtaggtttggttctctggggaaaactactctctgcttccaagatggcctcttcaggaattctgaatcctcaaatgcctgaagccaggtggaaaagttcacaaaacatggaatgaagcctcttttataagggctttaatctcattcacaaggggagaagccctaaaggcctaatcacctcttaaaatgccaactcttaataccataaagttggccattaagtttcaacacytgaattttggaggggacacattcaaatcattgcaccagatcagctattaaaaaatccccatgccaattaaatcagaatctctggggctgagacccacgcaccagtagcatctagagcaccccagatgattccactgtgtagccaaattttagaaccaatgatttagggcatttatacaacacaagtgaatacaaatgtgtacagacctgcaaaagtaaggcatccatattcctgcactcattttaatacaagcatagggaataatgtaacgata

SEQ ID NO: 347622 - DNA, 557 bp, Homo sapiens
caaacctgcacattgtgcacatgtrccctaaaacttaaagtgtaataataataaaattaaaaaaaaaaagaaagaggtttaattgactcacagtcctgcatggctgggaggcctcaggaaacttacaatcatagcagaaggtggaggggaagcaaggcacatcttacatggtggcaggagagagagagaaagagggggaaactaccacttttaaaaccatcagatatcatgagaactcactatcacaagaacagtctgggagaaactgcctctgtgatacagtcacctcccaccaggtcccaccctcaacagtggggattactattcagattacaattcaaggtgaggtttgggtgggtacacagagccaaaccatatcagatgtttttccatttatttgtgtcatctacagtttctttcggcagtgttttgtagttccccttataaagccctttcacctttttggttaaaggtattcctgggtttctttgtttgtttggctattgtaaatgggataaaattcttaatttagttctaagcctgaatgctgttggttt

SEQ ID NO: 347623 - DNA, 584 bp, Homo sapiens
tcaataatgaacaattagaatttgaaattaaacacacaatacaatttacattagcaatccaaaaaatgaaatatgtagatagaagtctaacaaaatatgtacaagattggtatgaggaaaattacaaaattctgatgaaagaagtcaaagaaaagtaaataamtgaagagatattccacgttcatgaataagaaacagtattgtcaagatgtcacttcttccaaacttggtctttagattcaacacaatctcagtcagaatcccagcaagttatttcgcggatattgtaaactgattctgaagtttatgcagacagaaaaaagtacagagtagccaacacaatattaaagcataagaacaaaattagagaattgatactacccaacttcaagatttactataaagctacagtaataaagacaatgtgctgttgggagaaaaattgacaactagatcaattgaacagaatacagaacccagaaacagacttatataaatatcaacagatcttttacaaaagagtaaaggcaatataatggagaaaagataatcttttcaagaaatgatgctggagaaacaggacc

SEQ ID NO: 347624 - DNA, 584 bp, Homo sapiens
atacttggtgttggtataccaacagtctttggaataaactggcgtgaacatagagatcaaattttacatgctaagaacttattgaggatacagactacactgaagagggcagcaygctgtgttcataaagcatgagatcacattttggacccaagttttgaggtatgagataatatagaatttaccttgctacctgtttttgtaaataaaattttactggaacactgtcatacccatccctttatcagtggctttccttatcagtggctgctttcaagtaataatagcagagttgagtagttgtgatagagaccaccacattgtctacaaagcttaaaatatttattatctggacatttacagaaaaagtttgcaaaatcctactcaaaccatcatagaaatgctctggttctgtgtcttaaactgagaaggtacagtcctgagcttatgattttctttctgaaactttccagtgcagactggaacaactgtaccaagtgtttgagaaattcatattcacactgcagtaaccatttacattgctatcaataggctctttggtaatcagagaagataattaagca

SEQ ID NO: 347625 - DNA, 584 bp, Homo sapiens
atacttggtgttggtataccaacagtctttggaataaactggcgtgaacatagagatcaaattttacatgctaagaacttattgaggatacagactacactgaagagggcagcatgctgtgttcataaagcatgagatcacattttggacccaagttttgaggtatgagataatatagaatttaccttgctacctgtttttgtaaataaaattttaytggaacactgtcatacccatccctttatcagtggctttccttatcagtggctgctttcaagtaataatagcagagttgagtagttgtgatagagaccaccacattgtctacaaagcttaaaatatttattatctggacatttacagaaaaagtttgcaaaatcctactcaaaccatcatagaaatgctctggttctgtgtcttaaactgagaaggtacagtcctgagcttatgattttctttctgaaactttccagtgcagactggaacaactgtaccaagtgtttgagaaattcatattcacactgcagtaaccatttacattgctatcaataggctctttggtaatcagagaagataattaagca

SEQ ID NO: 347626 - DNA, 584 bp, Homo sapiens
ctgcttccctcctaagcctcctttcttatcactgtttcccttaccctccaagcctcacacatatggacctcctgtgattcagttatgtgaagccagcatgcttttgccacactccttgattttcacacatgctagtcccactgyctgataaattcctgccctcattcttcacctgaataacaaatgatctttgtgatatctatttagatattatatacctagaagaatcttccctaacttccaaaattaaacaaacttcctcatttcaatttctattgacctctttatttctcatttatagcagttgtaaaagtgagtaataattgcttcttgttttatgcctgaaataatttcatgcactcttacttgtgtcttctaaaaatctaacagataaagaaagtaacatgtacagctagtcttttatataatttgtagacacacacacatttcataattcggagcttgcctaagaaagctgtaatactgtgagatttttatttttctaaatcattgcagaagcaaggaatctgtcaccacgcctttagtcctgtccatgttgtcactgatctgtgatctatgacatg

SEQ ID NO: 347627 - DNA, 430 bp, Homo sapiens
ggaggtgagagaacctaggtaaaattaattgcttccatcatagtataaatagaaaagggctccgtataagcactgagacttctgagggaggaaaaagtcattttataagagctgaaaacatctgaagaaagagttaccatggcttatgctggcctagattaagcccaaagcaaaccttccaactgttgttgaattacaagtttaaaaatcttcagaaagtttcctttaagtacatatcttaacaaaatttgagtttttatgaaaaagttagaagttaagaaactactttcctgtaatataatttaaggacaaatactaaatgtaatatttaaataaacattgtartgttttgatggagacatactgatgaattaaacctacttactcacatttttagttattcagcacaaatataagattataagtatta

SEQ ID NO: 347628 - DNA, 462 bp, Homo sapiens
caagaaaaaatacacctggcatggagccctttactcaaatcaagaatggctaattgaagcaagtgtattcactgagggcagagataggcagagatgccctttagcatgccttgtaattttctgttgaaagttgggcatggtgtatcaggaaaaaggaactgargtagttaggcctttagtgtgaggtcgatggtgatctggttaaaatttagactctgttttctatttgctgtcatcatggtgtcataggctaaaatttcctctgatgtccttgttttgtctcttttgttgtccttgggtttccctagagactccttaactagagattgaggcttatagttcttttaactttaatcatttacgattctacaggagttttattaatgtggtaaggcatggcggggggagggaaacagtctataattctctgattagatctcagtcttagtttttacccagtac

SEQ ID NO: 347629 - DNA, 462 bp, Homo sapiens
caagaaaaaatacacctggcatggagccctttactcaaatcaagaatggctaattgaagcaagtgtattcactgagggcagagataggcagagatgccctttagcatgccttgtaattttctgttgaaagttgggcatggtgtatcaggaaaaaggaactgaggtagttaggcctttagtgtgaggtcgatggtgatctggttaaaatttagactctgttttctatttgctgtcatcatggtgtcatargctaaaatttcctctgatgtccttgttttgtctcttttgttgtccttgggtttccctagagactccttaactagagattgaggcttatagttcttttaactttaatcatttacgattctacaggagttttattaatgtggtaaggcatggcggggggagggaaacagtctataattctctgattagatctcagtcttagtttttacccagtac

SEQ ID NO: 347630 - DNA, 462 bp, Homo sapiens
caagaaaaaatacacctggcatggagccctttactcaaatcaagaatggctaattgaagcaagtgtattcactgagggcagagataggcagagatgccctttagcatgccttgtaattttctgttgaaagttgggcatggtgtatcaggaaaaaggaactgaggtagttaggcctttagtgtgaggtcgatggtgatctggttaaaatttagactctgttttctatttgctgtcatcatggtgtcataggctaaaatttcctctgatgtccttgttttgtctcttttgttgtccttgggtttccctagagactccttaactagagattgaggcttatagttcttttaactttaatcatttacgattctacaggagttttattaatgtggtaargcatggcggggggagggaaacagtctataattctctgattagatctcagtcttagtttttacccagtac

SEQ ID NO: 347631 - DNA, 557 bp, Homo sapiens
gtaaaaatattataaggtaaaatgggcattttgtagacatgatgagatgcaaartcacaaaaaacggtaacccaagaatgtggcacacaatgcgtgtaaactattgcttgtttactctcatgatgacatggctggctgggagcttcacctttctactgcggcccagcatcttcagagagtgttgtactgcatattgctagcccaggaaaagatgaaaattcaaagtagggatcctactgaatgcatatcacttttgcaacatcatagagtcaaaaaatcctaaatcaaaccatcattaagtcagggactgtctgtagatcatctaaatggtattcatgatttagttttggataacaaaggacaattttaaacagtctttcttcaattaaaaagtagaaccattttgagatactagagattgatattttagttttagaaatttgaagcattattcttccaagtctctatctgtaaaaatataaaatagagagagatcaactttaagctcttgtctatataattcccttacagataaaaaaaaaatcacaggagttttt

SEQ ID NO: 347632 - DNA, 557 bp, Homo sapiens
gtaaaaatattataaggtaaaatgggcattttgtagacatgatgagatgcaaaatcacaaaaaacrgtaacccaagaatgtggcacacaatgcgtgtaaactattgcttgtttactctcatgatgacatggctggctgggagcttcacctttctactgcggcccagcatcttcagagagtgttgtactgcatattgctagcccaggaaaagatgaaaattcaaagtagggatcctactgaatgcatatcacttttgcaacatcatagagtcaaaaaatcctaaatcaaaccatcattaagtcagggactgtctgtagatcatctaaatggtattcatgatttagttttggataacaaaggacaattttaaacagtctttcttcaattaaaaagtagaaccattttgagatactagagattgatattttagttttagaaatttgaagcattattcttccaagtctctatctgtaaaaatataaaatagagagagatcaactttaagctcttgtctatataattcccttacagataaaaaaaaaatcacaggagttttt

SEQ ID NO: 347633 - DNA, 557 bp, Homo sapiens
gtaaaaatattataaggtaaaatgggcattttgtagacatgatgagatgcaaaatcacaaaaaacggtaacccaagaatgtggcacacaatgcgtgtaaactattgcttgtttactctcatgatgacatggctggctgggagcttcacctttctactgcggcccagcatcttcagagagtgttgtactgcatattgctagcccaggaaaagatgaaaattcaaagtagggatcctactgaatgcatatcacttttgcaacatcatagagtcaaaaaatcctaaatcaaaccatcattaagtcagggactgtctgtagatcatctaaatggtattcatgatttagttttggataacaaaggacaattttaaacagtctttcttcaattaaaaagtagaaccatttygagatactagagattgatattttagttttagaaatttgaagcattattcttccaagtctctatctgtaaaaatataaaatagagagagatcaactttaagctcttgtctatataattcccttacagataaaaaaaaaatcacaggagttttt

SEQ ID NO: 347634 - DNA, 614 bp, Homo sapiens
acacctttatttcagtctagctagtcatccatccacttggatatataaagtcttgtttcagttaaaaaatattcccagccccaaggttttgtaatattgtctactaagatttttaaaaatatgcttgttttataattttacatgtaaagttttactattgctataatttatttgaacayatagagtaaattagaaggtcctacttacttatttccagagagcagtttgctgtaccatttattgccccattgtatttgttcgtgtatatatttaactgtattttataatctcttctgctgaagtattgctttatgcctaagcagtatgatttactcatgactaaaagaattatattatatattaatttgatgagccatgatctcatacatcttcttatttcttgttttcttgatttttgacgtttatttttccatatatacttgaagattattttatagagttcaaagaaatctatgaaggttctaatggaattgcaaaagcttctaatggacattactctaatttaaggtagatttaacttttgaggatacaaaatattcttataaaataacaaaatagatcttttctttttattacacattattttatgtcta

SEQ ID NO: 347635 - DNA, 578 bp, Homo sapiens
taacaggtgctacagtagtgtggtggcaaagaaagcctagaaatagaaaacttgaagaaactacactttatttgatccattcaataaacattatctaagcagccactctatcataagaaatataggacataaactatccctaatctttggagggtgaggttgttgctagaaaattatatgagtaaaaccacaatgatgatactatataaactgtccaggaacagggctaaagaaggcaaacagaaggttaatattagagagctatgggaatatatgcacccactgtttygggttagagagtatcccagctccagagaggagctgcaaggacagggaactatcccaaaagaactatataattagccaggttcaagacagctaataaaacatgggaggacaagatagcaagccaagtgaaacaaatggatttaagatgaggtctggttacaggaatgaaaaagaaacccatttactaaaacgaagaatgaggatggataagtaacatggttgacttcctactcttctttttcagaagctaaaacggagccatatacaattcctcctgttagaggcaacta

SEQ ID NO: 347636 - DNA, 578 bp, Homo sapiens
taacaggtgctacagtagtgtggtggcaaagaaagcctagaaatagaaaacttgaagaaactacactttatttgatccattcaataaacattatctaagcagccactctatcataagaaatataggacataaactatccctaatctttggagggtgaggttgttgctagaaaattatatgagtaaaaccacaatgatgatactatataaactgtccaggaacagggctaaagaaggcaaacagaaggttaatattagagagctatgggaatatatgcacccactgttttgggttagagagtatcccagctccagagaggagctgcaaggacagggaactatcccaaaagaactatataattagccaggttcaagacagctaataaaacatggraggacaagatagcaagccaagtgaaacaaatggatttaagatgaggtctggttacaggaatgaaaaagaaacccatttactaaaacgaagaatgaggatggataagtaacatggttgacttcctactcttctttttcagaagctaaaacggagccatatacaattcctcctgttagaggcaacta

SEQ ID NO: 347637 - DNA, 618 bp, Homo sapiens
cttcagttaggagtacatatttttgtaaaatacagttcataaagagaaaattttgaataccaatggtgacaactttctaaacaaaaattataatggtagtttgtatacatggtagctaatcaaaacacaaatattaatgtgtaaataaataggaagttgtttccattgattttagttatccaaaaataaattatatttttttctaattttgcttattttctcttagtgaatttttttttctttttttgtgaagttttataagaaagtcattactttaaaatcattctagtatattcaggataacagcaaatgtaagggtcattcatagaaaaagaaaaaaaatcccttagaaacaatcaactgagatatatgaggataatcatctgaaggtcttattctaatagaagctgtagtatcagcttaaagaattattcaaatttactaagtttagttaagtagtcaaaattttttattaaaaaggacttttaatagagatatccaagatttttgccaaagtcatgaatggtatcaattttatgagcttgtgaatttctacactgkttttatgtatgagcatccatgggaaaattttctcagtcattcaataaatgtttattg

SEQ ID NO: 347638 - DNA, 435 bp, Homo sapiens
ggaagccctgtcttcttagccacacccacacatgatggagcttccatcaagctgaactgggtagtgggtggaagatagggagcaagttgtggctcaagtgccacagtccctcattgttctcaccacattatagtagatttttatgaatgtttctatctttgctgtatgcctktagaacaatttccagagactttaaataatttggatttttttaaaagtagtttcaccagtgttgcttgttttgctgagaagtagaccaacagagcccctcatgccagcatgaaattcctaagtccaggattatttgcaagagcagggagaggtttgtgactgaacccattaggaagataaagggtagaggaggcaagggctggaaagcacacgccagtgacaggagataggcaagttactaggacttaccaacaggaactggaa

SEQ ID NO: 347639 - DNA, 626 bp, Homo sapiens
gccctgtcttcttagccacacccacacatgatggagcttccatcaagctgaactgggtagtgggtggaagatagggagcaagttgtggctcaagtgccacagtccctcattgttctcaccacattatagtagatttttatgaatgtttctatctttgctgtatgcctttagaacaatttccagagactttaaataatttggatttttttaaaagtagtttcaccagtgttgcttgttttgctgagaagtagaccaacagagcccctcatgccagcatgraattcctaagtccaggattatttgcaagagcagggagaggtttgtgactgaacccattaggaagataaagggtagaggaggcaagggctggaaagcacacgccagtgacaggagataggcaagttactaggacttaccaacaggaactggaaaaatacgtagaatctcattttcatcagaaggctgctggggaatcagcatcagtaccaaatgtttatctcggccaggcccagagagccagcaggattcagcatggatcatgccaccctgcacccaggaacggtgcgtgtgccagggacgtgaggcagtggtagacagggtgatttacatcaccatctggtcaaaag

SEQ ID NO: 347640 - DNA, 643 bp, Homo sapiens
tttcaccagtgttgcttgttttgctgagaagtagaccaacagagcccctcatgccagcatgaaattcctaagtccaggattatttgcaagagcagggagaggtttgtgactgaacccattaggaagataaagggtaraggaggcaagggctggaaagcacacgccagtgacaggagataggcaagttactaggacttaccaacaggaactggaaaaatacgtagaatctcattttcatcagaaggctgctggggaatcagcatcagtaccaaatgtttatctcggccaggcccagagagccagcaggattcagcatggatcatgccaccctgcacccaggaacggtgcgtgtgccagggacgtgaggcagtggtagacagggtgatttacatcaccatctggtcaaaagcagtttccagtgtcttcagttgtgaccaatgaacatcagaacccattatgcctggggagagctatgttctgggccacgccacccatttcccagctgcaaatctccaaggagtgttccatgtgatgtcattatgctggagttttttcctgcattgttccgtaaatttatccattcatttgtctacctgcccatcagatctttattgagatttactctgtgcatccacattataga

SEQ ID NO: 347641 - DNA, 643 bp, Homo sapiens
tttcaccagtgttgcttgttttgctgagaagtagaccaacagagcccctcatgccagcatgaaattcctaagtccaggattatttgcaagagcagggagaggtttgtgactgaacccattaggaagataaagggtagaggaggcaagggctggaaagcacacgccagtgacaggagataggcaagttacyaggacttaccaacaggaactggaaaaatacgtagaatctcattttcatcagaaggctgctggggaatcagcatcagtaccaaatgtttatctcggccaggcccagagagccagcaggattcagcatggatcatgccaccctgcacccaggaacggtgcgtgtgccagggacgtgaggcagtggtagacagggtgatttacatcaccatctggtcaaaagcagtttccagtgtcttcagttgtgaccaatgaacatcagaacccattatgcctggggagagctatgttctgggccacgccacccatttcccagctgcaaatctccaaggagtgttccatgtgatgtcattatgctggagttttttcctgcattgttccgtaaatttatccattcatttgtctacctgcccatcagatctttattgagatttactctgtgcatccacattataga

SEQ ID NO: 347642 - DNA, 626 bp, Homo sapiens
gccctgtcttcttagccacacccacacatgatggagcttccatcaagctgaactgggtagtgggtggaagatagggagcaagttgtggctcaagtgccacagtccctcattgttctcaccacattatagtagatttttatgaatgtttctatctttgctgtatgcctttagaacaatttccagagactttaaataatttggatttttttaaaagtagtttcaccagtgttgcttgttttgctgagaagtagaccaacagagcccctcatgccagcatgaaattcctaagtccaggattatttgcaagagcagggagaggtttgtgactgaacccattaggaagataaagggtagaggaggcaagggctggaaagcacacgccagtgacaggagataggcaagttactaggacttaccaacaggawctggaaaaatacgtagaatctcattttcatcagaaggctgctggggaatcagcatcagtaccaaatgtttatctcggccaggcccagagagccagcaggattcagcatggatcatgccaccctgcacccaggaacggtgcgtgtgccagggacgtgaggcagtggtagacagggtgatttacatcaccatctggtcaaaag

SEQ ID NO: 347643 - DNA, 643 bp, Homo sapiens
tttcaccagtgttgcttgttttgctgagaagtagaccaacagagcccctcatgccagcatgaaattcctaagtccaggattatttgcaagagcagggagaggtttgtgactgaacccattaggaagataaagggtagaggaggcaagggctggaaagcacacgccagtgacaggagataggcaagttactaggacttaccaacaggaactggaaaaatacgtagaatctcattttcatcagaaggctgctggggaatcagcatcagtaccaaatgtttatctcggccaggcccagagagccagcaggattcagcatggatcatgccaccctgcacccaggaacggtgcgtgtgccagggacgtgaggcagtggtagacagggtgatttacatcaccatctggtcaaaagcagtttccagtgtcttcagttgtgaccaatgaacatcagaacccattatgcctggggagagctatgttctgggccacgccacccatttcccagctgcaaatctccaaggagtgttccatgtgatgtcattatgctggagttttttcctgcattgttccgtaaatttatccatycatttgtctacctgcccatcagatctttattgagatttactctgtgcatccacattataga

SEQ ID NO: 347644 - DNA, 546 bp, Homo sapiens
aagaggcccaaagagcaggctcacgcatgtaaaaagtaaagcattttagtgtccacatagcctttgcctctttcatccagttagatcttcctatcagtcctgtgtagcaggcataatgggtattgaaattctcacatcacagatgaggaacaaagtgcccagagatagtcagtgacatgcagcaattcagaagaggaactaaaaatcaaaccaaatatactgattccaggaagacatgctttccaacctactggtgcatcttggcataacaaggggtaccagaaaacatagtgaaaaaaataaaagcaacttaagggtctgaagaccctgggcagtcactctctgtgcctctccctgatgcccttgacctgcctagaagccccttcgacagctccgtgcactcccaaggctttctgggtctacctgagcaagcaccttccctggcagtctgcacacagggctgrctaggtatactggaggaggtaatagccgagagagtctcttaaggtgttgaagggatctaaattcaaacagcagaatgtgaat

SEQ ID NO: 347645 - DNA, 527 bp, Homo sapiens
tcggaattctcagagtggggcgaggtcgccagggttctgagttaagaaactaacagcaaaagcataaaaaaagggggggggggtttcttaatagtaatgcgatgcaattgcatccatatgctgaggaaacttgggatggggtaagaagagagaagaatgtaggatcctrtaagtgtttgcaatagcccacggatcatggaaggtgccattgtatttcacgtgatcttgacctcttctaacttattcctaagtctattttaaaatgcaggcactgagtcttacaagctggaattaacttctgaaagaccatacttaaccaagtaatagagctgggacggacaatcaggcccttctgaccctaacgcccatcactgcaggctgccctgcctgcctccccgtgagtggacaactcggactaagtccctgccctacagaaaacctcctgataggcctgagacctaaatatttaatgttgtcattatggcttttcttcctttaagctgagccctttaccaaaatgacatttt

SEQ ID NO: 347646 - DNA, 541 bp, Homo sapiens
atcaatattgtctctaacattggtcttgagagatgctggggacagcgcaggatgatggagtgggtgggattgggaggcagacatagaggggtgaggtagggtgaacagtcacttccatcgagcccattcaccaaaagtggatccttgccaccagtgttgtagtaacagtaatgcatttggacatgatagtcatgaaaaccatgatggaaaggctttcaaggacacagagcgaacacaggagtcagccctgctccacayagaattaaagcatctgaagtcagctgtgagacaaatggagaaggtggcccttgaatactgctcctttcccccaccgctgacagtctttgctgtccccacctccccttcctgatttcccagtctcccacataggagcaaggggctttccatggacccagccttaaagacataataaggcatccttgattcttcctttaccttcctataacaccctgttcgtcagaaattccttttgactccacttgtagatataacttgagtgcctcccatttcttcttctctg

SEQ ID NO: 347647 - DNA, 443 bp, Homo sapiens
tatgacatgccttttggggaacaattttacccgtactttatcattttttttccttgcctttgtccccttgaaacaagctcactaacagcagattctacatatattgtgtctgattagtgctttgcatgttgttatgagctgaatcacattcccccaaaaattcctrtgttgaagtcctaactcccagggcttcagaatattactatatttggagatagggtctttaagaagtaatcaaggttaaaaaaaaaatgagggcattagggtggacctaatccaatatgactggtgtccttataggaagaggagattagggtacagacacacaaggaaggaaaatgatgtgaagatgaagaaagaagatggccatctacaagccaagaagagaggccccaggagaaaccaaccctgccgacaccttgaattcagatttccagcctctg

SEQ ID NO: 347648 - DNA, 627 bp, Homo sapiens
gggaggcagaagattttgctactaaagcaagtgcattcaaactaccacataggatcccttgaactggaatctgcgtcggctgcttcagagaccagcacaggtttactgctatctgctaagtgctgctgcaatgtcattactatgttccattctcccagtgtggaaactgagtctcagggagagtttaaggagcttggcaagctcacgcagctggaagtaagagaagaggctggggtttggacacaagcctttcagctttctcatctgtgccccccccttgatcatgttggcataaaccaggcagagtaacaggctgtgggcaaacttgtttgactaactggcaggttcaagggccataaatgtgacyctgaaatagaaggtgagccctgagttaccctttctggtaatggacagggacccagcacactaggtgatatctcagacctcttccctctgggattccaagatagagcaggtagaggagtgggaagggtgaccttgagctccaagtacaagtcgagattcccagacttcttgatgtcaagaagtagtaaatgatgaattaaaaaaaagaaaaactgaaggtggcattggggaccaactttttattttgcccttaaaaactta

SEQ ID NO: 347649 - DNA, 491 bp, Homo sapiens
gatgccagcatcatgcttcctgtacagcctgtggaatggtgagccaattaaacctattttctttataaattacccaatctcaggtatttytttatagcattgtgagaatggattaatacaagatatctcacaggagaaggaacatttaataatgattgacatttgctgattcctcactgtggtccagacatcctgataagcacttttataaacattgttttcctcaattctcccaacaacaaactacaatccccattttatagacaaggaaacaggctttatttgtgagatttagcagagaatcatggtcacacacacacacacacacacacacacacacacacacacgtgcagcatttcagctgctatggggatccctaacttgtatgggctccccctctgaagcccttggaaaaccctagcactgatgttgtatattttgataacatttgcaagctattttactggcaatcagtattgtctttttccac

SEQ ID NO: 347650 - DNA, 565 bp, Homo sapiens
gtggaatggtgagccaattaaacctattttctttataaattacccaatctcaggtatttctttatagcattgtgagaatggattaatacaagatatctcacaggagaaggaacatttaataatgattgacatttgctgattcctcactgtggtccagacatcctgataagcacttttataaacattgttttsctcaattctcccaacaacaaactacaatccccattttatagacaaggaaacaggctttatttgtgagatttagcagagaatcatggtcacacacacacacacacacacacacacacacacacacacgtgcagcatttcagctgctatggggatccctaacttgtatgggctccccctctgaagcccttggaaaaccctagcactgatgttgtatattttgataacatttgcaagctattttactggcaatcagtattgtctttttccaccatgacttctcttctgtcataatttcctttgtgtgtgtgtgtattgagtgatttgagaagtcttggcatctggctaaggttgtgttttagatacatttgttttg

SEQ ID NO: 347651 - DNA, 565 bp, Homo sapiens
gtggaatggtgagccaattaaacctattttctttataaattacccaatctcaggtatttctttatagcattgtgagaatggattaatacaagatatctcacaggagaaggaacatttaataatgattgacatttgctgattcctcactgtggtccagacatcctgataagcacttttataaacattgttttcctcaattctcccaacaacaaactacaatccccattttatagacaaggaaacaggctttatttgtgagatttagcagagaatcatggtcwcacacacacacacacacacacacacacacacacacacgtgcagcatttcagctgctatggggatccctaacttgtatgggctccccctctgaagcccttggaaaaccctagcactgatgttgtatattttgataacatttgcaagctattttactggcaatcagtattgtctttttccaccatgacttctcttctgtcataatttcctttgtgtgtgtgtgtattgagtgatttgagaagtcttggcatctggctaaggttgtgttttagatacatttgttttg

SEQ ID NO: 347652 - DNA, 567 bp, Homo sapiens
tatagcattgtgagaatggattaatacaagatatctcacaggagaaggaacatttaataatgattgacatttgctgattcctcactgtggtccagacatcctgataagcacttttataaacattgttttcctcaattctcccaacaacaaactacaatccccattttatagacaaggaaacaggctttatttgtgagatttagcagagaatcatggtcacacacacacacacacacacacacacacacacacacacgtgcagcatttcagctgctatggggatccctaacttgtatgggctccccctctgaagcccttggaaaaccctagcactgatgttgtatattttgataacatttgcaarctattttactggcaatcagtattgtctttttccaccatgacttctcttctgtcataatttcctttgtgtgtgtgtgtattgagtgatttgagaagtcttggcatctggctaaggttgtgttttagatacatttgttttgggttgaataggatatgtttatatggattttggtcacttctgtgcgtagttaaatgattgctgac

SEQ ID NO: 347653 - DNA, 585 bp, Homo sapiens
ctttcccacaaggacaggctgaacaggtcaaggggctacttcctaaatgctgggctgcagctgatcgggtgtgttgtgtgttacaaaggcccctcagggtgtaaaatgcccttcctgacctcacattcttcatcagtcattgcctgggaagatggaggtggtgatgctgcagagagggcctgggaaccattggtgaatgggtgagcatgtagtatggatgaattgtgggtcaggggtgatgcacatctcatttcaaacactgtagtgtgggggttgtagagaaggaggtatgtgactacctgttagacctgttcttttgttttggaaatttgatgctatgtccaaaattcaaaaatttagatgactcagtagaaagttcatggtgaaaaatgacatcttccaggtaatattgggtgagccctccgaggccattaaattccagccttgtccacagagrcaaacaagccttctatcacagtcaccaccagacctgttgatatagcatatttattaaaacataaaatcagctcattgccttacagccttttatgatcgagatcaaaatgaccagcagcaggtagcaca

SEQ ID NO: 347654 - DNA, 579 bp, Homo sapiens
tctgaatgacctataaatacaatggaattcaattcaagtctgcatttattaggcatccacttgtgtccagcactgtatcatggtaatcagagcaaagctggagattgtaggagcttgattctgtgataccacaatgaacttctctacattacagagaaaccatgaagactgtctgtactgaatggtttgtgcaatgctcagatgttcctttaggtctgaggcacmtattccctcagttaaggaagtgttctcaccaacactactcatcctacaccatgactggttgatgctagggtccaaaggcccagcccttcccttggattaggaacatctttgaaaatctccttcaactccagagtcctgcatgggaaagttgaggtctaactgcattgcagtttaacttctctctttgccccatcctttttgccttactccttcacagaagcccttgttcctgagagcatgcccctccaaccttgccatgtgcaagtctctcagagtctatttcctggaggaactcaaacattgacatgaaatctcatggcctttggaaaaaaggggtccctccagtgtcaacct

SEQ ID NO: 347655 - DNA, 579 bp, Homo sapiens
tctgaatgacctataaatacaatggaattcaattcaagtctgcatttattaggcatccacttgtgtccagcactgtatcatggtaatcagagcaaagctggagattgtaggagcttgattctgtgataccacaatgaacttctctacattacagagaaaccatgaagactgtctgtactgaatggtttgtgcaatgctcagatgttcctttaggtctgaggcacctattccctcagttaaggaagtgttctcaccaacactactcatcctacaccatgactggttgatgctagggtccaaaggcccagcccttcccttggattaggaacatctttgaaaatctmcttcaactccagagtcctgcatgggaaagttgaggtctaactgcattgcagtttaacttctctctttgccccatcctttttgccttactccttcacagaagcccttgttcctgagagcatgcccctccaaccttgccatgtgcaagtctctcagagtctatttcctggaggaactcaaacattgacatgaaatctcatggcctttggaaaaaaggggtccctccagtgtcaacct

SEQ ID NO: 347656 - DNA, 566 bp, Homo sapiens
tgcatacatatgaggtaggaagaagcatgtttgtgaaccgcgctggcgtgtctggaactccaccctgtgcctgcccacatacctctctgtccagcataaagctcccattgctccccctgcctggagagaaggcatctttagagcacaagctccccttctccattctttggccattgaataaaatctgattgcttctccaatcaaatgttctttttttttttttttttttttttttttgcagccagtataaagtagaaaaagaacacaacttattggtgccaagaagggctgcgttcctttctggaagctctgggggaaaatccatgcttgccttttccagctgttagaagctgcccacatcctgtgggtcaggagcccttcctccatcttcaaagtcagcagtaaggggcaaagttcttctcatgctgccatctctctggttttccgcagccaagaaacagttccccaattttaaraacttgtgatgagattggacccacctggatagtccagggtactctccccatttcaaggtccttaaatttgatcacatctgcaaagtccct

SEQ ID NO: 347657 - DNA, 515 bp, Homo sapiens
cagtgagtgatcccagggagtgctcaatggaggtgggtagccgctgttgaggactttgtgaaagggatttggctctctgatggggcttcaccagacaccattaggaacccttgcaaatacaattctctaaggtctgctgggtctttgcctgattaagaccaaaactatgacacttcccagccaaccctccacccacactatgtgactccaagctatggctccctctcatttctctacctctaacatatgtatttttccttgattccattctaaaggaacctgctatgtctgaagtcacccagggcattttctttggtcactacccagaagaacagtcaggaataatacagtgaacctttcctaatggcytgtaccaggaaaagcacggagcccttcacactgcccacttatgcattcaagaaaggctcaccaagcacctgccatggccagactctgtttcccacacaaggactagagcagggaacaaactttctccatggaggggctcttgtcca

SEQ ID NO: 347658 - DNA, 598 bp, Homo sapiens
cagagaaataaaaaggatgtgacaaaagagagtgaggtgtagaacacagtctccctctcctggacaaactgctctgggaaagtttgcacttggaggtagatggggatgaagccaacacatcatcccgctgtggtgtggcaggaatcccagaaaggagtgtgtgcatgtgcatgcgtgtgtgtgtgagtgctgctgtaacagaagggcctcatctgtctgcccatctgtgaaatggggaggctgccaaaattcctcttcccttgggttctaacagactcccagcaagaatggaaaataagatattggggctgatatttaggtccttggacaataggmtcaggacctagggatgtgaagagcaacagaggctgctctcagcctttctgtaagtgccccaggtgggcaggagactaatccaaaacaggagagacaggaggtctaattgctttttgctggactctgcctggagactctgattgaataggcctaggacactggaatgtcctcagacccatctcaagctcttgtgcaagaggcattaatagtagccaacatgcattgagtagcagttatgtgccaggtatgtttttaagcactt

SEQ ID NO: 347659 - DNA, 598 bp, Homo sapiens
cagagaaataaaaaggatgtgacaaaagagagtgaggtgtagaacacagtctccctctcctggacaaactgctctgggaaagtttgcacttggaggtagatggggatgaagccaacacatcatcccgctgtggtgtggcaggaatcccagaaaggagtgtgtgcatgtgcatgcgtgtgtgtgtgagtgctgctgtaacagaagggcctcatctgtctgcccatctgtgaaatggggaggctgccaaaattcctcttcccttgggttctaacagactcccagcaagaatggaaaataagatattggggctgatatttaggtccttggacaataggatcaggacctagggatgtgaagagcaacagaggctgctctcagcctttctgtaagtgccccaggtgggcaggagactaatccaaaacaggagagacaggaggtctaattgctttttgctggactctgcctggagactctgattgaataggyctaggacactggaatgtcctcagacccatctcaagctcttgtgcaagaggcattaatagtagccaacatgcattgagtagcagttatgtgccaggtatgtttttaagcactt

SEQ ID NO: 347660 - DNA, 598 bp, Homo sapiens
cagagaaataaaaaggatgtgacaaaagagagtgaggtgtagaacacagtctccctctcctggacaaactgctctgggaaagtttgcacttggaggtagatggggatgaagccaacacatcatcccgctgtggtgtggcaggaatcccagaaaggagtgtgtgcatgtgcatgcgtgtgtgtgtgagtgctgctgtaacagaagggcctcatctgtctgcccatctgtgaaatggggaggctgccaaaattcctcttcccttgggttctaacagactcccagcaagaatggaaaataagatattggggctgatatttaggtccttggacaataggatcaggacctagggatgtgaagagcaacagaggctgctctcagcctttctgtaagtgccccaggtgggcaggagactaatccaaaacaggagagacaggaggtctaattgctttttgctggactctgcctggagactctgattgaataggcctaggacactggaatgtcctcagacccatctcaagctcttgtgcaagaggcattaatagtagccaacatgcaytgagtagcagttatgtgccaggtatgtttttaagcactt

SEQ ID NO: 347661 - DNA, 612 bp, Homo sapiens
acaattagctggctttgatttgggacccagagctctcagactaaaactactcccaagtttactagaaataagtccacactaaatgaagtacaattcagaagaagtagggaatgtggtaaaacaggccactaagaagctctacaggatgctaagccagccatagaatgagtttttcttggtcaaaaagaagatggcttggctggcaccatggctcatgcctataaatcctggcactttggaaggctgaggtgggaggttcgcttgagaccaggagtttgagatcagcctgggcaacagaatgagacccatctctataacaaataaaacaacaaaaaaagaagacctcctaagtcttgaaaaagcagtcttggacagtgtcttgactggctcttctctcaatcccccactagatccaccacaccccatacactgggacaagtggtagcccttttagaatagttttctggctccwtactgattccaccttcatcacagtgttgtcaaagaaccagacagacctggtgcctcgggaaagcccttctgctctacagacctcaattaagcctacctgtaaaactggaataatttcgttgccttggagattactgtgag

SEQ ID NO: 347662 - DNA, 544 bp, Homo sapiens
ggtaggcccccaagaaatccctgctgaatgagtgtttggattaatgaatgaataaaacaatgagataatggaagcacaagtccttgggataccaatgggtaattaataaactgtgcttcctctcttctttactcttaaaagtggatctgtatctttcatttgataaaaagcaacaggggtgattggaataaacactaggtgggggcaagagggttagtgctagtgagagatcctaaatctctgcatgaaggatgtctccacttccttstataaaggaggtaatccaagctcatatgtaactgtaacacgtgttatttgtttctgtaccaccttgttctagccttgttctggatattttttgcaaagactgattgcaaagctactatccaacaggggtaacatatgtctgatcccaaacttacattcttgttgaaacatgaacacactaaacccaaagtcaccttgcttgtagacaaaatgcacagagctgaggggctgcccagctctgcctctgtctgactgtgaaactctgagcaagtcactt

SEQ ID NO: 347663 - DNA, 544 bp, Homo sapiens
ggtaggcccccaagaaatccctgctgaatgagtgtttggattaatgaatgaataaaacaatgagataatggaagcacaagtccttgggataccaatgggtaattaataaactgtgcttcctctcttctttactcttaaaagtggatctgtatctttcatttgataaaaagcaacaggggtgattggaataaacactaggtgggggcaagagggttagtgctagtgagagatcctaaatctctgcatgaaggatgtctccacttccttctataaaggaggtaatccaagctcatatgtaactgtaacacgtgttatttgtttctgtaccaccttgttctagcyttgttctggatattttttgcaaagactgattgcaaagctactatccaacaggggtaacatatgtctgatcccaaacttacattcttgttgaaacatgaacacactaaacccaaagtcaccttgcttgtagacaaaatgcacagagctgaggggctgcccagctctgcctctgtctgactgtgaaactctgagcaagtcactt

SEQ ID NO: 347664 - DNA, 495 bp, Homo sapiens
cccgctgcctctcagcacacccggtctgccccctaagtctaccagttctacaggacagttcattctttgctgttgcagctcccctgaccctccatcagctggagtaattgtttcttaattggactctaagtcattctatgcagggagcaggggaaactagaattaaatgaaatcgggatctgaatmcaaaggaaagaaaaagtaaaccaaaacgttatacagaagagttgaaaaacagaatggatgaaagcgtgagggatggagacgtatccgtgtttatatacattggtatgttaggaaaatcaatggatttggaattcaaaattctagtcgcaataaaaaaaaaactatgtccttgaaaaaattactgtctcagacctcaaattcagcatcggtaaaaagggaagactggtcacttaatttccaaagacctttctatatcttatctcttcagaaacagcagcagtttctgtttattctagaaggtggccgcat

SEQ ID NO: 347665 - DNA, 472 bp, Homo sapiens
attcaggctgctttccaaaggaatcgagtgtcaaatggtgcaatcagtgtgttgaagagtctcaactgttgagattaggggggagaaaaacacatttttttccctaatagctactacccaataatactaggccaaacccatccttcctcttgagtaggctgcataacattttagtcacttttggttttcaaaaatgtcttagtttagatgtcccaaaaatgtctaaaaatcagttctgttcatttttaaagttcaatatcatatatgagtcaaagcacttcccctactccattccctctccagccccatctcaggctcacytcatgattgtggttctagcagcttgtggtggaggatgggacatgcctggctctcacataaccccttctactccctgtcaggtgggaaagaggaagagagaaaacagatgtctccttccccaactgagggaggcctcagctcccttgttggg

SEQ ID NO: 347666 - DNA, 618 bp, Homo sapiens
aaagagtgattggagaaaaaagatcaagtaagtttcctctaagtcggtgcaatctgagctgagatctgaagaataaaaggagtcagacacgtgagcagccaagacaggtctttctaggaagagaaaggagcaagtgcaaaggtccagtggcaggaaagagctcagtatgttcaatgaactgagagaaggcaatgaaactagaacatggtagacataaaggagaaattagaaaaaagacaaaaccaaattatgtggatttcagtaggccatagtaaacagcccaagtgtttactaaacaaaatgaaaagtcactggcgagtcttgattagagaaattgtacgtgttgtatgcttttgaaaagactgctctgtttgragaatggccagttggggaagtaagagtaaaatatgatagctttcactaaagtgcatcaagaagatttaaagaagtagatgggttcacgatctatttaagaaatatcctcaaggagaattcctcagctctctgtgaaagagggtggaaatgtcaaattcccaaattgtataattgtgtctttatcatcccatcattaataccaacatttcagtgccaagagctaactcacaaatgctcttaaca

SEQ ID NO: 347667 - DNA, 404 bp, Homo sapiens
aaaaacagtaccactgccacacttctttagccataaagcaagttccttagtcagaggcaatgctgtgtggaatatcatgatggataaggcatttcgtgagtccatggatggtagtcttggcagaagcaytgcatgcaggataggcaaacccacattcagagtaaatgtttattccagtgaggacaaacctctgccatttccatgacagaagagttctaatataatcaacctgccaccaggtagctgactgatgccccaagaaatggtgccataccgaaggctcagtattggtctctgctgctgaaattgggcactcagcagtggctgtagccaggtcagccttgataggtggaagtccatgttgctgagcccatgtgtaacctccatctctgccaccatggcct

SEQ ID NO: 347668 - DNA, 561 bp, Homo sapiens
gaaaaacagtaccactgccacacttctttagccataaagcaagttccttagtcagaggcaatgctgtgtggaatatcatgatggataaggcatttcgtgagtccatggatggtagtcttggcagaagcactgcatgcaggataggcaaacccacattcagagtaaatgtttattccagtgaggacaaacctctgccatttccatgacagaagagttctaatataatcaacctgccaccaggtagctgactgatgccccaagaaatggtgccataycgaaggctcagtattggtctctgctgctgaaattgggcactcagcagtggctgtagccaggtcagccttgataggtggaagtccatgttgctgagcccatgtgtaacctccatctctgccaccatggcctctttgttcatgggcccattgggtgataacaggggtggctcaggaaacaggctgagtggtatccacagaatgggtcaccctatccacttgattattaaaatcctcctctgttgaggtcacccgttggtgaacactcacatgggatacaaatatcttc

SEQ ID NO: 347669 - DNA, 578 bp, Homo sapiens
caaataaactattagaaccgtttttaactccccaagctccaaccttaaatgcagagtccctacttagtgggtccaaatcaataaattcagcctgatccaactctatgttccttcagccattgtaccacacccttaatacccattcccatgtctgtcctccagatttctgcttatataaatcagaaaactcaagcagttctttctgagtgtagcacacctcctattgggtcacactctcaacctcacctctatgggcrcaccaggactttagttataggcctagaagcaaacaggggtgttgggggcagctcctaaggagaatcaatattatcttgccaggcaactgccaaaggggagtccatcactgttgcctcatgcagtgcagggtttaactcctcagacaaaggtggaaaggctgatggcagcatgggtcagggaggggatgttgccactactggggatggggaagctgtttcttctggcaaaaaggttcaccagagtttacaaactctgtgtccccagcttcaccagggtcctcccacacatcctcattctgagttgcagggtcccattctttt

SEQ ID NO: 347670 - DNA, 564 bp, Homo sapiens
gcttaggccctgtggatttgtggcatctccttgttaaacatcctgcagaaagctctgttaaaccactaccaccagaccctactgcctccttccaaatatctctgggagtcccagcaggggtatctccatgctcaggagaaactctagccaaccagcaaatgtcctctctcacttacccctctccctatggtgtcaccctctggctcagtccccagacaatcagaaaggtcactgttcctaatggctcttctgcatggtgtgcaagggaatggttgtcctggcttagaggaacaactctgtcaaagctccctgaggaatttgaataacgtggctgtattagtcctttctcacgttgccataaagaactacctgaaactgggtgatttataaagaaaagaggtttaattgactcatagttccacaggctgtagaggaagcataactggggaggcctcaggaaatttacartcatggtggaaggcaaagggaaagcaggcatgtcttatatggctggagaaggaggaagagagagcacagggaggagctacacacttttaagcaacc

SEQ ID NO: 347671 - DNA, 556 bp, Homo sapiens
aagtcaggagttcaagatcagccttgccaacatggtgaaaccccatctctactaaaaatacaaatatgtgctgggcatggtggcacatgcctgtaatcccagctactcgggaggctgaggcaggagaaccgcttgaacccagaggcaaaggttgcagtgagcagagatcaygccattgcactccagcctgggtgacaagagcgaaactccatctcaaaaaaaaaagaaaaaaaaaaagaaaaagtgaaaaagaacgtgaattaacatgaattgcctccatttgattattttcctgcatttgttgctttaaaagtggagtgaaataaattgaaagttcatactctaaattgtgctatttagtgaaactgaccattatcatcttggccatggtgcttctattgtggactgtacaaaagcctgcaaagtgaaagattggagagccatccccagacagcagtgtgaagtagttcttgtgctctttggaacaagggaatcctaactgagcactttctctcttgttttttcagtggccttttcatcaaggcacccagggctc

SEQ ID NO: 347672 - DNA, 545 bp, Homo sapiens
tcaaagacaaattgactgtaaatgtgtggatttgttttaaggctctctattctgtttaattggtccatatgtctgtttttatactagtactatactgttttgatcactgttgtggtatattttgaaatcaggtactgtgatgccatcagcattgttcttcttgctaaaaattgcttttgctatttggaggtctttggtggttccaaacaaactttaagattgttttttctatttctgtgaaaaatatcattggactcttaacaggaatttcattgaatctgtagattactttgggtggtgtacatattttaacaatattaattatttgcatccacaaacagggatrtctttccatttctttgtgtctactttggtttctttcatcaaggttttacagttttaagtgtacaaatatttcacctcttggttaaatttattcctaagtatcttttgtgtgctattataaatgggagtctttccttaatttctgtttctggtaattagtttttagtgtatagaaaaacaattttgtaagttgattttgc

SEQ ID NO: 347673 - DNA, 389 bp, Homo sapiens
tacaggacaagcccatcctagaggaagctttgagaaaaggaaattaaccaatatgtggtattggcttactatgttttacccattgtgctgggcagtaccacatactggagaaatttaccactaagccctccacaaccccctttgtcagctgtctttctactgccttctaagcatcccccaaccaccaacagttggggcccccaggcagtttcctgatggattccacttgctmtccccagaaaagtttacccaggaagctttcctgatcttttcctccttccctcctccaatgtcctttccctcaaggtcttgctaggtgacagctaatctcagcaagaatctgatggattttaatgtattattgagtttcccttcccagactacccttg

SEQ ID NO: 347674 - DNA, 641 bp, Homo sapiens
cagtgttttgacagttcatggcatatttttgcaggtctactgagacctccgggactgtactaaaggaaggatttagtcttgtttctatggaaaccataactactctgtaagcctgttaaacaagacagtttgcaatatggtatcttattcaagatgaatagtctttgtaatatatcattgataaatttttctatctagatttcaacatctgcctgagaaaattctaaatctttgatgactccacaagaaaaacatcagccagccacagtgcaaacaagctctattgcaatctggttcatgtgctgggaaataaaaatggtttctacyttaacgaaaaaaagaaaaggaattcagcctagaacacaggaatacaggaatgacattttcactttgaacaactgacaagaagctagcattaccttaactagcttttatttgcatttcttttaatttttcacttttcttcacgacaaagagattggtggttttaaaaataaattggtttaaggcttaagaaacagaaaatgtgtgttatctcctctgtctactagctttgaatatttatgcacatgcactagactataacttttgttattgttcaccagcgcttaccacaacatccagcatagaagataaaaagc

SEQ ID NO: 347675 - DNA, 641 bp, Homo sapiens
cagtgttttgacagttcatggcatatttttgcaggtctactgagacctccgggactgtactaaaggaaggatttagtcttgtttctatggaaaccataactactctgtaagcctgttaaacaagacagtttgcaatatggtatcttattcaagatgaatagtctttgtaatatatcattgataaatttttctatctagatttcaacatctgcctgagaaaattctaaatctttgatgactccacaagaaaaacatcagccagccacagtgcaaacaagctctattgcaatctggttcatgtgctgggaaataaaaatggtttctaccttaacgaaaaaaagaaaaggaattcagcctagaacacaggaatacaggaatgacattttcactttgaacaactgacragaagctagcattaccttaactagcttttatttgcatttcttttaatttttcacttttcttcacgacaaagagattggtggttttaaaaataaattggtttaaggcttaagaaacagaaaatgtgtgttatctcctctgtctactagctttgaatatttatgcacatgcactagactataacttttgttattgttcaccagcgcttaccacaacatccagcatagaagataaaaagc

SEQ ID NO: 347676 - DNA, 600 bp, Homo sapiens
gtacagcatactacacatctaggctatataatatagcttattgctcctaggctacaaaccgatatagcatgtaactgtactgtactgaatactgtaggcaattgtagcacaatagtaagtatttgtgtatataaacatagaaatgatacagtcaaaatatggcattataatcttatgggaccactattgtgtatgcagcctatcattgaccaaatgtcattgtgcaatgcatgactgtattatatccaccacatcaagaagtcaaagttaacaccattaggacataatctttgaaaaactgatgcttcagagatcatagtyccacattttaacttattaaatcacaacattttagaattgaagaggtcttaaagatcaagttttatctaacatcctaatttatagacaatcagtctgatgtccaaaacacctaagagtctttctgtgatcattcagctagtgcagtgatacagccagggctagactctaacaagacagtaataataaaacaaccatgtttttagtgtttcctacgtgccaggcactactgcctgggacaactctttctgccatgagattctttaaaaagaaagaagcaga

SEQ ID NO: 347677 - DNA, 609 bp, Homo sapiens
ttaacttattaaatcacaacattttagaattgaagaggtcttaaagatcaagttttatctaacatcctaatttatagacaatcagtctgatgtccaaaacacctaagagtctttctgtgatcattcagctagtgcagtgatacagccagggctagactctaacaagacagtaataataaaacaaccatgtttttagtgtttcctaygtgccaggcactactgcctgggacaactctttctgccatgagattctttaaaaagaaagaagcagagatttgaggaaagattttgctcacatttgtgaaggaaaaaaaaatatttctgatatgacaagaaaatatcaaggcttcccattactgagttttttccccagctttagtgaggtataattgacaaaaaattcatatattcttagtgtacaaaatgtgatgatttgatatatctatacaatgtgaaataattactacaatcaaattaattaacacatccatacccacacacaactaccattgtgtgtgtgtgtgtgtgtgtgtgtgtgtgtgtgtgtgtgttaacacttaggatctgttctctcagcaaatttcaggtaaacgatacagtaatattgat

SEQ ID NO: 347678 - DNA, 539 bp, Homo sapiens
atgctgtgtcatattggtgcctgaggcaaaaggaaaagtcaataattcagatcctgttgtggtttcaaattggttttttgtttgtcatcgatcctggctgggaattatgttagtgtcattaagaaccaagattttcagyatgggagaaaggagatgcagatgtaagactgagaagatttagtaaaaactccattgtcctgaatttaaaatataacttctgatgctttttatcttgaaaatacaaaatgatagctatgtcactataattatcactatatatgtacatatatttacatacatatacagttgattctctttatgatttgtatttgtgaattctcttacttgctaaaatttatttgtaattcaaaaaaatcaatattcatgacacttctgtggtcatcgatggatgtattcagagtggcaaaatatttgagtcaccagacacataggttcccagtttgaggtcgataaagcaacattttccttttttgttccagatctcatattgattgattgagacagggtttcattccatc

SEQ ID NO: 347679 - DNA, 539 bp, Homo sapiens
atgctgtgtcatattggtgcctgaggcaaaaggaaaagtcaataattcagatcctgttgtggtttcaaattggttttttgtttgtcatcgatcctggctgggaattatgttagtgtcattaagaaccaagattttcagcwtgggagaaaggagatgcagatgtaagactgagaagatttagtaaaaactccattgtcctgaatttaaaatataacttctgatgctttttatcttgaaaatacaaaatgatagctatgtcactataattatcactatatatgtacatatatttacatacatatacagttgattctctttatgatttgtatttgtgaattctcttacttgctaaaatttatttgtaattcaaaaaaatcaatattcatgacacttctgtggtcatcgatggatgtattcagagtggcaaaatatttgagtcaccagacacataggttcccagtttgaggtcgataaagcaacattttccttttttgttccagatctcatattgattgattgagacagggtttcattccatc

SEQ ID NO: 347680 - DNA, 424 bp, Homo sapiens
aacaatagataatgactgtcttagtccatttatttgctgaaaaggaatacctgaagctgcgtaatttataaagaaaagagttttattttactcacagttttgcagactgttcaagaagaatggtgccagcatctgcatcaggtgatggcttcaagtyaaagaaagaaggttcatggaagaaggtgaaggggagccaagctggctgtgtacagatagcacataaccagaaaggaagcaagaggtgagtggggaggtgccaggttctttttaacaaccaactcgtaatagagccagatctcactcagtgcccccgtactgcaccctagggagcacattaatccattcatgagggatctgtctccatgacccagacacctcccattaggccccacctccaacttgagatttggatcagatttcaaca

SEQ ID NO: 347681 - DNA, 424 bp, Homo sapiens
aacaatagataatgactgtcttagtccatttatttgctgaaaaggaatacctgaagctgcgtaatttataaagaaaagagttttattttactcacagttttgcagactgttcaagaagaatggtgccagcatctgcatcaggtgatggcttcaagttaaagaaagaaggttcatggaagaaggtgaaggggagccaagctggctgtgtacagatagcacataaccagaaaggaagcaagaggtgagtggggaggtgccaggttctttttaacaaccaactcgtaatagagccagatctcactcagtkcccccgtactgcaccctagggagcacattaatccattcatgagggatctgtctccatgacccagacacctcccattaggccccacctccaacttgagatttggatcagatttcaaca

SEQ ID NO: 347682 - DNA, 609 bp, Homo sapiens
ttgtgtctcttcttttaagggcactaatcccatcatgagtgccatactctcatgacctcatctaaccctcattgcttcccaaaagtcccatcaccaaataccattacaatggggcctacagattcaatatatgaattttgaggggacacaaatattcaatccataacagatttgtgagttctttatatattctgcatacaagttgcttatcagatatatgatttgcaaacatgttctcctatcctatgggtttaaaaaaaaatctgtatggcatcctttgaagcataaaagttaactaattttgataaaatctggtttatctgtgttttcgtttcttccttgtgcttttgatatcacatcttggaagactttgcctaacccatagtcatgaagatttaatccatattttaagaattgyataattttcatttctacatttaggtttgtcatccattttgagttaattgttgtatatggcatgagaaagagtttcaattattttcttttgtttgtagatatccagttgtcccagcacaattttttgataagactattgttttctttcattgaatttgtttggcaaacttaccaaaaatcaattgaccgtaa

SEQ ID NO: 347683 - DNA, 622 bp, Homo sapiens
ctgtcctcacactttcttggcacctgctgtagccagttactgcaactttctggggactggctgagtgcattggcttgttccttatcagtatcccctctgtgtacacctgggctttcctccttgctgccaggttaccaactattccttcatctgcctttcatcctcatatgctggtytggagtaacagatgtccccagttcttattctccttggtttctattaaattttgtatttgttttattttcaatttttccaagagacaaagcagaattatcttttttccactttaaaaccattattattgtccataaacatttacatgatactctgattcataattttccttcccttcttctaaatcctaaaatcagagcataagtgaccactgtgttgtccccaggtgtggtagactttatctgtgccatttccttgtgctttggccaacttataaatgctttcatatacttctctctgtttgggagactttataggactgcagaggctgctctacctgtgtagacatggcagtcccaatagaagaggaaattttcaaccccaagaagcatagcatcccctcatgaataactcttgggagctgatgtattaataccccagctccctc

SEQ ID NO: 347684 - DNA, 492 bp, Homo sapiens
ccttcatctgcctttcatcctcatatgctggtctggagtaacagatgtccccagttcttattctccttggtttctattaaattttgtatttgttttattttcaatttttccaagagacaaagmagaattatcttttttccactttaaaaccattattattgtccataaacatttacatgatactctgattcataattttccttcccttcttctaaatcctaaaatcagagcataagtgaccactgtgttgtccccaggtgtggtagactttatctgtgccatttccttgtgctttggccaacttataaatgctttcatatacttctctctgtttgggagactttataggactgcagaggctgctctacctgtgtagacatggcagtcccaatagaagaggaaattttcaaccccaagaagcatagcatcccctcatgaataactcttgggagctgatgtattaataccccagctccctccccagcttaggtg

SEQ ID NO: 347685 - DNA, 492 bp, Homo sapiens
ccttcatctgcctttcatcctcatatgctggtctggagtaacagatgtccccagttcttattctccttggtttctattaaattttgtatttgttttattttcaatttttccaagagacaaagcagaattatcttttttccactttaaaaccattattattgtccataaacatttacatgatactctgattcataattttccttcccttcttctaaatcctaaaatcagagcataagtgaccactgtgttgtccccaggtgtggtagactttatctgtgccatttccttgtgctttggccaacttataaatgctttcatatacttctctctgtttgggagactttataggactgcagaggctgctctacctgtgtagacatggcagtcccaatagaagaggaaattttcaaccccaagaagyatagcatcccctcatgaataactcttgggagctgatgtattaataccccagctccctccccagcttaggtg

SEQ ID NO: 347686 - DNA, 548 bp, Homo sapiens
ggaaggactgctgagataatactgctaagttaaatacaaaactggttgaaatccttcagagcaataagaccagactctttggtgttgagttctctacagaaaagaaaaaatattcatctaaaattatcctatcttatcaggtttacagaattatttaatcaagtgtrcaaagtttattcccctaaagttaaaagatcttcaagaaagcccattagacaatgttctttgcattatattaaaacttcagataatcattttttgcctcaattctgttaatgctctttagccaagtccaccagaaatacacctatagtggaacaagttgggtttattactcgttatagcaaggaagaaccctcaccatggggaaatgttggatgtttcagttagagaatgtgagaatgaatatattatagaatttggattttgaattttgtttgaatgatttggggtggggggtttaagagagccagagtttgccctagattgggtgctgttagaaaagagagacaggccgggcgtggtggctcacacctataatcccaaca

SEQ ID NO: 347687 - DNA, 468 bp, Homo sapiens
cctacatggttctcaggaaatccttggcctggccaatccacagccacattctctatcacagcacaaagatttttaccaggatcttgccacatggaactgctgcatcaaagcctaaatataggtattagggagatcagacccacatggtagaaatatggtagcatcatttaatgcaggcttacttatttgccttttagatttctacagaatcctcaggaagtagctgggcattgctgttcattctaaacagagtcaccagttcatctacttaagttctcaaagatccttggcaaagctggcckttttagtgagtggcacagactgatacttgtgtggtggaagttgagacacatcagagtgaaccttctgctcaaaactgcttcacttccatttgccatacttcatgaaacaccatcaaatgtttttttgttttttgtgaccatgtcctcttgaaaaagaaaaatttcc

SEQ ID NO: 347688 - DNA, 595 bp, Homo sapiens
tggctaatatttaagggggaaaaaaacaaaggagagagaggaggaagatatatgtgttgactagtatttgagcaaacagtaggcaaggcaagagtagaactagacccaagagaaaaccagaaggaagcaggggcttgatatctgtaggactctctacctctcaaatgtgtctgctttttcttttyatcttgagcaaaatctctacaattggagacgtgtacactagcaactataggcttatattcttttacacttgaaaatcagagacaagagagaaaattgtgtccctgatagttcaaaaaatatatatcctaggggagaactgtgactggccagtcttgattaggtggtatttatctatgaaccaatcactgtggccaggaaacagagtcataaaataaaaactcccatctatttcctgtaatgggagatacaaaagcggttcgttaaagggaaaacagtaagattcccaaaagaaggaagagatccttggtgctcacacaccaaaaaaactcattaatagcaacaacaggtattgtcagcctacaacacttaaaagtagagtattttatcaaatcaattttctaggtccgac

SEQ ID NO: 347689 - DNA, 500 bp, Homo sapiens
ggccccggtgtgtgatgttcccctccctgtgtccatgtgttytcattgttcaactcccacttatgagtgagaacatgcggtgtttggctttctattcttgtgatagtttgctggattattcttgtgatagtttgctgagagtggtggtttccagcttcatccatgtctgtatgttttatgttagcatctcattgcttccctaatatgttaaaaagcaaaatgtatgtgttctgtctgtagttttttttgatttcataaataagttgaagtttaatgttttcagtttttgaatatttgcaacatacacttaggcatatatatgaagtagatgtttgacagtatttattgattgctattttaaaactcttggctttgcttccaaatcttaaaggaatcaataacactaatttattcaatcagcaaattaacaaacatttgtttgtagagcactgtgttatgtgctggtaatgcaaaaatgaaaagtacttcctctaccttaa

SEQ ID NO: 347690 - DNA, 500 bp, Homo sapiens
ggccccggtgtgtgatgttcccctccctgtgtccatgtgttttcattgttcaactcccacttatgagtgagaacatgyggtgtttggctttctattcttgtgatagtttgctggattattcttgtgatagtttgctgagagtggtggtttccagcttcatccatgtctgtatgttttatgttagcatctcattgcttccctaatatgttaaaaagcaaaatgtatgtgttctgtctgtagttttttttgatttcataaataagttgaagtttaatgttttcagtttttgaatatttgcaacatacacttaggcatatatatgaagtagatgtttgacagtatttattgattgctattttaaaactcttggctttgcttccaaatcttaaaggaatcaataacactaatttattcaatcagcaaattaacaaacatttgtttgtagagcactgtgttatgtgctggtaatgcaaaaatgaaaagtacttcctctaccttaa

SEQ ID NO: 347691 - DNA, 500 bp, Homo sapiens
ggccccggtgtgtgatgttcccctccctgtgtccatgtgttttcattgttcaactcccacttatgagtgagaacatgcggtgtttggctttctattcttgtgatagtttgctggattattcttgtgatagtttgctgagagtggtggtttccagcttcatccatgtctstatgttttatgttagcatctcattgcttccctaatatgttaaaaagcaaaatgtatgtgttctgtctgtagttttttttgatttcataaataagttgaagtttaatgttttcagtttttgaatatttgcaacatacacttaggcatatatatgaagtagatgtttgacagtatttattgattgctattttaaaactcttggctttgcttccaaatcttaaaggaatcaataacactaatttattcaatcagcaaattaacaaacatttgtttgtagagcactgtgttatgtgctggtaatgcaaaaatgaaaagtacttcctctaccttaa

SEQ ID NO: 347692 - DNA, 500 bp, Homo sapiens
ggccccggtgtgtgatgttcccctccctgtgtccatgtgttttcattgttcaactcccacttatgagtgagaacatgcggtgtttggctttctattcttgtgatagtttgctggattattcttgtgatagtttgctgagagtggtggtttccagcttcatccatgtctgtatgttttatgttagcatctcattgcttccctaatatgttaaaaagcaaaatgtatgtgttctgtctgtagttttttttkatttcataaataagttgaagtttaatgttttcagtttttgaatatttgcaacatacacttaggcatatatatgaagtagatgtttgacagtatttattgattgctattttaaaactcttggctttgcttccaaatcttaaaggaatcaataacactaatttattcaatcagcaaattaacaaacatttgtttgtagagcactgtgttatgtgctggtaatgcaaaaatgaaaagtacttcctctaccttaa

SEQ ID NO: 347693 - DNA, 480 bp, Homo sapiens
gatctatttaagaatctgccgcaacacactggagaaaaaaaagaagaatatccacagaaaggattgctgttgaaattggcatacttgaggcaccaggagatggttaggaacgaagaaatgcagaggatattggtatcagctgtacaggtgaactgctgtggttcccaggagcctgctttgcagaggacagtggcatcttttgcaacagaggtaaccaacagccattcctgtccaggaaccccatagagggagatgtggctgcacactcccataacccctaagaatcagttgctcttgtgctattctgggactggagctgccacatttcccatccctgtgcatgccyccaacctctgagctgtggctgttccacaagtgcccacattcctgaccccttctctgagggtttattctgtgtacccatgtctcatacaccagaaccatagcaagctagatcatgtgtgggtcccagagccaagg

SEQ ID NO: 347694 - DNA, 410 bp, Homo sapiens
cgtgaatcttcatattaatgtcccatccctaatataactgttcttcacgtgtttttcccacttccaactggctttcttgtttctatctctataaagatttttttctgtatgataatttttactaagaatgaggaggttcatacatttggaaaggagagctttatttctygtaaagggctgcagcctgcagcatggccattctgacagactgggaaacacagcctctggtcagatgctagaaacagacacttcaggccttggtaaaataaccaacgtctccaactgtgtcctgtttcaaaagaaaacagattcttacaaacttatgcaaataaccatgttgccataaaataagaatactcatgaaaagtttccaaattttggagaactgaggtagacagaaaggtaaattc

SEQ ID NO: 347695 - DNA, 603 bp, Homo sapiens
tttggttgagggggacagaatttcattcttgtttcccaggctggaggggaatggggcgatatcggctcactgcaacctytgcctcccaagtacaagccattctcctgtctcaacctcccaagtagcttggattacaggtttgcaccaccattcccagctaatttttttcatatttagtaaagatggggtttcaccatgttagtcaggctggctgcaaactcctgacctcaggtgatccacccgcctgggcctcccaaagtgctgggattacaggcgtgtgccacacgcccagccccattttttaaaatgttaaatcagaccctatcaaaatttaaaaacttctgtttcttcaaagatactgttaaattcactttcagtagaaaaacattgagaaaaccagccactctctgagacaaaatagtagaaaaaatattatgtatctggaataaataagaactctcaaaatttattgctaagaaaacaagtgactcaataaagaaattatttataacttacaaagacacttcaacaataaatatatgtagtgtaaaaataagcacataaaaaacattctcaccatctttccataaagtaaatgaaaat

SEQ ID NO: 347696 - DNA, 603 bp, Homo sapiens
tttggttgagggggacagaatttcattcttgtttcccaggctggaggggaatggggcgatatcggctcactgcaacctttgcctcccaagtacaagccattctcctgtctcarcctcccaagtagcttggattacaggtttgcaccaccattcccagctaatttttttcatatttagtaaagatggggtttcaccatgttagtcaggctggctgcaaactcctgacctcaggtgatccacccgcctgggcctcccaaagtgctgggattacaggcgtgtgccacacgcccagccccattttttaaaatgttaaatcagaccctatcaaaatttaaaaacttctgtttcttcaaagatactgttaaattcactttcagtagaaaaacattgagaaaaccagccactctctgagacaaaatagtagaaaaaatattatgtatctggaataaataagaactctcaaaatttattgctaagaaaacaagtgactcaataaagaaattatttataacttacaaagacacttcaacaataaatatatgtagtgtaaaaataagcacataaaaaacattctcaccatctttccataaagtaaatgaaaat

SEQ ID NO: 347697 - DNA, 603 bp, Homo sapiens
tttggttgagggggacagaatttcattcttgtttcccaggctggaggggaatggggcgatatcggctcactgcaacctttgcctcccaagtacaagccattctcctgtctcaacctcccaagtagcttggattacaggtttgcaccaccattcccagctaatttttttcatatttagtaragatggggtttcaccatgttagtcaggctggctgcaaactcctgacctcaggtgatccacccgcctgggcctcccaaagtgctgggattacaggcgtgtgccacacgcccagccccattttttaaaatgttaaatcagaccctatcaaaatttaaaaacttctgtttcttcaaagatactgttaaattcactttcagtagaaaaacattgagaaaaccagccactctctgagacaaaatagtagaaaaaatattatgtatctggaataaataagaactctcaaaatttattgctaagaaaacaagtgactcaataaagaaattatttataacttacaaagacacttcaacaataaatatatgtagtgtaaaaataagcacataaaaaacattctcaccatctttccataaagtaaatgaaaat

SEQ ID NO: 347698 - DNA, 542 bp, Homo sapiens
atcttactagcaaagatgtctgtggattatgggtataccagacacttttattttaattaagattcaaacttcatgctaatatccctgaaatctaaagctagcataggcaaggttgaaagggtggtagagcaaataaataaaatctaaactaaacaaacctgttcttttaaagcagtcaggaaattttctgccttccaattgttagagaygattctactttcagagaggctgttttgttgttctaggaacaccacacactgaaaatgtgctttttaattttgaggatgtagatcagtggtgtgaccccaaggaatgcaattgctttgtaagataatataaagaggctggctttgttgcaagcagagttgcatttccgcagattgtacttcccttagaggaatttttctccaaggatggttttagaatgtgctctctctgaaaattatagcaagcccttggggacatttttgtgaaaacaatggccacaagatgtcagcaatagagacctctaaggacttcaagaaagacctgaaagctcaatt

SEQ ID NO: 347699 - DNA, 596 bp, Homo sapiens
gttttattaacttatgaaattagtttttatctttaattgctctgccatagggaagtaggcatacttttgttcatgttttgtggttttagcaaagtggagtaagctgatacagcatggtggaggacagtcaaagggttattgagaagagaagtctgcagtgagaggtgtaagaaaacaataatcaatgttccctttcttagcctaatctgcatgaattttcaaggcagtattttaattcctataaccacatagaatccagtttaagttatttaatttatacaatgaagaaaagaataatttcagtagagagtttggaacctgatattgtttggctttgtcttcacccaaatctcatcttgaattgtagttcccataatccccatgtgtcatggawgggacctggttggaggcaattgaatcatgggggcagttacctccatgctgttctcatgataatgagtgagttttcatgagatctgatggttttataagcagcttttcccccttttgctcaacacttctccttcctgccatcatatgaagaaggatgtgtttgcttccccttccaccatgagtgtaagtttcctgaggcctct

SEQ ID NO: 347700 - DNA, 600 bp, Homo sapiens
ggtctctaatttcttttccttatttctccttattcttattttatgggattttatgagctacaacaaaatgagttggcaattagtcttccttttgatttttgtgaccatttgtttaatgtttttaaaacatttagaggggtagatttgaaacaatttgtctctaaaaatgtctgggcatgagattttttgaggaagtataggaatctttgtttatcatttaatttctttcatgaatacaagtctattaacattttctattgcttttttttttaccaaattctgccattctcatttttcagaaatgtatcaattgtattttattttaaaatgtattttatgcaatctttgtaacatgctttgaaattttaatattttkatattccctttattttttatatatttttcgattttctcatttattttagtaagttttctactggttccctatctcattagtcttttcaaataaacaaatttaattttattcaatttctctatttttctttgttcttggttttgctgatatttggtttatgtcttattatttatttccttcttgtttaattatgtttactttggcaatgtttttccaattccttg

SEQ ID NO: 347701 - DNA, 576 bp, Homo sapiens
ctgaatgtataaaccagagggaatgaaatgcaaggaaccagctagattaatgatgaaacactccagaaaacaaccaggccttggctcttagatggcattttgggacatgccctggaccagagtggaagctcactgccctaaagggtgagtcccaggtcaggcagcattcamcacagaattaaattaataccacagaatttaattctgtggtattaaagggataccacagaaatacacaagttctttaaatgccactatgaacaaaatctatgagatgcctgggctggctttgcaattccactgttctaaaatatgtagtccagaggcctgaagatcatgcagtccagcagcctgaagttcatccagtccagtctactactactggcactagagcactcctcccagaggccataggttggacccacccaccctgctattactactacagctgcactcacctgcatgtactacttgcaggcctagagatgactggttaattgataatcagtgaacaggagacaataaggcaacccagagattaacaacaatagaagtccctacattctccactactac

SEQ ID NO: 347702 - DNA, 605 bp, Homo sapiens
tgtctggtgaggacccacttcttggttgacagaggctgtctttgtatcctcacatggtgargagcagagggatctctcagggatcccttttgtgagagcactaatcccattcatgaggactccaccctcacgacctaattaactcccaaaggttcaacttgctaataccattgcactgggggttaggatttcaacataggaatttgggggggacacaaacattcattctgtgacactcgtctttttagcattggtgtatggaagcatatggctcacttatgaattaaatgtcccaaaagaggaagtgattggaattgttaactttctctaatgatttagaagacaaattctgggtgagccgagaatacccctcttagagtttattaattggttctaataagatatataggctatttcaggtagagactaataattctgttgggaactactatctcctgaggtatgggtagaggttgtgggggtcaaccaagcaaatcaaaactaacaaccaatttacaaggaaatgttcaatctacttaacaatatgatctttaaaataatgcttaactataaatttgcattaaaaaatgcaaatgtttttgaga

SEQ ID NO: 347703 - DNA, 605 bp, Homo sapiens
tgtctggtgaggacccacttcttggttgacagaggctgtctttgtatcctcacatggtgaagagcagagggatctctcagggatcccttttgtgagagcactaatcccattcatgaggactccaccctcacgacctaattaactcccaaaggttcaacttgctaataccattgcactgggggttaggatttcaacataggaatttgggggggacacaaacattcattctgtgacactcgtctttttagcattggtgtatggaagcatatggctcacttatgaattaaatgtcccaaaagaggaagtgattggaattgttaactttctctaatgatttagaagacaaattctgggtgagccgagaatacccctcttagagtttattaattggttctaataagatatataggctatttcaggtagagactaataattctgttgggaactactatctccygaggtatgggtagaggttgtgggggtcaaccaagcaaatcaaaactaacaaccaatttacaaggaaatgttcaatctacttaacaatatgatctttaaaataatgcttaactataaatttgcattaaaaaatgcaaatgtttttgaga

SEQ ID NO: 347704 - DNA, 676 bp, Homo sapiens
tgattttaatgtacagttaggactgaaaaccactcacctaattagatgactttgggtaaattattttaatctttattccttctgtgccttagtgtcctcaagtatcaaatgaagcaggtaatttccagatccagaaatccactctaacacgtaatagttgcccaagagggggctatttttgtgacatttgttattattgtttttgttattaatactattacataatctcactgatttttagaagcttagtctttttactgacagaaaagtatcagtaaactcaaatggcaagcagactagtttttctatcatccaatgttataatttggtttccagaaattattaggtaatggtaattgatataacagctttgcccattagatcacctgcctttacacactgtactataaaataatggactgagttttatgacttgtggaatccaccgtattgatttatagtcacagctcagggctgtgtgtgggtaggcacaaaagtgtgaacactaattgttagtgaacccatttggaggactacagagaggtgctcagaggccagggttccaaatgtttctcattaattatcttcaaaacaaactctcagygtaagagccccaattagggagcaacacatggtttagaaagccctggtggtaaatttcctgatgtactggatt

SEQ ID NO: 347705 - DNA, 561 bp, Homo sapiens
cacaaccagggctgtgcaactggacatgaggccagtcctgccctctttttgctttactcctgacttgccactctcagcaataggtcctgacccctcaagaactgttttggtgactttctattagggcccacagaatagagactcagcaaatgttgagtggagttgaccatttaactcttgttggtctcagatctatccttaggttcaatttccacagatctgacactgtgtccttttggctcttcatagctgctgactgattttcttttttaaactcccaccctacccttacccactacagtacgtttaggaaatgtattgtcttatggcaaagagaaatatcgtcttcctgagttgtgaaacaactcagaaacattgtaggaggcattttgttttacagaccagagggaaacagacatggattaagtcttctcagaattaagttgaaatcaccaagctkataaataatgtctctccctctcctctgacctgtttatagaatttgtcctcccgttgttttctccctccttcccttccttgtttcaggccatggcctgtgca

SEQ ID NO: 347706 - DNA, 555 bp, Homo sapiens
ctggtgaccagaattggcaaaaycaagttaacttctttttcagaaagccccttaatgaagctgatcatatttaatcttggctggccattccggagcaacactgattcagctccttacgaggagagctctaggaatggagaacacctgttaggggatgctccgtaatgtgtgtcttaagtgtaatagcaaaaagcaactgtctacccaccccaagttctgtgttcatgcagccagccactgggaggcagagatgtgcctgctggctgcaggctggtgctgggctccttttagtctgtaacacaaactaataaatgggcttgctttaaaagacatgggggagactgatgtgggcttccatatttgaagaaagtacttttctcctgatgtagacagagataccagtgtctaaagagtttccattccgtggtgatacttgcaatacccttggcaacccctgaaattacacaggggagcagagatctcagagttgatcagtcgcctgtcagttaccccaggatgctggctttcatcatttcctatttttttttgcaggga

SEQ ID NO: 347707 - DNA, 555 bp, Homo sapiens
ctggtgaccagaattggcaaaaccaagttaacttctttttcagaaagccccttaatgaagctgatcatatttaatcttggctggccattccggagcaacactgattcagctccttacgaggagagctctaggaatggagaacacctgttaggggatgctccgtaatgtgtgtcttaagtgtaatagcaaaaagcaactgtctacccaccccaagttctgtgttcatgcagccagccactgggaggcagagatgtgcctgctggctgcaggctggtgctgggctccttttagtctgtaacacaaactaataaatgggcttgctttaaaagacatgggggagactgatgtgggcttccatatttgaagaaagtacttttctcctgatgtagacagagataccagtgtctaaagagtttccattccrtggtgatacttgcaatacccttggcaacccctgaaattacacaggggagcagagatctcagagttgatcagtcgcctgtcagttaccccaggatgctggctttcatcatttcctatttttttttgcaggga

SEQ ID NO: 347708 - DNA, 541 bp, Homo sapiens
aaaatctaaggcagtattacaagcgctaggaaactttgttaatgcaatggctgttatttcagcagatgctgagagaaaattaagcatcttgaaaaataccattgaagttaagtggattctccacttcctgagtctgcgtgttacttaatgtgcagcaatttaatgggaaaatcattggaaaagttttctcatggctcaggggcatcatttatctagtggcagttacatcaaagaaaaaaaaaatcacatctataaacaatttgtagtattacttaaatctcttggaaaggaagacattgaataatatctataatttagcaaatttagagaataaaatggaacacattttataattacatttaagataaatgtaatagtttatgaaattatatccacgtgtcagctgttaaatatttttgtcttgcccctgcctatctctcaagccttctctggtgattcytcctctcatcctgggcttcagcaattctgtaagcttcggttcttgagagtcctcccttttcttggaacattcttctcccta

SEQ ID NO: 347709 - DNA, 523 bp, Homo sapiens
ccccaacccctgcccagacaaagccagacatacatagagcccccatccatccattgaagctggagaagccagctttacttccccagttccaaacagcccatcaatctgtaggatcacaggcacattggtgacttattttgaagtctctgctgagatgacacttgctttctgcacgagaggaggagaaaattactctcttctaagacagctttcaaaccagagctatatcttttgtggagccaaaggggttttggtgtttcagggaggcaagggcakgggctgccacctcactccagaggctcccaggggttcagagctgcctgcttacctcaacccacttcatggagcaggattccagaccttgcagctcctggaacagtcagggatgccagtgctccagccagggctccctgcattacccaaagtcaacccattgaatttaggggcaggaggagggccctgctctgataaatggagagtcctggctccaggcatttgctcttgctccaggattgactgcagg

SEQ ID NO: 347710 - DNA, 504 bp, Homo sapiens
cccctgtctgtctggaagcctggtcagctgccttccttgtgacattcctttctctgttcctacaaagctctcctctctctccacctcagctgctggtggagacccccatggccagccttaagagaaacatcagaagaaagttaatagcgaaacggtctggcggatctaattgatttttttcctattggttccctaatataggcaacacygttcctgccgcttttctgggctggagattatgtcataaataaagagatttgctccctatttccatgtgcttatctttaataagttaagaactcaacaagctttaggaggacgttgaaataagcaagagatccggtggtggctttggctgtggcagtggctttatttcaacaaagggggaggcagattgctgaggctagtggaagagaatttccattctttgagttgcactgggcctgggctcatctgggagaagagaggggcaagtgagagagctgggggaggaaattcgtggtg

SEQ ID NO: 347711 - DNA, 450 bp, Homo sapiens
acccactctccggttctggacaccccacagattaattcacatttcctgaaaactgacagtgaacacaaactgtgcagcgcatgcagaaacagcctcactcaagtttaagtaccatgcacctcatgtgccaagctctgctatttatttgcagggtctcatttagtcctaatcaaccctatgaagacaacagtattgctatctcccatttcacagttaaggaaaccaagaaacagaaaggtgatttgctcaaaggtgatttgctcaaaggcttacagctagcaaatagcagagcgaggatttgaatccaggtccattgacttcccctgctctaaacattgccctgtagccctcatcctgcacttacagtgcacttacaaytgcaagcattaataaggcacatataatatgcaagatcctaggcataagggctgagggggtagaaaaagaaat

SEQ ID NO: 347712 - DNA, 566 bp, Homo sapiens
gtttcatgctgtttattaatgagtagtaatcaattttatgaatatcacattttgtttaagtatttgctaattggtagatatttgggttgtttccaattaggggccattaataagattatatgaaattctatgttgaatggaggtctgttttcatttctctttcatacataccaaggagtggaattactgagtggcctgtgtatattgaacttttagaatatggcaataatctttgataaagtrttcaattttatattgacagaaatatatgaaaggtccagttcatatctttacttctaagcttttaaaatttcattcattctagtgagtgtgatactgtattgtggttttaatttatccttctataataaatgaggctgagcaacattttatgtgctctcagtcatttatattatcttttttgggaaagtttataccattttcaaattacagtacaagactgttccccgttcatggcttaggttttgcctcacttagtagtgtttttccaaaggccagtgtttgttacttttaacaaatttgtcaatttctaatttttttcattg

SEQ ID NO: 347713 - DNA, 566 bp, Homo sapiens
gtttcatgctgtttattaatgagtagtaatcaattttatgaatatcacattttgtttaagtatttgctaattggtagatatttgggttgtttccaattaggggccattaataagattatatgaaattctatgttgaatggaggtctgttttcatttctctttcatacataccaaggagtggaattactgagtggcctgtgtatattgaacttttagaatatggcaataatctttgataaagtattcaattttatattgacagaaatatatgaaaggtccagttcatatctttacttctaagcttttaaaatttcattcattctagtgagtgtgatactgtattgtggttttaatttatccttctataataaatgaggctgagcaacattttatgtgctctcagtcatttatattatcttttttgggaaagtttataccattttcaaattacagtacargactgttccccgttcatggcttaggttttgcctcacttagtagtgtttttccaaaggccagtgtttgttacttttaacaaatttgtcaatttctaatttttttcattg

SEQ ID NO: 347714 - DNA, 605 bp, Homo sapiens
ctgatatcagtaagctgggagaggtccccaaatgccagtagtgttactggggaatccttgctcccagaggtcccaagatggtggcaggccgcttcgaagatggcggcrggccaatttcaagacggtggcaggcctcgtgttctctgacctggggttcttggcctcagggattccaaggaatggaatcttgggccatgtggtgagtgttatagctctgttagaagctgtgggtcatggaagagaaccatggaacccagtgactagtgttcagctcgattaggacgaacctgggcacttagccatgcaggaacaatggcaagccgctagcccgatcaggagtggcaatgggcgcctcactggatcaggagcacagcggacaccctgccggttctggagggatggaagtcagcggcaggtctgcgatggcggcaaacagcagtggtggactgcaagcaaaagctcagctccagccataacaaacacggaccaaagagagtgcagttgcaagatttaatagagtgaagacagagctctggtacagacggaggggacccaaagagggtagctgttgctggcttgaatgcctggatttatatcccaatcat

SEQ ID NO: 347715 - DNA, 606 bp, Homo sapiens
ttcatgtgtaatgtggggataatgtatttcattgcctatgaacagtattttgattaattaaatgcagttattcaattaaatgaacacttaataggaggtttatcataaaaattacagttctgggcagcattggagattcagctagggtgagcacaccgcatagtggggatcatagttcttattaagactcttgaagttacatcaggaaaaatctcaggtagcccctaactgcacattcccatcatgctttcgctaaagcataagagacattcagtgtctgtcctgcagcctgtttatgcaaaaccactctgattttaactgaccaatttcttccttttagcatttactttttctgaaattttttgtatgtgtaaggtaggattgcctaatttatctttagttatkcttttactttttaaaatgactatgatgtgtaatatcttaatattccatgacagaatatagcaaattgtttatcttttattaattgataggagcatatgcctctaagatattacacattagtgtcactttgtgtatagaagaggaactctttaatgcatgattgtttcctaatgactagcacagagcccggcacttaataac

SEQ ID NO: 347716 - DNA, 281 bp, Homo sapiens
ggaaacactagtcgtgtgtttagagaaagcaagtactaggaagggatggaggctaagaaaaggtgamatatcaagcaaaatatgataaggagtaactttggctcgatcctgcagggaagctccagggctagcacaggccacatcagagttgccctgctcaggaggagaagatctggagcatttctcctcatgtcccttttgagtgctgcctcagaagcaaatgtaagttcccaggcaatgtccccacccatgagtgccagcaggcaggatatcacaacttg

SEQ ID NO: 347717 - DNA, 500 bp, Homo sapiens
cttgagcccaggaggtcaagaccagcctgggcagcatgacaaaatctcttatcaacagaaaaatacaatttttttttctgtgcttccatatacatgcatctgtgtttccagatactcaggaggttgaggcaagaggattatctgagcccaggaggtctgtagtgagctgtgattgtactaccacactccagcctgggaaacaaagtgagacactgtctaaaaaaaagaaaaaaaaaasaaaaaaaattaatgtagataatgagcatagtgtcagacaaatcaaaggttacaatgtaagtgtattaaagaccattttaagcattttaagaattaatttactaagaacttctttagcttctgaatttcttttcactataagaaagggaaaaacagcagtgaatcagtcctaattgttttttgtttgtttgtttttgtttccctcagtgtgagaactgtcacagaaactgtttattattatcctgtgtttaaatttagggtct

SEQ ID NO: 347718 - DNA, 553 bp, Homo sapiens
taattatacaatttttaattgaaaatttacgaaaattatcaaaatatgcaaataattaaggcagagcataaatatatatatgtttttatgtatatataaatatatatatgtccacaataagaaagagaagtaatatgagcggttatgtgcatatatcatgttaatataatagtttgaattgtagtatatgcaataaacatctaatcaaatcttatataatttattaraaccatctcaaaattgtggcatataaaatattgttgcatttggatcagtgagatatttagattctccactaataaaaataatgaagaattttgctcacaataaggtaactgagaatttttattttaaataataatttgtatgcatgcaaacaaatacacacacatgtaacatgcttatggtatgaaaaaggaagggcaagtcttccttcttacagtggtttgctgttgagttttcactaaaatacatttatatcttttaaaaaataactgtaaaaatacatacacaactctattatgttctttaaaataaatagttttctttattt

SEQ ID NO: 347719 - DNA, 592 bp, Homo sapiens
atggtatgaaaaaggaagggcaagtcttccttcttacagtggtttgctgttgagttttcactaaaatacatttatatcttttaaaaaataactgtaaaaatacatacacaactctattatgttctttaaaataaatagttttctttatttcccagaacttgtgccacagcaaatacagcaaaaactactcagcacgttacaagagtagtgagctgtctatcttcttccgcggggaagacactgactttatttttttattttagtatctgccaattcatgaaagtgagttatatattcctttcattctcccatgagccaaaggataagaatagtatcctgggtgtcactgatccaccacacatgctggctgtgcractgcgcttggaagaggatattacttgcctggtgacttaagcaactacctctgccttttaatgaacattcatgaaaaaaatgcaaatttgtgttcactagatacataatcaatcacaactacacagctggaagaagtagtgacagagatgggggccagaaatccactcagctttttgtcctgtttaaaatacatttaaaggattggcccaattggcag

SEQ ID NO: 347720 - DNA, 602 bp, Homo sapiens
atttttctcatcagctaagcaaatcttttccaagactttgcaggcaattgcaaaatgactattttaaaaatggtttagtgtaatcccagcactttgggaggctgaggcgggtggatcacaaggtcaggagatcaagaccatcctggctaacacagtgaaaccccacctctactaaaaatacaaaaaaaaattagctgggtatggtggcgggcacctgtagtcccagctactcgggaggctgaggcaggagaataacttgaacccgggaggtaaagcttgcagtgagccgagatcgcaccactgcactcccgtctgggygacaaagcgagactccatctcaaaaagaaaaaaaaagattagaatttaaaatattacaaatgttttcaattccaagttaaactattttgctttctttcatttaatcaatcaagatcctaattgtaaaattgtgacaaataatctcataagtgggtttagattttctagggaattaaagtgttgtggacctgaaaagaaagcagtaggaggcaaattgccacatattctggtaaaagactatgaaaaactagttatttcaccaagtcattggttttgaagatctc

SEQ ID NO: 347721 - DNA, 376 bp, Homo sapiens
ttaaacatagtctctgctctagttgcagtaatggggggcaatggcttagtttgctaaccccttttacagtgttttagaaaaggggttggcaaacttattttgtaaacagatatagagtattttcagttttataggaaacctagcatatatatatcacagatttttctcttkttttcttcaatttttaagtacataaatggtatctagaaacatacaaaacagactcatgggctggactaggccatgggcctagtttgctggcccttgattgcaactagcaacaacatgtaagaactggatctttcttcccttctcagggaaaacttcagggcatcttattttctagtaaaactttaatatcctgaatgtaaaagtg

SEQ ID NO: 347722 - DNA, 579 bp, Homo sapiens
ttcataagaatataccacaccaaagaagaaaaaatgaaacctgccacctgttgacaaaattttaaatgtcagtaatgtttattttatttgtttactaattcctttttgattttcatacacaaaaatatccatttaaagttttattacccttttattgaatcattggtaaaacctgaagaggaattttacatagaatggggtaggagctaaggaaacagaaaaataaataataagaaagtcatatagtcttaatatttaaagctaacagagggaaataaataattggaaatataagaaagataaattgtacaataygtaacatataatgagagtatcacctttgatttttcataaatatatatagtaatttaatgtgagagctaaaagatgtcagataccttccctgtattatctgacttaaatttatttatatcaacttaaattaacagtttgtgtgtgtgtgtgttttgttaaaggatttcttattttcttgtttaaaaaaatagtggcttgaggaagcttcaatgtctcccttaaaatagtcttgttattgaataacttagcattgaacatttgtaa

SEQ ID NO: 347723 - DNA, 582 bp, Homo sapiens
atgatgttattttccaattaattattctaattttttagaaacttagacatatataaaaatgcatataacctatacccacaatattattattattttatgctctttatttccttagtaatagcaagttttgaagatattcccttaattgatctgtttttgaacatgttattccrattgcattcaggatttttggtaaatgactgcattttagctgctattgccaaaaacaatgagtgagtgggtaattctgtgggacaatgggtatgttatacttcactctactacccaatttacatttttgtctcttaatgttattttgtataccttaaatatatataataactaattaaaaataaatacataaataaaaataaattgtggggagggggagcccatattgctgactagattctgtcagaaagaccttctaccactgagagaccagaccatcaactgtatcagtaaactctgagctctgagcagatctacagaaggagggtggatgaagagtggatagagggaggacacagactctgagtcagtaacctgagaaccttgcacggggttgctgagcaccaggac

SEQ ID NO: 347724 - DNA, 553 bp, Homo sapiens
gatggttattcattgattatgtagataataaaatttgtaaaaatgtagtttaaaataactactataaatataaaatttagacaatatggttactactacaatagctgaagagataatatwtttcagaagaaatttgaaaacaaaacaacaaaatagaattatagaactgaaatacaaaaatgccaaatttaaaaattaaataaatcgatcaaaggaaaaatgaatactgtacaaaaatttaataaatctgaagacaggttaatagaaaatatgaactataaaaatgaaagactgaaaaaagaagcataatattatggactgtgagataatattaagtcatctcccacatgggtgattgaagttccaaaagatcaggtgaaaaaaaaaatgggaaaatgatatagatgtgatgatgaaaatagttgaattattctgaattgcatttttacatgaaatcatgaatctaagaaaccatgaaacccaaaaatacgggggaaaattatctaaaatagagaaagaatacataacaatattgtcatcttaaagttatata

SEQ ID NO: 347725 - DNA, 553 bp, Homo sapiens
gatggttattcattgattatgtagataataaaatttgtaaaaatgtagtttaaaataactactataaatataaaatttagacaatatggttactactacaatagctgaagagataatatatttcagaagaaatttgaaaacaaaacaacaaaatagaattatagaactgaaatacaaaaaygccaaatttaaaaattaaataaatcgatcaaaggaaaaatgaatactgtacaaaaatttaataaatctgaagacaggttaatagaaaatatgaactataaaaatgaaagactgaaaaaagaagcataatattatggactgtgagataatattaagtcatctcccacatgggtgattgaagttccaaaagatcaggtgaaaaaaaaaatgggaaaatgatatagatgtgatgatgaaaatagttgaattattctgaattgcatttttacatgaaatcatgaatctaagaaaccatgaaacccaaaaatacgggggaaaattatctaaaatagagaaagaatacataacaatattgtcatcttaaagttatata

SEQ ID NO: 347726 - DNA, 546 bp, Homo sapiens
tcgttaatactattgatgtgccttatcatttgttgaaaacatgatggattagatcctctggcatcttggtcagataccttttttaagattccagaacttttctccagactgtcagaagtgttgcattatcatgacttagagctgagtacatccccaggaattgctttccttttaaagaagctcttttgctcaaggctttacccactctccaagcaagaacttcccacattcacatctttgatgtgtatgtaagactctcacctcaatttggcatatatctaaagggacttccakgctaaaaacttcacactgagtcaactgagccttcagttgttattatatcatgagggattttttttaatatccaattcttctttcttcactcataaagcatttttttttttcctgagaacaatgtctgatcaccaccaccatgcaaacctctgcttcagagaatgtttcctaggcaatgtgcccagtaacactctactaccaagggcagtcctcagaacagattctaaagaagctcatgcgttggtgaggtca

SEQ ID NO: 347727 - DNA, 523 bp, Homo sapiens
caggtgggaaacaaatttttaataacttattttaatatctttaaacaaggactattgcctaaaagggggatatttacatattaagtttaactaagataattcatattagaactttatcagtaaaataagcagtaaaataatttctccatgctacagtgtaatctttttcaggaatttgaatggcagtgtagtcaaagtaaataggaaaaattttaaactgccctttaaaagccatgcataatgacctagatacatgggaattcattaagaaaatcctcacacaaaattatttatattaatgattatcaaatgttgttctctggcaaattgagtttccttggagacattctcaattaaatactagctaatctcagacacatctttttttaatgtgcattwtttgttttagcttaatggtcagttatgtaaaaacatgtttgttatggtattttaaacactataatattaattttgaggtttttttttacttgtacatcttgtgcagttcatctccaatgtttgt

SEQ ID NO: 347728 - DNA, 559 bp, Homo sapiens
ctcaagactttttctgtgaaacagctttcttctactactcactagaaaaaaaaaaactttcccttactttcagatattacccactttgcctttccttttgcatttgaagtgtttggaaatacagtcatagaccacataatgacagtctgcatatgcaacggtggtcccataagacayaagattataatggagcttttattgtccctgaagaccttccagtgacacaaaacgtggaggtggaagacagtgatattgatgatcttgaccccgggtaagcctatgataatgtgtgtgcttgtgtcttagttttttaaataaagagttaaagaagtaaaataaagagagaatttaaaaataagaaaaaacatatagaataaaaatgttttaaaaatatatttgtacagcttacaatgtttttgcattttagctaaatgttattatgagtcaaaagtttaaaaaattaaagtttataaagtaaaaaggttatagtaacatagattaatttattattgaagaaagaaaacttttgaaataagtttggtgtagtgtaagtgtacat

SEQ ID NO: 347729 - DNA, 626 bp, Homo sapiens
ccacataatgacagtctgcatatgcaacggtggtcccataagacataagattataatrgagcttttattgtccctgaagaccttccagtgacacaaaacgtggaggtggaagacagtgatattgatgatcttgaccccgggtaagcctatgataatgtgtgtgcttgtgtcttagttttttaaataaagagttaaagaagtaaaataaagagagaatttaaaaataagaaaaaacatatagaataaaaatgttttaaaaatatatttgtacagcttacaatgtttttgcattttagctaaatgttattatgagtcaaaagtttaaaaaattaaagtttataaagtaaaaaggttatagtaacatagattaatttattattgaagaaagaaaacttttgaaataagtttggtgtagtgtaagtgtacattgtttataaagcctacagtggtgtatagtaatgtcctaggccctcagattgacttgtcacccactcactgacccacccagagaaacttccagtcctgcaagctctattcctggcaagtgaccagacaagtataccactttttttttcttttgcaccacatttgtgttgcgtcttttctatttagatgtgtttatatac

SEQ ID NO: 347730 - DNA, 626 bp, Homo sapiens
ccacataatgacagtctgcatatgcaacggtggtcccataagacataagattataatggagcttttattgtccctgaagaccttccagtgacacaaaacgtggaggtggaagacagtgatattgatgatcttgaccccgggtaagcctatgataatgtgtgtgcttgtgtcttagttttttaaataaagagttaaagaagtaaaataaagagagaatttaaaaataagaaaaaacatatagaataaaaatgttttaaaaatatatttgtacagcttacaatgtttttgcattttagctaaatgttattatgagtcaaaagtttaaaaaattaaagtttataaagtaaaaaggttatagtaacatagattaatttattattgaagaaagaaaacttttgaaataagtttggtgtagtgtaagtgtacattgtttataaagcctacagtggtgtatagtaatgtcctaggccctcagattgacttgtcacccactcactgacccacccagagaaacttccagtcctgcaagctctattcctggcaagtgaccagacaagtataccactttttttttcttttgcaccacatttktgttgcgtcttttctatttagatgtgtttatatac

SEQ ID NO: 347731 - DNA, 626 bp, Homo sapiens
ccacataatgacagtctgcatatgcaacggtggtcccataagacataagattataatggagcttttattgtccctgaagaccttccagtgacacaaaacgtggaggtggaagacagtgatattgatgatcttgaccccgggtaagcctatgataatgtgtgtgcttgtgtcttagttttttaaataaagagttaaagaagtaaaataaagagagaatttaaaaataagaaaaaacatatagaataaaaatgttttaaaaatatatttgtacagcttacaatgtttttgcattttagctaaatgttattatgagtcaaaagtttaaaaaattaaagtttataaagtaaaaaggttatagtaacatagattaatttattattgaagaaagaaaacttttgaaataagtttggtgtagtgtaagtgtacattgtttataaagcctacagtggtgtatagtaatgtcctaggccctcagattgacttgtcacccactcactgacccacccagagaaacttccagtcctgcaagctctattcctggcaagtgaccagacaagtataccactttttttttcttttgcaccacatttgtgttgcgycttttctatttagatgtgtttatatac

SEQ ID NO: 347732 - DNA, 642 bp, Homo sapiens
  misc_feature (1)...(642): n = A,T,C or G
tcatagtttgcagggtaaataattcatttgatttttatatctttaaaaactcatctaaatagataaaataatatgacagcaaaatgtttttagtactgttcatacttcccattcctatatttatataaatattaagatatgataagacaaatgtaaaatatagttttgtttattttatcactatggatcagagaatgtgcacttgttagaatgagtgctactttttgacctaatgtttgaagacagtaagaagtaaaataaagacacttgttttttttttcattataaatctgttagacaaatgcatcaactctgcttctaattattttatgatactttattataactaatatatttacaagacatacatatgtatatgtgtaaaaatacacaataatgttagatattaagaagatacaaacattcaacttatcttctgtagagagttctctcaattcagtgccctttattcctctatctttcttaaaagctaagattcttggagacaagtaaatattattagtagcaaaaacaagcaacagctgttttttttatttttattttttgagattcacaaaaaaacycatttaccaaacatttacaaatcagtacgacnnnnnnnnnnnnnnnnnnnnnnnnnnn

SEQ ID NO: 347733 - DNA, 574 bp, Homo sapiens
tttttggctattttccatgcacctcttctctttagtaggtccagatgagatggattgctaaaatccaatagtgagagaaataattgttgtatcaacaactgccaggttggttctactcaaacgctgagctcctggtaaattcaatcctctggattatcttcatataaaaaacaagtaagaggtataggcttcacccactacatgcagaagaagttcagctcaaatagtgtagttttaacagtcattaacccaatttaaatggtataaagtaattagtatatatgctttgaatgagaatgttcccaaactttgatatataatattcataatttggatagatttcaactaagagtgtacttttacatgtatccttattggcaatagagagtttttattaggcaccagtaaatggtctttgtgactactgctatgacagtcagtggtatatcttaattagcagtattatttctagttcaactaaaatagctaaagggtcctcctgggatcwattctgggatatgattttgtttaatcttattattaatgataataaatttttactttgtgggagtat

SEQ ID NO: 347734 - DNA, 490 bp, Homo sapiens
aaagtagttttaaaacagtatgcagctgtgtggacacctgtaattgcagccacacactcccagacatgatgcagttggggagggtgggccagtgctctcttactgtgcttcaagcagctctggttgcaagtgaccagagaagtgatttctgaacagactgtggggagtgtgttccctgaaatgacagataatcttccaaaattcaggttgtaggaaaccttcctgagttgttagggacatggtagtgtccttggaaccatttcccaagaaaaagaagagtctccaccggtctattatttatrtcttctttgttccccttctaacagctgaaattaaattttgaggtcatcatttttgaagtcagttttggtaatacatgtcaatctgtgattgcctttacagagtaatgatgttttgttaaagtgcaatttgtttattatacatattttcttatgaagaatacaatttccatctacaagagcaggagtta

SEQ ID NO: 347735 - DNA, 629 bp, Homo sapiens
tgttccttttggagttaattttcaattttattccactgtggtctcagagggtgtttgatataacttcagttttcttaaatttattgagacttgttttgtggcctatcagatggtctgttttggagaatgttccatgtgctgatgaaaagaatgtatattctgcagttgttgggtagaatgttatgaaaatttacattaagtccatttgttctagggtatagtttaaatttgttgtttctttttagactttctgtcttgatgacctgtctagtgctgtcaatggagtattaaagtcccccactattattgtgttgccatctatctcattttttatgtctagtagtagttttataaatttgggagctcccgcattaggtacacatatatttaggattgtgatatttttcctattggactgatcgttttatcattatataatatccctctttgtctttttcatctgatgttgttttaaagttcattttgtctggtataagaatagctactcctgcttgcttttggtgtttatttgtatggaatatcttttytcacccctttaccttgagttcatgtgagtccttatgtgttaggtgagtctcttgaagacagcaagtacttgcttagtcaat

SEQ ID NO: 347736 - DNA, 437 bp, Homo sapiens
tagcatttctaaggcagacttggcagtgacaaactctcaccttttctttctctgcatgagtttttatcatgcttttatttttgaaagactgggtagctggatacagtattcttggctgaaaatattttcttgtagaattgtgaatatattatctcattcccttctggtttacaaggtttctgcagacaactccagtaataattttatgggggttcttttgtatgtaatgattttcttttcctttgctgctttcaaaactctttgtctttaattttgacratttgactgtgatgtgtctgaatgtaagtctcctcaaattcatcttgtttggtgtcctttgggcttcctggatttgtatttctattgtcttcctcagacttggaaaacgttctgccattatttcttttctcttttctttttttttttttttttaagat

SEQ ID NO: 347737 - DNA, 589 bp, Homo sapiens
ggctgctgcagtttgctgcgggttcacttcaggccctattcatctggggcactcccgcatctggagatgtcacccgaggaggctggaggacaacaaagatgggtgcccggctccttcctctgggatctctgaccttggggagcactgacctgatgccagcaggaacactcctgtatagggtgtctgataacttctgttgccgggtctcacccagttgggrgcatgggaaccaggacccatttaaccaagcaatttggctgtcccttggtggagggggtgtgctgtgctgggggtaaagccacttgtctgggcttcccagattcctcagggctagcagggggaaaactaagcctactggtccatggagactacaacccttcctcatcctagaggcttaggcccagggagatcagtgttctgtccctaagcccctgtgtggagttgctgaagttcttgcagggaggccccacccagtaaggagggatgggtcaggttccagcctaaagaggcagtctggccactatctaccatagttggtgtgctgcactgtggggaatacttcttgggaccaagccgtccagtctccctg

SEQ ID NO: 347738 - DNA, 583 bp, Homo sapiens
tctgcaattctacatctaagattttatcatgagagcttatttctacatgtggatctgacayagttatatggatttactgcagtgccttttgtaaggatgatacattgaaaacaaacaaatgcagtgccttttgtaaggatgatacattgaaaagaagactagctaaatatcagggtactcacagaggagatattatgcagctattaaaaaggagatatatttatttatctttctacatatctgtctttatatgtcctatgattctatgtgtgcatgcatgcatatctgtgctgctctcaaacaatattttagatatgttcagtaaagtaaataaagtgtaaacagttgtagattattctctaactggagaaaatacacatacatatgtttgtacatgcacatactatatatatttgtatagataaaaacaactagtaacactagctgattacaggtaggtggactgaataccaaggggacaagtgtaagaaagagaattacctcttactgtaagctcttttgtgctataacattgatttttactaaattgatattacttatttagtaaattttaaaaattaat

SEQ ID NO: 347739 - DNA, 583 bp, Homo sapiens
tctgcaattctacatctaagattttatcatgagagcttatttctacatgtggatctgacacagttatatggatttactgcagtgccttttgtaaggatgatacattgaaaacaaacaaatgcagtgccttttgtaaggatgatacattgaaaagaagactagctaaatatcagggtactcacagaggagatattatgcagctattaaaaaggagatatatttatttatctttctacatatctgtctttatatgtcctatgattctatgtgtgcatgcatgcatatctgtgctgctctcaaacaatattttagatatgttcagtaaagtaaataaagtgtaaacagttgtagattattctctaactggagaaaatacacatacatatgtttgtacatgcacatactatatatatttgtatagataaaaacarctagtaacactagctgattacaggtaggtggactgaataccaaggggacaagtgtaagaaagagaattacctcttactgtaagctcttttgtgctataacattgatttttactaaattgatattacttatttagtaaattttaaaaattaat

SEQ ID NO: 347740 - DNA, 532 bp, Homo sapiens
tttatgcacatgaatttcatctccaaagttaccgtcctccttctcagccgctgctggagatggacacatggagattggacaagtgcccaagrgcttcagtgccacgcaggaatgcttcagtcatgacagtttgcacaacacagccactgtcatctcattagaaggcatgagcatttttgccacatgccgattaatacagacacacctgctctcactaatgtcatccaaaagattggagttggacttattttatattcctccaagcttctggccatttaattccatgacattatgggacaacaaagtctgtccgagaggtcacctggtccaatctgccacttccagaaatactaatagttagccattgaaaatgaatgggtttctgttacattttaaaatgtctgctgggatggtgattccccacaatttgtagccagcttcagtgtttaatcagccttataattgtagtggaatgggatggctggtaaagaagaaattacgtcttatttttcttttagttaaaaggcagaaa

SEQ ID NO: 347741 - DNA, 590 bp, Homo sapiens
tgaatatatggaaataattacctgaacaccacagaagtggtttggagagttagccattgccctgggacagagctagatgcttcactwatcacctcatagtacttctcaccctccaaggaccccatcatcctgacactgctgcagccaccactgccaaagagaaggtgcccctgtacaagcttccaaatccaagtccaagtgtatgtctctgatttgcagatgataagtcacctgccagtactgcaaaggatgctgggaaattgaatgtctaatcttttcaggttctataatgaggagcagccactgctgagtttcataaaaagtgaaactactcaagctttgaactgagcagatgagttcataatccagattacctaaaataatgataaatattcactatgctgcttgaaactatcaccatggtattaattttccacacattctgttaactttttgacaggagtcatgttactcctctcctatgttctaagttcagtcgtgggtcacttattgatggggatattttctgagaaatgcatcattaggcaattttgttattgtgtgaacatcatagggcacacttacataaa

SEQ ID NO: 347742 - DNA, 560 bp, Homo sapiens
attacctgaacaccacagaagtggtttggagagttagccattgccctgggacagagctagatgcttcactaatcacctcatagtacttctcaccctccaaggaccccatcatcctgacactgctgcagccaccactgccaaagagaaggtgcccctgtacaagcttccaaatccaagtccaagtgtatgtctctgatttgyagatgataagtcacctgccagtactgcaaaggatgctgggaaattgaatgtctaatcttttcaggttctataatgaggagcagccactgctgagtttcataaaaagtgaaactactcaagctttgaactgagcagatgagttcataatccagattacctaaaataatgataaatattcactatgctgcttgaaactatcaccatggtattaattttccacacattctgttaactttttgacaggagtcatgttactcctctcctatgttctaagttcagtcgtgggtcacttattgatggggatattttctgagaaatgcatcattaggcaattttgttattgtgtgaacatcataggg

SEQ ID NO: 347743 - DNA, 633 bp, Homo sapiens
ttttctatttgagaacttgtctttgttgtattttcctttaattctttaaatgtgattccttgagttttggctttcactttattccagaatttttgtgtctttactgtgcactaagcctcacattcagccagggaagagtagataactagattttttgggtgctgcatcgactttttttttttttttttgagacggagtcttgctctatcacccaggctggagtgcagtggcatgatctcagctcactgcaagctccgcctcctgggttcacgccattctcctgcctcagcctcccgagtagctgagactacatgtgcccgcaaccacgccctgctaattttttgtatttttagtagagacggggtttcaccgtgttagccaggatggcttcgatctcctgacgtcgtgatccacccacctcggcctccaactgtgagatagtgtcaatcagttggacttggagtttatttggctttttaaaacaaacattcaacaaatagtgctgggacaattagatatctgcatgtaaaagatgaakttggaccactcatacacaccagacaaacaaaaagacctaactcaaattgaatcatagacaaaaatgtaaaagctacaactgtcaacacttagaag

SEQ ID NO: 347744 - DNA, 606 bp, Homo sapiens
gttgagaaacttctctttctgttattggcaacatgaggaacaaatggcacatatacctttcttctgcaattatatttattggcaaacrtcattttcctatcactgaaaatggcaacatcatcaagtgtcgaatgttcctagaaaactgagatcagttcttaagagacaatgctgtgaaatcaaggtagatgtttcatgagggaaagtctattcttaagagaaatactttgggcattatgtgatattaaattctcatgcccatgatctacactgagtttggacagcagcgggggaagggaatactctacattttggcaaactaaagaatagctaaaatgtataagctaaaatgtataagctgtgcatatcttctggttgcaaccctgatttactcaccaccatttttcctcctcattttttttgctttagaaggctgaactagaaagattgcatccataggctgccttacactctggctacaagttggccagtgggactattggttgaattggctgaaggatgagaatatagctggggtatttattcttccagattcctccttgtggggtcactggaagttgtcagcattcctttaccaaaggtcat

SEQ ID NO: 347745 - DNA, 571 bp, Homo sapiens
taagagaaatactttgggcattatgtgatattaaattctcatgcccatgatctacactgagtttggacagcagcgggggaagggaatactctacattttggcaaaytaaagaatagctaaaatgtataagctaaaatgtataagctgtgcatatcttctggttgcaaccctgatttactcaccaccatttttcctcctcattttttttgctttagaaggctgaactagaaagattgcatccataggctgccttacactctggctacaagttggccagtgggactattggttgaattggctgaaggatgagaatatagctggggtatttattcttccagattcctccttgtggggtcactggaagttgtcagcattcctttaccaaaggtcatgcttttcatcatgtaggtctctctgtatagctctttattgctggcttgtttaactattccctcttcttccccattcatgctgaagagagctaaatgactcaccactcttgctggcctcaggaatctgcacagttctttggtttctcccaaacttgcctacatctttgttaatagttcct

SEQ ID NO: 347746 - DNA, 571 bp, Homo sapiens
taagagaaatactttgggcattatgtgatattaaattctcatgcccatgatctacactgagtttggacagcagcgggggaagggaatactctacattttggcaaactaaagaatagctaaaatgtataagctaaaatgtataagctgtgcatatcttctggttgcaaccctgatttactcaccaccatttttcctcctcattttttttgctttagaaggctgaactagaaagattgcatccataggctgccttacactctggctacaagttggccagtgggactattggttgaattggcygaaggatgagaatatagctggggtatttattcttccagattcctccttgtggggtcactggaagttgtcagcattcctttaccaaaggtcatgcttttcatcatgtaggtctctctgtatagctctttattgctggcttgtttaactattccctcttcttccccattcatgctgaagagagctaaatgactcaccactcttgctggcctcaggaatctgcacagttctttggtttctcccaaacttgcctacatctttgttaatagttcct

SEQ ID NO: 347747 - DNA, 571 bp, Homo sapiens
taagagaaatactttgggcattatgtgatattaaattctcatgcccatgatctacactgagtttggacagcagcgggggaagggaatactctacattttggcaaactaaagaatagctaaaatgtataagctaaaatgtataagctgtgcatatcttctggttgcaaccctgatttactcaccaccatttttcctcctcattttttttgctttagaaggctgaactagaaagattgcatccataggctgccttacactctggctacaagttggccagtgggactattggttgaattggctgaaggatgagaatatagctggggtatttattcttccagattcctccttgtggggtcactggaagttgtcagcattcctttaccaaaggtcatgcttttcatcatgtaggtctctctgtatagctctttattgctggcttgtttaactattccctcttcttccccattcatgctgaagagagctaaatgactcaccactcttgctggcctcaggaatctgcacagttcttyggtttctcccaaacttgcctacatctttgttaatagttcct

SEQ ID NO: 347748 - DNA, 587 bp, Homo sapiens
ccttggaagaaatgtggagttctgatttccttggaagaaattctaattgccatggtatctttaaacttaaatgtccatgatagttttcttgggaattgttcatcttaaactctaggttagaatgttggttatttattgggtaatactttcttggaytactttttctttctttccttccttctctatctctctccttccttccctccctgctctcttgtttgtatttttatattctttattgagtaggagggaaaaagagctaagttaagattagtaggtaaaataattacatgtggaaatacgttgcacaaatagatgccaaattggtgtcaggaaaaaaaagtgattgagaatgagtattagaaaataaggatactacatacttaagcatgtactaagtgctggtattgagagtggagagttgaatacctaatttatgttaagttatggcaggcattttaatagtatttaataaccacaacagtcctgcatacagtcattctgcaaatatctattgatatttgtgtgtgatgcattgtagtagatgttagggatatagcaataagcaaaataagcacagtccctgc

SEQ ID NO: 347749 - DNA, 587 bp, Homo sapiens
ccttggaagaaatgtggagttctgatttccttggaagaaattctaattgccatggtatctttaaacttaaatgtccatgatagttttcttgggaattgttcatcttaaactctaggttagaatgttggttatttattgggtaatactttcttggactactttttctttctttccttccttctctatctctctccttccttccctccctsctctcttgtttgtatttttatattctttattgagtaggagggaaaaagagctaagttaagattagtaggtaaaataattacatgtggaaatacgttgcacaaatagatgccaaattggtgtcaggaaaaaaaagtgattgagaatgagtattagaaaataaggatactacatacttaagcatgtactaagtgctggtattgagagtggagagttgaatacctaatttatgttaagttatggcaggcattttaatagtatttaataaccacaacagtcctgcatacagtcattctgcaaatatctattgatatttgtgtgtgatgcattgtagtagatgttagggatatagcaataagcaaaataagcacagtccctgc

SEQ ID NO: 347750 - DNA, 587 bp, Homo sapiens
ccttggaagaaatgtggagttctgatttccttggaagaaattctaattgccatggtatctttaaacttaaatgtccatgatagttttcttgggaattgttcatcttaaactctaggttagaatgttggttatttattgggtaatactttcttggactactttttctttctttccttccttctctatctctctccttccttccctccctgctctcttgtttgtatttttatattctttattgagtaggagggaaaaagrgctaagttaagattagtaggtaaaataattacatgtggaaatacgttgcacaaatagatgccaaattggtgtcaggaaaaaaaagtgattgagaatgagtattagaaaataaggatactacatacttaagcatgtactaagtgctggtattgagagtggagagttgaatacctaatttatgttaagttatggcaggcattttaatagtatttaataaccacaacagtcctgcatacagtcattctgcaaatatctattgatatttgtgtgtgatgcattgtagtagatgttagggatatagcaataagcaaaataagcacagtccctgc

SEQ ID NO: 347751 - DNA, 587 bp, Homo sapiens
ccttggaagaaatgtggagttctgatttccttggaagaaattctaattgccatggtatctttaaacttaaatgtccatgatagttttcttgggaattgttcatcttaaactctaggttagaatgttggttatttattgggtaatactttcttggactactttttctttctttccttccttctctatctctctccttccttccctccctgctctcttgtttgtatttttatattctttattgagtaggagggaaaaagagctaagttaagattagtaggtaaaataattacatgtggaaatacgttgcacaaatagatgccaaattggtgtcaggaaaaaaaagtgattgagaatgagtattagaaaataaggatactacatacttaagcatgtactaagtgctggtattgagagtggagagttgartacctaatttatgttaagttatggcaggcattttaatagtatttaataaccacaacagtcctgcatacagtcattctgcaaatatctattgatatttgtgtgtgatgcattgtagtagatgttagggatatagcaataagcaaaataagcacagtccctgc

SEQ ID NO: 347752 - DNA, 585 bp, Homo sapiens
ctcactttactttgagtgacaactacgaataatgttccacagcatccttgccatcccatgctggtgtggggctaagggatagcagcgtgctaagtcactgggaatccaggatggaggggaatcacgggagtgacaatcaagctgttaggcagcttcagttgcccctttgtttctcctccaattgagaatcttttgtgccttttttttttttagtcattttcctctctgcgctctactttgctaattaaaattctaatcactctgacagctagaggtagggaaaaaaaatcattcttccatgctggagaaggtaatttcaaggtgttttagctgccaaagaaacaaacgaaaattagacaaagaagctggttgtcatagcaggacaaatgaattttgctttcccattctgccgaaaaatatgaaactttagcaaagacaacacatttctatttggtattgtrgaaattctaaacacgtgaaggttaaacaatatgtttcactttcctacaggttaaggttttctgataaaaatagtattttatacatttgttcatgtcaaaaataatttactgttcttggggtgaa

SEQ ID NO: 347753 - DNA, 624 bp, Homo sapiens
tgttgttgttacgtgattggttcgctaagtaagtagatttcagtacaagaaaataataaactcttcggtccataaggttttaacagcacatgaacagcaatgaatccataagaattcagcaatctatttataagaactttcaaagattgttatcctaaaaatatccagagagagttttgtaatatattggtgcaaaattgttaaatcgataaaatgtgtttgtttttaacttgtaaagtatcacaggatcatgaatgtattktttattgttgtactaattctaagatgtttttggaagacacaatgctttaaagaagagagtctagcataaattttatgcaaagggagactatgaatactacagtactagtagattgaaaaagtatgaaattcatcatcagatttccccagacagatttaaaaaaatcatttacatagatattccaacatgtattggcagtgcattagataaaggtttaactttgcaacagaatatttggagctcaaagctcagatctgtgagtacattcctgggttatcataagcaaaattatataaaatctctgaccctcagattcctcatctataaaatagagtcaatgatggcaatctcccaaacagtag

SEQ ID NO: 347754 - DNA, 538 bp, Homo sapiens
cttttctctctcaatgcatagtaagttcctaaacagcaagtttaccagacttgaccaggattttaaacttagcccatgtacttacttccattattaccccaacacccttaaaatgacacataataaagcaataaattatctttaatactagaaattattttccaatgctactggtgaamcaggtttattaaacaaataagaatattaaagaacatatagcttaaaacatcctcagaagtaaactacaggagtagtacagcaatctacatatccaattccgcattgagcatttgaattcaagctgaaatttgagagccacactctgtaggatatgacttccctgggtggggagggtacctagtattagtgttatcgcctgcaagaaaagcaaagcagattttgaggtaactgagaccaccaatgcagacctgaatgggggaaaaaaagacaattcttttgaaaacaaaaatgaactagatttcctcactgccagaggaaatgtattcctcttttggcagctagtgaggagaaaaaatat

SEQ ID NO: 347755 - DNA, 587 bp, Homo sapiens
cttttagttcgatgagtatatttaggacaatcattttaaataatttgtcaagttagagtcctgtgtttcrttagggttgtatttatagatttattttgtttcctttaatgggccatgtttccatgtttcctggtattcctgtgatcttttgtttaaaattggggctttgtgggtgttgagagggactcacccagtttttgcagactggttctatggaaagggaggaagatcttaattaattagtctaacatggagacttaaagtcttctcaagccttttctgggcatgcaaattttctgatgccatgtgtgtactttttctcaattgtcccttttacagggctgtctttacatctcttaatttttcaaaaagtctcaccctacttcttgaagccttatatattctatcatattattctgcctataatctcttgccttcaggcatctgtaggtctgcagtcttcctgcagttttcctatgccacagcacctgctacagtattctctggcttcagtgcaaactatgcccaacattttatctcagctgtgagtcagatgatacagaaatcagtccctcaggcaacccaca

SEQ ID NO: 347756 - DNA, 587 bp, Homo sapiens
cttttagttcgatgagtatatttaggacaatcattttaaataatttgtcaagttagagtcctgtgtttcgttagggttgtatttatagatttattttktttcctttaatgggccatgtttccatgtttcctggtattcctgtgatcttttgtttaaaattggggctttgtgggtgttgagagggactcacccagtttttgcagactggttctatggaaagggaggaagatcttaattaattagtctaacatggagacttaaagtcttctcaagccttttctgggcatgcaaattttctgatgccatgtgtgtactttttctcaattgtcccttttacagggctgtctttacatctcttaatttttcaaaaagtctcaccctacttcttgaagccttatatattctatcatattattctgcctataatctcttgccttcaggcatctgtaggtctgcagtcttcctgcagttttcctatgccacagcacctgctacagtattctctggcttcagtgcaaactatgcccaacattttatctcagctgtgagtcagatgatacagaaatcagtccctcaggcaacccaca

SEQ ID NO: 347757 - DNA, 617 bp, Homo sapiens
tcattgacatagttaaaaggacctagctgmcattttttaaatctaaaaatttcttcttataggcttttacacagataaaaagtaacctggtccttaaggtcaatcttgatgttaattgggaattggcaaagaggtaggagtaagtttgtctctgttatgggaagagaaagagtgcaaaaatgtgagtgttatcttcagtaaccaaatagaaacatatatgtgtaattaaaattccttaaattcaacaaattccaaaataaggctaaaccaaaatatagtatgacaagactgtctacctcttactgatttgcctacatagctatcaactaatgtttgactttgatatagtattatctttaattgttcttagatttttttgttagtccactattataaatgagtctataaaaaatttgattatacacacagtcttctgggagaacaggagcaggattttggcatcgtgacattctcagcttcataacactcccctccttcatttcttcctctcttagcagtcagcagaataggctgacacgagggaaatgcctgccaaggaactttagtaggaggcagtttttaattaacaggggccagagaaggtgataaccccaagg

SEQ ID NO: 347758 - DNA, 617 bp, Homo sapiens
tcattgacatagttaaaaggacctagctgacattttttaaatctaaaaatttcttcttataggcttttacacagataaaaagtaacctggtccttaaggtcaatcttgatgttaattgggaattggcaaagaggtaggagtaagtttgtctctgttatgggaagagaaagagtgcaaaaatgtgagtgttatcttcagtaaccaaatagaaacatatatgtgtaattaaaattccttaaattcaacaaattccaaaataaggctaaaccaaaatatagtatgacaagactgtctacctcttactgatttgcctacatagctatcaactaatgtttgactttgatatagtattatctttaattgttcttagatttttttgttagtccactattataaatgagtctataaaaaatttgattatacacacagtcttctgggagaacaggagcaggattttggcatcgtgacattctcagcttcataacactyccctccttcatttcttcctctcttagcagtcagcagaataggctgacacgagggaaatgcctgccaaggaactttagtaggaggcagtttttaattaacaggggccagagaaggtgataaccccaagg

SEQ ID NO: 347759 - DNA, 634 bp, Homo sapiens
aaatttaataagcatctagattggtcctgtctaaagtagaagtcataagccacatgtagtaattgatyacttgaaatgtggccagtttgaattgggatgtactttaagtgtaaaatatacacaaaattgtgtaagtgtagtatgaaaaagagaatgtaacatatctcattaacaatttttatgttaatcacatattgatgtaatatttttaatgtattaggttaatatattaccaaaattatctgatttcttttctttttaacattttttatatagctactagaaaattttacattatatatgtgggttacattatctttctatcagagagtagtgatctagataatagttaaagttaatatttattaagcacttactatttatttaatatttagaaagcacttacatgctattctaagcactttatatgcatcatctcatttaatttcagaattaccattaggataggtgttattattacccctgttttatagacaagaaaatttaggcaagaatagtaagcaatttgcttaagattatgtaactaccttatacttcactctccttttaataattaaaatatttttgaagtgtctacgtaatgctatgcataagacatagtactatgcatagg

SEQ ID NO: 347760 - DNA, 602 bp, Homo sapiens
ttgtctgaaaatcagtttactctatttttagcccatacataggttgaaaaggctgcacactttgcagttccagccatttatattgccacatgtttccaataacatcttggagcttttagaaacttggagtttttaatacgtacaaaactttggaaaaccacaaggagctggcaagagcacactgcattcaactagctaaacaccaaaaattataaaacaagtgagtgtgtgtgcatgcttgtgtgtacttgtgtgtgtgtgtgtgtgtgtgtgtgttacctattttataattttaaattctggaattcttaagtcaaaaattttcaccagaatgtttctgctttgttcagttataatccttcaaatttcccttcaccatagccccccaaatacacccattctcacctctgcaccattgctcagaaatattccctgcctataaccccctcattctcctctatcactgcactaaacttagccactcttcaatacccaggtcaaattttaccttttccttaaagcttattgcarttattctggttcctggtgattccttttataattttcttccaagagtaaagtaagcactataaatattcact

SEQ ID NO: 347761 - DNA, 584 bp, Homo sapiens
ccctttttactctatcatccggcctgaaagaactggtgatacaacctgtgtactgaagaactgatgatacaatctgtgtattggaattttgcaatgttttttagggatggcttttgtgatttacagtaaatctgatgattttcatgtgcaggttaatttaaaaaaacacaatcactttattttcacatttatgaagtgtcccatagstatatttttaaaattcatgtacatactttataattcctatcctcaggaattatgtgcatgaataattgccccacaaagtagcatgggaaatgttctatataaatgttagttaaagagttatgaaagttcaaagaaaaagagaaacgttcagaaatagctttgtggagaaatgagcatttttaattcatctgtgaaggaggaaagaatatgggcatgtggagctttggaagccaaatatatgcccagtggagggatgggatgagatgaaggaaaatgttggaaagtaagtaactgtcatatccatttggttatttgaacttcggtaaatctcctgagatgtaatgactactgaatagcagcaagttttattggcattt

SEQ ID NO: 347762 - DNA, 584 bp, Homo sapiens
ccctttttactctatcatccggcctgaaagaactggtgatacaacctgtgtactgaagaactgatgatacaatctgtgtattggaattttgcaatgttttttagggatggcttttgtgatttacagtaaatctgatgattttcatgtgcaggttaatttaaaaaaacacaatcactttattttcacatttatgaagtgtcccatagctatatttttaaaattcatgtacatactttataattcctatcctcaggaattatgtgcatgaataattgccccacaaagtagcatgggaaatgttctatataaatgttagttaaagagttatgaaagttcaaagaaaaagagaaacgttcagaaatagctttgtggagaaatgagcatttttaattcatctgtgaaggaggaaagaatatgggcatgtggagctttggaagccaaatatatgcccagtggagggatgggatgagatgaaggaaaatgtkggaaagtaagtaactgtcatatccatttggttatttgaacttcggtaaatctcctgagatgtaatgactactgaatagcagcaagttttattggcattt

SEQ ID NO: 347763 - DNA, 584 bp, Homo sapiens
ccctttttactctatcatccggcctgaaagaactggtgatacaacctgtgtactgaagaactgatgatacaatctgtgtattggaattttgcaatgttttttagggatggcttttgtgatttacagtaaatctgatgattttcatgtgcaggttaatttaaaaaaacacaatcactttattttcacatttatgaagtgtcccatagctatatttttaaaattcatgtacatactttataattcctatcctcaggaattatgtgcatgaataattgccccacaaagtagcatgggaaatgttctatataaatgttagttaaagagttatgaaagttcaaagaaaaagagaaacgttcagaaatagctttgtggagaaatgagcatttttaattcatctgtgaaggaggaaagaatatgggcatgtggagctttggaagccaaatatatgcccagtggagggatgggatgagatgaaggaaaatgttggaaagtaagtaactgtcatatccatttggttatttgaacttcrgtaaatctcctgagatgtaatgactactgaatagcagcaagttttattggcattt

SEQ ID NO: 347764 - DNA, 385 bp, Homo sapiens
tccatatctcacatccagctcacactaatgcaagaggtggcttcccatggtctagggcagctccacccctgtggctttgcagggtatagcctccctcccggctgctttcatgggctgacgttgagtgtctgtggcccttccaagtgcacagtgcaagctgttgatgggtctatcattctggggtttggaggatggtggccctcttctcacagttccactaggcagtgccccagtggggacgctgcrtgggggctctgcctccacattttccttctgcactgaccagcagaggctctccatgagagccccacccctgtagcaaacttctgcctagaacatccaggcatttccatacatcctctgaaatataggtggaggttcccaa

SEQ ID NO: 347765 - DNA, 607 bp, Homo sapiens
acatctgtgtcctaaaaagcccagttcagtgattcacaatccctgccccacactcctacagcaagagaataatctctctagacatgccactcttgcatttgcacgcaaatgcgtaattgcttcctattgcctcgcctatcgaatttatattcttcaacctgattatccagatattctgccaagacccttgactctcttttctcatagctgaactcactggtattgctcacttctctcacagataatgtataagcaacaaaatctaagcccattcccagttcttcatccagaacatgcctctttctccgggccatagacattttattccctctctccttttctctgccagcatactctgcagatcctttcaaaygctcctgcataaaggagaaaccactcacctagctgctcattctttactcacaaaggcctcaggcctcaagctcatcctttaacttttatttctcttttcagcaaagagtgtgttggtacattcaccttccctccctaggttgaccagtttttctaactggaccccagacctttgatggttgttgctttttcagcttgccagctgcacctagtacagagttattcatcaggaata

SEQ ID NO: 347766 - DNA, 625 bp, Homo sapiens
tatgaaccaagtttaaagacaaatcacacactagaaaatgttatgtgcaattcaactgacatagagctagtattcataatacacaaacaatttctataaatcaatataaagaatccaatagaaaaatggaaattatatggagaggtaatttatagaagaagaaacctggatatgccaataaccatacaaagagttgctcacgctcactggttctcactacaaatttaaataaggaaataccatttcatatttaccccactggcaaaactgaaagtgtctgactgctgatgggactgtacagctgccgcagagagaaatttgacaattcctattgaattaaataaacatgtataaaccacagtactcagcaattccacttctagatatattcaatgtggaaaatccaacacaagtccacaatgaatcttgtgtaaggaggataattttagtacatattcgaagtggaaaattggaatgaacacaattwtttattaacgaaggaaagaatgaataaactaccaatgattaatcaagaggaatatattaaagtaattaaaatgtgtcaatatgaaaaagtccaaactataatactaaatgagtatttcatcaaagattatgtaccagg

SEQ ID NO: 347767 - DNA, 607 bp, Homo sapiens
acttgagatagatctggtttcaagyccaagccctactgcatgctagctctgtgtaaatattgagcaaatttgttaatctctctgagcctcagcttctcaccccctcccaataacacccacatttaaatgagaaaataaagtttttttacactttaaatttctggtggttctctccttctttgcgtcccacccttcctttctttctttacttccttctttccttttttattcattctttctatatgtactatgcttgctttgcctgttttataaaaagatttaaaaatcacatttgtgggaagtctaacttattttttttaaaggaaagataagctagaaaatttccatttgtttatggaaaaatcagaaaacaaaaacatcaacattctcaatatttagttttagaaatgtttatctatgagtcatttcaggcagggataaaaggactgaattcaccacagcctggacctcacttacagctggtagcatttggtgtcagctgttataaggatgaccaagttacttccaggaatattctccctccagaatgcaaagaggctcaccaaataatgtgcttccttctttgtggtaggagatgaataatgta

SEQ ID NO: 347768 - DNA, 607 bp, Homo sapiens
acttgagatagatctggtttcaagcccaagccctactgcatgctagctctgtgtaaatattgagcaaatttgttaatctctctgagcctcagcttctcaccccctcccaataacacccacatttaaatgagaaaataaagtttttttacactttaaatttctggtggttctctccttctttgcgtcccacccttcctttctttctttacttccttctttccttttttattcattctttctatatgtactatgcttgctttgcctgttttataaaaagatttaaaaatcacatttgtgggaagtctaacttattttttttaaaggaaagataagctagaaaatttccatttgtttatggaaaaatcagaaaacaaaaacatcaacattctcaatatttagttttagaaatgtttatctatgagtcatttcaggcagggataaaaggactgaattcaccacagcctggacctcacttacagctggtagcatttggtgtcagctgttrtaaggatgaccaagttacttccaggaatattctccctccagaatgcaaagaggctcaccaaataatgtgcttccttctttgtggtaggagatgaataatgta

SEQ ID NO: 347769 - DNA, 501 bp, Homo sapiens
tccctggttggcaacactttgttttgctacatttaaagctaacttgacatagctggaattttctcccaggatcttatttctttcagctttggggttacaaatccagtttcctagagtttcatttttatcccttacttcaatgtttaaaatcttccctccaaagccacctaatcaggctgagaggtcttgtcttcctttggttctgcccaatcccttttcatcaaccttcttttcctcaggcctttcacctgctcaggcatcgtgtgtgagcctgtaagtctcttctgattaactcgcctctgacctattaatgtgctcagtcattcctgcagcagttccattgtcaaaccagtgctccaaatgtattattttttyctatttctgccctcaatggagttcacttattttcaacccagggccttgatcttgttctcaagctatttgcttttctgccatcaagaggcaaacaaaaactaaccacaacattctaaaaacccaaat

SEQ ID NO: 347770 - DNA, 537 bp, Homo sapiens
gactataggttggcaccaccatgtctgatatatttatatatatatatatatatatatwttttttttttttttttttgagacagagtcttgctctgtcacccaggctggagtgcagtggtgcaatctcagctcactgtaacctctacctcccagcttcaagtgattctcatgcctcagcctcccacgtagctgggctacacgcacgtgccatattttcagtagagagggtttcaccatgttggccaggctggtctcaaactcctggcctcaagtgatcctcctccctcggactcccaaagtcctgggattacaggtatgagtcaccatactcagctgcaaaacagatttcctatctcacatttctgtaggtcagaaaaaggtaggttgtcttgactggtttctctattgtagatttcacaaggccaaaatcaagtggtcagccaactaggctttggttaggagagtctggagaagagtcgtattggggttgagtcaggctgttgttggcagaacattcattgcagttgtagaactgat

SEQ ID NO: 347771 - DNA, 557 bp, Homo sapiens
atttatctcttttagaaatgaggacaatctttccagactttttcattggccagaatcatcccacgtgatcacgccttgagcaatgaattgttgtggcaaagacagccactgatcagctaggaccaataaagactgtcccctgtagctatttctctagactcacatgaacactcaaaatggtgaacaaaagcagttatctgtctgcaagtaacatggaggaaatrtctactgggtaaatgtccagctgtgtctttcacagagagggaaaatatttatatgcttatcgtatggttcatgagtaataaaaaattctaaaacattggattagagacacaaagcagcagtaagaatctatcaatggttatctagcattttttaatgttctgaaagaattaatgtctttctttgcaattaaatgacaaagccttagttctttaaacaaatgcaaaaaacaaaacacagatcaaagagggccttgaaacaagaagtgagcatgccaggaaaatgtgatgaaataaagagtatgtaacatacagaggacgtgtacagcaaagata

SEQ ID NO: 347772 - DNA, 587 bp, Homo sapiens
aattgctctatcaaaaagacacatgcattcatacrttccttgcagcactatttataatagcaaagacacagaatcaacttaggtgcccatcaacagtggaatggataaagaaaacgtggtacatatacatcatagagtactatgcagctgtaaaaaaacagggaaatcatgccctttgccacaacatggatgcagccagaggccatcatcctaggtgaatattgacacagaaacagaaaaccaaatattgcacattctcatttgtaagagggagccaaacattgggcacacatggacataaagatgggagcaacagacactggagactactgcaggggagggagagaaagggaaaagggctgaaaaactacctactgggtattatgggcactacctgggtgaggagaataaattataccccaaaccttagtatcatgtaatatacccatgcaacagacaggcacatgtaccccctgaatctaaaaaaatgaaattagaaaaataaattggcctgccaagaaccacaacagagatagctctcctagctcttcattctgatttaaagatgtcttataaataccttttaa

SEQ ID NO: 347773 - DNA, 587 bp, Homo sapiens
aattgctctatcaaaaagacacatgcattcatacgttccttgcagcactatttataatagcaaagacacagaatcaacttaggtgcccatcaacagtggaatggataaagaaaacgtggtacatatacatcatagagtactatgcagctgtaaaaaaacagggaaatcatgccctttgccacaacatggatgcagccagaggccatcatcctaggtgaatattgacacagaaacagaaaaccaaatattgcacattctcatttgtaagagggagccaaacattgggcacacatggacataaagatgggagcaacagacactggagactactgcaggggagggagagaaagggaaaagggctgaaaaactacctactgggtattatgggcactacctgggtgaggagaataaattataccccaaaccttagtatcatgtaatatacccatgcaacagacaggcacatgtaccccctgaatctaaaaaaatgaaattagaaaaataaattggcctgccaagaaccasaacagagatagctctcctagctcttcattctgatttaaagatgtcttataaataccttttaa

SEQ ID NO: 347774 - DNA, 587 bp, Homo sapiens
aattgctctatcaaaaagacacatgcattcatacgttccttgcagcactatttataatagcaaagacacagaatcaacttaggtgcccatcaacagtggaatggataaagaaaacgtggtacatatacatcatagagtactatgcagctgtaaaaaaacagggaaatcatgccctttgccacaacatggatgcagccagaggccatcatcctaggtgaatattgacacagaaacagaaaaccaaatattgcacattctcatttgtaagagggagccaaacattgggcacacatggacataaagatgggagcaacagacactggagactactgcaggggagggagagaaagggaaaagggctgaaaaactacctactgggtattatgggcactacctgggtgaggagaataaattataccccaaaccttagtatcatgtaatatacccatgcaacagacaggcacatgtaccccctgaatctaaaaaaatgaaattagaaaaataaattggcctgccaagaaccacwacagagatagctctcctagctcttcattctgatttaaagatgtcttataaataccttttaa

SEQ ID NO: 347775 - DNA, 556 bp, Homo sapiens
gagcttacaggcagctcataagacaaacagcgatttttatagtttttactagatcttgaattacctttactcacagccagatgaaagctcaataccacagatttctcctaktaggacaggcagctaaccagataatgcttcttgagttatggggaggcgtaagccactactactttataatttaggatttatatcccatttactttcaaaatacctaagaactccaagattagaaatagagagagtggatgcattatggcctctgaattaagcaggtgatagcacttggactacagtttaattctgtgctgaacataacagtttctgtgaaaatgtgatttgagctaaactgcttttgaaccttgagagaatatttaagcctatcagttactcataccttagtgtgaatcatttaagcaaattattgctcttctctgtaatactttgctgacatcagatactgtggaaataagaatgttgataggacagagaattttataatttacatctggtcttagtccattcagggtgctataacagaataccatattctggg

SEQ ID NO: 347776 - DNA, 556 bp, Homo sapiens
gagcttacaggcagctcataagacaaacagcgatttttatagtttttactagatcttgaattacctttactcacagccagatgaaagctcaataccacagatttctcctattaggacaggcagctaaccagataatgcttcttgagttatggkgaggcgtaagccactactactttataatttaggatttatatcccatttactttcaaaatacctaagaactccaagattagaaatagagagagtggatgcattatggcctctgaattaagcaggtgatagcacttggactacagtttaattctgtgctgaacataacagtttctgtgaaaatgtgatttgagctaaactgcttttgaaccttgagagaatatttaagcctatcagttactcataccttagtgtgaatcatttaagcaaattattgctcttctctgtaatactttgctgacatcagatactgtggaaataagaatgttgataggacagagaattttataatttacatctggtcttagtccattcagggtgctataacagaataccatattctggg

SEQ ID NO: 347777 - DNA, 556 bp, Homo sapiens
gagcttacaggcagctcataagacaaacagcgatttttatagtttttactagatcttgaattacctttactcacagccagatgaaagctcaataccacagatttctcctattaggacaggcagctaaccagataatgcttcttgagttatggggaggcgtaagccactactactttataatttaggatttatatcccatttactttcaaaatacctaagaactccaagattagaaatagagagagtggatgcattatggcctctgaattaagcaggtgatagcacttggactacagtttaattctgtkctgaacataacagtttctgtgaaaatgtgatttgagctaaactgcttttgaaccttgagagaatatttaagcctatcagttactcataccttagtgtgaatcatttaagcaaattattgctcttctctgtaatactttgctgacatcagatactgtggaaataagaatgttgataggacagagaattttataatttacatctggtcttagtccattcagggtgctataacagaataccatattctggg

SEQ ID NO: 347778 - DNA, 571 bp, Homo sapiens
cagcatttctttagactagcctattgtgactctctaaatcactatttcccagttatgaaaatctcatacactctccatatcattctactttttttttgcagaacataatgaagtagtatatataataagctcattttaatttttttaaaaaaggatttacttattagtactacaaaatactaaattaaagcaaacttcataataacacaccttaaacaattatttttttttagagacagggtctctctctggcacccaggctgaagggccactgcaccttgactcttcagctcaagtgatcctcccttctcagccttcctagtaactaggaatacaggtatgcaccaccatacctagcttttttttttttttttttwaatttttggaaaaggagggttctcattatgttgcccaggctggttccaaactcctgggctcaagtaatcctgccatctcagcctcccaaagtgttgggattacaggggggggccattgctcctggccttaaataacatattataccaagataaaaatgtaagaccaatttgtatttttcccacctaacaaatga

SEQ ID NO: 347779 - DNA, 571 bp, Homo sapiens
cagcatttctttagactagcctattgtgactctctaaatcactatttcccagttatgaaaatctcatacactctccatatcattctactttttttttgcagaacataatgaagtagtatatataataagctcattttaatttttttaaaaaaggatttacttattagtactacaaaatactaaattaaagcaaacttcataataacacaccttaaacaattatttttttttagagacagggtctctctctggcacccaggctgaagggccactgcaccttgactcttcagctcaagtgatcctcccttctcagccttcctagtaactaggaatacaggtatgcaccaccatacctagcttttttttttttttttttaaatttttggaaaaggagggttctcattatgttgcccaggctggttccaaactcctgggctcaagtaatcctgccatctcagcctcccaaagtgttgggattacaggkgggggccattgctcctggccttaaataacatattataccaagataaaaatgtaagaccaatttgtatttttcccacctaacaaatga

SEQ ID NO: 347780 - DNA, 571 bp, Homo sapiens
cagcatttctttagactagcctattgtgactctctaaatcactatttcccagttatgaaaatctcatacactctccatatcattctactttttttttgcagaacataatgaagtagtatatataataagctcattttaatttttttaaaaaaggatttacttattagtactacaaaatactaaattaaagcaaacttcataataacacaccttaaacaattatttttttttagagacagggtctctctctggcacccaggctgaagggccactgcaccttgactcttcagctcaagtgatcctcccttctcagccttcctagtaactaggaatacaggtatgcaccaccatacctagcttttttttttttttttttaaatttttggaaaaggagggttctcattatgttgcccaggctggttccaaactcctgggctcaagtaatcctgccatctcagcctcccaaagtgttgggattacaggggkgggccattgctcctggccttaaataacatattataccaagataaaaatgtaagaccaatttgtatttttcccacctaacaaatga

SEQ ID NO: 347781 - DNA, 548 bp, Homo sapiens
aataaaattacaaagcattaaaacaagctccagatttcgttcttcataattctaaataaagaaggtttaaaacttaatcgcatatggagtagaattaatctcacttggtttagtttacattgtcaataaataaaattcttgagagtatcctttcattttctcaagcaatttatttttctcattttaggaaatgttcacaatttacaaactaatgtggcaagaaaattattctaaaagcataaaagtcaatgtcttaaaaagtaaagacatcaaagcaacattcaaacagtcctactagtctctcaatttcttcgtctgtaaaatgggatcacagtgaagtaagttactaattgccaaatgtgttatatatttcttgtctcacctwcctgccagaagtataagatttgtgaagtcatagttcaaaacagatagaaaataaagtaagttattaataaaccacaataatgggcttcttagcgttcctttggagaaatttaatgagatgaggtagaacttgctgattcaaaagcttggacagaccatgtcta

SEQ ID NO: 347782 - DNA, 545 bp, Homo sapiens
gaaacatactctaagaccaaccacaggctcagccataatgcaagtcttgataaataaaaaaaacttgaaatcataccaaccatactctcagatcacagtgtaacagaaatagaaatcaataccaagaagatctctcaaaacyacacaattacatgaaaattaaacagcttgcatttgaatgaatgttgtgtaaacaaaattaaggcagaaatcaaaaaattgttttgagataaatgaaaacagtgatacaacgtatcaaagtgagcgagtcacttgagctcatgaatttgagatcagcctgtgcaacacagcaaaaccccatctttacaaaaaatacaaaaattggctgagtatggtggtacacacctgtagtctcagctaattgtcagggctgaggctggaggatcgcttaagctcaggaggtcaaagctgcagccagccttgtttgtactactgatctccaccctagactgagtgacaaagtgagatcctgtctcaaaaaaaggggtggggggctgacaacaccaaatgatacacaagatcaa

SEQ ID NO: 347783 - DNA, 545 bp, Homo sapiens
gaaacatactctaagaccaaccacaggctcagccataatgcaagtcttgataaataaaaaaaacttgaaatcataccaaccatactctcagatcacagtgtaacagaaatagaaatcaataccaagaagatctctcaaaaccacacaattacatgaaaattaaacagcttgcatttgaatgaatgttgtgtaaacaaaattaaggcagaaatcaaaaaattgttttgagataaatgaaaacagtgatacaacgtatcaaagtgagcgagtcacttgagctcatgaatttgagatcagcctgtgcaacacagcaaaaccccatctttacaaaaaatacaaaaattggctgrgtatggtggtacacacctgtagtctcagctaattgtcagggctgaggctggaggatcgcttaagctcaggaggtcaaagctgcagccagccttgtttgtactactgatctccaccctagactgagtgacaaagtgagatcctgtctcaaaaaaaggggtggggggctgacaacaccaaatgatacacaagatcaa

SEQ ID NO: 347784 - DNA, 506 bp, Homo sapiens
aattaaaaccacggtgagacatcactacaaacttatcacaatggctaaaataaaaacagtgaagaaccaaattgcaaaaacactggatcactcattgtattattctcctagagcaatcataacaaaatactacagactgggtagtttaaacagcaaaatgtcttttcttacagttccggaggttagaagtccacgattaaggtgtcagcaggtttggtttcttctgaggcctcttactttggcttgcaggtactgccttttctctgtgccctttcatggtctttcctttgtgtgcacatatccctggtgtstgtgtgtccaaatttcttcttttaaggacaccagtcagatggattaggggccactctaaagacccaatttcaactaaaatcactttttaaaagacctgtttccaaatacaatcacactctgaggtactaggggttagagcttcacacaacctatgaaatttgtggggatataattccacctttaacattcatata

SEQ ID NO: 347785 - DNA, 651 bp, Homo sapiens
ggctttcccctcctttgctctgcacttcttcctgccatcatgtgaagaaggacgtgtttgcttccctttccaccatgattgtaagtttcatgaggcttctccagccctgtggaactatgagtcaattaaacctcttccctttataaattacccaatctggggtgtgtctttattaacagcaggagaaggaagtaatatgccatccttttgggctttttatggagactttatgatgcaggcatgattggttaaatcattagccattggtgattatgctatagtctgaatgcatgtatgctcccaaaatcatacattggctcctaagagccaatgtgatatgatagtattaagaggtggggccttttgggaagtgatcaagtcaggagcactctgctcttatgagtgggattagttcttttagaaaggaacttgatgggagctctgtagtcttttcagccccttcctccatgtaaggacccagccacaggcaccatctctggagcagagcaagccctcatgcaacactgaattggcagatgccttgatttggacttcccagtctcgagaactgcaagaaaagaatttctattatttacaaaktacccaggataagatagatattttatcatagcaacatgaaaggataagaca

SEQ ID NO: 347786 - DNA, 565 bp, Homo sapiens
cactcttgtttttactggcactctgaattttctcattggcctccctttgccaagctttgaagcaaagaaatcaaacaagtaggacattcaggtggstggtcactggacttgggaaattctaaaataaagcaactgatgaatagcacatagtttcaaaggggcttttcagctgcaagacatatagatccaggtatgttggtgtaagcctcaaagaatctcctagcattatgagggacataatcaaaggagattaggaacatgaatccaaggcttagaaatcattctcttgaaagagtgtggaatcactcactagagtatggaattagagacttattagtctgagtttacagtttggctctgtcacataatagctgggtataaaaattcctacttcatgtggttggtagaggaattaattaaattgcattctagttaccagcaggggagacaggggagaagaaagttggacatgaagcagtggaaagcaaggacaaactggagctttctaggataactgggcactcatggagagtattggaactagaaatactctccagtactcatg

SEQ ID NO: 347787 - DNA, 525 bp, Homo sapiens
acgaaagtaatccagattgcctttcatgcagcaaaccatttacaagaaaaccacacgtgtgcacagagcraaaaagccctcctattgaaattgccattgttcagaagaagagtaactttaaatccctaactgaaggtgaactgggtcaggaattgtgcaagttagcactgccaagggactcaagactcttctagggaggcttcaaatacattttctgagattcccatgagtagacattttgcttaatgtagcctgaatttactatatctctgagctattctccctagaatagtaaatgtgagaaataatgaaataagaaatgaaggttccacatcagtaatattatattttgttataattttaattgccatttaacacttagctcaccatgttgattgaaggagagaaaatgcttcaattttgtcatcactgacaacatttaactgacaacatttaacaggcttaaaatctatatgtcaaataagagatgaaataactaaatgcaattcatctccataagttacc

SEQ ID NO: 347788 - DNA, 596 bp, Homo sapiens
ttttcacagcaaaattgagtacagaaatttcccatatacctcctgcccctgcatatgtacagcctcccccattattaacatcctcaccagagtgatagattttttacaatttatgaacctacattgacacatcattatcacccaaagtcgacagtttrcattagggttcacgcttgatattgcatattctatgggtttggatgaatgtataatgccatgtatctaccatcgtaatataacacagtaggttcactgccctaaaaatcctctgagctccacctattcatccctccctaacccctggcaacacctaatatttttactgtctccatagctttgcctgttccagaatgtcatccttatagttgaaatcatcttctaagcgttttgtagttttgcattttactagatttaatttttaagaagagttttttatttacggaagaacctgagcagagtacagataactgccatgtaaccctctatatttgattttaatgatgataaaatcttttattattttataggggaaaaacagaaaagaaagactcaaatcctatttttcaaaaagatagaagacaattggtttagttctc

SEQ ID NO: 347789 - DNA, 605 bp, Homo sapiens
ttgaataaccataaacacaccaatccctatagtttccagagatgaatcaaccttgtattcatcaggtttccctagagaaagagaaccaataggatggatagatgattgatagatagatagatagatagatagatagatagatagatagatagaataaatgaatgagtagaaggtaagtaggtaagtaggtaggtaggtaggtagagagatagatggatatagagatagatgaatagatatagatatatagatagatatgatggatggatgaagaagtatatgtgatagatgaatagctaggtagctgaatagatagatctgatagctagctggatagatagttaaatgtgattgatgaatagagagatagatatgatagatggatagctaagtggctggataaacagatctgatagctagctggatgaatagatagatagatagatagatagatagatagatagatagatagacagacagacagacagacagatagatagaatacatgaatagataggtgatagatagacaagtagagagagakatggagagatggatagagagatagagaaacggggatttattggaggagttggctcagacaa

SEQ ID NO: 347790 - DNA, 606 bp, Homo sapiens
tctaaacatatgcacacccaacactggagcacccagattcctaaaacaagttcttctcgacctacaaaaagacttagccacacaataacattggaagatttcagtaccccaatgacaatgttagataatcatcaaggcagaaaactgacaaagaaactctggacttaaactcaacatttgcctatttggacctaatggatatctacagaacactgtacccaacaactgcagaatatgcattctcctcatccgcaaacagaacattttctaagtttggccacatgctcagtcataaagcaagtgttaatgatttttaaaaaaatcaaaatcataccaagcacactcttgaaccacagtgcaataaaaccagaagtcratatcaagaaggtctctcaaaactatgcaaatacatggaaattaaacaacttgttcctgaatgactcctgggtgaacatcaaaattaaggcagaaatcaaaaaattatttgaaatttatgaaaacagaaacacaacttgccaaaatctctaggatacagctgaagtaataagaggaaagtttgtagcgttaaacatcttcatcgagaagttagaaagatctcaaattaac

SEQ ID NO: 347791 - DNA, 459 bp, Homo sapiens
tctattgggtcctgacagggaccaagtggtcagctctctgggcttcagtggtgacttccagcaggacaagcagtgaccaggagacctttaggrtgcacttcccaggagaacatgggagccagagaggctgtgttcagacaccctgactatccctctcatcgagttaggacaattcacacacatgaccttccatgtacctagagatcagtatagtggtaccattcagagaacagaccatagcaagtgtgagagactgagattaacctcataacaattccaaaccagatgagattaaagaataattatcctctaaaacaagggtggagtatcccttatccaaaaatccaaaatccataatgctccaaaatccagaactttttgagcaccaacatgactctcaaaggaaatgctcattagagtattttggatttttgattttcagattagaaatgctcaacc

SEQ ID NO: 347792 - DNA, 634 bp, Homo sapiens
cagagacttttatggcagcccctcccatcacaggcccagaggcctagaaggaaagaatggatttgtgggccagacttagggttctgctgccttgcttaacctcaggatactgctccttgcatcccagccactccacctccagccatggctaaaatggtcccagataagtctcaggctgctgttccagaggatgcaagccataagccttgctggcttccgtgtggtgttaagccagcaagtgtgcagagggcaatagttgaggcttggggccctccacctagattccaggggatgtatgggaatgcctggatatccaggcagaagtckgctgtaggggtggagccctcatggacaacctctactagggcaatgcagaggggaaacatggtgttgaagcccccacacagagtccccactggggcactgactagtggagctctaagaagaggccaccatcctccagaacccagaatggtaggtccatcgatagcttgcatcatgcacctagaaaagctgtaggcactcaaagccagcctatgaaagcagctgagggggccatatcctgcagaaacacaggggtagagatgcccaagcccttgggaggtcacctttgcaccagtgtggcctatatgtg

SEQ ID NO: 347793 - DNA, 634 bp, Homo sapiens
cagagacttttatggcagcccctcccatcacaggcccagaggcctagaaggaaagaatggatttgtgggccagacttagggttctgctgccttgcttaacctcaggatactgctccttgcatcccagccactccacctccagccatggctaaaatggtcccagataagtctcaggctgctgttccagaggatgcaagccataagccttgctggcttccgtgtggtgttaagccagcaagtgtgcagagggcaatagttgaggcttggggccctccacctagattccaggggatgtatgggaatgcctggatatccaggcagaagtcggctgtaggggtggagccctcatggacaacctctactagggcaatgcagaggggaaacatggtgttgaagcccccacacagagtccccactggggcactgactagtggagctctragaagaggccaccatcctccagaacccagaatggtaggtccatcgatagcttgcatcatgcacctagaaaagctgtaggcactcaaagccagcctatgaaagcagctgagggggccatatcctgcagaaacacaggggtagagatgcccaagcccttgggaggtcacctttgcaccagtgtggcctatatgtg

SEQ ID NO: 347794 - DNA, 581 bp, Homo sapiens
ctttctgtacagcctgtggaaccatgagtcaattaaacttcttttctttataaattacccagtctcatgtatctctctgtagcaaygcaagaatgatcaaatacacctagaaagacacatatagactaaaaataaaaggtggaaaaagatattccaggaaagtgaaagcaaaaagagcagatgtgtctataattatatatgataaaatagatttcatgacaaaatccatgaaaagggaaaaatatgtcatttataatgctaaatgtgtcatttcagtaagagaatataataattgtaaatgcatatgcatttgtacacccagacatataaattaaacattattagagccaatgatagatcacaatacaatgacagtagggaacctcaatacctcactttcagcattgggcagaacatcaagaccaaaaattaacaaagacacaacagactgaatctgcattctggaacaaatggacctaatagatatttacagaacatttcatccaatcagtgtacaatacacattattttcatcacacttaactttgtcatggacagacgatatgttaggtcacaaaaca

SEQ ID NO: 347795 - DNA, 581 bp, Homo sapiens
ctttctgtacagcctgtggaaccatgagtcaattaaacttcttttctttataaattacccagtctcatgtatctctctgtagcaatgcaagaatgatcaaatacacctagaaagacacatatagactaaaaataaaaggtggaaaaagatattccaggaaagtgaaagcaaaaagagcagatgtgtctataattatatatgataaaatagatttcatgacaaaatccatgaaaagggaaaaatatgtcatttataatgctaaatgtgtcatttcagtaagagaatataataattgtaaatgcatatgcayttgtacacccagacatataaattaaacattattagagccaatgatagatcacaatacaatgacagtagggaacctcaatacctcactttcagcattgggcagaacatcaagaccaaaaattaacaaagacacaacagactgaatctgcattctggaacaaatggacctaatagatatttacagaacatttcatccaatcagtgtacaatacacattattttcatcacacttaactttgtcatggacagacgatatgttaggtcacaaaaca

SEQ ID NO: 347796 - DNA, 612 bp, Homo sapiens
cttgggctgttgtgttagttcgttttcacatgcggataaagacatacccgagactgggaagaaaaaataggtttgatggacctacagttccacatggctaggaaagcckcacaatcatggtggaaggcaaggaggagcaaatcacatcttacatgtatggcagcaggcaaaaagagagcttgtgcagggaaactcccattttttaaaaccatcagatcttgtgaaactcattcactatcacgagaaacagttcaggaaagacctgccccataattcaatcacatcccacaaggttcctcccacaacacgtgggaattgtgggaatgacaatacaagatgggatttcatgggaacagagctaaaccatatcagctgccataacaaaattaccatggactgggtgttgtagacaacagaaatttattttctcacttttctggaaatggggacatctaagatgattcagtttcttgtgagaactctttctagcttgcagatggcctcactgtgttctcaggagagaaagggagagatcatcctcttctcattggattagggacacatcctcatgacttcattaaaccttaattacctcctaaaattcctatctcc

SEQ ID NO: 347797 - DNA, 520 bp, Homo sapiens
tttctttttccatctttacaatttcatggataaaagattgtcttttccatagatgttagcaacctttgaatatgatgtttttctcttttctcattaagtcaataactttcattttttccacttaaagaatgcacgtatggcttctgcttgggatatcaaaattactcttgtgctttgkggcgattattaagttaaataaagattatctaaacacaaggactgcagtaccagaaaagttaacctgagaaccaagatggctactaagtgactaaagtgatgggcagtgtctacagcatggatctgctaaacaaaagtttgatttatgtcccaggcaggactgagttgaatggcatgagatttcatcatgctacacagaatggtgcacaatttaaaatgtatgaatatttctgaaatttttcatttaatgtttttgcatcatggttggtcttgtataactgaaaccatgaaaaaccaaacagctgatatgggggaactactgtagatatgcaggtggtggggg

SEQ ID NO: 347798 - DNA, 520 bp, Homo sapiens
tttctttttccatctttacaatttcatggataaaagattgtcttttccatagatgttagcaacctttgaatatgatgtttttctcttttctcattaagtcaataactttcattttttccacttaaagaatgcacgtatggcttctgcttgggatatcaaaattactcttgtgctttgtggcsattattaagttaaataaagattatctaaacacaaggactgcagtaccagaaaagttaacctgagaaccaagatggctactaagtgactaaagtgatgggcagtgtctacagcatggatctgctaaacaaaagtttgatttatgtcccaggcaggactgagttgaatggcatgagatttcatcatgctacacagaatggtgcacaatttaaaatgtatgaatatttctgaaatttttcatttaatgtttttgcatcatggttggtcttgtataactgaaaccatgaaaaaccaaacagctgatatgggggaactactgtagatatgcaggtggtggggg

SEQ ID NO: 347799 - DNA, 520 bp, Homo sapiens
tttctttttccatctttacaatttcatggataaaagattgtcttttccatagatgttagcaacctttgaatatgatgtttttctcttttctcattaagtcaataactttcattttttccacttaaagaatgcacgtatggcttctgcttgggatatcaaaattactcttgtgctttgtggcgattattaagttaaataaagattatctaaacacaaggactgcagtaccagaaaagttaacctgagaaccaagatggctactaagtgactaaagtgatgggcagtgtctacagcatggatctgctaaacaaaagtttgatttatgtcccaggcaggactgagttgaatggcatgagatttcatcatgctacacagaatggtgcacaatttaaaatgtatgaatatttctgaaatttttcatttaatgtttttgcatcatggttggtcttgkataactgaaaccatgaaaaaccaaacagctgatatgggggaactactgtagatatgcaggtggtggggg

SEQ ID NO: 347800 - DNA, 626 bp, Homo sapiens
tgcaggtggtgggggtaataaactatcttaagccaaaacttatgtttrgacctatatggttaaaataggaataagccaatttagtatcccttttaaaagggactgatttctttttcctaaaagaaaaagtgtaaggcaaacttgacacagttaatagaaacatttttgttcttagcaagatgattaattttgaccacatcaacattgacatctccagtttatctctaggaacagctactaatataatcatatccatatccaattaagggcaggttgagatgaggagtgtattgaaaactaaatgcacttaagttattaggatataaattctttttatttgaatagatactgtttacttttcacacaataggatttacaaccaaaactttcagtttacagaagtgtttctttttatccagagatattggaaaagaggcacacgcagaccagcacacatcatgagcaacaaaaagaacatattctagaattaagcaaacaaacaaacaaaaacactagagtacatggaggtcaaggaacatttaaatcaaattaaaccagctttttccaataactttctgtggtagatactcaagatttctttggaatttaaggaaaaagcaatgtca

SEQ ID NO: 347801 - DNA, 626 bp, Homo sapiens
tgcaggtggtgggggtaataaactatcttaagccaaaacttatgtttggacctatatggttaaaataggaataagccaatttagtatcccttttaaaagggactgatttctttttcctaaaagaaaaagtgtaaggcaaacttgacacagttaatagaaacatttttgttcttagcaagatgattaattttgaccacatcaacattgacatctccagtttatctctaggaacagctactaatataatcatatccatatccaattaagggcaggttgagatgaggagtgtattgaaaactaaatgcacttaagttattaggatataaattctttttatttgaatagatactgtttacttttcacacaataggatttacaaccaraactttcagtttacagaagtgtttctttttatccagagatattggaaaagaggcacacgcagaccagcacacatcatgagcaacaaaaagaacatattctagaattaagcaaacaaacaaacaaaaacactagagtacatggaggtcaaggaacatttaaatcaaattaaaccagctttttccaataactttctgtggtagatactcaagatttctttggaatttaaggaaaaagcaatgtca

SEQ ID NO: 347802 - DNA, 577 bp, Homo sapiens
ttctttttatccagagatattggaaaagaggcacacgcagaccagcacacatcatgagcaacaaaaagaacatattctagaattaagcaaacaaacaaacaaaaacactagagtacatggaggtcaaggaacatttaaatcaaattaaaccagctttttccaataactttctgtggtagatactcaagatttctttggaatttaaggaaaaagcaatgtcatattccgcaacgttaaatgtcaaatccgaatacgctaatacatttaattcattgtgtagaatatctaattctcaatatcttactctgttctagtaaaaggtgattcagaattgggctttgaaatttaggcattgacgataaaaccttatcaaaagtaaattataataaaggtagactttcctgaagatcaaaggaaataaaggaataaagaaacacttgaacctgatccygtgagtatgaaagtggtaagcaaatgggttggtattatctcaatatgtttaaaacttgaagcatgctcttgataaaaacaagttattaatgtttcttaactaagcaatccttatacattagcaaaa

SEQ ID NO: 347803 - DNA, 540 bp, Homo sapiens
aaattactaatccttaacaaataaaactgttcgtacaaattgacaggtagccttttctacctatacctctattgcccacagacggaagaacactctcctattcttaaatatgaaaagctcattcgtaataacctaatgaagtttcatgttttgattcttcaaggagtatttgaatctcctgtcattactgctctaatttataacctctctcattcacagctccatctcgtccttctctaattaacaaacacatctagtttctttcattttactcatcatattgcacagcaattatttttgtctttctcttttactatattataattcctttatcagcagaaacattatttgattgcatattartgcaacttatctttcaaatatgtaacagcacttatgacatagctgatggttaaatatttgtttaataaggcatataaggcattttgcagaactcaatctccaacatattgtgtttcattcttctgctcacattttgtatctgtttcctagcaccgccatattaaggtaccataaggt

SEQ ID NO: 347804 - DNA, 546 bp, Homo sapiens
atcagcctgttctttaaagatttgaagccaggcattgccttctttccagctgtggaagttctagatggcacctatttccaatagaaggctgttttatctatacttaagtatagccatatttatcaattgtcttatttagagcttctgaataacttgctgcagcttttccatctgcagttgctgcctcactttgcactttgaagttatagaggcagcttctttacttaaacctcatgaatcaatctctgttagtttccaacttttcttctgcagcttcaccagctttcccagctttcatagaattaaagagttaccattctgctcttcattaggctttggcttaagggaatgttatccctggtttgatctatccagagtaccaaactttcttcatgtcaccaataaggctgttttgctttcttgcaakgcatacgtggaataacacttttaatttcattttataacttatttacattcagagcttggttatctgatgcaagaatcctagcttttggcccatctcatgccttcctcattaagctcaat

SEQ ID NO: 347805 - DNA, 607 bp, Homo sapiens
taagcagccaactccagaaaccccaaaaccaacaaaagaacttcatccttaatattctgttcctctagaaacacgccttttaccaaaatctgtatttgtcagggttgtctagagggacagaactaataggatatataaatatcctggagtttattaagtggtattaacttacacaatcacaaatcccacaataggctgtctgcaagctgaagagcaaggaagccagtccgagtcccaaagctgaagaacctggagtccagtgtttgagggcaggaagcatccagcacaggagaaagatgyaagctggaaggctaagccagtctagccttttcacgttttttttctgcctgctttgtattttggctgtgctggcagctgattggatggtgtccacccagattaagtgcctttcccagcccactgactcaaatgttaatctcctttgtcagcacccttacagacacactcatgatcaatactttgcattcttcaatccagtcaattgacactcagtattaaccatcacgtgccttgaagaaacaaaatgtaacactgtagtaagttattaataatgagttgttgacatttgaaaacagaagagagtgtt

SEQ ID NO: 347806 - DNA, 607 bp, Homo sapiens
tggtacttgctatggattggccacccaaatctcatcttgaattgtagctcccaaaatccccgtgtttcatgggagtgactcagtgagaagtaattgaatcatgggggcaggtttttactattctgttcttatgayagtgaatatgtgttatgagatctgatggttttataaagggcagtttacctgcaaatgctctcttgcctgctgccatgtaaggcatgtttttgctcctccttcaccttccaccatgattgtgaggtatccccagtgatgtgaaactgtgagcccattaaacttcttttttcttataaattactcagtctcaggtatatctttattagcagtgtgaggacagactaatacagtattttttccttaaaaaggacactttatcgaggtgaatgtcttagagatctgctgtacagcctagtgcctctagttaggaatactataacatatatttaacattttaatgaaataatacttcttatgtagtattctcatgacaaaacataataataatgaataaagagaaagaaaacttttggaagtgaaggagacgtttacagcatggattgtgataacttctcaggtatagacttgtctc

SEQ ID NO: 347807 - DNA, 607 bp, Homo sapiens
tggtacttgctatggattggccacccaaatctcatcttgaattgtagctcccaaaatccccgtgtttcatgggagtgactcagtgagaagtaattgaatcatgggggcaggtttttactattctgttcttatgatagtgaatatgtgttatgagatctgatggttttataaagggcartttacctgcaaatgctctcttgcctgctgccatgtaaggcatgtttttgctcctccttcaccttccaccatgattgtgaggtatccccagtgatgtgaaactgtgagcccattaaacttcttttttcttataaattactcagtctcaggtatatctttattagcagtgtgaggacagactaatacagtattttttccttaaaaaggacactttatcgaggtgaatgtcttagagatctgctgtacagcctagtgcctctagttaggaatactataacatatatttaacattttaatgaaataatacttcttatgtagtattctcatgacaaaacataataataatgaataaagagaaagaaaacttttggaagtgaaggagacgtttacagcatggattgtgataacttctcaggtatagacttgtctc

SEQ ID NO: 347808 - DNA, 607 bp, Homo sapiens
tggtacttgctatggattggccacccaaatctcatcttgaattgtagctcccaaaatccccgtgtttcatgggagtgactcagtgagaagtaattgaatcatgggggcaggtttttactattctgttcttatgatagtgaatatgtgttatgagatctgatggttttataaagggcagtttacctgcaaatgctctcttgcctgctgccatgtaaggcatgtttttgctcctccttcaccttccaccatgattgtgaggtatccccagtgatgtgaaactgtgagcccattaaacttcttttttcttataaattactcagtctcaggtatatctttattagcagtgtgaggacagactaatacagtattttttccttaaaaaggacactttatcgaggtgaatgtcttagagatctgctgtacagcctagtgcctctagttaggaatactataacatatatttaacattttaatgaaataatacttcttatgtagtattctcatsacaaaacataataataatgaataaagagaaagaaaacttttggaagtgaaggagacgtttacagcatggattgtgataacttctcaggtatagacttgtctc

SEQ ID NO: 347809 - DNA, 607 bp, Homo sapiens
tggtacttgctatggattggccacccaaatctcatcttgaattgtagctcccaaaatccccgtgtttcatgggagtgactcagtgagaagtaattgaatcatgggggcaggtttttactattctgttcttatgatagtgaatatgtgttatgagatctgatggttttataaagggcagtttacctgcaaatgctctcttgcctgctgccatgtaaggcatgtttttgctcctccttcaccttccaccatgattgtgaggtatccccagtgatgtgaaactgtgagcccattaaacttcttttttcttataaattactcagtctcaggtatatctttattagcagtgtgaggacagactaatacagtattttttccttaaaaaggacactttatcgaggtgaatgtcttagagatctgctgtacagcctagtgcctctagttaggaatactataacatatatttaacattttaatgaaataatacttcttatgtagtattctcatgacaaaacataataataaygaataaagagaaagaaaacttttggaagtgaaggagacgtttacagcatggattgtgataacttctcaggtatagacttgtctc

SEQ ID NO: 347810 - DNA, 578 bp, Homo sapiens
tggcatgattatagcttattgcagccttggcttgcagagctcaagtgatcctcctttctcagcctcctgagtagctgtgattacaggtgtgaatcaccgggcgtgatggctcatgcctgtaataccagcastttgagaggccaaggagggcagatcacgaggtcaagagattgagaccagcctggccaacatggagaaaccccatctctagtaaaaatacaaaaattacctgtgcgtggtggcgcgcctgtagtcacagctactcaggaggctgacggaggcgaatcacttgaacctgggaggtggaggttgcagtgagctgagatcgcaccactgcactccagcctggcaactgagaaatattctgtctcaaaaaacaaacaaacaaacaaaacaatgtagagaaagggtcttgatattttgcccaagctggtctcaaactcctgacctcaagcatttgtcccaccttggactcccaacctctgggactatatgcataagccaccatgcctggccagaaacgtttgtctttttacactgctgtacccctaggaccaagaacagtaccagaaatgagg

SEQ ID NO: 347811 - DNA, 578 bp, Homo sapiens
tggcatgattatagcttattgcagccttggcttgcagagctcaagtgatcctcctttctcagcctcctgagtagctgtgattacaggtgtgaatcaccgggcgtgatggctcatgcctgtaataccagcagtttgagaggccaaggagggcagatcacgaggtcaagagattgagaccagcctggccaacatggagaaaccccatctctagtaaaaatacaaaaattacctgtgcgtggtggcgcgcctgtagtcacagctactcaggaggctgacggaggcgaatcacttgaacctgggaggtggaggttgcagtgagctgagatcgcaccactgcactccagcctggcaactgagaaatattctgtctcaaaaaacaaacaaacaaacaaaacaatgtagagaaagggtctygatattttgcccaagctggtctcaaactcctgacctcaagcatttgtcccaccttggactcccaacctctgggactatatgcataagccaccatgcctggccagaaacgtttgtctttttacactgctgtacccctaggaccaagaacagtaccagaaatgagg

SEQ ID NO: 347812 - DNA, 593 bp, Homo sapiens
aagaaaaataagttatgctcaatgaatttaattcattcagtgatctcccaagtccccagattcagcaaaattctattgaaaacaaatttgaagcagtctcaagaaaacggaagcctggaaaatcccgcccctggttttgccagttgtgtagaactctgttttccaaagctacttacttgaaataagacttctgatttaaagaaagtttaagagggcttttctatgataaaaaataattttctactaagttgagaaacatgctataaattatgataataattgtttttatggagtttgatacatatgttctgaccataatttaaattaaattaggctgctgtggataaaaatattaaaaatgccctaggagatgtgtaaatgggtctataatattcaaagagacaaagactgattaagatagcacggttgagtaaatttaactttctaagctcaacgaaaatttcccaacataaaatgttttwttaattctataagaaattataaaatcaagataaaaccattaaagtacaaagtctaatgctgaaaatctattttaaaagctacaatagtttccttaggttttagttataata

SEQ ID NO: 347813 - DNA, 522 bp, Homo sapiens
tacagtcttttcaatttcacttgttaattcctctgtgttaacaggttattttgtgctgtacactttaactttcataattgtaatattaatgtaaagaaaagcctttttgaaacccaaaacaaaatttgaactgtcttgtagatgccaaaaaagggagtttcaaccagacaagagtttaggagagtattttgatggaaagaagatagcaaccataggactcggttgtagacatccagaagatggtgcaaaacagtagctgcatttcagcagaagcccaatggatgtggamaacaatggcttaacagaggtaacaggctgccatgagcttcataaaaacaaattcatgacactaattgacttatttaatatgagaagaatcaagattttcacactcaagttgaggacatacttaaattagccaaccaaataaaggtatgtaatacaacaataccctttttggaagctagggaagcagtattttttactggtagagatcaaaaaattttccctaagtgagtgttg

SEQ ID NO: 347814 - DNA, 593 bp, Homo sapiens
tggtgggactctatagacattcgtttttaattgctttaattttctaagtaaagattaatgtaaggccatcaggtgaaaacatggacggaagataataccytggaaatgtaaagagaaagtagaatgcttgggagttttctaagggataggaaaaattaaatggactaggaaaatacattatgttttcttaacaaaagcagatgtatcattttaaatttatcattataaatgtaaagcgagacttcccagtaaagttgtgtgttattctctagccacattcaagttcaatggaatagttacagaagggatgaagagttgatttaaatagcattagtatttttccaaacaagtaggaaaacctaacagaaatcaagttgttttagactgtatgtaagggaatgttttaaggattggccatagaccataactcaagtaagtaggaaaaagtaagtaggaaaaagaaaaactacaaacagaaagctaccatgaaaatctagcagtatcaaaggtcgtccaaaacaaaagaaggtagcagtcagagagcagggcacagaagttaatgctatcaggaggtttcatttattggtaaagct

SEQ ID NO: 347815 - DNA, 593 bp, Homo sapiens
tggtgggactctatagacattcgtttttaattgctttaattttctaagtaaagattaatgtaaggccatcaggtgaaaacatggacggaagataataccctggaaatgtaaagagaaagtagaatgcttgggagttttctaagggataggaaaaattaaatggactaggaaaatacattatgttttcttaacaaaagcagatgtatcattttaaatttatcattataaatgtaaagcgagacttcccagtaaagttgtgtgttattctctagccacattcaagttcaatggaatagttacagaagggatgaagagttgatttaaatagcattagtatttttccaaacaagtaggaaaacctaayagaaatcaagttgttttagactgtatgtaagggaatgttttaaggattggccatagaccataactcaagtaagtaggaaaaagtaagtaggaaaaagaaaaactacaaacagaaagctaccatgaaaatctagcagtatcaaaggtcgtccaaaacaaaagaaggtagcagtcagagagcagggcacagaagttaatgctatcaggaggtttcatttattggtaaagct

SEQ ID NO: 347816 - DNA, 593 bp, Homo sapiens
tggtgggactctatagacattcgtttttaattgctttaattttctaagtaaagattaatgtaaggccatcaggtgaaaacatggacggaagataataccctggaaatgtaaagagaaagtagaatgcttgggagttttctaagggataggaaaaattaaatggactaggaaaatacattatgttttcttaacaaaagcagatgtatcattttaaatttatcattataaatgtaaagcgagacttcccagtaaagttgtgtgttattctctagccacattcaagttcaatggaatagttacagaagggatgaagagttgatttaaatagcattagtatttttccaaacaagtaggaaaacctaacagaaatcaagttgttttagactgtatgtaagggaatgttttaaggattggccatagaccataactcaagtaagtaggaaaaagtaagtaggaaaaagaaaaactacaracagaaagctaccatgaaaatctagcagtatcaaaggtcgtccaaaacaaaagaaggtagcagtcagagagcagggcacagaagttaatgctatcaggaggtttcatttattggtaaagct

SEQ ID NO: 347817 - DNA, 603 bp, Homo sapiens
cagcctctatgagttctaaaccacaatagataaagaagggttatctgccatataggctattccccattaaggtttagggatttctgttgctaggattcccaaatgtagtccctgaacggaagaagttcctaatcatttgtagtatctgtagtatctatagtcagctctctttatctgtgggttaagcatccctagattcaaccaattgcaaatgaaaattattaaaaacagatggatggttgtgtttgtactgaacatttacacactgttgttttccttgccattatttcacatatcatacaggacaaaaattctttacrtggcatttacactgtattaagtataaataatcaaaagatgatataaaatatatggaaggatgtgcataggttatatgcaaatactacaccactttatatcacagacttgagcatctgtggagtttggtatccacaagggtttctgtggccaatttcccctggatacggagggatgactatatagttttaccctaaaaagctgaaaattacctatttttatgttgtattccctcttcgaagcaaccagtacatgagggacaaaagagactgacaaggagaaaga

SEQ ID NO: 347818 - DNA, 603 bp, Homo sapiens
cagcctctatgagttctaaaccacaatagataaagaagggttatctgccatataggctattccccattaaggtttagggatttctgttgctaggattcccaaatgtagtccctgaacggaagaagttcctaatcatttgtagtatctgtagtatctatagtcagctctctttatctgtgggttaagcatccctagattcaaccaattgcaaatgaaaattattaaaaacagatggatggttgtgtttgtactgaacatttacacactgttgttttccttgccattatttcacatatcatacaggacaaaaattctttacgtggcatttacactgtattaagtataaataatcaaaagatgatataaaatatatggaaggatgtgcataggttatatgcaaatactacaccactttatatcacagacttgagcatctgtggagtttggtatccacaagggtttctgtggccaattycccctggatacggagggatgactatatagttttaccctaaaaagctgaaaattacctatttttatgttgtattccctcttcgaagcaaccagtacatgagggacaaaagagactgacaaggagaaaga

SEQ ID NO: 347819 - DNA, 606 bp, Homo sapiens
tgagaaataaactcatgaaattaaatatatattggctcaacttaatagctgtatgaacatttcagaagaaagagtaaacaaacaatggtagaacaatataagttttccaaaatgaataataggaataatattacaaataatcataataactagagtatcaaggtgatgttagatggtatcatatgatcaaaagtacatgaaacaggaatggctgtgagaataggacagaagaaaaaaaaccraagaacttaaagatatcatggctgaaaattacccatacttgtaaaatccataacttttacatagatatttttaaagaccatgaaaataaaccccaagaatcagccacacccagacacagcatagtcaagccagtcagttagatatacagagtgaattttgatagcagtaaaagacagatgacctataacatacaacgaaacatcaatgcaattaatgactgaaatgagagtgatggaggacagaagaggattggacatccttaaattgctcaaagacaaaaagggggaaaaaacccccacaaaacaaaactgtcaacccagacttctgttctcagtgataatatcattcatgattgaaggcaaa

SEQ ID NO: 347820 - DNA, 529 bp, Homo sapiens
tgctgaatgttatcatcagtttttcaattaactgattaaatgaagttattatatttaaagcaacattttgattatccaatatcaaatataacatttgaagtgaagagaaagcagttatctacatcacagaataatgaaataggtcaggttttctacatagaaatacaccagatattagagtcagtggacagatggttgaagargcatgaagtaccttcatacctatttaatatggtctgtcttttgtaaagtaaagccagggtatgccaaaagcaaatgcctagtttgggtttatctcaatcccattccatctgctttttaattagtggcaattcttcccagattttggtattaattgcttatgtgttttagcctccaatgctattgagatgtgtgcctttctctgtatctgcatagatttttgtagtgacaatcagtagtggatgaattagctagattccattttaaacctgagcaccatgtctttctagattttaaaagttggataattacttattcaatgtaataa

SEQ ID NO: 347821 - DNA, 529 bp, Homo sapiens
tgctgaatgttatcatcagtttttcaattaactgattaaatgaagttattatatttaaagcaacattttgattatccaatatcaaatataacatttgaagtgaagagaaagcagttatctacatcacagaataatgaaataggtcaggttttctacatagaaatacaccagatattagagtcagtggacagatggttgaagaagcatgaagtaccttcatacctatttaatatggtctgtcttttgtaaagtaaagccagggtatgccaaaagcaaatgcctagtttgggtttatctcaatcccattccatctgctttttaattagtggcaattcttcccagattttgrtattaattgcttatgtgttttagcctccaatgctattgagatgtgtgcctttctctgtatctgcatagatttttgtagtgacaatcagtagtggatgaattagctagattccattttaaacctgagcaccatgtctttctagattttaaaagttggataattacttattcaatgtaataa

SEQ ID NO: 347822 - DNA, 585 bp, Homo sapiens
tttttgtcatgtgttcattgtgtgggttaacagacatgttctccttagtttcgacacaagaatctgtttttatcttaaataaatgattttgtcktggaattgtgataggctgaaaaatagctccccaaaatatctggatcctaatccccagaacctataaatgtgtgtttatgtggcataggaaattttgcatatgtgattaaattctttcaaggtgaggagactatcctgtgttatcccagtgggctctaaatgtaatcatatgtgtccttataaaaggaaaacagaacaaaatttgaccacagaagagagaaagcgagggtaccacagaaacagagggatagaaaaagagagagatttgaggatgctatgctgctgtctttgaagatgaagaaaggtgccatgagcctaggaatgtaacagctgtaactctagaagctgaaaagtcaaggaaattgatttttccttacagccttccaaagaaaatgcagtcttgctaacactttgtttttggacacatcaaatccattttaaacttctgactttcagaaccgttagtcaatagatttctgttattttaaacca

SEQ ID NO: 347823 - DNA, 585 bp, Homo sapiens
tttttgtcatgtgttcattgtgtgggttaacagacatgttctccttagtttcgacacaagaatctgtttttatcttaaataaatgattttgtcttggaattgtgataggctgaawaatagctccccaaaatatctggatcctaatccccagaacctataaatgtgtgtttatgtggcataggaaattttgcatatgtgattaaattctttcaaggtgaggagactatcctgtgttatcccagtgggctctaaatgtaatcatatgtgtccttataaaaggaaaacagaacaaaatttgaccacagaagagagaaagcgagggtaccacagaaacagagggatagaaaaagagagagatttgaggatgctatgctgctgtctttgaagatgaagaaaggtgccatgagcctaggaatgtaacagctgtaactctagaagctgaaaagtcaaggaaattgatttttccttacagccttccaaagaaaatgcagtcttgctaacactttgtttttggacacatcaaatccattttaaacttctgactttcagaaccgttagtcaatagatttctgttattttaaacca

SEQ ID NO: 347824 - DNA, 585 bp, Homo sapiens
tttttgtcatgtgttcattgtgtgggttaacagacatgttctccttagtttcgacacaagaatctgtttttatcttaaataaatgattttgtcttggaattgtgataggctgaaaaatagctccccaaaatatctggatcctaatccccagaacctataaatgtgtgtttatrtggcataggaaattttgcatatgtgattaaattctttcaaggtgaggagactatcctgtgttatcccagtgggctctaaatgtaatcatatgtgtccttataaaaggaaaacagaacaaaatttgaccacagaagagagaaagcgagggtaccacagaaacagagggatagaaaaagagagagatttgaggatgctatgctgctgtctttgaagatgaagaaaggtgccatgagcctaggaatgtaacagctgtaactctagaagctgaaaagtcaaggaaattgatttttccttacagccttccaaagaaaatgcagtcttgctaacactttgtttttggacacatcaaatccattttaaacttctgactttcagaaccgttagtcaatagatttctgttattttaaacca

SEQ ID NO: 347825 - DNA, 622 bp, Homo sapiens
gccaccaccatggctggctgctgtcacaagggtggaagaatggggtgttggcagcaaacttgcctccttgagcagcagagccacaattcattttcatgagcccacacagagttccccacccatggctgccatcactgcaggctgctgccactggggctagagtgcaagtgaagcgcaccttccccacctgcctgccactgactgctgcccaccatcttcagtagcaggacctcagtgtacccactgctactctccacccaagcattctgccagggtcctgcagataatttcasccctgcctacgacatccagtacctacacacaccttcaggggacctaaggacaagcctgcgcagcctggcttcaaaaccctcatgcaggagcatgatgtccagggacctggtaattgccaaacccctgtccaccaccattggcacctgagcactcctcctggaagcctgaggttgggcctcccttaccctactgctaccaccacagctggcacctacctgcctgtaccacatgtaggcctggagactggtcagctcagctcaatacaaatatcaccaacaccagccttcactgctcagaaccgagaggattgtcccaatatagctatcat

SEQ ID NO: 347826 - DNA, 569 bp, Homo sapiens
cctgcctgtaccacatgtaggcctggagactggtcagctcagctcaatacaaatatcaccaacaccagccttcactgctcagaaccgagaggattgtcccaatatagctatcatcatcttccacaccaggcctgctgcccaggagccgaagaaccctcccacacccgtggcccacaactgccactactagcttccaagcaagccacctggaagccgaagtattgaccaacctggaccaacttataccagtgccagtgtacattgctctggtgcccaagaacaggcatgctcatcccacagatgccaccatggggcccaaagaytgggatacaatttatccctgtccccagcaaaacttcaccacagcctccactaataaccacaccttcagtcactgaggataatacagataccactgatgctgatttatagtcaaagaaataatatagagactacatgactgcacaagtgcagaaccctacccaaccaactccatagatatatcccccccaaaagtcctcccatactaaagccactccaaaaaaatcagaaaaagcaactgttacacc

SEQ ID NO: 347827 - DNA, 624 bp, Homo sapiens
ctgttttcacagtgctataaagaaatacccaagactgggtaatttagagagaaaagagttttaattgacttacaattctgcatgtctggggaggcctcaggaaacttataatcatggcagaaggtgaagagaaagcaagtaccttcttcacatgacagcaggagggaggrgagagagcgaagggagaagacatgcttataaaactgtgagaactgcttcactatcatgagaactgcattggggaaaccgcccccatgatcccctggtccctccctcaacatgtagggattatggggattacaattcaagatgagatttgggtggggacagagccaaaccatatcagaaccaaagaatgaataccctaaaatgacaatactgcccaaacaaatctgcagactcaatgcaatatttatcaaaatatcaatatcattttttatagaattagaaaaaaaaatcctaaaatttatgtggaaccaagaaagagcccaaatagtcaaagcaattctgaatttaaaaataaaacacaacaaaacaaagctggaggcatcgcagtacctgacttcaaaatatgttacaaggcatagtgaccaaaacaagatggtgctggtataaaaacagaca

SEQ ID NO: 347828 - DNA, 542 bp, Homo sapiens
aaagtatctatgcctattaaaggtttttgttttcttttgtttttttcattccttaaatccagttatttactcaaatctgttattttgtgtatcattataccttaggttttattatttttagtaatattgttatcatttatcattaatttgactaactgttcatttaggtttctgttgacctgttcaatgagatttayatatttttgatgaatataaaactaagcatttgaaaacgctttatattgagataatttttagacacagttgtaaaactggcatagacagtctccatctacctttattcaacttctcttatattgtcacctttcatatcaacagaaaaattattgaaatttagcctatcccaaaagaaacagctctgtttcagaacagtgtatgtctgcaagattaagaaacctgattattaatatatggcagagagtatttttaatcttagaaaaaagaataagaatatataacccttcaaaggcccacgtgttccatgctagatatttatgaaataacaacataaaatttagata

SEQ ID NO: 347829 - DNA, 586 bp, Homo sapiens
tttactcaaatctgttattttgtgtatcattataccttaggttttattatttttagtaatattgttatcatttatcattaatttgactaactgttcatttaggtttctgttgacctgttcaatgagatttacatatttttgatgaatataaaactaagcatttgaaaacgctttatattgagataatttttagacacagttgtaaawctggcatagacagtctccatctacctttattcaacttctcttatattgtcacctttcatatcaacagaaaaattattgaaatttagcctatcccaaaagaaacagctctgtttcagaacagtgtatgtctgcaagattaagaaacctgattattaatatatggcagagagtatttttaatcttagaaaaaagaataagaatatataacccttcaaaggcccacgtgttccatgctagatatttatgaaataacaacataaaatttagatatttctcttggtatagtactataaaataaattagagaatttattgtaagctcaccagtgttttttccattatatacttttctgtgctagtatacaatccagaatcacact

SEQ ID NO: 347830 - DNA, 633 bp, Homo sapiens
ggctgtaattttgaaaggaaatttttctcagacaaagacaaaagttatattttactcatagtagtgaaaatttactagagagtggtgaaaaatgttataggtcaggaaaaataagacagtgagataaaaataaagatatataatggataggtaaatttaatttttgcttttgaatttaygcaattagaatactgtgtctgtgttcctatgaaaacttcactagtgtctccatgtctactttgagacatatatccatatattaatattacctcagtgtgacgacagaacaatagcaagactgctgttttgtggacatctgtagctctgtggcactattatttcttggatatgaagattatctcatattcttctccaagtgtttcctcttggagctcaaaaataattaagcaaatagacacctttgaaaaattcaatgaggcttattatgcaaggaaaatattgtttctatttgtatttccttcaactttatattcaatttgcaattctcactgtacttataaaagaaatacgttttttgataaaattaagaccacttaagtcttcacttgttctttggtttatgctcaattaacttgtaaatttgacagattaaatttttctaaccatctatga

SEQ ID NO: 347831 - DNA, 572 bp, Homo sapiens
acagaacaatagcaagactgctgttttgtggacatctgtagctctgtggcactattatttcttggatatgaagattatctcatattcttctccaagtgtttcctcttggagctcaaaaataattaagcaaatagacacctttgaaaaattcaatgaggcttattatgcaaggaaaatattgtttctatttgtatttccttmaactttatattcaatttgcaattctcactgtacttataaaagaaatacgttttttgataaaattaagaccacttaagtcttcacttgttctttggtttatgctcaattaacttgtaaatttgacagattaaatttttctaaccatctatgactatttataaacttcataaaataatcatgacacttcagattacaattacaaattcaattgcctaattctttcaagcacttcaaaacacttaatatgtgagactttaagagccagtatgcaatttgctgaattccatctgcctgccagggagaccactgatgtgccacaaggttaagaatttgtgaatttaaaaccataggtagagatgttggagagcaga

SEQ ID NO: 347832 - DNA, 626 bp, Homo sapiens
tggaaggtaggaagaaaagtgatcttttcaattaatattgtaatgtattcaccttaacaagtgcaaaaatttctcatataatcaaactccaattaaaatattatcagattccttaaaataatcataattataaaatagtaaattgacaatgaccagaatgaggtatttattgccatgtaaatctagttattttcaggaggaaaattatcatacataatttatagttgaagaaattggaaaayacgagcaaggctgaaatgtcagtaaatcacagtatgatattaaaaaatatttcttaccctaaaacatgtaaaattttaaagtgtttgcccataacagtaaagaagaaagtgagattcttaaaccgaaatctgttttttgacttagttagtgctaaatacatacatgcttttgtatacatttttgtagtttatattcatttttgtttaataacttttgcttgttaaaatgtacatgtaagaatcatacagttttttgagaaacatggatggaatttcacagctgattgagatgatgctgtatctttaactttatgcaaagaaaatatatgattcttttcctctgatccacaattttatgattttaattgaccccgaaacaggtaa

SEQ ID NO: 347833 - DNA, 626 bp, Homo sapiens
tggaaggtaggaagaaaagtgatcttttcaattaatattgtaatgtattcaccttaacaagtgcaaaaatttctcatataatcaaactccaattaaaatattatcagattccttaaaataatcataattataaaatagtaaattgacaatgaccagaatgaggtatttattgccatgtaaatctagttattttcaggaggaaaattatcatacataatttatagttgaagaaattggaaaacacgagcaaggctgaaatgtcagtaaatcacagtatgatattaaaaaatatttcttaccctaaaacatgtaaaattttaaagtgtttgcccataacagtaaagaagaaagtgagattcttaaaccgaaatctgttttttgacttagttagtgctaaatacatacatgcttttgtatacatttttgtagtttatattcatttttgtttaataacttttgcttgttaaaatgtayatgtaagaatcatacagttttttgagaaacatggatggaatttcacagctgattgagatgatgctgtatctttaactttatgcaaagaaaatatatgattcttttcctctgatccacaattttatgattttaattgaccccgaaacaggtaa

SEQ ID NO: 347834 - DNA, 626 bp, Homo sapiens
tggaaggtaggaagaaaagtgatcttttcaattaatattgtaatgtattcaccttaacaagtgcaaaaatttctcatataatcaaactccaattaaaatattatcagattccttaaaataatcataattataaaatagtaaattgacaatgaccagaatgaggtatttattgccatgtaaatctagttattttcaggaggaaaattatcatacataatttatagttgaagaaattggaaaacacgagcaaggctgaaatgtcagtaaatcacagtatgatattaaaaaatatttcttaccctaaaacatgtaaaattttaaagtgtttgcccataacagtaaagaagaaagtgagattcttaaaccgaaatctgttttttgacttagttagtgctaaatacatacatgcttttgtatacatttttgtagtttatattcatttttgtttaataacttttgcttgttaaaatgtacatgtaagaatcatacagttttttgagaaacatggatggaatttcacagctgattgagatgawgctgtatctttaactttatgcaaagaaaatatatgattcttttcctctgatccacaattttatgattttaattgaccccgaaacaggtaa

SEQ ID NO: 347835 - DNA, 631 bp, Homo sapiens
ttttgtgtttattttaactagtgacagacttatttaacattctaayttagtttgcatagctttttattgtttggtcatgtttgttttataaaatattcagaaatcatttaatataaaggaagcataatcagtaactgacaaacataagattaattaatcttcccccccaaaataagaaaaactaatcatcaaaaaagctaagaaaagttaatatctggtatcatttcagaagtgtgaattacatgatttggtaccaacattctcttgggattctggctcaggtttgaaatgtcagcaggggtttatccattttgctaggctgcttgctgtgcttaaattccttctctctgtagtcgtctttaatattcactaggctaattcaaatgctttgcattctaaaacaatggaaatagtgaaatgctagaccatcctactggagattactgaacatgttctacacgtatatctctaaagaatccaaggaaagaaaacatgaattagtatcatggcttttttaaaaaggtggctatattttttaatacaaaatttaatgcaatttataatgtctacatacatttgattagaaaaaatatgatcacatgactttctttttattcattggccattcttt

SEQ ID NO: 347836 - DNA, 631 bp, Homo sapiens
ttttgtgtttattttaactagtgacagacttatttaacattctaatttagtttgcatagctttttattgtttggtcatgtttgttttataaaatattcagaaatcatttaatataaaggaagcataatcagtaactgacaaacataagattaattaatcttccccccmaaaataagaaaaactaatcatcaaaaaagctaagaaaagttaatatctggtatcatttcagaagtgtgaattacatgatttggtaccaacattctcttgggattctggctcaggtttgaaatgtcagcaggggtttatccattttgctaggctgcttgctgtgcttaaattccttctctctgtagtcgtctttaatattcactaggctaattcaaatgctttgcattctaaaacaatggaaatagtgaaatgctagaccatcctactggagattactgaacatgttctacacgtatatctctaaagaatccaaggaaagaaaacatgaattagtatcatggcttttttaaaaaggtggctatattttttaatacaaaatttaatgcaatttataatgtctacatacatttgattagaaaaaatatgatcacatgactttctttttattcattggccattcttt

SEQ ID NO: 347837 - DNA, 631 bp, Homo sapiens
ttttgtgtttattttaactagtgacagacttatttaacattctaatttagtttgcatagctttttattgtttggtcatgtttgttttataaaatattcagaaatcatttaatataaaggaagcataatcagtaactgacaaacataagattaattaatcttcccccccaaaataagaaaaactaatcatcaaaaaagctaagaaaagttaatatctggtatcatttcagaagtgtgaattacatgatttggtaccaacattctcttgggattctggctcaggtttgaaatgtcagcaggggtttatccattttgctaggytgcttgctgtgcttaaattccttctctctgtagtcgtctttaatattcactaggctaattcaaatgctttgcattctaaaacaatggaaatagtgaaatgctagaccatcctactggagattactgaacatgttctacacgtatatctctaaagaatccaaggaaagaaaacatgaattagtatcatggcttttttaaaaaggtggctatattttttaatacaaaatttaatgcaatttataatgtctacatacatttgattagaaaaaatatgatcacatgactttctttttattcattggccattcttt

SEQ ID NO: 347838 - DNA, 631 bp, Homo sapiens
ttttgtgtttattttaactagtgacagacttatttaacattctaatttagtttgcatagctttttattgtttggtcatgtttgttttataaaatattcagaaatcatttaatataaaggaagcataatcagtaactgacaaacataagattaattaatcttcccccccaaaataagaaaaactaatcatcaaaaaagctaagaaaagttaatatctggtatcatttcagaagtgtgaattacatgatttggtaccaacattctcttgggattctggctcaggtttgaaatgtcagcaggggtttatccattttgctaggctgcttgctgtgcttaaattccttctctctgtagtcgtctttaatattcactaggctaattcaaatgctttgcattctaaaacaatggaaatagtgaaatgctagaccatcctactggagattactgaacatgttctacacgtatwtctctaaagaatccaaggaaagaaaacatgaattagtatcatggcttttttaaaaaggtggctatattttttaatacaaaatttaatgcaatttataatgtctacatacatttgattagaaaaaatatgatcacatgactttctttttattcattggccattcttt

SEQ ID NO: 347839 - DNA, 522 bp, Homo sapiens
taattacaaatgtaataggtaggaaagtaactgtgttagtttgtttctctacacattcaatcattcattcaagytagattcttaaagctcaacagtacagctcgcagaacgaaagtagaaattaatgctgaacatataggcattgcagggacataaaatgtcattaaagattaggtgagatatatatctttccactacagaggtctatcatagttatccttaattttgaagacctcaggactctaccagctatgattcattaacttcattttatatcaagtataataaatcacctcaaattcaagtagagtcttgaataatatgttttatcatagaactccataaatcatgttctgagtggagggcccttatccttgttaaccaaaacaggcaaaacaaagcttagtttactttccaaggggaaatcctgaaattcccccaattacaaaacaattctttgtttgacagactttcaaatataatttcagatcatttttcaactcaaaactagaaacagaagaa

SEQ ID NO: 347840 - DNA, 522 bp, Homo sapiens
taattacaaatgtaataggtaggaaagtaactgtgttagtttgtttctctacacattcaatcattcattcaagttagattcttaaagctcaacagtacagctcgcagaacgaaagtagaaattaatgctgaacatataggcattgcagggacataaaatgtcattaaagattaggtgagatatatatctttccactacagaggtctrtcatagttatccttaattttgaagacctcaggactctaccagctatgattcattaacttcattttatatcaagtataataaatcacctcaaattcaagtagagtcttgaataatatgttttatcatagaactccataaatcatgttctgagtggagggcccttatccttgttaaccaaaacaggcaaaacaaagcttagtttactttccaaggggaaatcctgaaattcccccaattacaaaacaattctttgtttgacagactttcaaatataatttcagatcatttttcaactcaaaactagaaacagaagaa

SEQ ID NO: 347841 - DNA, 522 bp, Homo sapiens
taattacaaatgtaataggtaggaaagtaactgtgttagtttgtttctctacacattcaatcattcattcaagttagattcttaaagctcaacagtacagctcgcagaacgaaagtagaaattaatgctgaacatataggcattgcagggacataaaatgtcattaaagattaggtgagatatatatctttccactacagaggtctatcatagttatccttaattttgaagacctcaggactctaccagctatgattcattaacttcattttatatcaagtataataaatcacctcaaattcaagtagagtcttgaataatatgttttatcatagaactccataaatcatgttctgagtggagggcccttatccttgttaaccamaacaggcaaaacaaagcttagtttactttccaaggggaaatcctgaaattcccccaattacaaaacaattctttgtttgacagactttcaaatataatttcagatcatttttcaactcaaaactagaaacagaagaa

SEQ ID NO: 347842 - DNA, 522 bp, Homo sapiens
taattacaaatgtaataggtaggaaagtaactgtgttagtttgtttctctacacattcaatcattcattcaagttagattcttaaagctcaacagtacagctcgcagaacgaaagtagaaattaatgctgaacatataggcattgcagggacataaaatgtcattaaagattaggtgagatatatatctttccactacagaggtctatcatagttatccttaattttgaagacctcaggactctaccagctatgattcattaacttcattttatatcaagtataataaatcacctcaaattcaagtagagtcttgaataatatgttttatcatagaactccataaatcatgttctgagtggagggcccttatccttgttaaccaaaacaggcaaaacaaagcttagtttactttccaaggggaaatcctgaaattcccccaattayaaaacaattctttgtttgacagactttcaaatataatttcagatcatttttcaactcaaaactagaaacagaagaa

SEQ ID NO: 347843 - DNA, 615 bp, Homo sapiens
aatattacattattaatatgtatgttacatatatctatatctatattctatatataggggtgtgtgtgtgtgtgtgtgtatatatatatatatatatatatatatatatggaaatgtaagtcccagaaagatcaraaaacttttacaaggtcacatgtatgatacattcattcaggaataaattattattgggaaattactgtgcaccagtatttttacagaactgagaatatagtagtgatcaagatacaaaaggtgcttgtactgatgaagcttacttaatgatttcagtggagataaaaaaaggaaatatactataggctttgaaatacaccaacacagaaataacaaatggtgataagatctgtatgaagaattaaaacatgctaattgaaattttaacatatcattaagcacagcattaaaatatgaaactcttagaaataatttaataaagtatgtgtaagacctgtacattcagaaccatgacagcactgaactttaaattataagacctaaataaatgaagatatataccatcctcctggatcagaatactcagtattgctaagatgtcaattccacccaacttgatttatctatttaataaaattc

SEQ ID NO: 347844 - DNA, 605 bp, Homo sapiens
attgtggttcctcttaactaggtaacaacaaaaaatggggagagactgttttggaagagtaattaatgcaatgaaacatatttacrggacattgaaatctaggttaaacaaaatatatacaatgatttctattttgtaaattatatgcattaatgtgaatattaaatattatattgcatattatatataatatatatgcacaataaaatagtaatggtaattctctccagtatataggattatgagcaagtattaacttaatttttagatttgtctacatttcctaaatcttatataatgaatatataatacttttgtaagaaaaaacctattgaaattatttgttaaagagagtttctcagaagctgaacgaaataattgatatgaattattaagaagatgtctatagtaacaataggaaattgaggtctcaaagatgatgttaaaatttgaagtataagatgtaggcatgttggtgatgtcattatctgggactgacaaaaaatgagaacattttgaagaaaataattattttggtttggttaattaattgggttctaggtagaaatattatatggaaatgtcagtaatgaactaaagatgct

SEQ ID NO: 347845 - DNA, 563 bp, Homo sapiens
atttttagtacaaaagtgaaccaattcactacaactagggaaaaatgaaagtcttacatatcacaggtagcttataayttctttattaactaaatactgtgacatgttcctctccttttacaattaaatattgttaaaattttagcaattaaagacaaaatatttaactgttgtacactttaaaagtttaccttttaaaatatcaatatttattatagtattggtattatatatcttgagtagtacaaatagcattctaattcaaagcagaataatcaataataatcctatttataaaacagatctaaggaagagaaaataataggatgagaaagaaacaagaatactagagtgtgtaaaaattcaatttatatgttaactaaactaccactgcccatcatctgctgtataaattatggcctacagttatcaagggaacagttactttcttgatacttcttaattaactgtttttgataatcaataactgttctgcatgctaggttgtattggcacatcaaaggaaatatgttgtgagttttaaggaagatattgtgtttttg

SEQ ID NO: 347846 - DNA, 347 bp, Homo sapiens
gaatacgtggagccatatcaaagattctaataaattaatactatagcatcaatatcatagatgccataatttgtttttaccaaaacatcagrggttcagtctaagtcccgttgctcacatcacagaaagccaattcctgagacaatgtgtatttccagggaagaaggctttatttgggtgctgcagctgaagagatgggagatcagtctcaaatctatctcattaactgactaaaactgggagtatataacagggaaggaatgtagctacctgtgggaaaacaaaatttagggaggaataaggaagaagaattgatcaacaggaagccagtggtcagttaggaaaac

SEQ ID NO: 347847 - DNA, 577 bp, Homo sapiens
tttgtggtgtgtagagtgctcaggatgcttgtaggattgcactggcatcaacctagctataaaagtttatttaagaaaatttttaaaggaaatttttaataaaaagagaaactgcatacaatgcaatttacctgtttttttctaatacagcattcagtactaaaattcrctttatgctccaatgtacattttacagagcttaatgtacatagaatatataataaagagtaatttctcttctgatttattatttatttgagatccataacagtaaacatggctttctctaaaagtatattttatattatgccagactaagatttttaaaatttaccaaagttaagactttttctagaaatacattataatagcatcaggaatctaattggaagttacattaaagagaaataacattttctccctctctaaaagcaaaaagtaatacttgttttggatttgcaattccataatgttctttatctgaatacttcaaatgctcagcgtgtgattataagggcatcaggtttacacaacaggcttatgagaagaaggattttgtgtaaatgaaaacattgta

SEQ ID NO: 347848 - DNA, 571 bp, Homo sapiens
agatttttaaaatttaccaaagttaagactttttctagaaatacattataatagcatcaggaatctaattggaagttacattaaagagaaataacattttctccctctctaaaagcaaaaagtaatacttgttttggatttgcaattccataatgttctttatctgaatacttcaaatgctcagcgtgtgattataagggcatcaggtttacacaacaggcttatgagaagaaggattttgtgtaaatgaaaacattgtatgatttcagagaaaatttgttttcaaagyatttgaatatgagctgggagtctgtgttttgttactgtgattataataaaggtagtttttattatctgcctagtaactttcaggggattaatgactcagcaagaatcaggtgtttcgacttgtattcaacatgacagcaaacatttagttatttaaagtaaaatactaaatacaggaagataggccaaaagttttaatacttagtagtaaaaactcttctgtgacttctttaacttcttcagtacatctagttttatgggccttaggacaattcagtgtggg

SEQ ID NO: 347849 - DNA, 559 bp, Homo sapiens
aaatttgttttcaaagtatttgaatatgagctgggagtctgtgttttgttactgtgattataataaaggtagtttttattatctgcctagtaactttcaggggattaatgactcagcaagaatcaggtgtttcgacttgtattcamcatgacagcaaacatttagttatttaaagtaaaatactaaatacaggaagataggccaaaagttttaatacttagtagtaaaaactcttctgtgacttctttaacttcttcagtacatctagttttatgggccttaggacaattcagtgtgggcatcataccctgtcaggaaaatggaatcagcttgtcctgagtacttttatccagtaagctagatcatatggctctccataacagtgaaaccatgttccagagacctcatttctgtgttcttggtgttagatttataaccatgccacatgttttgtaatttttcaacttaacataaactcttgcacattacataggatttctcacatacacaagtttctaaggtaagggctttgcaagcaacagtttggctatggcccacc

SEQ ID NO: 347850 - DNA, 547 bp, Homo sapiens
ttaaagtaaaatactaaatacaggaagataggccaaaagttttaatacttagtagtaaaaactcttctgtgacttctttaacttcttcagtacatctagttttatgggccttaggacaatwcagtgtgggcatcataccctgtcaggaaaatggaatcagcttgtcctgagtacttttatccagtaagctagatcatatggctctccataacagtgaaaccatgttccagagacctcatttctgtgttcttggtgttagatttataaccatgccacatgttttgtaatttttcaacttaacataaactcttgcacattacataggatttctcacatacacaagtttctaaggtaagggctttgcaagcaacagtttggctatggcccaccacactgagtaattgctaacattatatctaatattttataaagcacttttgtcaagttcctttatattttgaatacaatagttttcctgagaaaatcagccattattagcccagaacaatgctgcatgtacattaaccaaagatggttctgaatagat

SEQ ID NO: 347851 - DNA, 523 bp, Homo sapiens
taaatcatcatttttataaagtaacagcaaaagtcaacagaagatgctgatatatactgatttattattttccatctttggccaaagttttttcttcattaaattaaatcatgaaagccaacttctttcaaatttagatcataatccaattggttatcatttttaaatttattatgaatcattcrtggccaacagcaattataatctttcatttttaaatgaaagatttaaatttttaagtgaaagatttaaatctttcatttttaaatgaaagtattaatgtactaactagggtttgttagttgcaagagataaaaaaaaactaaggttttacttaagagaaaaaaagaggaaattatttatacaatattgggttgctcacataatggattactatgtcaggatattttggctagaaacaaacacggcaaccaagataggaatcagccaatttaaagcatctagagagcaactgatacttaaccatatttctcagtattattactaagataagtatataaat

SEQ ID NO: 347852 - DNA, 560 bp, Homo sapiens
tcatggaaactctctttttctttcttttcctttttttctctctctctccagtaaaccaaattgccttgattgtgtacataagactcaacaactgttactttgtctgaatttccatttttaaaatacgagatatgcttcctaatataaaatataaagttattcaagtggatacaaactagaatttattatgctcattgctattgagtcattttatcactttaaatgtatctttctaaaattattttctagattgtatataaggcatttagaggccctgctcttgccctgctcttgcagtatcaaattaagatttttaagaaaacaatattaccttaacyagaatcagaacatttcatttttattcttttctttgagattgcatggaggttttaagtgaaactctaagcagaagttatttttccctttgaatttcaatagaaacatttttcacctggcacttgacatttaacttatacttccctgaattgtaattttgtttgtacaagtcttatctgttcaaccagattgtaaatactttaagataccaacatgcttaaaga

SEQ ID NO: 347853 - DNA, 560 bp, Homo sapiens
tcatggaaactctctttttctttcttttcctttttttctctctctctccagtaaaccaaattgccttgattgtgtacataagactcaacaactgttactttgtctgaatttccatttttaaaatacgagatatgcttcctaatataaaatataaagttattcaagtggatacaaactagaatttattatgctcattgctattgagtcattttatcactttaaatgtatctttctaaaattattttctagattgtatataaggcatttagaggccctgctcttgccctgctcttgcagtatcaaattaagatttttaagaaaacaatattaccttaactagaatcagaacatttcattttyattcttttctttgagattgcatggaggttttaagtgaaactctaagcagaagttatttttccctttgaatttcaatagaaacatttttcacctggcacttgacatttaacttatacttccctgaattgtaattttgtttgtacaagtcttatctgttcaaccagattgtaaatactttaagataccaacatgcttaaaga

SEQ ID NO: 347854 - DNA, 560 bp, Homo sapiens
tcatggaaactctctttttctttcttttcctttttttctctctctctccagtaaaccaaattgccttgattgtgtacataagactcaacaactgttactttgtctgaatttccatttttaaaatacgagatatgcttcctaatataaaatataaagttattcaagtggatacaaactagaatttattatgctcattgctattgagtcattttatcactttaaatgtatctttctaaaattattttctagattgtatataaggcatttagaggccctgctcttgccctgctcttgcagtatcaaattaagatttttaagaaaacaatattaccttaactagaatcagaacatttcatttttattcttttctttgagattgcatggaggttttaagtgaaactctaagcagaagttatttttccctttgaatttcaatagaaacatttttcacctggcacttgacayttaacttatacttccctgaattgtaattttgtttgtacaagtcttatctgttcaaccagattgtaaatactttaagataccaacatgcttaaaga

SEQ ID NO: 347855 - DNA, 582 bp, Homo sapiens
ttctgcctagtgagcacatgtctcctttttattacatttctctttcagctttcccagtagaagaaattcaagaaaggcaaacgaaaataataataaattgtgtcatcatcatttcaaacacatatatactcaccattaagtggaattttctaataccatcttctcctgttcagaaggcatagtatgagataatatagggcaaaaacaaaagaattaccatttgtacacaacttcagatgactataagactggtactttatatagtaaacatttttatacgttatcaacttattattattacctgataaattacataggagaaaactaaacctcagaatacctaagcaaaaaccacccgagtttacatagctattaactggtaaagccagaattggaatacaagcttttgtaatgcaaatatctatgtatatcacaggctcctaaagtatctttccttgttacaagtagaatctgcatgttttttattgttgttgttrttgtttttctatctaaaaggagagtaatttagggtatgttcacattaagcattttattatgtataaaataaaccaaaaacattgc

SEQ ID NO: 347856 - DNA, 582 bp, Homo sapiens
gggattttgagaggttggtttaggagttttaaaaatgtctgtgagtagggtaaatgttcttacagattgatacacgaattatgtttcattaggtgggtcaggaggagatgtggccagatgatagttctcttaagaaaccagatggagccagttaattactgtctgctgttggtttatctaatccttcaggattcatgtagaatctctcctttttcccagagagtacctctatttatgcagtttcctccagtccagatgtctgtaaattacagcatgcaggcacaattcagcccattgcctgtttttgttttttaaaaaagctttataggaacacaaccatattcatttacttacatgttgtctatggctactttcatattatttattatgtggccttttacaaaaagtttgttcaccctgttctagtttgttaagtctaatgtctcattgctgtctrcaatattttactactcagtctggataatgttatatcatttgatcttttttttctttttttttaacttttattttaggttcaggtgtacgtgtgcaggttggttatataggtaaacttatatcatg

SEQ ID NO: 347857 - DNA, 651 bp, Homo sapiens
tactatcagtagaattgtgttccgcaaaagatgctgaagtcctaatctctagtacctgttaccctgaccttatttgaaaatagagtctgtgcagatgatcaggatagtgtgagatcattaaggtgggcccaaatttgatatgactgyctatatataaaaagaggtaatttggtcacagagacagatgtacacagaagaaaaattatgtaaatcatcataaaagaatgccatgtgaagattggagttttgttgccataagccaagtaacatttaagactacctgaaactgaaagagagagaaaataatccttccctactgccttcaaatggagcatggtcatgctgaaacctcaattttgaaactctattctccagaactatgaggaaataaatttctgttgttcttagttattcattttgtggtactttgttacagtagtcccaggacgttaatacaggaatccctctaaagataacataataaaacacttttaataaaaaccactacatttattttgagcaacatagttaaaactctgttgtaagttttttgtttcagtttttctatttatattttgacatattaagagaatgttagctttataaaggataatctataaaatactctaaggatctatggaattcaggcaa

SEQ ID NO: 347858 - DNA, 575 bp, Homo sapiens
ctttatgaaacaaaatggaatttgtagaaattactgaaattaacaagtttttttaataaacaaatgtgtatgtatacaatacacctcttaaaaagtggaaaaagataaaaataacagacatttgatttctcaaagtgttatatgtttaaaatgtagctacatctataaattttatttaataaaatatagaagattatggagggaacatttcacattctcctatttaccctgcctcatctcctgtaaaaagttaaaatatcacttttatattgcccaagtgtgtaatacattattttctatttccaaataaatgatttctatattcaccatctgtttgttrtttacttgtgtggagatacacatattttctgttgttattcacaaagtttagtaactttgtcattgtgttagttattttttttaattaacctgagaaatgcagagtcagttaaggattttagaagcatttcttcaaatgtttttctgtttattatgctaactttgtctagaaaaattattaatagtttggaaaagattttttttccaccctactaagtaccttaaagaaaaagaaa

SEQ ID NO: 347859 - DNA, 532 bp, Homo sapiens
atacacatattttctgttgttattcacaaagtttagtaactttgtcattgtgttagttattttttttaattaacctgagaaatgcagagtcagttaaggattttagaagcatttcttcaaatgtttttctgtttattatgctaactttgtctagaaaaattattaatagkttggaaaagattttttttccaccctactaagtaccttaaagaaaaagaaatatccttttctattcaattttatcttatgttgtctggactgctcattttggtcattttaacttatttttgttatcatttctttcagagtgggcttcatttctgtaatatacatacatatattaatttttgcttattaaaattagcagcttcactttttacctcttggttttcttacaatttgcttcagtatttataattatttaatagatattatgacttctataattttgttattttatatagtattgtttgttaagaaatatatgtatagactttgtgttcctttctaattgttgtcaatagttgaaggg

SEQ ID NO: 347860 - DNA, 229 bp, Homo sapiens
gtggaaagtagtctgaatatttcycaaataactagaaacagagctgtcattcaaccagcaatcctcttactgggtatatatatccaaaataaaataactcattctatcaaaaagacacatgcagttacatgtttattgctgcactgtttacaacaccaaagacatggcatcaacacagatgcccatcaacggtacactggataaaggaaagggggtatatatacaacac

SEQ ID NO: 347861 - DNA, 229 bp, Homo sapiens
gtggaaagtagtctgaatatttcccaaataactaraaacagagctgtcattcaaccagcaatcctcttactgggtatatatatccaaaataaaataactcattctatcaaaaagacacatgcagttacatgtttattgctgcactgtttacaacaccaaagacatggcatcaacacagatgcccatcaacggtacactggataaaggaaagggggtatatatacaacac

SEQ ID NO: 347862 - DNA, 229 bp, Homo sapiens
gtggaaagtagtctgaatatttcccaaataactagaaacagagctgtcattcaaccagcaatcctcttactgggtatatatatccaaaataaaataactcattctatcaaaaagacacatgcagttacatgtttattgctgcactrtttacaacaccaaagacatggcatcaacacagatgcccatcaacggtacactggataaaggaaagggggtatatatacaacac

SEQ ID NO: 347863 - DNA, 604 bp, Homo sapiens
gtctggcaactcaaaaagccagtttcttcttacctccaaatgactgcactagttccccagcaatggataactgggctgaaatggctgaaatgttagaaatagaattcagaatatggatagaaacgaagatcattgtgattcaggagaaagtcaaaacccaatccaaggattctaagaaatacaataatatgatacagaagatgaaagatgaaacagccatttttataaagaaccaaactgatctgacagagctgaaagcttasgtcaatactttcagaatgaaattgcaagtattaatagcagaattaaacaagctgaggaaaaaaatctcagagctcgaagactgattgtccaaaacaactcagtcagacaaaaataaagaggaaacaataaagaagcatgaacaaaacctccaagaaatatgtgattacgtaaaaaaacaaaacaaaaacacaaatttgtgactcattgacttcccggaaagagagagagagaaagtagacaacttggaaaacacatttcaggatatcatctaagaaaatttgcccaacctcactagagaggacaatattcaaattccggaaaggcagagaagccttgtgaa

SEQ ID NO: 347864 - DNA, 604 bp, Homo sapiens
gtctggcaactcaaaaagccagtttcttcttacctccaaatgactgcactagttccccagcaatggataactgggctgaaatggctgaaatgttagaaatagaattcagaatatggatagaaacgaagatcattgtgattcaggagaaagtcaaaacccaatccaaggattctaagaaatacaataatatgatacagaagatgaaagatgaaacagccatttttataaagaaccaaactgatctgacagagctgaaagcttaggtcaatactttcagaatgaaattgcaagtattaatagcagaattaaacaagctgaggaaaaaaatctcagagctcgaagactgattgtccaaaacaactcagtcagacaaaaataaagaggaaacaataaagaagcatgaacaaaacctccaagaaataygtgattacgtaaaaaaacaaaacaaaaacacaaatttgtgactcattgacttcccggaaagagagagagagaaagtagacaacttggaaaacacatttcaggatatcatctaagaaaatttgcccaacctcactagagaggacaatattcaaattccggaaaggcagagaagccttgtgaa

SEQ ID NO: 347865 - DNA, 529 bp, Homo sapiens
attgtgatggaagatttcaaggatatagctctatctcagaacttttcaaatggtatactttaaatatatacctgttttgaatgtcaattatattttaataaagaagttaaaaataaaagaccagaaaaggactatgactgtgggaggaacagcaactaaaacaaattttaaaaagagaataacaaaatgatcataaatcctggctatataccacatggtgttcgaaaatgtttttcatgtrttatctcatttaaacctcagaacagccctatgaactcaacatcatagttatgtaactttacaaataaagaaaatgaggcacggagaggttaagtaatttacatatggatattcacacaataaggaataaaggctagattaaatactgacattttactacccgagcccacattcctaatgatttttctgctctcaactacaaactgagtaaggctgttccattgaaaacaacgagattatgttaataataatgtacacgttatgaataataagctgttaaaaattattt

SEQ ID NO: 347866 - DNA, 586 bp, Homo sapiens
tctggtgtcacacaaatggttagtatattttaaatgtacttaacataaaaatacattatattgttttacaaatttttaagcaaagagactttaaatttgttaatgcatcrtatagatttgcactttgataaaaggaatgcaaaataattaatataaaaatctctatattatatattttctttgaacattactttttgtacatacagttgatacttgaacgatgagggaattggggtgccaatccaccacaaaatcaaaattccatataggacttatttatttatttgtgtatttatttagtagagacagggtctcactccatccaagatggagttcagtgatgtgatcatagctcactgtggcctcaaactcctggactcaagtgatctttcttcctcagactcctgagtagctgggactataggcacacaccaccatgcctggcgaatttctttattttctgtagagatagactcttactatattgcccagtctgggcttgaactcctggtctcaagtgatcctgttgccttggcctccaaaggggctagaactgtaggtgtgagtcactgtgcccagcccacaa

SEQ ID NO: 347867 - DNA, 629 bp, Homo sapiens
gtgcagctaatttgaaaaacagtttggaagttcttccaatggttagatgtagagctaccatatgtctcaccaattccatccctaaatatataccactatctagagagaaatgaaaatactaaaacttwtatatgaatgcttacagcagcattatacataatagctaaaatgtggaaataatcaaatgtccctcaactgctgaataggagaaccaaatgtaatatattcatacaatggaatattactcagacataaatagaaatgaagtaatgaatattactcaaatataaacagaaatgaagtaatgatatattcaacaatataaatcaatcttatgaaactatagtaaatttttaaaatatcagccacaaaaggccacatattatgcgactgaattcatatgaaatactcagattagacaaatctgtagagaataaaagtagaacagcggttatctagggctgggtgtgggaaggtgggattgaaggctaagtacagggtttcttattggagtgctatgaatattttaaaattgattgtagtgatggctgcaaaactctggaaatatgcttaatcccttgaattatatactttaaatgaataacttacatggtatgtgaattatttct

SEQ ID NO: 347868 - DNA, 629 bp, Homo sapiens
gtgcagctaatttgaaaaacagtttggaagttcttccaatggttagatgtagagctaccatatgtctcaccaattccatccctaaatatataccactatctagagagaaatgaaaatactaaaacttttatatgaatgcttayagcagcattatacataatagctaaaatgtggaaataatcaaatgtccctcaactgctgaataggagaaccaaatgtaatatattcatacaatggaatattactcagacataaatagaaatgaagtaatgaatattactcaaatataaacagaaatgaagtaatgatatattcaacaatataaatcaatcttatgaaactatagtaaatttttaaaatatcagccacaaaaggccacatattatgcgactgaattcatatgaaatactcagattagacaaatctgtagagaataaaagtagaacagcggttatctagggctgggtgtgggaaggtgggattgaaggctaagtacagggtttcttattggagtgctatgaatattttaaaattgattgtagtgatggctgcaaaactctggaaatatgcttaatcccttgaattatatactttaaatgaataacttacatggtatgtgaattatttct

SEQ ID NO: 347869 - DNA, 629 bp, Homo sapiens
gtgcagctaatttgaaaaacagtttggaagttcttccaatggttagatgtagagctaccatatgtctcaccaattccatccctaaatatataccactatctagagagaaatgaaaatactaaaacttttatatgaatgcttacagcagcattayacataatagctaaaatgtggaaataatcaaatgtccctcaactgctgaataggagaaccaaatgtaatatattcatacaatggaatattactcagacataaatagaaatgaagtaatgaatattactcaaatataaacagaaatgaagtaatgatatattcaacaatataaatcaatcttatgaaactatagtaaatttttaaaatatcagccacaaaaggccacatattatgcgactgaattcatatgaaatactcagattagacaaatctgtagagaataaaagtagaacagcggttatctagggctgggtgtgggaaggtgggattgaaggctaagtacagggtttcttattggagtgctatgaatattttaaaattgattgtagtgatggctgcaaaactctggaaatatgcttaatcccttgaattatatactttaaatgaataacttacatggtatgtgaattatttct

SEQ ID NO: 347870 - DNA, 536 bp, Homo sapiens
aaagtgtgtacgttaacctatgtagatacatatacatctttatacttatcgcgatatgtaagcatctgtacctatattaagtattagttcatattgaggtctccaactctgatgtgttaccacatgaatcatttcagccatctcccattgcatagttgttaatgcacactgtaacagtgagaaacctggttccaaatatttgacatcatttaatagtttttcagttctactatacatgtgtagcaatattagaatttttaaactataaccccatgggaaacaactttgtccactatattgcttatgtttagttcattttacatttagaattacagactccactmatttccaaagccacttaggctatcatcttttcttcccagttaatttaattttattaatcttttcaaataaccagctttgaattttctttttctttctgttgtttttcctattctatttccaaaaagagaataaaattgtttagctgtaagcacaagatcagtttgcaataacattaacagttataagcatca

SEQ ID NO: 347871 - DNA, 559 bp, Homo sapiens
tgaggagagggatgtatagttgaataattaagcagaccaaaacaagtagtaatttccttgctcagatcaggtctttatgtaacaaaagaagtagctgtggagaaaaaaatattttacttggaagtctctctytttttattgccatgaagaacattcattaaaaaatagtggagtgatggttcccatgaggaaaatgagctaacattgttctacaaaataatgttaaatgctatgttcgttgtaaatgaagcaatttgcaaattatagcatggttagaaggaaatacatttttcttttttataatctagaatgttgtgtctctcaggatcatatttacatatctgggaaatgtggatgttagggaagaaaggtgatgaagtggggaagagggagagagaaagatcaatctaccagtttttcactaatgtccagacaaacaattttgcatgttatcctattagaaagacttaaaaaggtgcaagacctagagccctgttcttattctgaatttctctggggtatggaagtaataaaacatctctatttctgagggcagaat

SEQ ID NO: 347872 - DNA, 559 bp, Homo sapiens
tgaggagagggatgtatagttgaataattaagcagaccaaaacaagtagtaatttccttgctcagatcaggtctttatgtaacaaaagaagtagctgtggagaaaaaaatattttacttggaagtctctctctttttattgccrtgaagaacattcattaaaaaatagtggagtgatggttcccatgaggaaaatgagctaacattgttctacaaaataatgttaaatgctatgttcgttgtaaatgaagcaatttgcaaattatagcatggttagaaggaaatacatttttcttttttataatctagaatgttgtgtctctcaggatcatatttacatatctgggaaatgtggatgttagggaagaaaggtgatgaagtggggaagagggagagagaaagatcaatctaccagtttttcactaatgtccagacaaacaattttgcatgttatcctattagaaagacttaaaaaggtgcaagacctagagccctgttcttattctgaatttctctggggtatggaagtaataaaacatctctatttctgagggcagaat

SEQ ID NO: 347873 - DNA, 559 bp, Homo sapiens
tgaggagagggatgtatagttgaataattaagcagaccaaaacaagtagtaatttccttgctcagatcaggtctttatgtaacaaaagaagtagctgtggagaaaaaaatattttacttggaagtctctctctttttattgccatgaagaacattcattaaaaaatagtggagtgatggttcccatgaggaaaatgagctaacattgttctacaaaataatgttaaatgctatgttcgttgtaaatgaagcaatttgcaaattatagcatggttagaaggaaatamatttttcttttttataatctagaatgttgtgtctctcaggatcatatttacatatctgggaaatgtggatgttagggaagaaaggtgatgaagtggggaagagggagagagaaagatcaatctaccagtttttcactaatgtccagacaaacaattttgcatgttatcctattagaaagacttaaaaaggtgcaagacctagagccctgttcttattctgaatttctctggggtatggaagtaataaaacatctctatttctgagggcagaat

SEQ ID NO: 347874 - DNA, 464 bp, Homo sapiens
actatatttcttaaatatatgccatgtaaacttttgtacattagttaaaaactctcccctctgctgaaaatgacattctgcttgctacttctgccttttggataagctcagagtgcctaccacgttgaaaattggaacaaagcaggcttgggagaagataggttggacgaatccataaaaagatgagtccttgatagggtactgcaaacaaatactactaccaacaccagcatcctcaaaatttctattatggcataaccagggtcttttcagaggagtctgtgttggggtcratgaatggcaacaattgttacagagtagtttttgaaagcagtcccatggatttaacttatgaggctaatgaaagcaacatcacagaaaaacagttaggatctggacaatggactccaggagtcaactgactagggttaaagtaagatagggaagctacagctagattctct

SEQ ID NO: 347875 - DNA, 563 bp, Homo sapiens
aaagtatttcaatatccctgtggctattaaatgatctattccaatcatcattcatataagcagtaagagctgttgaagaaaaaaaaggcatgggaaaatatttggggagtaacaagctaaatcaacaacaaaatggataaaacacaagaatagatcagtcagaataagtctgaaaggattaagggctcacagagaaaaagcatttgaaatgttacttcaatctttttaaagtcagtataaacagggtaggatgttctcttgggttttaaaggccaaaattttctaaggaattgatgaagtaatgtttgccaaaaaagcaattatgcaagcagctagactgaaaagtagaattttttttwtataattaacctgagtcaaaaggaaggtatagtctcacacatttttcatgatgatgtatcagcaatgtgcgatatagttgtactttgatgagtttaaaatactgaccagccagttttaataactgagtcattataaggattaatttacctagatttaaaatagttactatatatttataaaaaatggaatttttatcctccgtg

SEQ ID NO: 347876 - DNA, 340 bp, Homo sapiens
atcaaagataatccaagaactcagctgtataattagatgcaaacagcatgatgtgctaatttatgccttttaattaaacaagataaattaagacttgaaataccaatggaacgaatggaataaaaaataatatagtgtatgatgtattaccatacagggtttacatttaaccaattacctctcttattactaaaaatctatayagaaatagaaatacgcaaatactataagactgtgaacagccgcagatcaaatgaccacctatgtaatactcagtaaattatcctcaatgcttagcggtatgtctaccatatagtagaagctcaagaaatattcattg

SEQ ID NO: 347877 - DNA, 547 bp, Homo sapiens
atagtgtatgatgtattaccatacagggtttacatttaaccaattacctctcttattactaaaaatctatacagaaatagaaatacgcaaatactataagactgtgaacagccgcagatcaaatgaccacctatgtaatactcagtaaattatcctcaatgcttagcggtatgtctaccatatagtagaagctcaagaaatattcattggttgaataagtgaatgaatatttcatttctaatctgggtccatctgtgagcagtgtggtctctctgtaaagctgttggcttaaacaaagtccaagaatatagtttatattccaactatattataacattttatttaggaaattaaaaatagaacactgaagaagcccagctactgagaataatctatgattacagcagatctcctaagactgattctatctggaccaccttcctcatactgtcctatttcccaatgactcactctatgacttgccagaagaatgaattatgtcagaaacaawacatgttacaatcagagcatttctaatcagctccag

SEQ ID NO: 347878 - DNA, 687 bp, Homo sapiens
gagcccctcgcttgagccataaaaaggcttaggtgaaaccaaagaatgaccattctcctattctgaactttgttccaaatgtccccagctttgacatgtatcaaaaaatatataacatcctgaaactgatatttcttctctgctttagattaggaacatacgtacctagtcctaggcagccttagcaaagccctctctaggtggctctttagccagagtgcagacagtgcactttcagccccagccagccagtctccagmcccatgttgactttcactaagcttcctaatgacaggcagcagctggccttcaattctctgatctggaaacctgggagggaagccgaatgagctaggcagaatccaaagctggttttggagtcagacactgtgcgaacgaagctcctgtggtgcctgcccattaagtggcccagaatttctagtttctaacaacaatgaagcaacctaccattgaattctatttaacatgccttgcttcatcagaatgaaaaatatagtttacaatttacaaatcatctcagaaatttgtaacatttaattttaccaaaaatcaggtagactttctaattaatcagtagtaaagttaatatgacatatggacttaaacatatatgtatacattaggatatagatagatacacatacatatataagtatacaaacatac

SEQ ID NO: 347879 - DNA, 558 bp, Homo sapiens
agggggctgctactataaagatacttgaaaatgtggaagtgactttggaactgggtaacagacagaggatagaacagtttggrgggctcagaagaagacaggaggtctgaagttgaggttcaatgtgattaactcactgaacaaaatccacagagccaggatctgaactattgtcttcctcttcccaaagtgtttttcctattatttcatgctgccaaggtcttcctacaggagaaaaattataaaatgtttccttcctggagtaatttttgtcttagtacctagatcctttatctgtatcctctgtgagtccacgttgctttggctttgatggagattgaagcttctataacactttaaaagctcagtccagggtacaggactcttagtactcattcccaggtatagctctgctgtgtccagtcctaacattcagaccactgccttcattccctagtgctcagtatgcagagagcccactaaaactctagaccaaaagggatttaacattttacaaacagaatcaaagttatagaattttgttcctctcaaataaaa

SEQ ID NO: 347880 - DNA, 558 bp, Homo sapiens
agggggctgctactataaagatacttgaaaatgtggaagtgactttggaactgggtaacagacagaggatagaacagtttggggggctcagaagaagacaggaggtctgaagttgaggttcaatgtgattaactcactgaacaaaatccacagagccaggatctgaactattgtcttcctcttcccaaagtgtttttcctattatttcatgctgccaaggtcttcctacrggagaaaaattataaaatgtttccttcctggagtaatttttgtcttagtacctagatcctttatctgtatcctctgtgagtccacgttgctttggctttgatggagattgaagcttctataacactttaaaagctcagtccagggtacaggactcttagtactcattcccaggtatagctctgctgtgtccagtcctaacattcagaccactgccttcattccctagtgctcagtatgcagagagcccactaaaactctagaccaaaagggatttaacattttacaaacagaatcaaagttatagaattttgttcctctcaaataaaa

SEQ ID NO: 347881 - DNA, 574 bp, Homo sapiens
acactgtaaatttttaatcccagcttatttttcagtttatgggaagtcaaacacaaacaaacactaagaaatattgtacaggaaggcctgttaatgattacccagtttttagtccaatcctctcacactgtgaatagaaagtcaatttgcagaaatattttgccattaggccagtatagcagctttttaattattaatgaagcctgtcagatctttgaagaactgcacaacatcacagattttcttctcctttgtagctgtgcttgctgtcagaatatatttagaaacattgatgcttaagcaaatgtgtaaaacatgtggtgaaagtaatgcagcataaatgtaagtttacctcagggaatgcaaaaccagagttttgatgtttatgcttaaatatttagtacctggaccagctctaggcagaattggtacagyatatctttggcattctcatcttattttagctcctttctatatagaaccactgatgtgctaggcttaggtctgtgatcttatactgactactgactggcccaggacatctcaactctctctcttactaaagtttctaacc

SEQ ID NO: 347882 - DNA, 589 bp, Homo sapiens
gactctgctttaagattttcattaaaaaaaaaatttttttttttggtatactatgtgagagctgctttggagcaagctcagtgtttagcttatcttttttgtttaccttttattaaaaaaatcacaacccaatttgttaagtcctcataagacatttgctgaattaatggtattttatgtacccacataggcttttcttctttgtgccatagcaatagttcctgagtacgtatcatatgcaaggcatcaatacgaggatgaatgagacaagcaatgtccctgacctggtagaggctgactgcaaacaaacaatacatgagtaaaaatacaaacaatcattcttaagaaggcagacaacagtgtgctattatagaacataatgatggagtggtgggaaagcactttcttgaggaaattacagtaatactggatacatgaatgatgaagcaacagccacccatgtaaaaaatagagcaatgagtattccrggcagaaggggtagtcagtacaaaggcctaaaggtaagaagataggtagtactgtacttgcattgttcaaggaacttagagatgggttgtcaatatgtctg

SEQ ID NO: 347883 - DNA, 592 bp, Homo sapiens
ctcttgaaaaacatttgcacaaagaaagtatactatatgccaacgcatgtggcatacaaatttaatagaaacactagaaaggctttgtagattaatgtcctttaaacatacttctaacaacacattagtaaattagatgttattaaggaaggaataatttgatatgtaatttcaatgcacatagaaagtgtgctaaatacaagtggatttaaagaaaccactaagcraaataaaaagatgcaacctggtgagttgtatgatcttgggaaagtccctgtccctcatgtggacgtaaagattacctgatctatagctttacagagttgtaaagtgtaagaatggaagaaaatgcaaggaaaagtgctttgtaattgtatgttgctattcacatattacctagaagcctaacccacactgttatgcaaaggacaagtgatgagtataaatgaataaacccattagtaatgcagttaacatggtagttttactattacctaccacagagcataagtaggtaccccataaatgcagaaaacacattaagttcagccaaaatattgtatcatttaaatctgtgtgcaattattttgat

SEQ ID NO: 347884 - DNA, 581 bp, Homo sapiens
gctcttgaaaaacatttgcacaaagaaagtatactatatgccaacgcatgtggcatacaaatttaatagaaacactagaaaggctttgtagattaatgtcctttaaacatacttctaacaacacattagtaaattagatgttattaaggaaggaataatttgatatgtaatttcaatgcacatagaaagtgtgctaaatacaagtggatttaaagaaaccactaagcgaaataaaaagatgcaacctggtgagttgtatgatcttgggaaagtccctgtccctcatgtggacgtaaagattacctgatctatagytttacagagttgtaaagtgtaagaatggaagaaaatgcaaggaaaagtgctttgtaattgtatgttgctattcacatattacctagaagcctaacccacactgttatgcaaaggacaagtgatgagtataaatgaataaacccattagtaatgcagttaacatggtagttttactattacctaccacagagcataagtaggtaccccataaatgcagaaaacacattaagttcagccaaaatattgtatcatttaaatctgtgtgc

SEQ ID NO: 347885 - DNA, 560 bp, Homo sapiens
ggagagtagagacattcatacacatactctgtttataaygccagtcattttttcccatttagtcactgtttcatgtatatatagcttcctcacagggaactctaagaagaagaggggaatgaatagaaaaattttgcctgaaaacccactccagattccaagcaccaaatatctgattcaataaatgtctcctaattgtgtcttttttttttttaacgaatagaataaaggttggacgtggaaacaggtactggcagctctgtcagcagctgcttgggacaatgtcagttgcagaggccatcaacaatggagagggcgtgagtgatggcagcagctgttctttgtgtgggtcacccataaattgcctgtttatttttaaaaatgaccaaccatactgaacaagtgttgatattatcattagtctgggtatgcacttaggatatccaagaataaaacaggaatgaataataaggatgaaagaattcttgaaaagtttaaattccaaacagctgtgctaacagagtccaacattagctgactgaaacaaatatgaataccag

SEQ ID NO: 347886 - DNA, 560 bp, Homo sapiens
ggagagtagagacattcatacacatactctgtttataacgccagtcattttttcccatttagtcactgtttcatgtatatatagcttcctcacagggaactctaagaagaagaggggaatgaatagaaaaattttgcctgaaaacccactccagattccaagcaccaaatatctgattcaataaatgtctcctaattgtgtcttttttttttttaacgaatagaataaaggttggacgtggaaacaggtactggcagctctgtcrgcagctgcttgggacaatgtcagttgcagaggccatcaacaatggagagggcgtgagtgatggcagcagctgttctttgtgtgggtcacccataaattgcctgtttatttttaaaaatgaccaaccatactgaacaagtgttgatattatcattagtctgggtatgcacttaggatatccaagaataaaacaggaatgaataataaggatgaaagaattcttgaaaagtttaaattccaaacagctgtgctaacagagtccaacattagctgactgaaacaaatatgaataccag

SEQ ID NO: 347887 - DNA, 521 bp, Homo sapiens
gacgtggaaacaggtactggcagctctgtcagcagctgcttgggacaatgtcagttgcagaggccatcaacaatggagagggcgtgagtgatggcagcagctgttctttgtgtgggtcacccataaattgcctgtttatttttaaaaatgaccaaccatactgaacaagtgttgatattatcattagtctgggtatgcacttaggatatccaagaataaaacaggaatgaataataaggatgaaagaattcttgaaaagtttaaattccaaacagctgtgctaacagagtccaacattagctgactgaaacaaatatgaataccagaactgtagatatagagtgtcatagtttaggtttcctgagagcagaccccaaaacaatgatccaagtgcaagtaatttatttggctgatgattccaggaaatactgggaagggagttagggagacagaaaccagaagatagaaamtaaaggccacttcattgaacacatcacaatggtgagtaactaaaacttaat

SEQ ID NO: 347888 - DNA, 471 bp, Homo sapiens
cattaattccagatttatatagtaacattataaaatggctatgtttcaaaaatgagaagtttagataatcaacagttgaatgactaaccacttttgttgaaactgacactacaattcattcttactagagccgtgcttcagkattggctgataataaatgatacgatgttgtttcagaaacctcatcatccctcatgctccctataacttatgtaatatacattaaaaaaggaagtcaggtagatttataaaaataattaaatggcctcatttaatgaggccattctttaagaaaatcaacaaatataagggctagacctatcctcactaaactttctttttttattgatttatgctcatattttctttaaagaaaacagatttttaattagtttccaacataaacaatcttaagtagtctacacctgcaagaataatctgaagaacactttttgacttgtatatgatgtt

SEQ ID NO: 347889 - DNA, 471 bp, Homo sapiens
cattaattccagatttatatagtaacattataaaatggctatgtttcaaaaatgagaagtttagataatcaacagttgaatgactaaccacttttgttgaaactgacactacaattcattcttactagagccgtgcttcaggattggctgataataaatgatacgatgttgtttcagaaacctcatcrtccctcatgctccctataacttatgtaatatacattaaaaaaggaagtcaggtagatttataaaaataattaaatggcctcatttaatgaggccattctttaagaaaatcaacaaatataagggctagacctatcctcactaaactttctttttttattgatttatgctcatattttctttaaagaaaacagatttttaattagtttccaacataaacaatcttaagtagtctacacctgcaagaataatctgaagaacactttttgacttgtatatgatgtt

SEQ ID NO: 347890 - DNA, 548 bp, Homo sapiens
tccttagaggatgccagataaaataactgggagacagctgtttgtggaatcatcttatagaagtatgaagcagaggtagaaattagggatagtcttaatctgcatccgagtatgctacaatcacagcacgagtttctttgggaacttgatgttcatgtttatgtctacacattaattccagatttatatagtaacattataaaatggctatgtttcaaaaatgagaagtttagataatcaacagttgaatgactaaccacttttgttgaaactgacactacaattcattcttactagagccgtgcttcaggattggctgataataaatgatacgatgttgtttcagaaacctcatcatccctcatgstccctataacttatgtaatatacattaaaaaaggaagtcaggtagatttataaaaataattaaatggcctcatttaatgaggccattctttaagaaaatcaacaaatataagggctagacctatcctcactaaactttctttttttattgatttatgctcatattttctttaaagaaaaca

SEQ ID NO: 347891 - DNA, 548 bp, Homo sapiens
tccttagaggatgccagataaaataactgggagacagctgtttgtggaatcatcttatagaagtatgaagcagaggtagaaattagggatagtcttaatctgcatccgagtatgctacaatcacagcacgagtttctttgggaacttgatgttcatgtttatgtctacacattaattccagatttatatagtaacattataaaatggctatgtttcaaaaatgagaagtttagataatcaacagttgaatgactaaccacttttgttgaaactgacactacaattcattcttactagagccgtgcttcaggattggctgataataaatgatacgatgttgtttcagaaacctcatcatccctcatgctccctataacttatgtaatatacattaaaaaaggaagtcaggtagatttataaaaataattaaatggcctcatttaatgasgccattctttaagaaaatcaacaaatataagggctagacctatcctcactaaactttctttttttattgatttatgctcatattttctttaaagaaaaca

SEQ ID NO: 347892 - DNA, 516 bp, Homo sapiens
aactcattttatccgcacaaataccctctgatgtagggatgtagggataattattatctgcatttcaggtgagatwactgaagcttagacaggggaagtgacatgcccagggtcatcagctgatgagtggcagagttaggatttgaaactaggtactgtggtttcaaagctcatgtactttacaattgctaagctacagtctgaactaatgcttctcccttttataaccaaaagaaagtatatatgatgggggaaatccagactgaatataagggaaggttataaccattttttattttcacactggcaggacgctttcttacaagcactaaagcaaaccttgtaggcctccttgaacttttgaagagactctgtgagcaaaggcatcatatcataaaggctgagatcatttcagaagtaatgggacttcaatgtagtaggagcatgtggtgcatagtaaggagtggtaagaagtaagaaggatttcaaacatgtacctatgtcaagctgagggat

SEQ ID NO: 347893 - DNA, 559 bp, Homo sapiens
ctcatctacctaagttaataaaaagaatgacactatcaactgttagcaaagacataaaacaacaagaacactgctggtcaaaatgtaaattagtataactattttgggaaaatgtttagtattacctattaagtttaaagatacacatactttataacccagcaataatattcctaggtatgtactcttcagaaatatatgcatatgtgcatcaagagacacaacagcaaagtactttcaacataaccataaaaaaattcaaaacaatctggaaacaaagttcaccaacattagaatagataaataacttatggtacgcttatgcaacagacaattgtacattaattaatattaacaaactatggacactcaycaatatgtatgaatcttgcaaatattaaggaagccaaaaccaaagcaaaagaaatatatatactacatgattccatttatgtgaagttccaaaaactggcaaaactaacccaatggtgttagaagtcaggatactggtgaccttcggtgagtgggagggaatgatgttttaattgcaatttgatta

SEQ ID NO: 347894 - DNA, 642 bp, Homo sapiens
taaatcttacactatgtaaaagtgaatgaaacacaattgtatgatccaaattcacatccatggatagagaagcaattaattctctgaagaagtttaaagaaacaggaaagaagtttggagtagagatttagatttgtgagtcatcagtctcaaaaggagatcatgcatagaagttacatgggttgagaaaagtaccaaagacaggcctcttgaaaagactcaaattgccttaggtactattttcaaaactagctcttaatcctatccacgtagcaaacttaatcataccacttaattaaaattcatcaatggttctctaatacctggagcccaaaagaaaacaaaaatcaaaatttcttagcatgatattsaacactctacccattctatttttttaacttcccagctgctattttattgtagctatacaaaacaagttataatacctaaatataacttgtcatttcacatcttggacatttatagatccatgtatgccacacaatccacttggaaatttcctacttcatgcttaaaaagtctcctcaactcatttcctctctgaaggcttcacgttgtatccccactcaaccagacaagttaggcctttttatccccatgttctacaagcatacacacaca

SEQ ID NO: 347895 - DNA, 546 bp, Homo sapiens
aaggtcaggagatcaagaccatcctggctaacacagtgaagccccgtccctactaaaaatacaaaaaattagctgggcgtgctggcgcacacttgtacttgggaggctgaagcaggagaattgcttgaacccaggaggcggaggttgcagmgagccaacatcacaccacggcactccagcctggataacaaagtgagactccatctcaaacaaagagagacagagagaaagaaggagagagagagagagagagagagagagagagagagagagagagagagagagggcataggccccttctgaacttattattttagctatattctctttgagatagtacatgcatacaaaaaagtacaaaaatctttagtacacagtctatgacacattcatctactgagttaacaaccatgcatatcaagatatagaacatttcccaaattccagaagacttccttatttactctttcacataatagccctaaaggtatccactactctgagttttatcagcgaattttccctgttcctgaaacttcaatataa

SEQ ID NO: 347896 - DNA, 585 bp, Homo sapiens
tccacccttttgctcatgcagatatctaagcaatcacaaatcttaatcaatttgatcttgtaattatattttaggtacattcttttcatcctcactgcatttaacccggtttgggctcttataatttcttgcctgaaatactgcaagaaacttacaagtattttgtcccccattcaatacccctaaaacatattttctgttgctgatggtttatatatgacaaaatgtaagcagacttctaaaaaaaaaaaaaaccccaccgaaaacaggtggcttctttggagaggttgctgtaactttaggaggggagaagtacactattttaggtatacagcaaacaccttatatatatggagttgattgctatatcacattatcaatccctacccccaaactgccaactccatcagaagatatgcaggattctcaattttcactgcctagtaaagtgactctgaattctctaagaatgtgggtgaagtcacaatgatcttacagttttttaagtttytccctttactattctctttgataaactcacagtaaataggcagctgcttgtgtataggacaaccttatgcctta

SEQ ID NO: 347897 - DNA, 628 bp, Homo sapiens
gatatttgtagatgtattcttaattttgtaataccagtccatgaaatgaaattatggagaataccacagtaagccatactgactattaggaaaaatatttattacatgactatacataaatttatttccaattttacctttcctatttgagagagggagagagagagagtgcacgtgtgtgtgtgtatgtgtgtgagagagatatggtttggatctgtgtctcaccaaatctgatgtcgaattgtaatccccagtgttggaggtaggtcctggtgggaggtgattggatcacgggggtggagttcttatgagtggtttagcaccatcccctcagttctgttcttgtgatagtgagtgagtgagttatgaaatctggttgttttaaaagtgtgtagcacctccaccacttcttgctcctcctctggccatttaagacatagttgcktccccttcacgccttctgccatggttgtaagtttcctgagacctccccagaagcagaagccgctatgtttcctgtacagcctgtataaccatgagccaattaaacctcttttcttcgtaaattacccagtctcaggtatttctttgtaacagtgcgagaacagactaatactgtgtgtgtgtg

SEQ ID NO: 347898 - DNA, 536 bp, Homo sapiens
cgctgtgtagctataaccttgttgactctgttcctgttggtgacatttaagagagaaaacttgttaggcagtaatttatgctttaaattttttaagaagctgtagttatttataatcatccccacacagttcatcactcaattgcatttttccttttaattctgtcattttatgtttgaatgtcttgactaatacrtgaatataaacttcttaaaggaaaggaatataaaaaaaatcaccagaattatctgcttttctgaggccaaagctccatagcacaaatcaggctgttgtgagaaaaaaataagaaagaaaatgaaacaatattaagttcaacagtgttaggaggccacgtggcttgatgcgaagtgatcttgtgggcagggaatcttctagtcttctggtactggacagtcatggcagtgactgatgggaaacatggtcaggagcagatagtggtggacgatgcaaagttgacagagaaaaagaaggcagagggggcagtgatagtggaagtaatggaggaaggagacaag

SEQ ID NO: 347899 - DNA, 548 bp, Homo sapiens
gacccattttacagaaaatgacttttagagatattaagtagcttgctcagggtggtgcagtkctgaagtgttagatccagctgggcttaattctgtattgattttgctccaacgccatagcttactttggctaattattgtcagggaaaatgcttgttgtttcaattatgccaagtgtaggttattgtttctggcataaattgtccaaatttcacttgtacaggattaaataattattttcaacagtgcagctgggaaaacaacttgagtgtagcttttggggttaatttattctggcaggctcttcaagaggtggtattgcatgctagaggagtgataataaaggatattaacattttacaggccaagaaaatgttttcttgtgttctctgatagacaactatgccgtcttggggttaagtactagtcccatcactggagtgattcaaacttttatttccttagaaaaattttggacttttctcccaaggtatctctgctaccttttgaaggctgaaataatcttctatctggttatggaaccttcc

SEQ ID NO: 347900 - DNA, 618 bp, Homo sapiens
tctgggaaggctcattcttggatggtcttgtcctatgttggtggggagaaggagacatctcagtgagaaattttaagagtgccccaaagccgagttgggatgacatcacagagcggcagaaataagacctcagtcaagacattaatttacaaggctactgttacttgttgaatcatctctagttttcagaatactgtgattttagttttctcagaagaagtaaaacaatgaaagatatacagttttaataattgaaatagtagaaataaaatgtataaaaaattataataaaaaggaatttgtatgctagaacaaaaaataaccttttccattagggagccaactaaaaacattatgaagaaaattatatcccagttcttctttagaagcttgtaacaaagtggcttcttttctaatttttcctggcttctatttcatgggaagtatttatraatacataacaagaggtattttccattatacctacacctccttcttcaacacatatatgatctatagcaatgcaattgtctgtacaaccttaaccagggaacccatagctgtttgttgagctgcagttgaggcaagctgtttcattagctatatcctacatttata

SEQ ID NO: 347901 - DNA, 530 bp, Homo sapiens
gagttgggatgacatcacagagcggcagaaataagacctcagtcaagacattaatttacaaggctactgttacttgttgaatcatctctagttttcagaatactgtgattttagttttctcagaagaagtaaaacaatgaaagatatacagttttaataattgaaatagtagaaataaaatgtataaaaaattataataaaaaggaatttgtatgctagaacaaaaaataaccttttccattagggagccaactaaaaacattatgaagaaaattatatcccagttcttctttagaagcttgtaacaaagtggcttcttttctaatttttcctggcttctatttcatgggaagtatttatgaatacataacaagaggtattttccattatacmtacacctccttcttcaacacatatatgatctatagcaatgcaattgtctgtacaaccttaaccagggaacccatagctgtttgttgagctgcagttgaggcaagctgtttcattagctatatcctacatttatagga

SEQ ID NO: 347902 - DNA, 618 bp, Homo sapiens
tctgggaaggctcattcttggatggtcttgtcctatgttggtggggagaaggagacatctcagtgagaaattttaagagtgccccaaagccgagttgggatgacatcacagagcggcagaaataagacctcagtcaagacattaatttacaaggctactgttacttgttgaatcatctctagttttcagaatactgtgattttagttttctcagaagaagtaaaacaatgaaagatatacagttttaataattgaaatagtagaaataaaatgtataaaaaattataataaaaaggaatttgtatgctagaacaaaaaataaccttttccattagggagccaactaaaaacattatgaagaaaattatatcccagttcttctttagaagcttgtaacaaagtggcttcttttctaatttttcctggcttctatttcatgggaagtatttatgaatacataacaagaggtattttccattatacctacacctccttcttcaacacatatatgatctatagcaatgcaattgtctgtacaaccttaaccagggaacccayagctgtttgttgagctgcagttgaggcaagctgtttcattagctatatcctacatttata

SEQ ID NO: 347903 - DNA, 569 bp, Homo sapiens
aaaaaatattgaagtcagcccaaatacaagaggaagagaattagacttcatctttggcaaacacctctgctatgctgaataaaggaattggatgttagtcaggattcagatacactttggaagactacttcattttccttatgtctcaagcttctgatttggttcatattttaagagctgccaagattagatatatcttccttctcttaatcagaccttactcttattcatttaatttctatgagatagcattacataatacatcattgccaaatagttttggtcaacttatcttatttctctaagcctcagtttaaaaaagtctaaaaatatagactgtaaaagctgccttatctgctacattaggttggtgtaagattgccagtgaatcattcatttatgcaacaaacaacaatagtatgacagtaacacttaggatacttagcatgtacctaaaactattccactattctaaagaactatatgttaaatcttsataacagaacaagggccagctttttgtcggatagcatgctataatatgttctggggatataaatactaatagt

SEQ ID NO: 347904 - DNA, 609 bp, Homo sapiens
taatcgcaattcaattatcacttcaaagaaaatgaggaatacttaaggtcattctcagttcatattcaaattcacctttacttgattttctaaaaaamaaacaaacaaacaaacacacacaaaaaacaaaatcctgttctaaacagttggtttcttcaaatcagcttccaaacaagatccattcctagtatttggttacctcttgcctcttgggttctttttaatctaagagccacctccttccctccctcctttaccctccaaccgtcctccatcctttctttctcccattcctctttttttcttccaccccttcttcctatctcccattccattgacttgtagaaacagtaggtaattgtcctgtagataatcccatatttcagagtttagagttttctgatcgttccttcgaggtatttaactaattcccctatttccccatttagactagaagttagatagaaaatcttaattagatgtatgtgtatttttttgcaagactaattcctgagtgatgttatatatttcacatttcacaacattggtggtaaacaatatctttgacttagaattgctgagatgaagttcagatggtgtcaggtgaca

SEQ ID NO: 347905 - DNA, 607 bp, Homo sapiens
acctcaccttttacaggacacctgggtagaatcacgggtcaccaagaagtctctctaacatgtagacagacccttgtgtgaacatgtgtaaaaagttcttggacagaggcattttctagacacgccaattagaaaggacttaggtaagttacaacaagactgcgagcttgaagtattaacagttatttcaactttttgttttgcaattaatttcttagactttcttgatcagatttttcaacccccaattttcccaattgctccactttaacaaataatgtgtatgccaatctgcttacttttccaaggtatggttaggttaatgagtgtcatacagaatgcataagttaaaactgaatcttcggtatcctattcctgtgtatgtcttgctgccttataatttaacctggctgatccacacttagagctttcctgtgctgtcagtggatgcttatgtagtttattacagcttaaattatcatttactattggaaattggatcacaaggaaaaatctagcstttttaattatgtcaattttaaaaattattatgaagacagtagttacatgaactggcagtaatgatggaatttctgaatggtgctag

SEQ ID NO: 347906 - DNA, 575 bp, Homo sapiens
gctttctaatggaacaatttttcaatgtggagcaggacatatttactaacagatctaaatatcttttgtttctctgaaataagaagctaaaagtatataaacttaaactcatatttagtaattactgtcttagcatcatatcttatttggaaatgacttagatgttcaatgaatatcattcatttaaattagtttarcaaaattctaatggtatagttaccaaaagatttgggaaaccttatttgccaaaacaaagatttgagaaacctttaaagtagacatattataaaatctaattattaaaagttcatttataaatttttatcctatttacatttacttaatttattcattcttaacaattatatttggaaaatttcatgagttattagataaacttaaccattgtcccaagttacatttcctattaatcatttttatgttattgcatattaggcaagtatcataaaagcaagaaccttaaatttaaatacatgtgtattttgctaataactcagatacatagttgtttttattaaatcagcaatattaaactagtcttccttgccaaaaga

SEQ ID NO: 347907 - DNA, 495 bp, Homo sapiens
ctgagaggcacctgtccacccacaattcttggggctccatgaggtcgaacagaggtccccccaaaaaagaggaaagtctgtggaaccttttctgttttctttaagaggttccckagatgttagaagatttctttatgtcccctcatgtggtatctaaggtggcaagaggaaggagggacagatagaagtaaatgaaacaacaagtcttggagaagcctgtttgagattttgtcttctgaaaaaccaataaagttttacattattcttggtaaaaatcatatccagaggaggagcaaacagaaggagtgcacagaattatcaggggcttaagaagaaaggaattcctagtagactgagaagcttccatagaacagaggcctcaaaaatatatatgtacatacacagcctaaatgtcagcttttaattgttgacttttgacgataaagctcttaaaaaatatttttttatcaggttttaactgggcaaataacaagc

SEQ ID NO: 347908 - DNA, 495 bp, Homo sapiens
ctgagaggcacctgtccacccacaattcttggggctccatgaggtcgaacagaggtccccccaaaaaagaggaaagtctgtggaaccttttctgttttctttaagaggttcccgagatgttagaagatttctttatgtcccctcatgtggtatctaaggtggcaagaggaaggagggacagatagaagtaaatgaaacaacaagtcttggagaagcctgtttgagattttgtcttctgaaaaaccaataaagttttacattattcttggtaaaaatcatatccagaggaggagcaaacagaaggagtgcacagaattatcaggggcttaagaagaaaggaattcctartagactgagaagcttccatagaacagaggcctcaaaaatatatatgtacatacacagcctaaatgtcagcttttaattgttgacttttgacgataaagctcttaaaaaatatttttttatcaggttttaactgggcaaataacaagc

SEQ ID NO: 347909 - DNA, 632 bp, Homo sapiens
tttgaaatattttgagcatatctgttgaaaacagatcataacttttaacattttgatatctagaggcagattatttctactattagcaaatataatatacaaaataaagtaggccaaaaattctcatttattattatcagtcacatttctctagatagctaatttgctatttaatatttaatatatttgctatttaattaatttaatatatttaattatatagctaatttgctacagcattaaataatcaaattaagtgaataaagatccttgtattatttttgttttttagagaccaggacaaggtctcattctgtcacccaggctggagtgtagtagcatgatcacagctcactgtaacctccaacccctgcctcaaacaatcctcccagcctcccaaataactgagagtaaaggtgtgcagcacagtgyctagctaattttttaaaaaagttttttgaagaaatgaggtctcactatgttgcccaggctggtctcaaactcttgtcctcaagtaatcctcccaactcggcctctaaaattgctgggattataggcatgagccaacacccaggctaaaattattcttaatacagaaattaatagcttcccattaatttttatatagtata

SEQ ID NO: 347910 - DNA, 520 bp, Homo sapiens
ctttcacttaccgtgttttytgggttcatccataatgtaaaatatatcagtatttcatttttaattgtcaaataatctattgtatggatatatcacattttgttatccatttatcagctgatacataattgggctttttttactttttggctacttgaataaaactactataaacattcacatacagatttttgtgtggacataggttatcatttctcttgggcatttatcttaggaatggaatttctttgtcatatggtaagtctatgtttaacattttgaaaaaactaccaatctgtttcccaaaatgactgtaccattccacaatcccaccagtgatgtatgagtgttctaacatttctacctcctcacaacacttgttattgtccttattttagccatcctaggagatgtgcagtagtatctcattattgttgtgacctgcttttctctaattactaatattgctctcaggtggttactggacatttgtataccttctctacagaaacatctattg

SEQ ID NO: 347911 - DNA, 483 bp, Homo sapiens
tcttttattccagcttatcttcattctttagatttcaacttgactatcaattcctctctgaattatcagtttaaatcacctcctcttgtcaataactgctcacagcacccagtacttttctttcataagatatcataattgatgaatacatatttatttgtgtgattattttattccygtctttccaggggaacaaggcgaatgtctattttattcacctccccagaacctcccacagtgcctccgacttagtagataaattcagaaatgattgctcaatgactcaatctatcaatgtttatatctgaagcagagaacagaagcaggtcccagagagttttcaaatggttacctagcccatgaaatcttcactaccaaaaagttgacagtcgttttttcagttttgttgtgaagtatctccagggatagggactccaccatgacctgctttatatcctgttcctatgaaaatcattgttatat

SEQ ID NO: 347912 - DNA, 428 bp, Homo sapiens
aactgtttactctgatagagaggattcttttattccagcttatcttcattctttagatttcaacttgactatcaattcctctctgaattatcagtttaaatcacctcctcttgtcaataactgctcacagcacccagtacttttctttcataagatatcataattgatgaatacatatttatttgtgtgattattttattcccgtctttccaggggaacaaggcgaatgtctattttattcacctccccagaacctcccacagtgcctccgacttagtagataaattcagaaatgattgctcaatgactcaatctatcaatgtttatatctgaagyagagaacagaagcaggtcccagagagttttcaaatggttacctagcccatgaaatcttcactaccaaaaagttgacagtcgttttttcagtt

SEQ ID NO: 347913 - DNA, 573 bp, Homo sapiens
atatctttaatcttacaggacaaaatgaacacattaaagaattctcaatacaagttatctttaatcttaaagagcaaaataacaggttaaagaagttccaacacacattaatgtgttgaaataaagaactgttatatttcttcttacttgggtttgaacaaatacaactaaatggcctggagctttgttccccaacttttagtcattgagaaaaaaatataatgataaccaattggttgaaccttctcatataaagaaaagtgggcaaaggaccttatatttataggtaattagaggagattatgatcgggcargtgctattgattctcataattataatacctataatactttgtggggatgatttttccattttacagaagagtaaactgagagtatagaagctttattgagatgattgaatgaatgattgcagggcattttgcaaggcatgattttattttatcttatattatttagaattgctgtagctaagggacatttctacagcatagacaattcaagtgcttttggaatgactcatcatgaatcaagatatagccccttttctcc

SEQ ID NO: 347914 - DNA, 632 bp, Homo sapiens
tagtgttgtagaaagtagttattacttgtatgtctgttcatatttagaggtaatcaagtgtattttgctatatacatttttactttttaaaaatgttcacacctaaacattacaccagggatataaacttgtggaaatatcagccttttttgctcatctttttttgctgagtgtttctctcaaaactccattaacaatgaatttggctttactattcacacatatgttacatttaaaatgtcctcttttatgatcaggttgcattgcaagagattcatactcagcrtctcacatgaatgattcaacagagattaatgaacataatagcaatttcttattatagtatatatagtaatttcttcttattcactgaaaggagaaacattaataaaaactagtaataactgttaaggttttcttttaatattatatctaaggtataactcacattttcaacttcctacatttattttaaagcaacaaatcttccttgagccattgaagacatttattttgataaatatgaaagatgcaatagttttttgaacactcctccaagtaatctgatacacaatgacatcaagttcatttgaaagcaaatacctattcctgaacttttgtatggtgtttga

SEQ ID NO: 347915 - DNA, 632 bp, Homo sapiens
tagtgttgtagaaagtagttattacttgtatgtctgttcatatttagaggtaatcaagtgtattttgctatatacatttttactttttaaaaatgttcacacctaaacattacaccagggatataaacttgtggaaatatcagccttttttgctcatctttttttgctgagtgtttctctcaaaactccattaacaatgaatttggctttactattcacacatatgttacatttaaaatgtcctcttttatgatcaggttgcattgcaagagattcatactcagcatctcacatgaatgattcaacagagattaatgaacataatagcaatttcttattatagtatatatagtaatttcttcttattcactgaaaggagaaacattaataaaaactagtaataactgttaaggttttcttttaatattatatctaaggtataactcacattttcaacttcctacatttattttaaagcaacaaatcttccttgagccattgaagacatttattttgataaatatgaaagatgcaatarttttttgaacactcctccaagtaatctgatacacaatgacatcaagttcatttgaaagcaaatacctattcctgaacttttgtatggtgtttga

SEQ ID NO: 347916 - DNA, 426 bp, Homo sapiens
tttacaagaagaatcatctaatactttaaaaataactcattgctaacaattatttactattaccaacttcactgytaacataaaatagtatttttttggatttaagttggttttgttttttccttaaatattttaagtgaactatttaatattttgaaactgtctgagatcttttagaccgtatttctggcacaagtgtcaatacaatatacagttctttaataaataactttatgaatctcattggaatgttcattttaagggaaaaatgcccgttttagctattcatttaatgtatccatcaagaataacacttgatatacaattatagattagcttcaggaaaataacgttattttacattaggtatatatttgctttaacaatgagtattatgaaaacactaagtgtttaagagtctaatta

SEQ ID NO: 347917 - DNA, 544 bp, Homo sapiens
tggctttgaagatggaagaaggggccatgagccaaagaatacaggtgatctttagaagttataaaagacaaggaaaaagattatctgctagaccctccaaaaggaacacagccttgcttatatcttgatttgagctccttgagacctatttggatttctggcctctacaactgtaagaaaataaatttgcrttttgttaagccactaagtttctgctaatttgtaatggcaatgataggaaactaacgcaatgactttgaccaatagagtacagtagaagtgatgctaggtgacttcctatactgggccataaaaagctgtttagcttctactttcttctgacttgctcttggagtcctgagatagccaagcaaaaaatctaaacattccaattctaccacactctggataactgcagaccccagagagagcccatgtgtaggcactctggttggaagccccagttaagacttcaagttatcccagcctaggcgttagacatgtgcataaagaagccttcagaggattttatcccctagccatt

SEQ ID NO: 347918 - DNA, 572 bp, Homo sapiens
agtttctgctaatttgtaatggcaatgataggaaactaacgcaatgactttgaccaatagagtacagtagaagtgatgctaggtgacttcctatactgggccataaaaagctgtttagcttctactttcttctgacttgctcttggagtcctgagatagccaagyaaaaaatctaaacattccaattctaccacactctggataactgcagaccccagagagagcccatgtgtaggcactctggttggaagccccagttaagacttcaagttatcccagcctaggcgttagacatgtgcataaagaagccttcagaggattttatcccctagccattaaaatagccctctccccttctcggttttctgggtaatgccttagataccatgggacagaggcaatgtatgcctacatttggactatgccctgtccaaattcctaacacatgtaatccatgagcatacaaaatattggtagttttataccactacgttttgaggtgtttttttgaaaaacagcaattggaacagactttggtttctggtagtgggtgttgccataacaaacccaaa

SEQ ID NO: 347919 - DNA, 544 bp, Homo sapiens
tggctttgaagatggaagaaggggccatgagccaaagaatacaggtgatctttagaagttataaaagacaaggaaaaagattatctgctagaccctccaaaaggaacacagccttgcttatatcttgatttgagctccttgagacctatttggatttctggcctctacaactgtaagaaaataaatttgcgttttgttaagccactaagtttctgctaatttgtaatggcaatgataggaaactaacgcaatgactttgaccaatagagtacagtagaagtgatgctaggtgacttcctatactgggccataaaaagctgtttagcttctactttcttctgacttgctcttggagtcctgagatagccaagcaaaaaatctaaacattccaattytaccacactctggataactgcagaccccagagagagcccatgtgtaggcactctggttggaagccccagttaagacttcaagttatcccagcctaggcgttagacatgtgcataaagaagccttcagaggattttatcccctagccatt

SEQ ID NO: 347920 - DNA, 572 bp, Homo sapiens
agtttctgctaatttgtaatggcaatgataggaaactaacgcaatgactttgaccaatagagtacagtagaagtgatgctaggtgacttcctatactgggccataaaaagctgtttagcttctactttcttctgacttgctcttggagtcctgagatagccaagcaaaaaatctaaacattccaattctaccacactctggataactgcagaccccagagagagcccatgtgtaggcactctggttggaagccccagttaagacttcmagttatcccagcctaggcgttagacatgtgcataaagaagccttcagaggattttatcccctagccattaaaatagccctctccccttctcggttttctgggtaatgccttagataccatgggacagaggcaatgtatgcctacatttggactatgccctgtccaaattcctaacacatgtaatccatgagcatacaaaatattggtagttttataccactacgttttgaggtgtttttttgaaaaacagcaattggaacagactttggtttctggtagtgggtgttgccataacaaacccaaa

SEQ ID NO: 347921 - DNA, 579 bp, Homo sapiens
ttatatcttgatttgagctccttgagacctatttggatttctggcctctacaactgtaagaaaataaatttgcgttttgttaagccactaagtttctgctaatttgtaatggcaatgataggaaactaacgcaatgactttgaccaatagagtacagtagaagtgatgctaggtgacttcctatactgggccataaaaagctgtttagcttctactttcttctgacttgctcttggagtcctgagatagccaagcaaaaaatctaaacattccaattctaccacactctggataactgcagaccccagagagagcccatgtgtaggcactctggttggaagccccagttaagacttcaagttatcccagcctaggcrttagacatgtgcataaagaagccttcagaggattttatcccctagccattaaaatagccctctccccttctcggttttctgggtaatgccttagataccatgggacagaggcaatgtatgcctacatttggactatgccctgtccaaattcctaacacatgtaatccatgagcatacaaaatattggtagttttataccact

SEQ ID NO: 347922 - DNA, 572 bp, Homo sapiens
agtttctgctaatttgtaatggcaatgataggaaactaacgcaatgactttgaccaatagagtacagtagaagtgatgctaggtgacttcctatactgggccataaaaagctgtttagcttctactttcttctgacttgctcttggagtcctgagatagccaagcaaaaaatctaaacattccaattctaccacactctggataactgcagaccccagagagagcccatgtgtaggcactctggttggaagccccagttaagacttcaagttatcccagcctaggcgttagacatgtgcataaagaagccttcagaggattttatcccctagccattaaaatagccctctccccttctmggttttctgggtaatgccttagataccatgggacagaggcaatgtatgcctacatttggactatgccctgtccaaattcctaacacatgtaatccatgagcatacaaaatattggtagttttataccactacgttttgaggtgtttttttgaaaaacagcaattggaacagactttggtttctggtagtgggtgttgccataacaaacccaaa

SEQ ID NO: 347923 - DNA, 617 bp, Homo sapiens
gggtaggagcatctaaccttatctgcagtgctgagacgttttcctctgaataataacatctcaattgaaggctaacaggaagggagaggatgttctaaaccaaaggaaggtcatgtaggaaggcttgggggtcacacactcatgtaatatttgagaacataaattaagtttctatattcctggagcctagaatgcaaggaaagaaagattcttaaatctttagattcttaaataaataggaaatcaggacttgaaacaatttatataacacacaccaagtaatttgttttttatcctaatggcaagaccaagatgttttaagcagggaggtagcattatatgttaagcttagcaatattacrttgacaaagtaggaagaatgggttaagaggtagtagagacaaagcagaaagccattattagaacaatctagggcagacagttagtgggcttagtagtggctatagagatgaagagtactaaacagattttagaacacattaaacagtaagaaacagtggatatcaaaaaggaagcccagtttcattcttgggcaagtgattgaatggtggcatcaacctttgacaaagagaaccaaaaagaccagctagtgagag

SEQ ID NO: 347924 - DNA, 593 bp, Homo sapiens
attacattgacaaagtaggaagaatgggttaagaggtagtagagacaaagcagaaagccattattagaacaatctagggcagacagttagtgggcttagtagtggctatagakatgaagagtactaaacagattttagaacacattaaacagtaagaaacagtggatatcaaaaaggaagcccagtttcattcttgggcaagtgattgaatggtggcatcaacctttgacaaagagaaccaaaaagaccagctagtgagagaatatggtaaatcacaataaaatgtttggctccctataaatataaaattttaaaaaattatattataagcatgagaaactaatttctcatatgagaatatctcttcagggatgttttaaaaaataggtgtttaaagaaaaacattaataaaaagcaagcatatttgtacattaaagatgaaagcattaagaaattcaccttgcaggaaagcagtaaggccaaaaataatcaatggttgctatttctagcttttatattcaatatataaatactcccatcagaaggaagaacctatcctttaagagactgcctcttcaaaagaaaagacacca

SEQ ID NO: 347925 - DNA, 461 bp, Homo sapiens
ccatcacatggccagccagccaaattatccctcatatcacaatataacacacctacattgaaaggccagatttgctatactcatcaactaaaaataaacacttccttccttgccacaatttcccacttagctgaaacaacacaatattcattttgattgacaaaatattttcagatctaattacaatttccaacagtgtctgaacatgytgtgttttcattaagaattccatcacaattggataattcacatatcaatacaagtctagggcactggtgatatcaaacatctgtattgttgcccatgcagttgataaattggtaggatcagagttagcttattttgttacagagtatcattaataaggccaagatcaagagcttagttcctttctagagaaggtaaaattgctttcttcagcctaacagaggccaatacattcataaatgtgtatcgctgat

SEQ ID NO: 347926 - DNA, 461 bp, Homo sapiens
ccatcacatggccagccagccaaattatccctcatatcacaatataacacacctacattgaaaggccagatttgctatactcatcaactaaaaataaacacttccttccttgccacaatttcccacttagctgaaacaacacaatattcattttgattgacaaaatattttcagatctaattacaatttccaacagtgtctgaacatgttgtgttttcattaagaattccatcacaattggataattcacatatcaatacaagtctagggcactggtgatatcaaacatctgtattgttgyccatgcagttgataaattggtaggatcagagttagcttattttgttacagagtatcattaataaggccaagatcaagagcttagttcctttctagagaaggtaaaattgctttcttcagcctaacagaggccaatacattcataaatgtgtatcgctgat

SEQ ID NO: 347927 - DNA, 558 bp, Homo sapiens
taggagatatatattaagagatttattgcaaggaattggcttacatgattgtggggacgggctaggcaagtcaacagttcttagagtacattttcaaggataggctggaactctccagcaggagctgaagctgctattcaaaggcagaatttccttcagctctgcttttaagacctttcaactaaaaggcccacccggratagcaaggatagtctctcttacttaaagcctactgattatggattttaatcatattcataaaataccttcacagcaacacctagattagattcccatttgactgaatagctggagactgcacctagaaagattgtcatgtaaaactgaccatcacaccaatgcaatttaaatttttccaatttgaacatttaggcaatcctcttaggtaaacatcagcctctcatttagataaaaatgtgctcctcagaccaccttcctctcaaccaccttcccctgctgtgatggtgtccagttgtcagtgggtgagtgttctgggaaggttgtgccttgtgagatctgaggtcctgggagggcctc

SEQ ID NO: 347928 - DNA, 558 bp, Homo sapiens
taggagatatatattaagagatttattgcaaggaattggcttacatgattgtggggacgggctaggcaagtcaacagttcttagagtacattttcaaggataggctggaactctccagcaggagctgaagctgctattcaaaggcagaatttccttcagctctgcttttaagacctttcaactaaaaggcccacccggaatagcaaggatagtctctcttacttaaagcctactgattatggattttaatcatattcataaaataccttcacagcaacacctagattagattcccatttgactgaatarctggagactgcacctagaaagattgtcatgtaaaactgaccatcacaccaatgcaatttaaatttttccaatttgaacatttaggcaatcctcttaggtaaacatcagcctctcatttagataaaaatgtgctcctcagaccaccttcctctcaaccaccttcccctgctgtgatggtgtccagttgtcagtgggtgagtgttctgggaaggttgtgccttgtgagatctgaggtcctgggagggcctc

SEQ ID NO: 347929 - DNA, 602 bp, Homo sapiens
aggaattcctattttccaatgagaatttcaagcaaacatttatttttagaaagctaccaacttaatgttgagagtagtccagktctgtggacctaataggagctggctaatgagtgttttactttggtttggcagtactttttaaattattaacagtttagaaatgagtccagtaatcagtaaaaattttcaacagaaatttacttattatatagcaaataaaaacttaaagtgcacaatggtttactaatttcttacaggctttaaggtggataattaaaatgtaattagacaaaacaatgataacatcaaacaattggaagaaacattaagatttttaataaatgttgagatatatcctattggaaaaatatttctggaattatagcaaaagtcagtatagaatatgacacaatataaaaatactaagaactaaacaccacttagttgtagacaactaagtacaagttttaaagtaggcattaatgaaaatatcattagtcacatactatgtctgcccagtgatatcatttaacatttctatccaaacaaaaccaaactggcaactaacttgatagtataatttgcgataaacctaaatt

SEQ ID NO: 347930 - DNA, 612 bp, Homo sapiens
tacctgttgggaaacaaagggtaatctgtgataagtagactgtcaggcccctcattacaaatgtgtcattaaaagaatgtacgttcactttcattcatatatcattcacttacattcacacatactcaatcacattcttctggcttgggccaatgtgtgttagggatcaagtacagagtatagtaaatggtgttgttggtaaggaaagaccaagtgtgatacaaagaatataaatgaatatrttctctccaaaatgttgttagctgacaacaaaaatataacctctagcttgatgcagtcagtgtaatgccaatcacaacctcttctccataatcaacactctttacctgaaggcaggcttgatatggggggactgtgagagccaacaggagaaagtagtgacacttctcatttcaatttatttctatccaggcagttccactatagaggacagcagtttaagagaggaatgagcttcaggaaataagcaaagatgctttctgatttaatcctgagtttaattaaatacccacggaaatcctattatgtgccattttaaaattgtgcacactgccttattaggcccactagaataatctaaaagtgatgttg

SEQ ID NO: 347931 - DNA, 559 bp, Homo sapiens
atctaacttgcagtgttgctattgcatttagctgttgtcagcctcaccggcctgactactgatcaccgttcacaggtggatttgatcaattagttgctaagcacacaaaaaaggcagaggtcagacaccatcatcaactagggacaaaatgaggcacagatgtccataacatggcaacagggtaacaggcaatcagctggkaaccacataccattgttgatattacaacctgaattcacatcacataaaacaattaggaagaccaatccttacagctgttatgcaaaacaacagagaagccaaacagtgtgctgtggaagcacctggcttatttttgagccaaacaatttcttaggtggcaacatgtagaagagagaatgtattatttattgaacattcatactacaagagagtaagagggcaaaatcatgtctcaaatgaaataacgaatcaataaaaactcactccattctatttcaaaaaagaatctcagaggattattccctgattctgtaataaaaaaggtgcatcactctatgctagtactgcaataatagtt

SEQ ID NO: 347932 - DNA, 550 bp, Homo sapiens
attttctgtttatgctccataaagtttttatgacttacaatcataacatttttagagtggaagtctatgtaaaatatatcatttttgttattcttcttcagaatgaaggattaaactgaagattaaaagaaaatttccacgaagttttgattatgacagcattgtggagcacgtactgggtttgaagctgctttagtattaccttcaatgaatcctgagaaatgcagtgataatgcttagcatattatatatatatatatatatttctttttctttttatattttagataagagtgcccaggagtggaatctggaaatagagtctacatttgatgttgtcagctcaaagccagttggtggtcaagtgatcrtagccatccctaagttgcaaacacaacagacatacagcattgaacttcaacctgggaaaaggattgttgagctatttgtgaacattagcaaggtaaatgatggtacttcctgagaagcactggatgaaaagcaatacctgtgctaaagaaatgattagaaaggagggactaagtatgaa

SEQ ID NO: 347933 - DNA, 581 bp, Homo sapiens
aacctcagcaggcttgatgatgtgggggtgggaaaaaagaaggagttargaatggttcctcagctgctggtttgggctgctgaacaggcagcctctgaacaggcagggcaactctgttcattgagttacattactcagaaagaagagaaggtttgggggaaggggttgggtggaaattatttcagtgttagatgtgttttgtgtggggtgattgagagacacccaaggaataatatttgataggtgtttcattagatagatcttaagcttagggattgcatgtgggttaaggatatagatgtgtaagttagcagaatgtagataattgtagccatggtagcggatgaaatacctcagggatggcacagagaaaagagctaggacagaaccccaggcagtcataattagtaaggttggggtttggggagaagccagtagaagaatctaagaaggaatggttgacgaggtggagggaaaaccaatttgagtggggagtcacagaaaccagagggaaagagtgttttaagaagcaaagaatgttcagagtgttaaatgctgcaagggagttcaagttagaaaag

SEQ ID NO: 347934 - DNA, 581 bp, Homo sapiens
aacctcagcaggcttgatgatgtgggggtgggaaaaaagaaggagttaagaatggttcctcagctgctggtttgggctgctgaacaggcagcctctgaacaggcagggcaactctgttcattgagttacattactcagaaagaagagaaggtttgggggaaggggttgggtggaaattatttcagtgttagatgtgttttgtgtggggtgattgagagacacccaaggaataatatttgataggtgtttcattagatagatcttaagcttagggattgcatgtgggttaaggatatagatgtgtaagttagcagaatgtagataattgtagccatggtagcggatgaaatacctcagggatggcacagagaaaagagctaggacagaaccccaggcagtcataattagtaaggttggggtttggggagaagccagtagaagaatctaagaaggaatggttgacgaggtggagggaaaaccaatttgagtggggagtcacagaaaccagagggaaagagtgttttaagaagcaaagaatgttcagagtgttraatgctgcaagggagttcaagttagaaaag

SEQ ID NO: 347935 - DNA, 541 bp, Homo sapiens
cacacctcaaactctcccctcccttctgcgagcctccccagtaatgacccctgtttccttcccgaagatccactatcctgacatccatcactaggttacttttgtctctttttgaattttatgtacatggaaccatatagcatgtattttttagtgtgtggctaatttggctcagcattatgtttttgacatttaggtacagtagtgcctccttatctgtggtttcagttacccatggtcaactgtggtctgaaaatagtaaatggaaaactccagaaataagcaattcatgagttttaaattgctcactgttctgtgtagcatgatggcatctcgtgctgtcctgccctgtcttgtccaggacatgaatcatcgctttgttgagcatatccttgctgtatacattatccacctgttagtyactcagcagccttctcctttatcagacagaaaaagtcatagtatatatggggttcggtactatctgcagtttcaggcacctactgggggtcttggagcgtatcccctgcagataaggggg

SEQ ID NO: 347936 - DNA, 633 bp, Homo sapiens
atgctccagttagaattctagctctgggcaagtttatgtgcctctataagaagggtatctgttgtaatatgaacaataaatgactgtgtgcctaatatgtaccaggcactgttttagacattggggtggcagcagtgaacaaaacaaattttaagttcctagatttgttttgacgattaaatggattaatgtgcaaatttgaacaggctcttggcacatgacactcctagttattactgctattttaatatcacaatttataatttttaaaaaycgtttttgtttaagaactttgatttctagtttagtactcttagttaaccaggttgtctccttttgtaaatattttgaagatttatgtaatatagacacaacataaaaacttggcatattggaaaaaccagtgtttatgtgaacattattgattcaacttacagaaactttgacgtgtgcatgtggtttggtttttcagctgttaatgttaaaatcacatgaggcaactttcaaacattccacatccaacaattttagtgagtggacagctctgaactggaatgctcttcggtttaggcacctcttctagaaatatggggtcaagtagccattgatgtcagtatggtatgcttgtgttac

SEQ ID NO: 347937 - DNA, 633 bp, Homo sapiens
atgctccagttagaattctagctctgggcaagtttatgtgcctctataagaagggtatctgttgtaatatgaacaataaatgactgtgtgcctaatatgtaccaggcactgttttagacattggggtggcagcagtgaacaaaacaaattttaagttcctagatttgttttgacgattaaatggattaatgtgcaaatttgaacaggctcttggcacatgacactcctagttattactgctattttaatatcacaatttataatttttaaaaatcgtttttgtttaagaactttgatttctagtttagtactcttagttaaccaggttgtctccttttgtaaatattttgaagatttatgtaatatagacacaacataaaaacttggcatattggaaaaaccagtgtttatgtgaacattattgattcaacttacagaaactttgacgtgtgcatgtggtttggtttttcagctgttaatgttaraatcacatgaggcaactttcaaacattccacatccaacaattttagtgagtggacagctctgaactggaatgctcttcggtttaggcacctcttctagaaatatggggtcaagtagccattgatgtcagtatggtatgcttgtgttac

SEQ ID NO: 347938 - DNA, 603 bp, Homo sapiens
aatgtttaaaaatatttttgctacaatggctttgaagaacattgaagaagaaggccagtcaattggccttgattgatcaagcttgacagatttcccttcattccttgagattcttgagaaatttggcacgctgagccatgcagtaaaattacaaacaagtctctacctaaaaatatctggctttgacgatgcattataatttccttccacttataaatcctttattcttgaggtgtggttatttgttgcaaatctcacagatgacatctttctaagccatgaccttaaacccttagttggaccaggaaataccataaggtgatccaagagaatggccataaaaagaaagcatgtgcagcaggaaaccaatcattacagccaatttgtagatgaatcaatttatggtactttccctttttatgatgcctaatactttgatggaaactaaaagcagtagtggttatgtagcttttaatactattcatctttgaaaaaatttacaaacatcagttattgcccmtggctcattttaagataagtaagtccctaaaaagaaaggcatatctccatttcagaggtaaaaaagaaatggcacaaagaagc

SEQ ID NO: 347939 - DNA, 603 bp, Homo sapiens
aatgtttaaaaatatttttgctacaatggctttgaagaacattgaagaagaaggccagtcaattggccttgattgatcaagcttgacagatttcccttcattccttgagattcttgagaaatttggcacgctgagccatgcagtaaaattacaaacaagtctctacctaaaaatatctggctttgacgatgcattataatttccttccacttataaatcctttattcttgaggtgtggttatttgttgcaaatctcacagatgacatctttctaagccatgaccttaaacccttagttggaccaggaaataccataaggtgatccaagagaatggccataaaaagaaagcatgtgcagcaggaaaccaatcattacagccaatttgtagatgaatcaatttatggtactttccctttttatgatgcctaatactttgatggaaactaaaagcagtagtggttatgtagcttttaatactattcatctttgaaaaaatttacaaacatcagttattgcccctggctcrttttaagataagtaagtccctaaaaagaaaggcatatctccatttcagaggtaaaaaagaaatggcacaaagaagc

SEQ ID NO: 347940 - DNA, 603 bp, Homo sapiens
aatgtttaaaaatatttttgctacaatggctttgaagaacattgaagaagaaggccagtcaattggccttgattgatcaagcttgacagatttcccttcattccttgagattcttgagaaatttggcacgctgagccatgcagtaaaattacaaacaagtctctacctaaaaatatctggctttgacgatgcattataatttccttccacttataaatcctttattcttgaggtgtggttatttgttgcaaatctcacagatgacatctttctaagccatgaccttaaacccttagttggaccaggaaataccataaggtgatccaagagaatggccataaaaagaaagcatgtgcagcaggaaaccaatcattacagccaatttgtagatgaatcaatttatggtactttccctttttatgatgcctaatactttgatggaaactaaaagcagtagtggttatgtagcttttaatactattcatctttgaaaaaatttacaaacatcagttattgcccctggctcattttaagataartaagtccctaaaaagaaaggcatatctccatttcagaggtaaaaaagaaatggcacaaagaagc

SEQ ID NO: 347941 - DNA, 621 bp, Homo sapiens
gtcttaccccaggatgttttagtgcgctctaattctctgaaattcttagatggtatccataattctgaatattcaattatccagcatatagttgcttatctacccaggatagaaaggaattttgctatattcaaaatatcactttctgcctaaatatattcaaattttgcataaactgaagttctataaagaatcaaatatcaaaatacaattaagctagattattggcagctgcagtaacagaataagatctctgagtaacacaacgcatggcakatcagagccagtaactttgtctctataaataacaggaagttccatgacaatgctttacacagtgctatgtagaaaaactgaactgagatacagagatgtttggtaggtcatagagatggctatactctagaacgtgaacacagggatagacacaaagtacacgtaacaaatgactaactcattatgttttttctttcaaatgcagtacaactatggaatatccaaaatagaattaactatatgataaaataaacctacagaccaagttaaaaattacaaccaaatcaatgctggattttcacttaaaactaaatttaaaaattcttaatacttacaggtcccata

SEQ ID NO: 347942 - DNA, 614 bp, Homo sapiens
ctgaatagccaaggcaatcctaacccaaaagaacaaagccagaggtataacagtacctgacttcaagctatactaaaaggctacaataaacaaaacagcagggtactggtacaaaaatagacacatagaccaatggaacagaatagagacccctgaaagccacacacctacaaacaactgatctttaacaaaattgacaaagctaaataacgaggagaggacacccaattcaataaatgttgctaggaaaattggctaactatatgcagatgaatgaaactgtacccacacttcccattacatataaaaattaactcgagatggawtaaagacttaaatgtaagacctcaaactataaaaattctagaagaggccaggcgtggtggctcatgcctataatctcagcactttggaggccagggcaggtggaatgcttgagcccaggagtttgagaccaccctgggcaacatggtgagacctcatgtctattaaaaaaaatgctagaagaaggcctagaaaatactcttctagacattgatcctggcaaataatctatatgatgaagaccccaaaagcaaatgcaacaaaattaaaaaatagacaaattagactta

SEQ ID NO: 347943 - DNA, 483 bp, Homo sapiens
aatatatttggagacttcagcagccctccatcagtaatagagagatctagcaggcaaaaaaatcagtaaggacaaagttgaactcaacaataccatcaatcaactgggtatagttgacagctgtagaccatttcatccaacaacaacagaatacacattcttctgtaggtcacatagaacattcactgagatagaccayactttgggccataaattacaccttaacaaatttaaaagaatataaattacaaaatgtggaattaaactagaaagcaataacagaatgaaagctggaaaacctcaaaatactggatgattaaacagcacaattccaaataacacacaagtcaacaaagaaatctcaagataaattaaaacatttttaatacattaattaaaaaacaattttatcaaaatgtgtgggacccgcaaagcagtgcttagaaatttacagcattaaagtcatgtattaggaaaaaagaa

SEQ ID NO: 347944 - DNA, 599 bp, Homo sapiens
acatgtacaaagcacgttgcatagcttctcatgtacagtaggtgcagaatacaatgagggaaccatcattttcccattcacttacattttctgaagtaaatgcatgaagagactaaatacacatcttgtagcatttttcaaaacatgttctaagaaacattttcctctaacccctcaacctccacctcaacccttaccctcactggcaaagatttcaaagtttacttagtttgggaaaagttatgttttcctgtrtaggatggaggagtttacaatgctcagaagcatcttaaaagaaagcctggagaaagaaagctattttaatcttgcttagattatctgtttatctgttggcttccagcagcattcactgctttgctgggaactgcattgctgggaactgcatttacctggctttcttgccaaaggaaggaactatcgaaaactggaaggtacaaagagagaggaatccagtatgttcttatttcactttcagtggtgtctctttcagggactgtatctccacagtggtctcctctggttctgagaccactggaaaactcttccctccatggtcctggctcccaaaagacagcctc

SEQ ID NO: 347945 - DNA, 545 bp, Homo sapiens
taaacagggcataaatatgcagagataagtcatgtttaccttgttcttaccctgcacagatcactggttttactagttacaaaaaactacttgtattatatgaatagggatactaytttttcaacataatttttgagactgctatacaacagggcactttaaagaataccgttgtgtgcaatgatagctattggcattgataagactctccagaaagtctgaaataaccatcttaattgttgatgtataaagagaaagagaagaatctttccatgtggcatcagctcaaaggagcacagagccagatggaaatatttctatcataagataggcatttcaccatttaggaaggctgaagaaaaggcaacaaatcagccaccaacagcaagacaatttttcaaaagtagttagtcctcaagaataacaatattgagcaaattgtctacaaaactcgagctcttctctggtaactctatggctgagaacaatatctatgaactgtctctggtgcactagagacttctttaaagtatggcaaccttaac

SEQ ID NO: 347946 - DNA, 493 bp, Homo sapiens
aaaatgaaacagaaggagccaggtttgtctcaggctagtgctgttacacgcgtaagtttcagacatcccctgaatacaaaatgattttttttccccctgcattgacaaaagtccgtcttgcagggggaaaaaayagtagagaataaaacaaacaaatccacacaaacacacaaatctagtttcatgctagatgtatctgttgtgaagcaatatgttggctgaatagggaaagtcaggtgagttaaagtcttgtggcagcctgatttaaaccatggctacacaaaccagagccctgtccagatctcaggaaagtgaattatatataataacacttacagtttcctactactattagatttgccttcttacataaatgcttaagttatgataaaaaacagggccatgtcagttcctttcagtctcagcacatttgctattagcataagaaatgctgcttatggcagagctagtcgggcttgaaatttctgaatta

SEQ ID NO: 347947 - DNA, 493 bp, Homo sapiens
aaaatgaaacagaaggagccaggtttgtctcaggctagtgctgttacacgcgtaagtttcagacatcccctgaatacaaaatgattttttttccccctgcattgacaaaagtccgtcttgcagggggaaaaaacagtagagaataaaacaaacaaatccacacaaacacacaaatctagtttcatgctagatgtatctgttgtgaagcaatatgttggctgaatagggaaagtcaggtgagttaaagtcttgtggcagcctgatttaaaccatggctacacaaaccagagccctgtccagatctcaggaaagtgaattatatataataacacttacagtttcctactactattagatttgccttcttacataaatgcttaagttatgataaaaaacagggccatgtcagttcctttcagtctcagcacatttgctrttagcataagaaatgctgcttatggcagagctagtcgggcttgaaatttctgaatta

SEQ ID NO: 347948 - DNA, 558 bp, Homo sapiens
ttttagtcacttcgttttgtaggtatgtaataaaaaaccctaagatattgactagaaaacaatggccagttagtgggaaaaaggaaactgacacatttactcaccatttaaaaatccttcattcatacaagtttgcctccttttcagaaaaaatagtaaattacttttatttattattagttaaaaaccagaatttctatttgaaataaaatattttccccttaagaagaaggcagacattaaatagtattatcttaacatttccwaattcccttttccattaccactttattttccagagaaatggcagttgatttgcccgtcagccaccattatacaaataatgtcttcagctattctttgaactatgcatgttagcagcaaaagtacaaattcacttttgtattttggtcactctgtttttcatggacctaaactcacaaaacaatattatctctgattctcaaatcttttgctcagagtgaaatgtattttattctggaataatacaaactgaacttatctttttcctcaaattcaaagtgttccaaaggtatc

SEQ ID NO: 347949 - DNA, 585 bp, Homo sapiens
atcatgcctacataatgaagccttcataaaaacccaaaaggacagggttggggtgggagggcttccggatagctgcacatgcagaggctttcaggaatgtgaacaaaaactcatccacatgccaggagggtggtgcaccacaactccacagggacagaagtttctgtgctcaggacacttccagaccttaccctatgtatctcatcatctggctgtttatttgtaatatcctttataataaactggtaaacataagtacatgtttgatttctgctagctgctctagcaaattaattgaactgagagaagagattgtgggaaccccaacttgaaatcagtcatcagaagtcccagaggcccagacttgaaattgatgggaaagtgcggggttgggagggtggtggttcttgagggaccaagccctcttcctgtgggatctgatactctctccagatagacagtgtcagaactraactggaggacattcagctggtgcccattgcagacctgctttcttgcttggtgtatgggaagaaatccccaaacctttggtcacagaaagcttctgtattgcttattgttgta

SEQ ID NO: 347950 - DNA, 564 bp, Homo sapiens
atatacatgttgaggggtgttttsgggaaatgcagtgcggaggacatctacataacaataagagtggagtttcctgtgtaagtaacgtggccccgttaggagggcacacgtccctagttcaatgtttgttgggttatcattcttttctcttaacttaactcaaactgctaagagaccctttgcttagctactgaaagaatatggcaatttacagcaattaacagaactgacctagtctctactcttttttggtaatgttccacacatacagttcattatttcattttcacagtaaaaggaatagagtaagcaaggccaaaatctcgtggagttaattagacttctgctgtttattatttgacaaatttcctcttttatcctcacttccttaattttacctcttagtttcttttcacatgaaacatttgttccaaatgaaatcatctcagttagagaagtgataagcaagtgggaaatggaactctatttcagtggctccagaggccagctctctgagtttgcagtcactttgagagcacaacctcatacaggcaaatagaacat

SEQ ID NO: 347951 - DNA, 567 bp, Homo sapiens
gacactgaggtctacttcagggtatagggtgagaggaaggaaaggagcagaaatgataactattggataccaaactaaatacctgggtgatgaaataatctgttcagtgaacccaagtgacatgagtttacctatgtaacaaagcttcacatgtccccgagcctaaamgttaaaaagaacaacaaaaagctttcagtgaccaagtatatatgagaaacataacatgtcctggacccattgtagagtaacaatgtacatttcattatgaagacctatgctaaagaaatcagggtagccaattaaacctatggactaattttaaatataaaatttaaaagagatgtcttttctctcctttattatactttttatcctcctgtggagctaatattacgcagagctggttggaagattttccagatttatactctactaaagtttgtagctgcatcacgtccctttggaggtgtaggtgggtgtaaatcaaatctataaacctttgcagttagtcttttgagtgcctcaaaaagtgtttctgcaaatatcaacttaataaacaaagagcag

SEQ ID NO: 347952 - DNA, 538 bp, Homo sapiens
attctttcttggcatcatctctcacttgccacaatttgcagccagaaaacacttatttctacttttcttactctagaaataatccagccttaagtggatctaattccttcccagaagagaaacagccttgtcaggacttggttgtgtgtgctgtgtttgaggcatcaaggtttccatttacggcacagctgcacggactccgaaagctggtgctgagccagagctctgtacccactgagatctgtagtctggaatgataaacacacagctgcctgtggcgagggccacaggcataatagatggccacatctcaaccagagtcaagcgaagcctacmcaaatcattaatccaactgcttatatgttaaatatcacaaactgtgtacgaaatggtgagctatctcagtggaaggaggggaaaatggcagaggcaatttaaggaaacaggagagtaagtggctgtaagtcctctgcaaagtcctgctctagagctgatttactgccaccaagccctcttgctgcaaatagttcataaagcc

SEQ ID NO: 347953 - DNA, 554 bp, Homo sapiens
tttggttgtgagagttctttatatattctgaaacaagttttttttttttttttttatcagatataggctctgaaaatattttgtcttagtctatggcttgtcttttcattgtcttttcaaagcctttgaaagagtaaaatatttaatcttgatgaagtcctatttatcactttyctatggtttctgctttttattgctctaagaaatcttcacctaacccaaggccactaaggttttttcttatgctttccccctcaaaatgttacagttttaagtctgtgatccttccagttaattttcattcatgatgtgatatatgggttgaggttttatttgcatacagctgtccaattattccaataacacctactgaaaatactaatttatttattgaattgcctggaacctttgttgcaagtccattgaccatatatgtgtgggtctatttctggactgtttgtttagtctgttccattgatctttttctttgtcttttcactttgtctcactgtgttaattgctgtagagtttcagtaggttgggtactattagtt

SEQ ID NO: 347954 - DNA, 578 bp, Homo sapiens
gttctttatatattctgaaacaagttttttttttttttttttatcagatataggctctgaaaatattttgtcttagtctatggcttgtcttttcattgtcttttcaaagcctttgaaagagtaaaatatttaatcttgatgaagtcctatttatcactttcctatggtttctgctttttattgctctaagaaatcttcacctaacccaaggccactaaggttttttcttatgctttccccctcaaaatgttacagttttaagtctgtgatccttccagttaattttcattcatgatgtgatatatgggttgaggttttatttgcatacagctgtccaattattccaataacacctactgaaaatactaatttatttattgaattgcctggaacctttgttgcaagtccattgaccatatatgtgtgggtctatttctggactgtttgtttagtctgttccattgatctttttctttgtcttttcactttgtctcactgtsttaattgctgtagagtttcagtaggttgggtactattagttcacccactttgattttttccattttttggtggggagt

SEQ ID NO: 347955 - DNA, 557 bp, Homo sapiens
attaaaaagcgtacaaaaatcccacttttagttactgaactctccattatggatatatgacataatcattcccctaatgctggacagtttccaggttccaccaaatactactgtgagacccatcctatatataaatccacatctgattattttcttgggatagattcttaagtagaattgtggtatcaaaggctctgctaagctcccttccaggaagaccaacaatttacattcccccagaagtgtgtaagagtgcggcatccacagcaacactaagcattcttttaaaaaatctttgcgctgggtgcagttgctcacatctgtaatcccagcactttgggagacagaggtgggcagacaacctttgggaggcagaggtgcctacataacctgaggtcaggagtttgagaccagcctggccaacatggtgaaaccctgtctctactaaaaatacaaaaattagccgggtgtgttggtgggtacctgtaatcccagctacttgggaggttgaggcagggagaaytgcttgaacccaggaggcagaggttgcagtgagc

SEQ ID NO: 347956 - DNA, 554 bp, Homo sapiens
attaaaaaatatatatgccaggatgcctcccaggagtgagcctgattgaataagcctgggaaggtcttagcatctatattttaacaagctcaccaataattctgatacaygctaaagttagagccactgctctaggctcacacttctcccaattccgttaagtgggtatgctatacaatgtcccttcatcaaattgcttttctatgtaaattggtgtttacttgaaataatcatgagaaactgattgaagatgaacaagccttcaaataaagctgtttatgagatacgaattctgttccaggtgaactctgttccaggtaaactcagcctttaatcattgcagcagctaacaactacaagaacacaaagggggacaaaatactaaatagaactctgaaaacccaacacaaatactgaattacgttggccacatctctcaaacccttagtccaaaacaaaaatgtcatttattgaggctgtttttgtattttcccattgaccatagaaatatcacgtaagcctattgcaacatttgccctagcaggggagaaaag

SEQ ID NO: 347957 - DNA, 584 bp, Homo sapiens
ttaatgatgaaatattgtagataattttttgtaatgtaagctgttcttgctcttacaaatatccctcttacaattcttggaaacagccactagtgctaaggaaagcattatgagaaaacaaacaaacaaacaacatttaaaaaacatttttagagcatctgtggtctcatgagaaaactaagttgctgaraaatgccggcagaggggttgcccttgtggcacattctcaacctaccataaccttagtagatggtggcatctccctgggtaaacagatcatatgcataccaccaaaatttttaagtcagtctgtcacattcttaaaattccaccaatttatctcattatgaaatgtaaatatatttggcatctttgtgaatctctttcactattcacatggattaattccatagaggattcctgcctggttaatacctaattgaggatggggagcagttctttggcatgtgcaggaaacatcaggaaaaccatgtagcaaaactattaacaatgcagttccaaataaatttttgaaacagtttgtcaatttcttttaaaaaaaaaagtctgctggagtttgattg

SEQ ID NO: 347958 - DNA, 598 bp, Homo sapiens
ccaaatgtaattcattattttaattccctctggataagattgtctctagaattccaagtctttaatgatgataatgtrttttcatttgtggatcctctcatacctcaagctggagaggcagagggcccatgccctttttaaaaatcaaaagtaaatatgatgaagtcttttaacttcacagatggatgctactggagatatttcagaatattaacatacaagatattccagttttcttgcagttcttacaaagggcagagacaaagcctgattagaatgagtttgcattgtcagaatttttgagtctggcattttccttgagtttaaatgctatattaataaattctgaatatagtttaatgccactactttttctaacttgaagtcaattattaaaagatcaaaaattattaatgtgttttaaggaagaatactgtggaaatgaaatacaacacacacagtaagcaccttaaaaaaaaagttagtacttagcattaaaaaataaatgataaaaatacaaaattgaattactaatttattttgaactttaataaaataaattaaaatacaataccatttgaaattaagggtaactaat

SEQ ID NO: 347959 - DNA, 609 bp, Homo sapiens
cctctcctggggaaagacaacgtggcagggccttgcttcaagagcccagagaactggcttcttgttcccagtctaccacttactgagctgctgcaaatttgattccttctcagtcttcctggtttctaattaccatgtctgtaaaacaggaataaacaaacttcaataaaaacagrggacctgatcaaatgtcacttgacttcacttccagctttaagatccagtgaatgtgtcaactcatgactaaaaatgcactgaaaaggggggcggggggaagaaaagaaaaccactcctggcattcgctgaaatagtcagcagagattccactctctcattctcactttccaccacactctgctccctggttctcccccattctcccactatcactgcgtagcttactggtccaggggcttatcagctaacaccaatggtctactggctgtgtcctcctgcccctcaactccctctcccacacagcactccttcttcctcaaaacagttgagatcatcatgtccctatctcaaatcttatgttagaaaattcagatttggtctgccactgaaagccctccatagtccagctacaattatcctttttagatctac

SEQ ID NO: 347960 - DNA, 564 bp, Homo sapiens
ttttctctcttattaattttaaaatcttttaattttccatcttattttctttttcacctacgggttatttagaacagtgtttcttaacttctgttgatttataaagacagtagactttttcctttccaatctatatgcctgttagatatttccaatttaattccactatgattagagaacatgctttatgttatcagacttttaaaatttattgagacttgttttatgtttcaagacatcagctactttggtaaattttccctgagcactagaaaagaacatgtaccatactgtttggcattctagaaaggtcaattaggtcaagttggttaatagtatttttcacaatattcttactgattttcagtgttgcattttatcattttttgagagagaatgtgaaaatctttaatttattattaaataataamacaatttaatttatcattaaagaacaataataaatttattcattcttttaactttgtcagttttgccacatgaattttgaagatctgtaattaggtgaatacatatttagggttgctatgttttttggcagtt

SEQ ID NO: 347961 - DNA, 587 bp, Homo sapiens
ctggttttcagcaatttcattattatatactttggtctgttttctttgtgtttatcatgcttgggctccattgagctgctttgatctgtggtttataattttcgttgartgtgaaaatttttgatatttcttcaaaagtatttttgctctctcctggaaagattgcaacaacacagtttttagatgatttaatactgtcactttgatcactgaagcaattttattagatttttttaattgtgtatgttttatttctataccttaaattcaccaataattttttttctgtagtgtctaatgtgctatgtagttcatccatgaatttttattttctgatgttctatttttcagccttacaggatccatttatttctactttctatttcctattttgcctcattattttgagttttctctaaatcactgagcatttttccaataaccatttcaaagttcttatttaataattgtatcatatctgacattcctagcttctgtttctattgactaatttttctcttgattatgagtcacctttttgctcttttatgtgtctagtaattattcactgtaattattaattggat

SEQ ID NO: 347962 - DNA, 587 bp, Homo sapiens
ctggttttcagcaatttcattattatatactttggtctgttttctttgtgtttatcatgcttgggctccattgagctgctttgatctgtggtttataattttcgttgaatktgaaaatttttgatatttcttcaaaagtatttttgctctctcctggaaagattgcaacaacacagtttttagatgatttaatactgtcactttgatcactgaagcaattttattagatttttttaattgtgtatgttttatttctataccttaaattcaccaataattttttttctgtagtgtctaatgtgctatgtagttcatccatgaatttttattttctgatgttctatttttcagccttacaggatccatttatttctactttctatttcctattttgcctcattattttgagttttctctaaatcactgagcatttttccaataaccatttcaaagttcttatttaataattgtatcatatctgacattcctagcttctgtttctattgactaatttttctcttgattatgagtcacctttttgctcttttatgtgtctagtaattattcactgtaattattaattggat

SEQ ID NO: 347963 - DNA, 587 bp, Homo sapiens
ctggttttcagcaatttcattattatatactttggtctgttttctttgtgtttatcatgcttgggctccattgagctgctttgatctgtggtttataattttcgttgaatgtgaaaatttttgatatttcttcaaaagtatttttgctctctcctggaaagattgcaacaacacagtttttagatgatttaatactgtcacyttgatcactgaagcaattttattagatttttttaattgtgtatgttttatttctataccttaaattcaccaataattttttttctgtagtgtctaatgtgctatgtagttcatccatgaatttttattttctgatgttctatttttcagccttacaggatccatttatttctactttctatttcctattttgcctcattattttgagttttctctaaatcactgagcatttttccaataaccatttcaaagttcttatttaataattgtatcatatctgacattcctagcttctgtttctattgactaatttttctcttgattatgagtcacctttttgctcttttatgtgtctagtaattattcactgtaattattaattggat

SEQ ID NO: 347964 - DNA, 219 bp, Homo sapiens
gtttcagttttgccttattttctaattgcttgcaggggtgaggcaacttttacactgttattcaagcatgccacaagtggaattccccattcatcgaagttttgaaaatgttgaatcctgtgaattgataaataagatacagtatattaatayagtaaaatgctattcagcaatgtaaagaccaaagtactgacacttgttacaacatagatgaacctt

SEQ ID NO: 347965 - DNA, 549 bp, Homo sapiens
aacttctctatatgagtctcttccatttccattcatatactcccttgtcgaacttgactctgtgaagggcaacactaaattttacctcctttgctaagatattgatatgagagtggtgtggaaaatatgtcactttctcatgaaaaaaataataggaaacsctgaaactttgctctaaactttagccaaattgactcacgaagtttaattttggttatcatttcatgttcaaaattcaggacaaaatggtgaaagaaaatactagatagtagttttgttacatttgttttattatctcaaatcgggtttctgttacaaaatatgtttagagctactatcaaaaatagtgtcatcatattgatctgaattacagaatggtaaggtactgagcatttggttcaattttgtcacttaaaggtagcattggtcatgccaattgatgacaagggcatcaaaaggagcaatagcgacaaagggagtactattaacatatgctgttttataaataaagtccaagatttgaaccaaagtaatccaagctgaaacact

SEQ ID NO: 347966 - DNA, 549 bp, Homo sapiens
aacttctctatatgagtctcttccatttccattcatatactcccttgtcgaacttgactctgtgaagggcaacactaaattttacctcctttgctaagatattgatatgagagtggtgtggaaaatatgtcactttctcatgaaaaaaataataggaaaccctgaaactttgctctaaactttagccaaattgactcacgaagtttaattttggttatcatttcatgttcaaaattcaggacaaaatggtgaaagaaaatactagatagtagttttgttacatttgttttattatctcaaatcgggtttctgttacaaaatatgtttagagctactatcaaaaatagtgtcatcatattgatctgaattacagaatggtaaggtactgagcatttggttcaattttgtcacttaaaggtagcattggtcatgccarttgatgacaagggcatcaaaaggagcaatagcgacaaagggagtactattaacatatgctgttttataaataaagtccaagatttgaaccaaagtaatccaagctgaaacact

SEQ ID NO: 347967 - DNA, 597 bp, Homo sapiens
cttgttatttagttatgtggtgatgggaatttggaaccactaaaatgtccttgtgagaataaataggaaaattgtggcagctgtattaaagagaacattatgctccagctagatgcaattgattaaatatatacatggcaccatgaagggatcttaaaaatatagtattgaataagcaaatcaaaatacagaatatgtttagttaacaaattaaaacacagactatgcataayacctttaataaaaaagttaaatacctgcatgtgaaacaaaacaatttacaaggacatgtatgaatatgacggtacacatgaacacattactcaggttgcctatgggataacagagagaaattggagtgtatatagagataaaagggtttaagtaagtgagtaaacaaattagtactaggtgttggatggttttgtgagaacaaagtgagataatatgcaatgaattcagaagtaaaattaacttagccctcctcacatgaggccccaaatatttagaagaaaagaagcctcaataaaacatccgttctctgagaactcatcagatgactaagtattcaaaataacagaaggtagcaagtgcagc

SEQ ID NO: 347968 - DNA, 597 bp, Homo sapiens
cttgttatttagttatgtggtgatgggaatttggaaccactaaaatgtccttgtgagaataaataggaaaattgtggcagctgtattaaagagaacattatgctccagctagatgcaattgattaaatatatacatggcaccatgaagggatcttaaaaatatagtattgaataagcaaatcaaaatacagaatatgtttagttaacaaattaaaacacagactatgcataacacctttaataaaaaagttaaatacctgcatgtgaaacaaaacaatttacaaggacatgtatgaatatgacggtrcacatgaacacattactcaggttgcctatgggataacagagagaaattggagtgtatatagagataaaagggtttaagtaagtgagtaaacaaattagtactaggtgttggatggttttgtgagaacaaagtgagataatatgcaatgaattcagaagtaaaattaacttagccctcctcacatgaggccccaaatatttagaagaaaagaagcctcaataaaacatccgttctctgagaactcatcagatgactaagtattcaaaataacagaaggtagcaagtgcagc

SEQ ID NO: 347969 - DNA, 597 bp, Homo sapiens
cttgttatttagttatgtggtgatgggaatttggaaccactaaaatgtccttgtgagaataaataggaaaattgtggcagctgtattaaagagaacattatgctccagctagatgcaattgattaaatatatacatggcaccatgaagggatcttaaaaatatagtattgaataagcaaatcaaaatacagaatatgtttagttaacaaattaaaacacagactatgcataacacctttaataaaaaagttaaatacctgcatgtgaaacaaaacaatttacaaggacatgtatgaatatgacggtacacatgaacacattactcaggttgcctatgggataacagagagaaattggagtgtatatagagataaaagggtttaagtaagtgagtaaacaaattagtactaggtgttggatggttttgtgagaacaaagtgagataatatgcaatgaaytcagaagtaaaattaacttagccctcctcacatgaggccccaaatatttagaagaaaagaagcctcaataaaacatccgttctctgagaactcatcagatgactaagtattcaaaataacagaaggtagcaagtgcagc

SEQ ID NO: 347970 - DNA, 597 bp, Homo sapiens
cttgttatttagttatgtggtgatgggaatttggaaccactaaaatgtccttgtgagaataaataggaaaattgtggcagctgtattaaagagaacattatgctccagctagatgcaattgattaaatatatacatggcaccatgaagggatcttaaaaatatagtattgaataagcaaatcaaaatacagaatatgtttagttaacaaattaaaacacagactatgcataacacctttaataaaaaagttaaatacctgcatgtgaaacaaaacaatttacaaggacatgtatgaatatgacggtacacatgaacacattactcaggttgcctatgggataacagagagaaattggagtgtatatagagataaaagggtttaagtaagtgagtaaacaaattagtactaggtgttggatggttttgtgagaacaaagtgagataatatgcaatgaattcagaagtaaaattaacttagccctcctcacatgaggccccaaatatttagaagaaaagaagcctcaataaaacatccgttctctragaactcatcagatgactaagtattcaaaataacagaaggtagcaagtgcagc

SEQ ID NO: 347971 - DNA, 528 bp, Homo sapiens
atcaagtaaataaaaaaacaaaaaaagtcagggattacaatcctaatttcagataaaacagatttaaaatcagcaaacatcaaaaaagacaaagaagggtcttacataatagtaaagggttcaattcaacaagaagacttaactatcctaagtatatatgcacccaacacatagagacctacaaagagacatagactccacataataacagtgaaagactttaacaccacactgacagtatgagacaggtcaacaaggcagaaaattaacaaagatatttgggacccaaactgcacaatggaccaaatggacctgatagacctttacagaactctctacataaaaacacagaatatgcattcttcccattgccacatggcacatactctaaaatccaccacamaatcagacataaaacagtcctcagcaaatgcaaaagaactgaaatgataacaatcagtctctcaaaccacagtgcagtaaaagtataaataaagactaacaaaattgctcaaagccaaacaagta

SEQ ID NO: 347972 - DNA, 564 bp, Homo sapiens
ctctcaaaccacagtgcagtaaaagtataaataaagactaacaaaattgctcaaagccaaacaagtacgtggaaattgaataacctgctcctgaataattttgggtaaatattgaaatkaagggagaaaataaaagttctttgcaattaatgagaccaaagacacaacatgtcataatcattgtgacatagccaaggcaatgttaagagggtaatttatagcactaaatgctcacacaaagaaagttagaaagacctcaatttaacaaactaacatcacagctgaaatgaatagagaagcaagagcaaaccaaccccaaagctagcaaaagacaagaaacaagcaaaatcagagcagaactaaaggagattgagacatggaaaaccattcaaaaaatcaatgaatctaacagtttgttttttaagaaaattaataatatacgccactagctagattaataaagaagaaaagagaaaaattccaaataaacacagttagaaatgacaaagaagatattaccactgaccccacagaaatacgaataaccatcagagaatattataa

SEQ ID NO: 347973 - DNA, 564 bp, Homo sapiens
ctctcaaaccacagtgcagtaaaagtataaataaagactaacaaaattgctcaaagccaaacaagtacgtggaaattgaataacctgctcctgaataattttgggtaaatattgaaattaagggagaaaataaaagttctttgcaattaatgagaccaaagacacaacatgtcataatcattgtgacatagccaaggcaatgttaagagggtaatttatagcactaaatgctcacacaaagaaagttagaaagayctcaatttaacaaactaacatcacagctgaaatgaatagagaagcaagagcaaaccaaccccaaagctagcaaaagacaagaaacaagcaaaatcagagcagaactaaaggagattgagacatggaaaaccattcaaaaaatcaatgaatctaacagtttgttttttaagaaaattaataatatacgccactagctagattaataaagaagaaaagagaaaaattccaaataaacacagttagaaatgacaaagaagatattaccactgaccccacagaaatacgaataaccatcagagaatattataa

SEQ ID NO: 347974 - DNA, 547 bp, Homo sapiens
ttcttcatatacgcagtatatttaattgcactggtatagtttggatatttgtcccctccaaatctcatgttgaaatgtgatcctcggtgttggaggtggagtctaatggaaggtgtttagggcatgggggcagatcccttatgaataccttggtgccttccccaccccatggtaatgagcgagttcttgttctactagttctgaggatctgattgttaaaaagagtctggtgcctttcttctctctcttgctctctcttttgccatgtgacatscatgtttcgccttcacctttcactatgatagaaagattcctgaggccctcactaaagcatatgttggtgccatgtttcttatatggcctgcagaatcataagccaaatgaacctctttctaaaataaatgacccagcctcaggtattccttcatagcaatgcaaagttggctaatacatacacttctttcaattaaataatttattaatttttctatagctcttcttttgaaatgcttctattcctcctgagagatgatggttaaaatacagt

SEQ ID NO: 347975 - DNA, 579 bp, Homo sapiens
ctaataagaataataaaaccttttatggagcacttagtatgtactaaaaactttataaggattaccttcattaatttagctatccaaattttcccatgaaatacatactataggtttccctttttatgtrtgagaaattagactcaaagataaattaacttgctcaatgtcacatggattagtaagtggtagagccagaatataaacccaagcagtatttcccctctggaattcattctcataacttctgatctatgctgctgtaagagagggataagcaactatgatggagattccaaggaaaatgaggtcacatgtgacagaagggatagagacttgaaagatggtggaattttgataggtgcattaaagtggaaggacattctatagacacatcacatcctgaacaaatgctctgagaccaaaaagaccatgaccaaagttttaatcctagatgaaaaaaaaaaatgatggtgtataattaacactaatacgaagtcaaaaggaaaacaagggaatttcttagtttatcaacggatcatacaaatcattaaaaaaattggaaaccatgtttttaaa

SEQ ID NO: 347976 - DNA, 572 bp, Homo sapiens
aaatcaaaaggctgtttcatcttggcttgatgcttttgcagtaatacacaccaaattcgtggttgtgtaaaggagtaggagatggctttagagaatgaaccattggacccatgaaaaaccaccagaaagcactaaaaggaaaaattactgtgatcagggctaggttcattcattcatttatgcacttaaaaatgcatatttattgttgtctatattgtgataggtcagtgtttgtcaaccttttttcattatcaacattatcttcctgattgttctcctttcccatgaaattttaggaccacagatatactgtgtgtctgtatatagatttgcrtcttttggaagattataagctgttgtattgtcaaagtttctttaccccctttggaggtgatatcacctccattgaggatacatatgctattttctggaaatgatggtgaatcatttcatctgctgatgaagtctgtgtcctctgggtactgagagtttagtggggtagacagacacacacatagacaattatataacatgatgagggctacaacacgagtatcaaagaaccaacaaac

SEQ ID NO: 347977 - DNA, 571 bp, Homo sapiens
caacaataaagtggctaaattcagtttaaactttccccaaagagtttgggggacacagtagacttctgtttcaagcttgaaaaatgctaagcagctgcctgaagaggccaataagtagatagggctgctctggggagccaactgtaccctcactgaggagatgaccaagggctctgattcgttaaaaccagatgtgggtcttgcagtagaaacattggccaggggctattttaaaagggataaagctcaggagggcctcytccgtggggcaagacatctgtggcaggaagaactaaagatgtgctgatgtataggaagccaaggaagcagcaaggcaggggccctacctgagtggaagggctgcactcagaggggccagctgaagaattaggaggacagaagtgcccataagaggctaaaacatctgctgcggccagagaaaactagtgccagatgacatcagtgccagccaaaaaagatgcatctgcccttccttttcttcctcttctttattccacagcccagtggatggaaggaagaagaagaagcctaagagagggaataaaggagg

SEQ ID NO: 347978 - DNA, 575 bp, Homo sapiens
gtttctttgtgttgtagttggatatacctcttgcagttatctttagaaaatttgggggttgctttttcattcccttaatggtgtcttttgaaayacaaaagttttatattttagcatagtccaaattttattgttttatgtacaggtactgctttgtgtgttatagtaaagaaatttttccttcaagatcatttaaaagctttgctattttgcttttatatctagaataccccaaaattgatttttgtataaggtctgaggtagggatccagatatttttctcatttattaaaagaatcattcttttcccactgcactggaaagctgctcttatcaaaactaaggtgaccatatatatatatgggtctgtttccagactctttttttcttttccaagatcaattgtttattcttgtactaatgttaccctgtttcaattactacagctttataacagacttttaatctgggagtgtaaatcttccagccttgttcttttccttcaagattacttggtggctattcttggccctttgcatttgtcaatttacacaaatacaactgccatgatttta

SEQ ID NO: 347979 - DNA, 555 bp, Homo sapiens
cacttacttcctcaaggttccctgtgctcttactctaacagggcacctcctggccccacctttgaacttctaaccaacctctactgcttaccctcattctaccgggaattaaagttacttttgggccccttcacattcactagttaagttcctggagaaaaaagattgagtcttagacaatgccatacttcccaggtggtctaacatagtgctttgaacatagtaagtgctcaaagttatgaattggaagaaaaaatatttttatccttcaactctttttttctttagaaraaaatttactttttgtcacagctcaattcctgggtcaatgtggcgcatagtgggagcacttcgtgaactctggcttcctcagaagtggtgaagatcacaaactatcagtctggggaaactccacaatccctctataggcattgctccaaaaagattcctcgtacttttttaatcaatgctaattattcattatattattatgggtatgcaaaataatatacagatggccctgtctgaagaattacaaaggattgcctaggcctt

SEQ ID NO: 347980 - DNA, 598 bp, Homo sapiens
attggaagaaaaaatatttttatccttcaactctttttttctttagaagaaaatttactttttgtcacagctcaattcctgggtcaatgtggsgcatagtgggagcacttcgtgaactctggcttcctcagaagtggtgaagatcacaaactatcagtctggggaaactccacaatccctctataggcattgctccaaaaagattcctcgtacttttttaatcaatgctaattattcattatattattatgggtatgcaaaataatatacagatggccctgtctgaagaattacaaaggattgcctaggcctttttggttatccaggtgttttctatttttttccactgctagggtggcttgtgttaaatctggaaagacagatgccttaccaaatgcagatcaaatcctgaatgcattgatgatgacagtatggtaatgatttcttaacttcctttgcttagtgatactttcctgaatagtttcagtaaaggagctagcataccaggggagtttttctgcagcagataaacaccgagtatattctacattctgaatcagtgttagtgttgttggtcagtgattcagggggaagaaat

SEQ ID NO: 347981 - DNA, 598 bp, Homo sapiens
attggaagaaaaaatatttttatccttcaactctttttttctttagaagaaaatttactttttgtcacagctcaattcctgggtcaatgtggcgcatagtgggagcacttcgtgaactctggcttcctcagaagtggtgaagatcacaaactatcagtctggggaaactccacaatccctctataggyattgctccaaaaagattcctcgtacttttttaatcaatgctaattattcattatattattatgggtatgcaaaataatatacagatggccctgtctgaagaattacaaaggattgcctaggcctttttggttatccaggtgttttctatttttttccactgctagggtggcttgtgttaaatctggaaagacagatgccttaccaaatgcagatcaaatcctgaatgcattgatgatgacagtatggtaatgatttcttaacttcctttgcttagtgatactttcctgaatagtttcagtaaaggagctagcataccaggggagtttttctgcagcagataaacaccgagtatattctacattctgaatcagtgttagtgttgttggtcagtgattcagggggaagaaat

SEQ ID NO: 347982 - DNA, 633 bp, Homo sapiens
gtcttttgtagtgcaaattctgtaagaaatttatcaggtaagattttgcatcggatattctggcctaagtagttgatgacacctggaaacacaggcagagggctggtggttttaatagtatcctttgataagaactgagggctgccattagagcctgaagaaaaatacttctaaataaggccaagataatgtgttccaagtggtaccatgttttcagtgatctggactaatgcataaatgaaactttgagtgcctagggaattgccttccaaaaatcctccagakggtcacttccccaggaagagagcctagaggcaacccaggattacattctctatgaagagtctggaatctataaggagaatttagtctagaggaagggcctgagatccttttcctgagtttgttggttgagggagcatcctacactttgggatttgggaaagcggaaacttactcaatttcatatccttgtttggaaatacagaatcctaaccaagaccctggcctcaaaggagaactgctcagcttctacagagagtgactaaacagataaactgatggaaaaataaaaatttttctcaaacagttgtatttattctcttgtagcaaataagcaaatggctgactcag

SEQ ID NO: 347983 - DNA, 595 bp, Homo sapiens
attttaaatgtgcaaactttaataacttgacatcactgtttagataggattttaagaaaattatcagatactaaacgtcaccacctgctaatgaatcacttattgcttttgaaaccaatttatttcttttccaaagctatttcagctgaattcaaagctataaaaataattagatacaagtgacatgctgggaatatgtggaggaaataatctattttaaaataattattatttcttagaaggggaatccaacagattagactactactgtattattggtttctaaatcatcaaacaatcagaaaacttgggactttttctcttgcatcttaaaatattatttttwttgagatgtaatttatacacaataaattgcacatatttaaagtgtacaattgttaagtttttatatatgtatatactcatgaaaccgtcaccacaatcaacatgcagaacataactatcaccctcaaaagtatcctggtgccactttgtaaagctttctttatatcttttcctgaactttccttccccaggcactgctgacttgtgtttagtttgcattttccaaaatgttacataaattaaataatac

SEQ ID NO: 347984 - DNA, 576 bp, Homo sapiens
agaatgcctgattataacatttgtcagattaattttgttttcaaatrttacttttttaacaatttaaaatgttatatgtacaaaccgcatctttctgtattgctaagtggtctcacttgtcagctcataaacattaaataactagaaaatcattggtagtgacaagtagaaaatatgatggaaaatgtgaataagaaattgtctacttatgaacttcctgaattatcaacttgttaataacctgttacaaacaaaatgtattggtaaagtataactacgcctattagggctcacggtagtaagaaagagcaccatcttgacaatcttagtattatctgagaggaaaagatatcataggtttgaggcctgggcttaagtcgtttgaggtagatcttaagtatggaaatagctatggttgagtaaaatttggagaaataataattggttattagtggttataaacagagaaaggtttgtagtgaatcttgctagctacacagttgtctgataagcaagcttgtttgctcaagtaagttgaccattgtctcaaataaattgatctgtatgaattcatga

SEQ ID NO: 347985 - DNA, 576 bp, Homo sapiens
agaatgcctgattataacatttgtcagattaattttgttttcaaatgttacttttttaacaatttaaaatgttatatgtacaaaccgcatctttctgtattgctaagtggtctcacttgtcagctcataaacattaaataactagaaaatcattggtagtgacaagtagaaaatatgatggaaaatgtgaataagaaattgtstacttatgaacttcctgaattatcaacttgttaataacctgttacaaacaaaatgtattggtaaagtataactacgcctattagggctcacggtagtaagaaagagcaccatcttgacaatcttagtattatctgagaggaaaagatatcataggtttgaggcctgggcttaagtcgtttgaggtagatcttaagtatggaaatagctatggttgagtaaaatttggagaaataataattggttattagtggttataaacagagaaaggtttgtagtgaatcttgctagctacacagttgtctgataagcaagcttgtttgctcaagtaagttgaccattgtctcaaataaattgatctgtatgaattcatga

SEQ ID NO: 347986 - DNA, 524 bp, Homo sapiens
tcgtacacaaaacacctcaaatttagaaaaagaagaaaggaaagtgaaaatagaaagagggaaggatggaaaaataataggataagaaattggctgtcatcaaaatggcaaatgtttactttatgggaagaggaaaaatagtgaaaatgaataaaccagatttgtggagatttaaatcaataacacagattggcaggtggagactgagtcgaacactgaatcttcatcatcctcctttgtaatgtttttaaaatttcaacttttattttagatacagtgggtacacatgcagttttgttacatgggaatactgcatgatgcygaggtttgaagtatggatcccatcacacaggtaatgaacactgtacctgacaggtaatctatacacatatttggagataaaaagaacatgtgctaataaaaagtatagtttgtcagagggaaaatcaaccacttaaatgtagaagatctcagaaaaaaatatttataaacaatactatataaaataacaaaattgtataatt

SEQ ID NO: 347987 - DNA, 576 bp, Homo sapiens
tatttctttttctttaaggtacttagtagggtggaaaaaaaatcttttccaacctattaataatttttctagacaaagttagcataataaacagaaaaacatttgaagaaatgcttctaaaatccttaactgactctgcatttctcaggttaattaaaaaaaataactaacacaatgacaaagttactaaactttgtgaataacaacagaaaatatgtgtatctccacacaagtaaacaacaaacagatggtgaatatagaaatcatttatttggaaatagaaaataatgtattacacacttgggcaatataaaagtgatattttaactttttacaggagatgaggcagggtaaataggagaatgtgaaatgttccctccataatcttctatattttattaaataaaatttatagatgtagctacattttaaacatataacactttgagaaatcaaatgtctgttatttttatctttttccactttttaagaggtgtattgtatacatacacatttstttattaaaaaaacttgttaatttcagtaatttctacaaattccattttgtttcataaa

SEQ ID NO: 347988 - DNA, 486 bp, Homo sapiens
ttgcttggtatttttctaaataacacatattttctaaatagcacattttttaaagttttttttaacttttatcttaggttcaggagtacatgtgcaggtttgttatataggtaaactcatatcacgggggtttgttgtacgggttttttagtcacccaggtgctaatactagtactcaacagtaattttttttttaattctgtcactcctcccaaaytccattctcaagtaggcctttgtgtttgttgctccactctttgtgtccctgtgttctcatcatttagctcccacttataagtgagaacatgtagtatttggttttctgtacctgagttagtttacttaggataatggcctccagctccatccatggtcctgcaaaggacataatatcattctttttatggatgcataatattccatggtgtatatatatcagaagtctaccattggtgagcatttgggttgattccatgtgtttgctat

SEQ ID NO: 347989 - DNA, 486 bp, Homo sapiens
ttgcttggtatttttctaaataacacatattttctaaatagcacattttttaaagttttttttaacttttatcttaggttcaggagtacatgtgcaggtttgttatataggtaaactcatatcacgggggtttgttgtacgggttttttagtcacccaggtgctaatactagtactcaacagtaattttttttttaattctgtcactcctcccaaattccattctcaagtaggcctttgtgtttgttgctccactctttgtgtccctgtgttctcatcatttagctcccacttataagtgagaacatgtagtatttggttttctgtacctgagttagtttacttaggataatggcctccagctccatccatggtcctgcaaaggacataatatcattctttttatggatgcataatattccayggtgtatatatatcagaagtctaccattggtgagcatttgggttgattccatgtgtttgctat

SEQ ID NO: 347990 - DNA, 570 bp, Homo sapiens
aaaaaaaaaaaagaaagaaagaaaagatggagaatatccacatagaaaggatctctagtgatactgacatacrtgggaataagaaagatggaagctattggtatcagccatgtgatgggagccaccatgctccccagcaacctgctacacagaggacactggcatctcttgtcactgaggtaaccaacagctaatcctgccaggaaatcctagagaagaaaacatggctgcacacccatattccccaaagaaacaactgcttgggaaaggagccattacctagcccaactcttcatgtaccccaaccctgtatacatggctactctctgagtctccaaagtaaggacccatgctcagtggcaacactggatggatccacgtttcagatatcagagccaatggcagagcaagctagttttcactctgggccatggagccaagcacttgctgtgggcaccagctctgctgctatggagagctaggcaccatatgcccatgctctggggcaccagctctactgctatggagggctggaacctgccgtaatcccagagtcactctaccctgtgc

SEQ ID NO: 347991 - DNA, 616 bp, Homo sapiens
ccaataaaacagaatagaggttcagaaataaatccatgcatttatagtccataatttttgacagagatgccaagaacatacaagggggaaaggaaaatctctttaatagagagtgctggaaaaactggatatccacacgtagaagaatgaaattagatgctaatatcagactatatgcaaaaatcaattccaaatgaattaaagccttaaacgtaagacttgaaactgtgaaattaytaaaagaaaacatagaggaagagctccatgacattgtgctgggcaataagcttttgtttttggagaggaacccaaaagcacaggcaatacaatcaaaaataaacaaataggattacatacagcttaaaaggttctgtgtagcagaggaaacagccaacagaatgaagagacaatatatggaataggataatgtatttgcaaaccatacatctgataatgggttaatatgcaaaatacataaagatttcaaacaagtcaatagttagaaaacaagtaacccaattaaaaaatggtcaaaaaactgtatagacatttctcaaaagaagacatgcaaattgtcaacaagtatgtgacaaaagggaaatgcacaccaaaacca

SEQ ID NO: 347992 - DNA, 641 bp, Homo sapiens
ttgctgcttgctttttaaagtctggaatggttatgccatgaacagtcactgaatacaggtcaacaaattgcagacaacagtttgggaaactctggataggaatgcagtataataaaacttttgtttattttaagagtgttttttagctaaaattaattgatttgatgtttctattctgttatcatatttctgaaaactgataagcagcaaaaacttaggtgagtcgagctcattatttaaataaatattgataactttcaggaccatttctgtctctattaaacatatatatttttggcatattttacatttagaatgcacagcaatataataagcttgattatgttgtgctagcaaacaaacccataatctcaatagaaatatatttttctatcatactgcatcatcactgcctgtcttttaggactcatccctatattgtttgtaccctgggattaggytgtctgcctgaaatattgtcagcttttattgaaaaagtaaaaagagacagcatggtgagtcatgcactgactcttaaggttttacccaaaggaataaatatttcttctactcatgtttaattgactaattcacatggccacccttaattctaagggtcagtgaagggagaccccatcatg

SEQ ID NO: 347993 - DNA, 576 bp, Homo sapiens
ctttcctttccgtatttagcactctcttcagggcctcttgtaaggcaggtgtggtgaaaacaaattcccttagcatttgcttgtctaaaaagaatcttatttctccttcaattatgaagtttagtttggctgtatatgaaattcttggttggaatttcttttctttaataatgctgaatataggctcccagtctcttctggcttctagggtttctgttgaaaagaacactattagcctgagggggtttccwttgtaggttacttgccccttctctctagttttcctttcttcttcttttgtttttactttgaccttggaaaacctgatgactgtgtgttttggagatgatcatcttgtgtagtattcacaaggcttctctgcctttccggaatttgaatattgtcctctctagtgaggttgggcaaattttcttagatgatatcctgaaatgtgttttccaagttgtctactttctctctctctctttccgggaagtcaatgagtcacaaatttgtgtttttgttttgtttttttacgtaatcacgtatttcttggaggttttgttcatgcttctt

SEQ ID NO: 347994 - DNA, 576 bp, Homo sapiens
ctttcctttccgtatttagcactctcttcagggcctcttgtaaggcaggtgtggtgaaaacaaattcccttagcatttgcttgtctaaaaagaatcttatttctccttcaattatgaagtttagtttggctgtatatgaaattcttggttggaatttcttttctttaataatgctgaatataggctcccagtctcttctggcttctagggtttctgttgaaaagaacactattagcctgagggggtttccattgtaggttacttgccccttctctctagttttcctttcttcttcttttgtttttactttgaccttggaaaacctgatgactgtgtgttttggagatgatcatcttgtgtagtattcacaaggcttctctgcctttccggaatttgaatattgtcctctctagtgaggttgggcaaattttcttagatgatatcctgaaatgtgttttccaagttgtctactttctctctctctctttccgggaagtcaatgagtcacaaatttgtgtttttgttttgtttttttacgtaatcacrtatttcttggaggttttgttcatgcttctt

SEQ ID NO: 347995 - DNA, 515 bp, Homo sapiens
ggaggtcctggggcagctgagagtatctggatgaggctaaacctccaagtcacccaaaggtccctagattaamtccattcccagacagcctgttagggtgttggcaccaggacttccagtcttttctatcacattttttttctttctctctttcatggctgttatggctcctatctcttctttgtatgcaatgttgtgggtgtttttgcaacctggagatacaattttgttggctaaagtcagcaggtgccttagcaatcagcaatgcagctcaaagggttgttgtttttgtgatttccctgagacacggggatttcaagatttcagtctaagggcttctctgtccccctatgatgtctatacatgggactgaatagggggatatttcaccctgagtagctaccctcctctccatttaggcttttctttcttcatgtgagaactcagcactgtccagtgaatttaagcatcccttctataagacaaattaattttcttctgctaggagacatatt

SEQ ID NO: 347996 - DNA, 548 bp, Homo sapiens
tcatcatggttctggaaaagaaattagacattgcacttacctaatttcatcaattttttcatatttcttttgaaaatcaagtatggagaacaaaaagaagaaaggtggggtttaactatcaactgaaaaggccagagtagctttaaggttgatgtgatgtagttttctagtcagacttccataggaatttaggtagtagcttaccaacacctaaattattagagttcacattccatccaggaatatagactggccttcataaaatacatgtaactgaactagttcttctgctgtaagcagctacaaaactggacaaagcatacgaggyatctggtttcaggaagtggacaacagtcagtggaaagctgcaatctctgaatttcaaaagtgacgtcaggattccagagtcagtctagtcttcacctggaaacaattttcttaggtctatgtagagattttcctttttgcagagtgaggcagcatactgtactgaaggggatgctgtgcagaaactgaatttcagaagtcaggatggaggttccttgtaa

SEQ ID NO: 347997 - DNA, 614 bp, Homo sapiens
tgtattgcggggtataatgtaatattttgatgtttgtttacaatgtrgaatgattatttttatctttaaggtatttattttagaaacagggtcttgctgtattgtctagcctgtagagcagtgactattcacaagcatcaccatcacccactacaacctcaaactcctggcctcaagtgatcctcctgcctcagcctccagagtagctgggactacaagagcataacatcatgccctgctacactgtggaattattgaatcatactaattaataaattcatcacctcacatacttatcttttttgtgtgtagaaaacatttaaaatctaatattttagcaattttgatatatgcaatgcattattctttatgatagtcactattctgtgtaatagattactacagcttatttctcctaactgaaaccctgtactctctggtcaacatctcttttctcattcactctcttgctccagctgctggaatccacacttcacataaacaggactatgctttgtttccttctgcatttctcatgcatagaaacactgcctagcatatagcagaggctcgttaatcacgtttaaaaatttgttaaataaaaagaaaaatta

SEQ ID NO: 347998 - DNA, 564 bp, Homo sapiens
gatcttcatttgccttatcaattgatttttccccgttttattccttcttttgattcaatatatcccccaaactgtcctgtatatagagttrtatacagatacagaacaggaggctttacctgtatattttagcattgatggtagtcatggcctcacatatttcccactggaatttcagtattagggagcaaagacctaagactgctagcataattactttccatcgcctttgagaaacactcacaacctcatccctgtcctagcccgcccctttccatcacccagttatcagtaagggtatgaatagggagaataattatcccatataaaatcagagaattttctaattctagcattttgactgtctctcccaagaagatggacttcaaaaaaagaaaaagggctttaactttcctgtgctgaactttccaggcattattgaaaagaaatgactgctatttggtaagcagtggccctacaagcaaaggcgaagaatacctataatagagcaatgttagtttttgtggaaaagaacagtgggaactttagccatcagcacaatta

SEQ ID NO: 347999 - DNA, 564 bp, Homo sapiens
gatcttcatttgccttatcaattgatttttccccgttttattccttcttttgattcaatatatcccccaaactgtcctgtatatagagttatatacagatacagaacaggaggctttacctgtatattttagcattgatggtagtcawggcctcacatatttcccactggaatttcagtattagggagcaaagacctaagactgctagcataattactttccatcgcctttgagaaacactcacaacctcatccctgtcctagcccgcccctttccatcacccagttatcagtaagggtatgaatagggagaataattatcccatataaaatcagagaattttctaattctagcattttgactgtctctcccaagaagatggacttcaaaaaaagaaaaagggctttaactttcctgtgctgaactttccaggcattattgaaaagaaatgactgctatttggtaagcagtggccctacaagcaaaggcgaagaatacctataatagagcaatgttagtttttgtggaaaagaacagtgggaactttagccatcagcacaatta

SEQ ID NO: 348000 - DNA, 615 bp, Homo sapiens
tactcttctatgcattttacatatattacctcatttaattctcacaatatcagacattatccccttttcatgaatcagaaagctgaggcaaagataatttaaataacttccctaaggttctcatgactttcctatggtcttcaggaagtctagcccctgaaacagtggtgttcactgttgtgttaaatgaccttgaatattgagctattaaatatgagggtatattaggagagttcttatggaaatttctatagtgttctaaaatgtaaactttactgtattctattctagagtgggtatgaatacttcatagtattctatagtaggtataaatgactaataaaccaaatgaatacacacactaagatatttagatttaaaaaaagaaacttgctaaaccaaattggtcagtgtttaagcaatgtaattaaatgaagaccatctcaagcagaaacattttcctaaaaggttgccttctctcagtttcttaagatattcatcatgggaagcagccactgctaaagatagatctaaatcytaaatccttagttaaaatgtggtcttatttataaatgaaaacctagtctttccatagccctttctaaattggctatg

SEQ ID NO: 348001 - DNA, 553 bp, Homo sapiens
cagatgaatgtatactcagcagtaaaacagattgagctatttgtacacataacaacaagaatgaatctcaaataattatatcaaatgaaagaaactacagatagtcacatattttatcatttacattaaactttatatattgcaatttaatctatagtgtcagaaaatagatsagtggtttattcaatgctttgtagttctcagaatacaagtctttcacctcctgagttgtttattaagtattttgttctttttggtgctagtttacataagattgtttcctaatttccttttcagatagttcattgttagtgtttagaaacactactgagtttgtgtattcattttgtatcttgaagctttactaaaagtttgtttattaattctaagatttttcacagaattgttagggttttctaaaagatcatgtcacctgcaaacagggacagtcttacatcttccttttcaattatgatgcttttatttttattttttttgttctggatagaacttccagcactatgttaaatggaaatggtaatagtgggcatcc

SEQ ID NO: 348002 - DNA, 553 bp, Homo sapiens
cagatgaatgtatactcagcagtaaaacagattgagctatttgtacacataacaacaagaatgaatctcaaataattatatcaaatgaaagaaactacagatagtcacatattttatcatttacattaaactttatatattgcaatttaatctatagtgtcagaaaatagatgagtggtttattcaatgctttgtagttctcagaatacaagtctttcacctcctgagttgtttattaagtattttgttctttttggtgctagtttacataagattgtttcctaatttccttttcagatagttcattgttagtgtttagaaacactactgagtttgtgtattcattttgtatcttgaagctttactaaaagtttgtttattaattctaagatttttcacagaattgttagggttttctaaaagatcatgtcacctgcaaacagggacagtcttacatcttccttttcaattatgatgcttttatttttattttktttgttctggatagaacttccagcactatgttaaatggaaatggtaatagtgggcatcc

SEQ ID NO: 348003 - DNA, 540 bp, Homo sapiens
ccatacccagctatttttttttaattttttgtagagatgagggctcactttgttgcccaggttggtctcaaactcctgccttcaagcaatcctctcacctcagcctcccaaagcactgggattacaggtgtgagccaccatgcccatrcccagcctaatgcttccttaaatgcttggtagaatttaacagggaagctatctgttttaggcttttcttcgctgaaaggtttttacttaatgattcaattgccatactagttgtagttctgttaagactatttcttaataacttagttacagcgtctctagaaatgtgtctgtttcttcaaggttatccagttgattggcatgtgattgttcatagtggtctctggtgatcctttttatttctgtagcatctattgtaagttctcttctgtcatttctcattgtatttatttgagacttctctctttttttcttactgtaggtaaaggtttgtcaaatttgtttatgatgcgataaaccaactcttagttttgtttacattttttattgttt

SEQ ID NO: 348004 - DNA, 382 bp, Homo sapiens
aactcattgtgctaagtgaaatatgacagtcacataaatataaatgctgcatgattccacttaaatgaggtatataagatgactgagttcatagaatcaaggtgtgagatggtggttgcttttgccagaggctggggattggagaagaggaggagttaccgaaccctggccatatattttcagttaagcaagatgaataagcatagagatatgctgtacattgtacctataaccaacaataacgtattgtacacttgaaaattatgaagaaggtagatctcatgttgtgtctttatcamaaaacttttcaaaaagaacataaataatgaataaataggaataaaggaagcagatcagtggttttcaggggtcaaaaagagca

SEQ ID NO: 348005 - DNA, 484 bp, Homo sapiens
cttgtactagtttgctgggattgcaaacaaagtaacacaaaccgtgtggcttaaaacaacagagatttactgtctcacaattcaggaggctaaaaattcaaaatctagttgttagtggggctatgaaccttggagcaaaaaatcttttcttacactttcctagcttctggtgatttgccagaagtccttggcattccttagcgtgcaactgcagaactttagtctctgcctctatcatcacatgacattctcccctctgtgtctgtgtctaaatttccctcttatgaggactgcagtcatrctgaatatcaagggtccactctactctatgatgatgatatcttagctaattatatcagctatgatgccatttccaagtgagttcacattctgagatactggggtttaaacatgcatttcggggggacacaattcaacccataacagttctcatatttactttacctttatctattcatagggc

SEQ ID NO: 348006 - DNA, 598 bp, Homo sapiens
tatattcattgataataattcttcacttatttttcaatcttctgaaatgataacatcctttactggatcagatgcataggatcaaaataagtaaagtatgcatttagtttttgaccccttttcattaaggattattgagggtggccatataattttcttgaacactcttgggcaaacaagatatttggttattatggtacccaataactgatttgaagatgagggwcatcttttagttatttctgaaacaagcagagtgaaggcagatcctccattccaaatatagttaccttaaatttatcagttttggattaattacttgaccctttaattaaacttatttatttgatcctcatattgaaatgtatatcccttttccagaatgctcctatattcttaatgatttagagaaatgataactataattctcttaattttttgttctaaacccaagtaaaaagaggaataaaactcagatgagtagtagagcatcatctgaagcaacacttgatggataggtttggtttaaatctgaaactaaaataaacatttgtattcctttttatttgaattaaattggtgttgtcacacattactg

SEQ ID NO: 348007 - DNA, 529 bp, Homo sapiens
gaaggagtccaagaaccaaaatatgggcaaagggaagcacacattagcagggagaatcctgaggtggccctccttatccatgtgaggtgttcttttctatccactacacgcctgtggatcaccacatgagtatagtagaaagttgtatgacccactgaggtaaggaagatcaccaggttatggcaacagtgggttggccactgtcatgtgctgtgggaatgaccacagaggcacagtttgttgctcaggcaatgatatgaaaactagcggaagaattacagttagaaaaggataygagtacctctatgtctgtatttgtttctagtcatggataagctcaaaactcaggagatgcagttagaaacccttgcctgccactccactttgtatgtctgagagaaaggaaacagtgctggctgaaaatgtgagctatccttgctaaactgacctgagatgctaagatgtgaaatctttgggaatcagctagtgagtcagatgaagacagaagttatcttgcaggactgggata

SEQ ID NO: 348008 - DNA, 568 bp, Homo sapiens
tttgttgcccaggttagagtgcagtggcacaaccagggctcactgtagccatgctcttctgggctcaagtgatctgcccacctcagctcctcagtagctgatactacaggtgtgcaccaccacatctggctactttttaaatatttttgtagagatggggtctcactgtattgttcaggttggttctaaacttctggtctcaagcagtccccccaccccagcctctaaaagtgctgggattacaagtgtgagccactatgcctggctggctaaaacttaaaaaaaaaaaaaaagtatgtgcttagtatctttgttggcttyctttaaaaaaaaatgttctcctgtttatatttactccacactattcctccttcttctttgcgatcttcattgctctgagtcctcatcccataggatatgggccgatcacaaaatgggctgattggggttgagttgtccatcagacttgaaggaatgtccttgcagtgaggtgcactgtggaagcattgtactgtcttgtcccatggcttttgcttctttttggggacccagtatttggtataaaaaa

SEQ ID NO: 348009 - DNA, 554 bp, Homo sapiens
  misc_feature (1)...(554): n = A,T,C or G
nnnnnnnnnnnnnnnnnnnnnnnnaaaagacattcacacaagtatcaaaccaagaggggtgggttccctgaccaggaatcaaacccatgcagtggaggtaaaactgcagaattttaactattaggccacaaggtggagtagcctttgttgttcccagattaggaaacgaactcaagccctgatgggaattttaactaccagaactattttaggtcagacttttttgcacctattttagtcaagagaacttttttaggctagcctttgtcctgtaaaacagtttatctttttcattaattgcttaatataagagatcactaaaatctttaacagcacagagagagaggctgggaaggcagtcttaygtaaataaaacctctcaggtagtcaaattttgatttttcttaaccagccagggattttagaggtaaaatttgtctttcggcagctgcagggatttcagttgacataagaggggaccagaagttggtcaaatctaacaaaagatggactgaaacaaacaaacaaaaacagaaaaaagtgatctctgcctg

SEQ ID NO: 348010 - DNA, 409 bp, Homo sapiens
cagtgtggctttatgaacaacatgacaccttatcagcactttggaagtagttctggttgaaccaccttgacaccaraacaattcattcattcattcacaaacgtttgtcaacaatctagtacatgctaagtggtgggaagttgagtccctgagctcataattcattcaaccaatgttttcgagcatctactgttacattctggagaaatcaggacgcaaagcaattttcattctcaaagaattcatggtctcataagggaaaaaccaaaacaaaatttgaatgacagagtctatgtactaggtctacctagtacctatgtatatctagtatgtagagtctcatatgtatacctagtacagagtctctcacaggtatacctagtacatatgtatacctagtacacagagt

SEQ ID NO: 348011 - DNA, 537 bp, Homo sapiens
gtgcaccacatcaaattataaactagtatctggtacttatgaaatgcttattatgtacaaagcagtatcataaacactttatatattatttaatataattcttacaataattctgtgatataggaatcagtatcttcattttacaggtaaagaagctgagaattaggacggaaagagcttgccccacattccactgacaattgaaatcgctaggattcaaacccaggtctgtctcaccgtcttaaccactgagatttgtagcctgtcccattagactgaaatcctatttgaatcagctgtgtaggtttacattgcctgagagtaggaaaaaagtattttcatcctgaagacctaatagagcctttcaagaatgtattttacagctcttttcttgctgatagtagcagaatttgatctacagctcaaagtgtaggcccagttgaatgtggaagacttgacgggttagacargcatcttatgtcagaagacgcaaggggccagttctttaagtctggaaagctcaggctaatattagtg

SEQ ID NO: 348012 - DNA, 564 bp, Homo sapiens
atgtgaatgaactcaacaaatgggagagtacatggtgagaataatagagaatgggggctcatatattagaagataaggaacagatagggagtaagaaagtccaacaaagttaactaaagagaatattttgaaagcaggggaagacctgagtccttgaagccaaggtatgtatgtttgttgagaagtcattctccttccattcctttacatgtaggtcatcctcaaggtacmaataccagggggaaaaaaatgtaatctctaaaaccagcacaacagggctgatttccaacctgggcaggaattcctactagtgaagtgctgatagtaagtcttgaagagaatgttgttgggtggtagactgagcctttcattttggattgtcaccaggagaatattctttccatggctgagagaaagaaggcttcttttcactggagaagaaacagatttttgcagtgactctgcaaagacaacataggtcacgaggaagggattcattattttcaactgcagtctttccatagttctgatacaaatgttattctgcacccagaaacactcaaa

SEQ ID NO: 348013 - DNA, 578 bp, Homo sapiens
agcaagcaaaagttggagttaggagatgataacaaatataccacactcttaagaaactaaaatggagaaagaaggaaggagaaggagagggatatccagagttatcagaggcgtgtgtgtgtgtgtgtgtgtgtgcacgtgtgtgtatttgtctggggccatatttataatctgaaaaaaagaactagtaaacagggaataattaaatatcaacatgacaagggcagccattgtgcaagtccagttgtcagagttgactgacaggtgtatagatagctcacctcacctttacatcggggtggaaagccacagtggaccttargacaaagggacggttccagaagttcctattctagggatacagccagaccctcagcacctccacaggggatggatgttatccagagccctgaagtcacccatgaagacagcaggaacctcccgaactcttctttgcggtagagggcctgagtgaaacactgacaaaccacaaatttgtttcttgctttgtttttttggtggtggtgtttttccttgggaactggcacattttgcattgagggttacacaaagcaaaa

SEQ ID NO: 348014 - DNA, 578 bp, Homo sapiens
agcaagcaaaagttggagttaggagatgataacaaatataccacactcttaagaaactaaaatggagaaagaaggaaggagaaggagagggatatccagagttatcagaggcgtgtgtgtgtgtgtgtgtgtgtgcacgtgtgtgtatttgtctggggccatatttataatctgaaaaaaagaactagtaaacagggaataattaaatatcaacatgacaagggcagccattgtgcaagtccagttgtcagagttgactgacaggtgtatagatagctcacctcacctttacatcggggtggaaagccacagtggaccttaggacaaagggacrgttccagaagttcctattctagggatacagccagaccctcagcacctccacaggggatggatgttatccagagccctgaagtcacccatgaagacagcaggaacctcccgaactcttctttgcggtagagggcctgagtgaaacactgacaaaccacaaatttgtttcttgctttgtttttttggtggtggtgtttttccttgggaactggcacattttgcattgagggttacacaaagcaaaa

SEQ ID NO: 348015 - DNA, 647 bp, Homo sapiens
atgtgtatacccactggcatattctgttgaatagaattggcaaaacagtaatccagatcacaagatcacacatggacacacatatacatacgtacatgtatatttgtatatatttttctttttccagaaagtgattatgccattcccatccaatctagtcaacccacaccagtgtgaatactagcaaattgttcttgccagtagtggaatgtgcaatgtgcccaaggagattgtctaaaatttaaaggacagagaccaatacaaagtattcactgcctatatcccccttacttagaatacggtctgccatgcaatgtgccgtaaacatctgatgaattagtgtgtgaatgattacaggaatgaaatcagttatttttctaccatcaatcattcaggcaccacttcacaggttttgccayacaccagtgttttttgaacttaatatttctctttaaatcaattaattttaaacctaaataatttttaaacagaacctgtaacttgttatcatcaataaaaaaagagttatttttaaatgacatagcatatctattttacaacattcacaaatcacctagaaatcatcttgcataacactaggggtgagtgcactgcactaaacaaatgaatgtaaatcccatagcatg

SEQ ID NO: 348016 - DNA, 538 bp, Homo sapiens
ttctatctttgtagtaagtcttatagagcaaatattacagagagaagaattggcacaaatccctttaaattatactttcttcacattaatctgaggctaactctatattatggagaaacactttttactacagtagagaattcttagaggcccaaggtyctgtaatttttatcctatttaacttggagttgtttgtatgcctacagtattgtttactgaattaacacagttcactctaaatgactttgaagatataaaacattggacatttgacccaagagtgttcctcagggtcctctaagctctaaccctggattaagaggttaggtactccaagggaaaaaatttgcttactactttaccttacttccctgtaaaaatgtcttttctgagttattatttactcttacttccttagcgtttactctttttagtgggccactatgaagcttgtacatttaaacaaagtttctgtgtctttcacagggacaaagtgaagacattgtccaatatgttacctaaggtcccttatagtcaa

SEQ ID NO: 348017 - DNA, 563 bp, Homo sapiens
gatttttgggaagtgctgaaatttaagtgggggaaatgacaataatctatgaaatattccgagaggtaggaactataccagaagtgaaaaacagagccaaggcccccaagctaggtaggaggaagataaaaacagagtatatgagggaataggattttttacttacgggattcttgacactcacagtgtcaagacaggtaagagtcacaagtcaaaagagttgtgaagggaggccaggtgtggtggctcacgcctrtaatcctagtactttgggaagctgaggtgggaggatcacctgaggtcaggagttcaagaccagcctggctaacatggggacaccccatttctactaaaaatacaaaaaattagcagggtgtggtggcgtgcctgtaatctcacctacttgggaggctgaggcaggaggatcacttgaacccaggagatggaggttgcagtgaggcaagattgagccattgcactccagtttggacaacaagagcaaaattccatctcaaaaaaaaaaaaaaaagttgtgaagggagtaaatgaatgaataaaaaatt

SEQ ID NO: 348018 - DNA, 497 bp, Homo sapiens
catcctcactggtgcatcttcattgtgacaatattttcatatgcagaggatcagcacttgcttcctttacttttttcctccagagcaactttattgcataagcatgctcctttctattgactcattttgtagaaacaacccatatatttatatgccaggacatgggttacagattttacctccatagagactcatcracacatttctttcagtttgtgagttttgagctaacaagcaaagaggagctcacaagcaaaggtaaacctttcttttatgcttcacagtgacattcattccatgctgtcttttgtaccatgacctaggatgtggaatatggagtcaaagatgcgtaagacaaggttcttgacctcagagcaatccattcaggatacccattagtctgcatcaggcttctgtgtcatggaacccacacagagaggaggaaagggatgaagccaccaatgatgagcaccatgacttctggcatcacattttgt

SEQ ID NO: 348019 - DNA, 497 bp, Homo sapiens
catcctcactggtgcatcttcattgtgacaatattttcatatgcagaggatcagcacttgcttcctttacttttttcctccagagcaactttattgcataagcatgctcctttctattgactcattttgtagaaacaacccatatatttatatgccaggacatgggttacagattttacctccatagagactcatcgacacatttctttcagtttgtgagttttgagctaacaagcaaagaggagctcacaagcaaaggtaaacctttcttttatgcttcacagtgacattcattccatgctgtcttttgtaccatgacctaggatgtggaatatggagtcaaagatgygtaagacaaggttcttgacctcagagcaatccattcaggatacccattagtctgcatcaggcttctgtgtcatggaacccacacagagaggaggaaagggatgaagccaccaatgatgagcaccatgacttctggcatcacattttgt

SEQ ID NO: 348020 - DNA, 537 bp, Homo sapiens
atggatggatgttatgagcattgatataagatgttaatttacattgttcactcatagacatctatggagcacagtttggaaatttcctgcagaatcattatgctcctagcagagctttgtgtagggtttttgaaaattctgttcaattccacaggaaagggaaataaaaactatttctatgtcctcatctcctctcaggtgaaactcaaaatgggtttttgatttaaagtgctaggctggtctctagaatattatcagtccttttaaatggacttttaccttctgaagggagcatgggaagagggagataaaatatctcctcttaaactctcatcaatctgggagaaacagaaggttatttgaaggaaatggaggaatactgaaaaagaaactacactagtatattactatacataaaacaccttcctatctgctatctcatttaatacytaaaacaattgtgtaggtgccgttattattacaatattacagatgaagacactgaggcataacagtataagcctggaaatggtagca

SEQ ID NO: 348021 - DNA, 596 bp, Homo sapiens
ctatgtccctaatgactaggatatagaatcatcttccagaaaagatgacaaggaaagttttcagaagaggcagcagagaatctgggactatcaggatggggattctgggaaggacactccaacattccaagctaagggtactgcctgagctaaagcctgctgtgttcttttcctgctgcctgacattcttactgatctgcctgaaatccatatattcttggaaacgttgctgcctctgatttctgtataaatgacacagmccagactggagtaaacaggattcatgaaggccattggttctccttgagccattttatctgtgctgtctgtgaaccagactcatagagtcctgagtgcatggccaggtgtggtccagcctggaggttctgccctgtgaagtgtgcaggtatgtcttctgagtgggaagtggttataagcacccattttcatttcatctgtaacaattaaatagcctcacagcagcccctgagttgctgatgggctcacaccccattgccatgtaatcacatctaatctcattgagctctgctcaaaatagccataattggtggttttatccaaatcaataaagacag

SEQ ID NO: 348022 - DNA, 540 bp, Homo sapiens
tgcctaatcaagtcataagtggattaattcatcatttktcttcccaaagttaaatcatacagtttattaaagcttcattattgatcaaagaatattacttcttcatatctttgggtgaattaatttatctgcccatgattttagacttgagatttcttggatattaactcaaccatgtaatatgtttgttatcactaccagatcggaaaaaaaaatggggagggaaaattaaaatgcctcttttacctaaaggcaaaggaccgaaggaaataatcttgattttctttttgtacaaggtctgtatagctcaggagccttcattaaaacacttgtcggagaccattttaagtcttccctactctgtaatcccaccatgataggcttaaacctcaccaatattcacatgtgtaaatctgatttttcaggatagtaagatttgaaagatatgctgcatcaacaaattagaaaactggatttcacaaacacacaaaattgctttcatcaggaggtttctaaaactgttagaaaccaaaaatacag

SEQ ID NO: 348023 - DNA, 563 bp, Homo sapiens
ttcttgaaaattcttcagtctgtagtttcgttgctaaagtcaaggttgcccctggcccaggcactaaagaacagcactgatttatcgagtccctgaattttgaacacattggcagctctctggtgaatgcaaaggcaagaaaagatcgttgctcttaagtttgttaaaatatcagagtcaatattgagcataattggagaagagatttataaatatggaatggagaagtctagagagaaacctgaagtgttagattggaactggagatacaggagtaaactcatagctttgttttaaaatatgtatatatatatacacatagatgtagaaataracatagatgtgtatatatatgtatgtatgtatatgcatgtgtgttaatgtatgtatatacatatgcatatatttcttactgctgaaaggacctaaaaacaatgccattccagtagcaatgtgcacaccgggctcccatatcttgctttccaaatataattttttgctaaaaggaaacaaggtcccatggaaaaagggttgattccaaggctgaggcaggaaaagtgtaa

SEQ ID NO: 348024 - DNA, 515 bp, Homo sapiens
cattttatgcaaccactcgttgcataaaataggaatccttgagttcatattgatgagagagaagagagagtgagagaaagagagaaagagagagaaagctcttccttatagttccaatacaactttatttacaaaaataggcattgagctggatttggcctatgggctgtagtttgctgaccctcractaaaggaagctattgaagactttgaccctaaaaatggcatcatcagaattattccttgggaagatacatccagctactggatagaaaatggatttgagggaagagcataaaagtggaaagaaaaactaggaggctgttgcaatggtccacatgtttgcaccatggagaaaccaacacagttttataagccaaatatacctgggaatttggcctcacaaaccttagctggcacacagctgggtctgtctgtccttagctgaccttgattctcaccatcttgccagtttagccactctgaaatcttagccatctctgaaatcctatgtc

SEQ ID NO: 348025 - DNA, 457 bp, Homo sapiens
tgtcaggtaatcaatccagaagtttctgtgagcctcgctgaggggacactgaggagctgagagacagcactgtgtttaggggctttccaaacagggacatatgaccagaaccatggattccagttttcaacagcagcaccttgctctagatggggccaataacacctcaacagtgatcagtccaagtatcagaatagatcggacgcttcccagtaaagataagagaggatccaaggacacctgctggaacttacgccttttctctctgctttgagagtatgcaaagaagccttgtcatcagatccagaaatcatctcaggataaagaacagggagggttcaggacactataagatgaaacactcacctaaagtaaaagagcagccagaaatamggaaaactttaagccatctctaagaggaaggtgaacttaaaatatatccaacattttatgtgaa

SEQ ID NO: 348026 - DNA, 589 bp, Homo sapiens
caaatctggagttttaatgaacctaatctttactggcaaagtagctaacttgcctcctggaactttttctgcaaaattgttagttattgtcctgctcactttactacttcttctcctcctcctccttctcctccttctcctctttttcttcctmtaattcctccctcttctccttcttattattcctgtccttccccctcctctcccctcttgcttctcttcccctttcttttcctccactttaacattttaaaattgaggtgtaatccacataacagatgaatgatatgtgaaactcatcattttaaaatttacaattcagtgtttttagtgtattaataacacagttgtgaaactatcagctctatctagtttcagaacacttttttcctcaccacaccctcccccataaaaaaaaagcccatagcttttaactatcactctctaagctcctcatctctgccctaaacaaaaactaatttgtctttatggatttccctattctggagatttgtatcagtagaatcacacattcacacattgcatgttttttttttttttctctgtctgattttttcacttagcatag

SEQ ID NO: 348027 - DNA, 589 bp, Homo sapiens
caaatctggagttttaatgaacctaatctttactggcaaagtagctaacttgcctcctggaactttttctgcaaaattgttagttattgtcctgctcactttactacttcttctcctcctcctccttctcctccttctcctctttttcttcctataattcctccctcttctccttcttattmttcctgtccttccccctcctctcccctcttgcttctcttcccctttcttttcctccactttaacattttaaaattgaggtgtaatccacataacagatgaatgatatgtgaaactcatcattttaaaatttacaattcagtgtttttagtgtattaataacacagttgtgaaactatcagctctatctagtttcagaacacttttttcctcaccacaccctcccccataaaaaaaaagcccatagcttttaactatcactctctaagctcctcatctctgccctaaacaaaaactaatttgtctttatggatttccctattctggagatttgtatcagtagaatcacacattcacacattgcatgttttttttttttttctctgtctgattttttcacttagcatag

SEQ ID NO: 348028 - DNA, 594 bp, Homo sapiens
cacacattcacacattgcatgttttttttttttttctctgtctgattttttcacttagcatagtattttcaaggcttatccatattgtagcaggtatcagcacttcatctctttgtatggctgaataaaatatatcacaatttgattatccatttatcagttgaaggacatttggattatttccactctttgcctattgtgaataatgcttctataaccatttgtgtacagctttttgtatgaacatatgttttttatttatcttggktatatacctatgagttgaatcactgagttgtatggcaactctacgtttaaccttttgagaaactaccagactgtttttcaaagcagccatatctttttgcattctcatcagtgatgtaagaggattccagtttctactcatcttcaatgcttgttcctgtctgtcatttaaattaaagccatcctaatgggtatgaagttgtatttatctgtagctttgatttgcatttccttaatggctaatgatgaacatttttacatgtggcttattatctatttgtatatcttcattggagaaatgtctattggaatcttttgtcaattttt

SEQ ID NO: 348029 - DNA, 571 bp, Homo sapiens
aaacatgactggaggaaatcaaagcctagccatggtttccactgtgctccacatcatgtatctgctttcacatccttacctcccactaatgcatcatccacccacaatatggtctggccccaccaccttctataaaattgctctatcaatgatcaccagggaccaacacaattcaaaaycttgcttttttttcagtgcaaacttcactcatcttctccatcatgttgaagagatcaaacatttctgcattttgacactcctctctttggtcatttgcttcctccttcctccctgattgcaccctctctttttccatctcccagtcctttgaagtcagcatttcagcaagtcctacaattcactcacactctaatgaatcttgtatagtttgtcctataatgaactcattatgtttcctcaaagattgtcatcttcctccagcattgattgttactataaatgccaagctggtctcccagagtcagcttctcccttccccattctctctaggttcattctcactgggatctttctccatcacatatgtgaccatcactctctagtgccttca

SEQ ID NO: 348030 - DNA, 611 bp, Homo sapiens
attcaggatgtagtgaaactgttagaaagtatgaagaagactagaaaaggttaagcaaacatgactggaggaaatcaaagcctagccatggtttccactgtgctccacatcatgtatctgctttcacatccttacctcccactaatgcatcatccacccacaatatggtctggccccaccaccttctataaaattgctctatcaatgatcaccagggaccaacacaattcaaaaccttgcttttttttcagtgcaaacttcactcatcttctccatcatgttgaagagatcaaacatttctgcattttgacactyctctctttggtcatttgcttcctccttcctccctgattgcaccctctctttttccatctcccagtcctttgaagtcagcatttcagcaagtcctacaattcactcacactctaatgaatcttgtatagtttgtcctataatgaactcattatgtttcctcaaagattgtcatcttcctccagcattgattgttactataaatgccaagctggtctcccagagtcagcttctcccttccccattctctctaggttcattctcactgggatctttctccatcacatatgtgaccatca

SEQ ID NO: 348031 - DNA, 610 bp, Homo sapiens
ctcttttcaggcaacctgcttaaggggattatagacaaacttgaaaaacaaaggaacaagtccttgtaaagtgtttgagtgatatgtggggtagctttcctgacctctctccccaccccaccttctgcactctgctccatccacattggccttccttccttgcccagaactctctgggctcttttccttcaaggccttcacagcagcaattttcttagcttggaactcccttttcacactcatctaacttcactggaccaaggtctgctcgattaccacattcttggggaactctcttctgaccccaagcctatgtttgatccctttgttacattcatgtatggcatctagttcttttcttttagaactcccattacaacttcaatgaagtaactaattctgcaatgacttatttgatgcttgtcccttttcacaggcttgccatttgttttgctttccagggtatccccaagtccagccccaggcaggtgtgaatatattggctggatgaatctatcctakcagcctgggtctcagatgagtaggagagagggtagacagaggccaacagcaaacatgtatccattcttatttaaaaaatgtgtttgaa

SEQ ID NO: 348032 - DNA, 532 bp, Homo sapiens
tatatgtgcctatgagacatctccattttcaaacttagacttgaagtgggaaataagaaagtctggggataacttctataagaaagtttgtttataaacccattctgaattccaaacaagaaggaaaatagacgcacttcgtgttttctttttctagtcaccaattaaactgatgatccaacaccatttatttccattgccttatccacattgctgacaatcataaaaacagagcccaaaatgagtccatgaagcatatcccacctctgcttgtacaagactgaaagtgatagcttgagaacaaccrgcaatggaagaaaacacacccagtatggattgagaaggctagtatcaaacccagaaaaggactttctattatcagtgaggatgagaataaatggctccctaaggaaatggtatgttctcttaatagctcacaaattttccaggttagtttgatcaagtgaagcagagctagcagggatacaaattattgaaatggtggcaaagataaagcttctatgtaaaataa

SEQ ID NO: 348033 - DNA, 510 bp, Homo sapiens
ctttggaaaaggagaattcaccctgtgtgggtcaccatattaattactattacaaggagctgatttatggccacagagcccttgcaggtgtttgagaatggtgctccacaatgggaaatggaaacagggtaatcaataaccaccctgagactcctgctttaaggctgtccttgaargtgtgctgtggatctttttccagcacgtctgaagagcaatccttttgccagcaaggagccctacgggaggagaagtaaatattgtctttagacatggcacaaggaccaaagacactgccaagacatcaatactgagatatcacagagggcttgttggtggaggagggaggctggtcacaggcgggaaggtgagatttcttcttttgactgctgagatcactggacttgcagtcagaagatctgggctccagagctggctctatcctttatcagaaaagtaaccttggacacattacttaatctgtccaagcaacagttttcgcctctgtaaaat

SEQ ID NO: 348034 - DNA, 603 bp, Homo sapiens
atgttgtagttattggttttatttcagtttacattgatggtgagactcctggaattcatttttctgtccagtaaacagtaatggaagctagtggacatgaagttctcacacagaagcaatgtgtaattgacaacagggaggtcattyagatcaggtcagttattgaatatcaacatggaaagaaaatttgttacatatggacttaatggaaacgacaccctaattttatgtcaagttgatccaagaagcctgcccgagatcctctgcatgatgttttctataggaacatctatttttattgtatttccttaattcaatcaaaagggttcccttgagttgacttatagtaggctgtgatatcaaattatctgaagttaatacacaggatacaagtggatgttttatcttttggctaggagtccaaaactacattttattgagaataccaacaactgggttgttgcctagaattgactgggtatttggaatgtccaaggttgcagagaagggatctcaggatcagacgcgcagtttttgcattcatcaaacatttctgtgagtactgtgtcccaagctccacatgagttgcaaaagatagtgcca

SEQ ID NO: 348035 - DNA, 603 bp, Homo sapiens
atgttgtagttattggttttatttcagtttacattgatggtgagactcctggaattcatttttctgtccagtaaacagtaatggaagctagtggacatgaagttctcacacagaagcaatgtgtaattgacaacagggaggtcattcagatcaggtcagttattgaatatcaacatggaaagaaaatttgttacatatggacttaatggaaacgacaccctaattttatgtcaasttgatccaagaagcctgcccgagatcctctgcatgatgttttctataggaacatctatttttattgtatttccttaattcaatcaaaagggttcccttgagttgacttatagtaggctgtgatatcaaattatctgaagttaatacacaggatacaagtggatgttttatcttttggctaggagtccaaaactacattttattgagaataccaacaactgggttgttgcctagaattgactgggtatttggaatgtccaaggttgcagagaagggatctcaggatcagacgcgcagtttttgcattcatcaaacatttctgtgagtactgtgtcccaagctccacatgagttgcaaaagatagtgcca

SEQ ID NO: 348036 - DNA, 603 bp, Homo sapiens
atgttgtagttattggttttatttcagtttacattgatggtgagactcctggaattcatttttctgtccagtaaacagtaatggaagctagtggacatgaagttctcacacagaagcaatgtgtaattgacaacagggaggtcattcagatcaggtcagttattgaatatcaacatggaaagaaaatttgttacatatggacttaatggaaacgacaccctaattttatgtcaagttgatccaagaagcctgcccgagatcctctgcatgatgttttctataggaacatctatttttattgtatttcmttaattcaatcaaaagggttcccttgagttgacttatagtaggctgtgatatcaaattatctgaagttaatacacaggatacaagtggatgttttatcttttggctaggagtccaaaactacattttattgagaataccaacaactgggttgttgcctagaattgactgggtatttggaatgtccaaggttgcagagaagggatctcaggatcagacgcgcagtttttgcattcatcaaacatttctgtgagtactgtgtcccaagctccacatgagttgcaaaagatagtgcca

SEQ ID NO: 348037 - DNA, 603 bp, Homo sapiens
atgttgtagttattggttttatttcagtttacattgatggtgagactcctggaattcatttttctgtccagtaaacagtaatggaagctagtggacatgaagttctcacacagaagcaatgtgtaattgacaacagggaggtcattcagatcaggtcagttattgaatatcaacatggaaagaaaatttgttacatatggacttaatggaaacgacaccctaattttatgtcaagttgatccaagaagcctgcccgagatcctctgcatgatgttttctataggaacatctatttttattgtatttccttaattcartcaaaagggttcccttgagttgacttatagtaggctgtgatatcaaattatctgaagttaatacacaggatacaagtggatgttttatcttttggctaggagtccaaaactacattttattgagaataccaacaactgggttgttgcctagaattgactgggtatttggaatgtccaaggttgcagagaagggatctcaggatcagacgcgcagtttttgcattcatcaaacatttctgtgagtactgtgtcccaagctccacatgagttgcaaaagatagtgcca

SEQ ID NO: 348038 - DNA, 562 bp, Homo sapiens
ggatttctcagagtctgtttttcctgtttgtgttaattttcacagccagttatcctatttacatwtttctaaagctgttcacaggacttgttgtcagttatcctatttacattgttttaaagctgttcacaggacttgtcagttatcctatttacattgttctaaagctgtttacaggacttgtccacaagaattcaacgttcttaagtggctttcgctgacttcctcttccccaagcacagctgggaatccccttccctcagacagcagcaagccttccttctcaggtcaccaatgcagggctccatctctgcctatttctagtcacctaactcatagtgagcacccactgtgcgtcattgagcacttctgcaagtcaagggtttcatgcagccactccaccaggtggatgtgacttccccattttaatgatgtggaaagtgaggtttggtgaagaaaatgtgccttatcaaaggctgagcttctaggatgtggccaagccaggattcaaactgaggtctgtctgagttccggtctgctgcattctccttcctgtgaccag

SEQ ID NO: 348039 - DNA, 603 bp, Homo sapiens
ttgttctaaagctgtttacaggacttgtccacaagaattcaacgttcttaagtggctttcgctgacttcctcttccccaagcacagctgggaatccccttccctcagacagcagcaagccttccttctcaggtcaccaatgcagggctccatctctgcctatttctagtcacctaactcatagtgagcacccactgtgygtcattgagcacttctgcaagtcaagggtttcatgcagccactccaccaggtggatgtgacttccccattttaatgatgtggaaagtgaggtttggtgaagaaaatgtgccttatcaaaggctgagcttctaggatgtggccaagccaggattcaaactgaggtctgtctgagttccggtctgctgcattctccttcctgtgaccagagttaagctctattaaatgacagactgcacaaatatgaactatctgcaaagcctccaagcagatctgccatccttttctacccaaggaagacatagtccaggtttactttaggccaagataccaaaagaggaaacaggccataactcccctaaccaagtgcactcatgttagacatcagattctttccaatgtttcc

SEQ ID NO: 348040 - DNA, 564 bp, Homo sapiens
attatctcctccctacgcttatagtgtcttttgtattttctttcttggtgtgttggtccatctcccaarctagaaaatcaagagatattgaagcttcatctttcctttttctcttaccttccacacctgattaattgcccatttcaggtgtcattgctacgtcctaggtagcatagcctttacacctgccagctccatctccatgacactatctctgctcatcttcgtctctcaactgtattcctcaccaacctttacatatcttcctctaatttttcttcctctgagccaatatcagtggtatttgaccttaatcatgttgcatcactgaccttttgagaataaaatttttgacattcttttcagaaaagaaagctcatgtgcacacagacatggcttttcacctacaagtttaaggtattcatctcatcacatctgtggacttcttcgtgttcagggataccaagtaacaaactatagcatcatctctggtccagggtgagttttagaaattgcagctctcacagcactcccctcctaagtaacttcatgtcaggttgttgc

SEQ ID NO: 348041 - DNA, 589 bp, Homo sapiens
gccatcctatctcataaagaaagaacaagcccttttgatgaatctcaaactgtcttcatcttagtccaaatgtaggagttacatgtgaaccaaccaatcgacatctcactccttataactaacagtgcctgcagaggctgttcttgggctctttctgaggtgttgactgaagtcctaagatgcagagtctctggtttcttcccagagtccctgggcttggtggaggtcctggaatccaagccacagtgaactcatgatccaagggtttactcactggttcatgcaacagggagagaggcccagttcacctggggctggtttggagggtctagaaaatataaaaagtgaagctctcctggcccacagagaaaaggtaagaaagtgtgtctggggaacaggaaggcactcattaggatacggagcatctcctagggkcagagtgattttgattcagattcagactgtaacagctcctggcatcatgcaaatgaaagcaccaaggagtctttcttccatgaaaacggggcaagttgccctttttttttcaagtagctaagcaacaaaaaatataaattacatcacagaatgg

SEQ ID NO: 348042 - DNA, 571 bp, Homo sapiens
aatggacctgattgaaaacttgatgtaggagctttttctacttaagccaagcttctcctttgttctttggaaagcccactttcacttatactcaatgcggatctccctaatctgcacattgttcttatagaaataaaagctctctctttttcctctgcagatctcatggtcttttgttaacatcattttctaatctactaaataatcaacttatttgttatatacaaacttctaagttgattatttgttgattattattatttgtttgattatttgttgcctgtcttcccattttaacatgcaagttcctctagagttgggaattttgtctaatgcattctatgtatctgatatattcaattatctcatgtgtttctcagcaaataaaatatttgcaataaatattttttcttactgaattgattagctaccagagttatgattatgagtccaagttgtcttattgaataaaaatactaagtggaaaaaaaatgaatgtggactctgacacakgacccaagatattaaaaggtcagatgtagatacgtttttgaaggactgaaaactaaat

SEQ ID NO: 348043 - DNA, 544 bp, Homo sapiens
cttcattttctctccatactgttagtaaagactacaagaagtagtttgcttttggctggcaattccagcaatgtttcttcactatcctacatcagagatatatgaactctccagtcctctgtcataattttgttatcagaaactttatctttctcttccacaagatatcacatgggtccataacattggtgacattatgccgattggtcctagtgagcaacaartagcaactactctagacttatttgtaacatatttgcatgttgagggtgggaaatatatctgaaaaaaatttagggtcttccacatcagtgaaatttctagggttccattggtgtgaggcatgctgagttatcccttctaaggtgaaggataatttgttgcattctggcctctcctacaaccgaaaaagaggcataatgattagttggcctctttcgattttagaggcaatatattccttgtttgggtatgttagtttggcccatttaccaagtgacccaacaaacagctagctttgaatggcacccagaacaagagaagg

SEQ ID NO: 348044 - DNA, 544 bp, Homo sapiens
cttcattttctctccatactgttagtaaagactacaagaagtagtttgcttttggctggcaattccagcaatgtttcttcactatcctacatcagagatatatgaactctccagtcctctgtcataattttgttatcagaaactttatctttctcttccacaagatatcacatgggtccataacattggtgacattatgccgattggtcctagtgagcaacaagtagcaactactctagacttatttgtaacatatttgcatrttgagggtgggaaatatatctgaaaaaaatttagggtcttccacatcagtgaaatttctagggttccattggtgtgaggcatgctgagttatcccttctaaggtgaaggataatttgttgcattctggcctctcctacaaccgaaaaagaggcataatgattagttggcctctttcgattttagaggcaatatattccttgtttgggtatgttagtttggcccatttaccaagtgacccaacaaacagctagctttgaatggcacccagaacaagagaagg

SEQ ID NO: 348045 - DNA, 584 bp, Homo sapiens
atatgatatatgtaaaattatactcttctctaaatcattgtccagggattcaatgccaaaacttatttgtgtcttgaaattcctaagactgatatcatcagtataatttgagtttcaaaatatccttatgataatttgacatcaaacaaattatctaaaacttaatagacaaggttagaatttaaattatctcaataaaatgaggtttgatatccatataagagaagaaataagttgatcataaagcaataaaaataagtaaattagactgtatatatgtgcatgtgtatatacttatatgtatagatttgtatacgtgtgtatgtgtgtgtagatatagtatatacaataaaattgytgtgtgtgtgtgtatatatatatatacatacacagtctgtgcaattctgcagtagaccttttctgctctttcagttggatcttgtgttcctaaaatacccaacatagagaaactggcacaccaagtgccttgtagatctgaagaatgggtttcacgttacaccaacactacttacaattgcaattagggaagcctcaacttcaataaccctagaatttagattctg

SEQ ID NO: 348046 - DNA, 377 bp, Homo sapiens
catttagtgaatagtgttcatcttcttttaactgaatttttttcaggtcatctttatattattgttatatttgttaacttttgctttttgttattattgtgctactttacatcaccagttaagcaaaatggataagtgattcaatatggttaattgagacctagcagtggggaggaaatagtaaatagaagtaagcagattatgcataggacactagggttaacaaacaataraaatctgtatgatgctaggacaactaattcttgcaagcgtgatgaatttcccaagaacctggaatggaaaactgaagatgggaagtatggtaatgtctactgaaaaaaatcagattttactgcaccaccagtccactaacctct

SEQ ID NO: 348047 - DNA, 562 bp, Homo sapiens
aaaaaatcagattttactgcaccaccagtccactaacctctaatactcagggttttgtcttttatgaaactttgtctgctttcctataaggaatatgggcagaaagcattccttgcttttacgttttgtttttgtgttttacagagcatagtgacctctcataaactagcaacaaagttaaagttaaatgtatttactttattttatttaagattcaggggtacatgtgcagatgtattctatgggtatattgcatgatgctgagatttggggtacaggtggtcccgtcacacaggtagtgagcatagtatggaataggtagtttttagctaattcctccctcctctcctcccccatctagtagtccacagtgttcattgcttccatctttatgtttattcatatttaatgtttagctcccacttgtaagtgagaacatgtggtatttgtttctgtgctaatttgcttaggataatggcctccagctgtgtcckttttgctgcaaaggacagggttttattacttttatggttgtgtagtattccatgatgtatatatacca

SEQ ID NO: 348048 - DNA, 571 bp, Homo sapiens
gtgatggcctgtagataggctcttagccatgccgcgctttcatgtttcagcatgttcacagtaatgctctggagtcagtgggggtgggacactggggagggaggtaaataaacctctccctaagaccacccctggaccttggaggcactctatctgatccctgatcccacaccagcgttccatatgttaagtattccacaccatgcgtgaggctcccttaggcagagkttatgcaggctacacccttcccagactagccctacagagggaggcacaatgctctcccccaccagctcacaaacctgggtatctcacccctctcagtgttctgagaatgggggaatcctcccttgcttgtgagccactcaatctaacaagtctttactgactagaagcagcaggcacagggcttgtacagtataacatccaggtgtttcctaggggaaaacagaactgtgcacaccagcagggttcaggaaaaggtggggccactctgctggaagcaggagtccaggcctgtctggagagaagaactgggaacagtctgctttctcctggcaccgtgactgtg

SEQ ID NO: 348049 - DNA, 529 bp, Homo sapiens
tgaaggtgaaaaagtcgaatcacaatgaaaagagactcttctaatggcttcagcaattcyaatgtgtcttgagccccaaaagattttggagtttgcagctgcagatgacaattccttttcttttcgttctttctttcctcttttttttttcttctcaaactgaatttcaacaatgaagcaagtgattgcagtgtggcaatagacaaaaactgttttcagagggttgcctgcttgcagaggcctgggaaaaccgtgcttccaagtcacaaacaataggtcttttaacctcatgctttgccccaaactgggtgataaacacatttcccaaaattgtcgtggtccaacatattaggaaacctacaataagaaaagcttagcatagttttctgtgctccaattaaaaagaagaatcttttagaagagctttcacaagctggatagcagcttcctccaatctggaattgaagtatgagtctcactttcacacgtatcctcaggcaacagcatcattcccacaacataaagacga

SEQ ID NO: 348050 - DNA, 529 bp, Homo sapiens
tgaaggtgaaaaagtcgaatcacaatgaaaagagactcttctaatggcttcagcaattctaatrtgtcttgagccccaaaagattttggagtttgcagctgcagatgacaattccttttcttttcgttctttctttcctcttttttttttcttctcaaactgaatttcaacaatgaagcaagtgattgcagtgtggcaatagacaaaaactgttttcagagggttgcctgcttgcagaggcctgggaaaaccgtgcttccaagtcacaaacaataggtcttttaacctcatgctttgccccaaactgggtgataaacacatttcccaaaattgtcgtggtccaacatattaggaaacctacaataagaaaagcttagcatagttttctgtgctccaattaaaaagaagaatcttttagaagagctttcacaagctggatagcagcttcctccaatctggaattgaagtatgagtctcactttcacacgtatcctcaggcaacagcatcattcccacaacataaagacga

SEQ ID NO: 348051 - DNA, 529 bp, Homo sapiens
tgaaggtgaaaaagtcgaatcacaatgaaaagagactcttctaatggcttcagcaattctaatgtgtcttgagccccaaaagattttggagtttgcagctgcagatgacaattccttttcttttygttctttctttcctcttttttttttcttctcaaactgaatttcaacaatgaagcaagtgattgcagtgtggcaatagacaaaaactgttttcagagggttgcctgcttgcagaggcctgggaaaaccgtgcttccaagtcacaaacaataggtcttttaacctcatgctttgccccaaactgggtgataaacacatttcccaaaattgtcgtggtccaacatattaggaaacctacaataagaaaagcttagcatagttttctgtgctccaattaaaaagaagaatcttttagaagagctttcacaagctggatagcagcttcctccaatctggaattgaagtatgagtctcactttcacacgtatcctcaggcaacagcatcattcccacaacataaagacga

SEQ ID NO: 348052 - DNA, 456 bp, Homo sapiens
taggaaagctatattggacacacattaggatggaccatggatagtaaatttaggggaacacactttgtatgagccatgttttgaatgtcctgtgtatagtgagactctgataaatcacttagctttcttacaataaacacctaattttcaccgccaataccaataytttatttttatctaaaatgaacacaatcttattgttatccctattctacagacatttgggggtaaatgtgaaccacttgaggaacctgaaatctcacccccatcagcaatgagacatccttcccctctccctagagtagactcatccgagcctagtgaagagtccggactttccccgtcacccagaattaaacaggccactccacacatactgtgttggtagaggctgcataaggaggagcaataatgtgcctctcatccttccagccagggtggtatcagcagaggcca

SEQ ID NO: 348053 - DNA, 456 bp, Homo sapiens
taggaaagctatattggacacacattaggatggaccatggatagtaaatttaggggaacacactttgtatgagccatgttttgaatgtcctgtgtatagtgagactctgataaatcacttagctttcttacaataaacacctaattttcaccgccaataccaatattttatttttatctaaaatraacacaatcttattgttatccctattctacagacatttgggggtaaatgtgaaccacttgaggaacctgaaatctcacccccatcagcaatgagacatccttcccctctccctagagtagactcatccgagcctagtgaagagtccggactttccccgtcacccagaattaaacaggccactccacacatactgtgttggtagaggctgcataaggaggagcaataatgtgcctctcatccttccagccagggtggtatcagcagaggcca

SEQ ID NO: 348054 - DNA, 456 bp, Homo sapiens
taggaaagctatattggacacacattaggatggaccatggatagtaaatttaggggaacacactttgtatgagccatgttttgaatgtcctgtgtatagtgagactctgataaatcacttagctttcttacaataaacacctaattttcaccgccaataccaatattttatttttatctaaaatgaacacaatcttattgttatccctwttctacagacatttgggggtaaatgtgaaccacttgaggaacctgaaatctcacccccatcagcaatgagacatccttcccctctccctagagtagactcatccgagcctagtgaagagtccggactttccccgtcacccagaattaaacaggccactccacacatactgtgttggtagaggctgcataaggaggagcaataatgtgcctctcatccttccagccagggtggtatcagcagaggcca

SEQ ID NO: 348055 - DNA, 456 bp, Homo sapiens
taggaaagctatattggacacacattaggatggaccatggatagtaaatttaggggaacacactttgtatgagccatgttttgaatgtcctgtgtatagtgagactctgataaatcacttagctttcttacaataaacacctaattttcaccgccaataccaatattttatttttatctaaaatgaacacaatcttattgttatccctattctacagacatttgggggtaaatgtgaaccacttgaggaacctgaaatctcacccccatcagcaatgagacatccttcccctctccctagagtagactcatccgagcctagtgaagagtccggactttcmccgtcacccagaattaaacaggccactccacacatactgtgttggtagaggctgcataaggaggagcaataatgtgcctctcatccttccagccagggtggtatcagcagaggcca

SEQ ID NO: 348056 - DNA, 605 bp, Homo sapiens
agggcatggtaatactaagagacaccctaatggatctcctatattccattcatactcttccttacttccatcagtagtagactgmtttcatcttggtagtccaggtcaatcacccagcaaacactgtaactcccttcttagccagttgacttcaaggtaggaggagcccaaagaggtccaagtggcaatcttaagttccagtttaatggaatcattgttgtgtctcctggtagcagcattcctccctctggaactaagacctctaggccagcagaacataatgtggtgggaacaggaagcacaaattttgctagtgggtcactaggggtgatggtgagtggtgccacttccacccttgatttctagacttgtgaatcctggcaatgggaaagaagtgccgtatattggatgctgagtcagagcatacaaagccttctggagaactttgccccagccttgcaaagtattgtcagctatttagcattgtaattgtgacttcaaaaggccattccactgttttcttactccagctgcttcaggatgatggggaacatggtaagaccagtgaattccatgagcatgagcccactgctgcacttctttag

SEQ ID NO: 348057 - DNA, 605 bp, Homo sapiens
agggcatggtaatactaagagacaccctaatggatctcctatattccattcatactcttccttacttccatcagtagtagactgctttcatcttggtagtccaggtcaatcacccagcaaacactgtaactcccttyttagccagttgacttcaaggtaggaggagcccaaagaggtccaagtggcaatcttaagttccagtttaatggaatcattgttgtgtctcctggtagcagcattcctccctctggaactaagacctctaggccagcagaacataatgtggtgggaacaggaagcacaaattttgctagtgggtcactaggggtgatggtgagtggtgccacttccacccttgatttctagacttgtgaatcctggcaatgggaaagaagtgccgtatattggatgctgagtcagagcatacaaagccttctggagaactttgccccagccttgcaaagtattgtcagctatttagcattgtaattgtgacttcaaaaggccattccactgttttcttactccagctgcttcaggatgatggggaacatggtaagaccagtgaattccatgagcatgagcccactgctgcacttctttag

SEQ ID NO: 348058 - DNA, 357 bp, Homo sapiens
aattcaaaggatcattagtggctactcagagcaactatatggcaacaaattggaaaatctagaaacaagtgaaaaaattccttaggaatttttccctaaaaaaaatcccaggacctgatggtttcactgctgaattccagcaaacatttgaagaagagctaataccaattctactcaaactattctgaaaaatagagaatgggggaaaactttcaaacctattctgtgaggacagtattaccctggtactaaaaccaaacaaagacaaatcaaaaaaagaaaactacagtccgagatctctgatgaatattgatgcaaaactctasaaaacgctagcaaacaaaattcaataacacc

SEQ ID NO: 348059 - DNA, 602 bp, Homo sapiens
tctgcccactgggaagatttcccttcaccactgcccttcagggatgtcctagaaagtggctatagtgctgcagctgtctgcttttgggtggtgcctgcatatggtgcagaaccatctgtgaactaggccctagtcttctcttcctctgtcagctgatcatagggaactccccctaagccattggtgcaggctggggcagagaaggcagggtggcaggattggagcctgtgggcatttgagccacatcatcatttaatttacttgtgccttcaggacctactcgagcccaatcacgtatataccactttcatttgatgatggaatactgctgtgcacaacccactttatggctggatgggacagaaagcacccaactcatgagaggtagttcaggttgcatactgacttgatgrcccatagtcaaacgttcagtttccaccaaagcccagtaacaagccaagagctgtctctcaaaaggagaatagttttctgcagaaggtggcagagccttgctccaaaatcctagaggcctccgttgtgattcatctatgggggcctgccaaaggctccaaacagcatccctatctgcaactgacacctta

SEQ ID NO: 348060 - DNA, 482 bp, Homo sapiens
aaatgctgacacaagatgtaaaatgagaaattgaaaaggttccactcacaaaagtaatatacataaatgtattgatgatatgtcacttgaggctgaaggggtttcatataataaacaacatcttctcaatctaggtggatgattcaacagatttcccccataaatgccatgctgaagtgtttatctgatttgtaaatggtggtgaaattaaatacaactcagtctgcaacaaattactgcctgagacaagcaaacgctaagatatatttaatgrtttgtcttcccatgtaaaaataaaatgtctgcttcggaattgctgtgtttgtatctataatgatgtttaccttgatgagaggttttgcttcccttatgagaaagaaaacaaaagaaaatctgatttgatagactgcatctttcacagtgaggtgttagtgtcaaagattcttgtagttgagagaggaggggcagagcaaggtggtgaa

SEQ ID NO: 348061 - DNA, 509 bp, Homo sapiens
gggtcagtcgtcaggtttcataatatcactcttccatgcagttaaagttcagttacagagtcatagattcttcaagcttttcctcaaaatggtatgatgacaagaaagatgatacatttgtcatgataatgatatttttatggaaatgcatatttttatcttagtctagttgctttattatacagcagttttctaccaagagaatatatagagtttttaatctgagcctattttttatagcctccaccttctgcagcttgacaactttcacattatgtagtcctttgtcataaaaccaaatctctrgttgccattactgttattacacagctcatagaagcatagtgatagatcttcagaagggtcaactacatagcaaggagttcatcaagaagctctgaaaccaattctaaaagaatgtgcttccaagaaaggaatgttctatcacactttgtaaacattattctacatatagaatttagaattatttacatatagccctttagaag

SEQ ID NO: 348062 - DNA, 593 bp, Homo sapiens
gaatgcaccagaatcctttaatagcagaattgatcaagcagaaaaaagaattagtgaacctgaagacagattatttgaaaatgcacagtcagaggaggcaagaggaaatagaataaaaaacaatgaagcatgactacaagatctagaaaatagcctcaaaagggcrcatctcttattggccttaaagaggagatagagaaagagatagggttagaaagttattcaaagacataataagagaaaactccctgtattagtccattttcacactgatgataaagatatgcatgtctgaaatccagcaagccagtcaaattttaaactccaaaatgatttcctttgactccaggtctcacatccaggttatgctgattcaaaaggtgggttcccatggtcttgggcagctctgcctctgtggctttgcaggttacaatctccctcccacaggctggtgttgagttcctggggcttttccaggcacgtggtacaagctatcagtggatctaccattctggggtctggaggatgtggccctcttctcacatctccactagatggtgccccagtagggactctgtgttggagctctggac

SEQ ID NO: 348063 - DNA, 593 bp, Homo sapiens
catatgttgaagctctataccctaatgttactgtattcagaaatagagccattaaggttaaatgcgccataaagatggagctctaatccaacagaactggtatcttcataagaaaacccgacaccaggagttcgtgagcacagagaaaagggctgtgtgggaacacaagaaggcagccatgttcaagacaggaagagaggcttcactagaagccaaccctgccagcaccttgatcttaagatatccaatctctgtaatagaatgatttatatttctttgggtgtatacccataatgggattgctgggttgaatggtatttctatccttaggtctttgaggaatcaccacactgtcttccacaatgaaataatttacattcccaccaacagtataagcattcctttttctccacaagcctcaccagcatctgttattttttgactttttaataataaccattctgactggtgtgagatggtatttcactggggttttgatttgcatttctataatgatcagtgatgttgaacctttcttcatatgattgttggcwgtattccattataaagacacatgcacatggtatgtttat

SEQ ID NO: 348064 - DNA, 559 bp, Homo sapiens
ctgacaattagtcatttgccagatgcagagtttgcatgtattttctctcctcctgtaggttgtctgtttgttcttttgatctcttgtgctgtgcagaagctttttggtttaagcaggtctcaattatcagtttttgtcatgtttgctgttgaggacttagtcataaattatttgccaagggcaatgtccaggttttcctaagttttcttctaggattttttttcttctaggatttttgtagttygatatcttacatttaagtctttaatccatcttgagttaatctgtctaaatggtaaaagataggagtagagtttaattcttttgcatattgttagccattttccccaggaccatttattgaatagggtgtcttttgctcattttttctttgactttgccaaagatcagttgcttctaggtgtgtatggcattgtttctatgttttctattccattttattggcctatatagctatttttgtaccagtatcatgctgttttggttaccataggcttgtattatattattgtattatgttatgaagttgggtaatgcg

SEQ ID NO: 348065 - DNA, 584 bp, Homo sapiens
gaaattgtttgatatatattagaatttatgtaattgcctcacttcagactttagaagtgtrtccacgaactcagcagatatcctgtctttctaaaaaaattacaaaatattttgatagaaattttaattttaaaatgccattattaaagtgtttttgaagcggaggctgagaaagacactagctacaataactacaacagttaccattcaaataattgtagatagattgccatatctcttaaaacaactttgctagatagatattaaatgtgtctgagtctaaaagacaagcggaagtataatcagctcaggaaacaattgtatgcataatagctaaaaagacaatgatgaataatgcatatgttatttacataattacttgcattagggttttttgtgtgtctggttctctaggagaagatagaatgctgtaaaagccatgagattaaaataaatatgattacataaataatttgttcttttgaagactcatttttgccagtgatataatattatatggaattagtccgaggacatggagttcttgagatctccaacccaagataaaatatcctgaaaattta

SEQ ID NO: 348066 - DNA, 581 bp, Homo sapiens
gtgggcacaccaccagtagggatgcagtgcccttcagaatggccatcctcttgtgcatccatgccagcctcttgcagggcatccatggctacatctacagcagtggactagtggggaggagaaatccaactcttcaggcctgtgccggagcactgtggctgcctggccactggagcagaaccacactcttccctcattgagttgaacacagcacctacatctctgctggaagagccacagtcactctctgcccacaagtgggagctcttgggcacaagaaagcacatactytggttttctctggtttcctttggcacacccctaggcaggtgccctgagctcccagctctccctttccctgggagcagcatgccctgtgggctagactaccgggaatccacagctccccttggtccaacaagctctgtgtggctgctgcaatcctagtgggtgctggggtatgtttgtgggggatcccgtgatgtggagacacaaggactgatagatccaatcaggcctatgatgttctcatgtgtctcttaccacaatcatctcatggtaagaatcctacaatgggtacg

SEQ ID NO: 348067 - DNA, 581 bp, Homo sapiens
gtgggcacaccaccagtagggatgcagtgcccttcagaatggccatcctcttgtgcatccatgccagcctcttgcagggcatccatggctacatctacagcagtggactagtggggaggagaaatccaactcttcaggcctgtgccggagcactgtggctgcctggccactggagcagaaccacactcttccctcattgagttgaacacagcacctacatctctgctggaagagccacagtcactctctgcccacaagtgggagctcttgggcacaagaaagcacatactttggtttyctctggtttcctttggcacacccctaggcaggtgccctgagctcccagctctccctttccctgggagcagcatgccctgtgggctagactaccgggaatccacagctccccttggtccaacaagctctgtgtggctgctgcaatcctagtgggtgctggggtatgtttgtgggggatcccgtgatgtggagacacaaggactgatagatccaatcaggcctatgatgttctcatgtgtctcttaccacaatcatctcatggtaagaatcctacaatgggtacg

SEQ ID NO: 348068 - DNA, 500 bp, Homo sapiens
ttgaaccgccatcagctggccgtgggttttaagttgtttttcaaataattgtaacggattgacactgactcctccacaccctttcatcccattcttgttgtgaagaagarcatacacatgcaagatggctggggtacggagtgcacatgatagccacagaacaaagagaagttgacataaaacatacatccgtacaaggcgatttgtacatttatgtttttaagtgaattttaattgattatatcaatgaaaaattttgcatggaagaaaatatgttagattaaagtttgaaaatgttcactgaaatgaagaaattcagcttctttaaaataatccactagatattatgatattatattatgtaataataaaattatatactattatgatatatataatattaaatatcattttatattatatatcatctataatatatattataatatataatatatattaatataatacatacaaaatgcttaaggtaacgaagaaac

SEQ ID NO: 348069 - DNA, 627 bp, Homo sapiens
gcttgggatttatgttattataggatgtttggaaaccagacttgaagctggtgcaacaagcttttaggccagtgtgactccaggtgagacagagacatgctggacatcatattcctcaatctcccaccagtactgggtcatattatttgggtcaaataaatagttaggcccttgttgtccattaaaatgatccatagtcttaaggwtgagaatcatatgtaagatataggtgaaaataaagagtcctgacaagggatcagcagccccatctagaggcctggggagaagaaaccaggatactccattgtaaccaaggatcaagatcaaagaatttgcactgccaagatagtcaggttttaatgtctaaagagtacagtgtaaaggcattccctcaaattaaaaggatgtggtattgcctaaaagatcatgaaggtgttagtttgccagtaatcacagtgattgaggaacatgggaaaatatagttaagtatatatgaaacatgcatgataaataagggttgagcagctgtgctgtagggtttacaaagaacactttaagcgttcttactacagtcatttagttacacattgtgcaatgtagacctataatcatatatataattatata

SEQ ID NO: 348070 - DNA, 552 bp, Homo sapiens
gaaaacaaatacagacagagacgcttctgaaaaatttaatgaacactttgatgggacctagtgtgaaagttgaggtccaaaaataaatgttcagtgttctcttatttggggcattgaaaaaattaaarttcagctcctacacatacatacacacagaagtatagatgctcactagcaaataagccacacccatatagatgcagcaaagtattttcattgctttattatcaagtacaaatcgacaacctagaaaaaccaccatttgaagaaaggaagaacttaaaagaaaatgatcaagataaacaaatagaagagacatgacccagagaaaatagatattaaggagagaaaagactattctatcccattatagtatcataagaatagtcatttaataatcattttaaagtttatatagaaaggcaaaagactcaagacagctaacacataattgtagcagaaaagagtcagagggttaatattgcctgacttcaagatttaccataaagctgtagaaatcaagacagtgtggcattggtaaaacaacagaca

SEQ ID NO: 348071 - DNA, 565 bp, Homo sapiens
aatgctaagtaaataataataacaaaactaacagtagtaaagaaactatctctgccatcaataggacagaaaagttagacaactataggatagtgtgtcagtgcttargaaagaagtaagcatatgttggcaagagagtgagtgaggtcagggaatattttctaaaaaaggtatttcctgagctgtctcttaaaattggtattatgcaaaggaagaaataatagggtgaaagacaaccagactttgggaaaatattgcaagatgcccaggcaagtggaagcaaaaatcaggaggcttgtgctgctcgcaccagtcgcctgccaccagtgcctcagccccacagaggaggtaaccagacacagaatgtggaacctggtcaccacactccccatattgaacttttcttgccagttgccatagccgaacaacgatggcctcaaactcactcccatgttcaaagtctcatgctagcagctctcactgacagaacctaaatcacatgcagaaacataaacacaaaggagttggggtaatgtaattttatccctttaatctccaaaatcca

SEQ ID NO: 348072 - DNA, 565 bp, Homo sapiens
aatgctaagtaaataataataacaaaactaacagtagtaaagaaactatctctgccatcaataggacagaaaagttagacaactataggatagtgtgtcagtgcttaggaaagaagtaagcatatgttggcaagagagtgagtgaggtcagggaatattttctaaaaaaggtatttcctgagctgtctcttaaaattggtattatgcaaaggaagaaataatagggtgaaagacaaccagactttgggaaaatattgcaagatgcccaggcaagtggaagcaaaaatcaggaggcttgtgctgctcgcaccagtcgcctgccaccagtgcctcagccccacagaggaggtaaccagacacagaatgtggaacctggtcaccacactccccatattgaayttttcttgccagttgccatagccgaacaacgatggcctcaaactcactcccatgttcaaagtctcatgctagcagctctcactgacagaacctaaatcacatgcagaaacataaacacaaaggagttggggtaatgtaattttatccctttaatctccaaaatcca

SEQ ID NO: 348073 - DNA, 565 bp, Homo sapiens
aatgctaagtaaataataataacaaaactaacagtagtaaagaaactatctctgccatcaataggacagaaaagttagacaactataggatagtgtgtcagtgcttaggaaagaagtaagcatatgttggcaagagagtgagtgaggtcagggaatattttctaaaaaaggtatttcctgagctgtctcttaaaattggtattatgcaaaggaagaaataatagggtgaaagacaaccagactttgggaaaatattgcaagatgcccaggcaagtggaagcaaaaatcaggaggcttgtgctgctcgcaccagtcgcctgccaccagtgcctcagccccacagaggaggtaaccagacacagaatgtggaacctggtcaccacactccccatattgaacttttcttgccagttgccatagccgaasaacgatggcctcaaactcactcccatgttcaaagtctcatgctagcagctctcactgacagaacctaaatcacatgcagaaacataaacacaaaggagttggggtaatgtaattttatccctttaatctccaaaatcca

SEQ ID NO: 348074 - DNA, 573 bp, Homo sapiens
tattttaagagtaatacaaaaatatccccttttatttgagtttaatttatatgtggctttgtctttgtagtatttaaaacaatttcaatttttaccacctcttataattagtagataattggattctatattaatacaatattagattattttcatttcaaaaatataaaagcatttctcatcccaacttactaaacttgatgagtacatctttagcctatctttgatctaggttttgtaacactgtgtgctttcatgtttttcacaaagtttgtaaaaatatccatatctttttttatttattgataaaaaatatttatcaatgtatattaaaaaatatttttgtattgtgtttgatgcaagataaatattcagctctttgcttttcccactttgccatatatcttttatggctattatttgaccttttaagggtcwtttttatttatttatattttgaattattttgttttcttagttacggttatttagatttatcagtgttatcctttttccttccaaggtgtaacatttttttatttaccagtcatcataaccagttatttattgtaa

SEQ ID NO: 348075 - DNA, 561 bp, Homo sapiens
cggttatttagatttatcagtgttatcctttttccttccaaggtgtaacatttttttatttaccagtcatcataaccagttatttattgtaacctttttcttttggattttttttgttaagcaactattgcagaaatgccctccaccgcccgtgcactctctctctctgtrtacacacacacacacatatgtacacacactaatatatatttgtgtgtatatcttcatggaaaggtctaatatcattgaaattccttttctgcttacagaattatgtagatatataccactctactgccttctgccatgtattattaaggatataattttatttacttttataaataacgtgatttttaccttgaattcttatataacttatttttttcagtaaaagaaattttctagggcctctgatagcatcatcttcattcattttatatgcttggaaatattgactctaaatcgtcaatctcgtatcttatttttaaagtttggcaagtctcctactaaacttgaatcattgtttctgatccatttgccctatatattgagaaatga

SEQ ID NO: 348076 - DNA, 552 bp, Homo sapiens
caaacttaaaacaattgcaagcagggagatttttatttttctgcattatcattgtaaaccttctcatacagaaattttctttaagtgttagatgattgctttttgttatgggttgaattgtgtttccctaaaactcgtgtattgaagtgctagcacccaggtctcaagtgtgactttatttggatatagggtctttatagaggtaatcaagctaaagtgaggtcattatggtaggtcttatccaatatgactaatatcctcataaaaaggggaaatttggggccggktgaggtggctcacgccagtaatcctagcacttagggaggcggaggcacacagattgcttgagcctgggttcaagaccagcctgagcaacagtgacaccccaattctactaaaaaattagccaggcatggtggcgcaggcctgtagtcccagctattcagaggctgagatggaaggcttacctaaaccctggaggtaaaggctacagtgagccatgattgagccactgcagtctagcctgagggacagagtgagatcctgtctcaa

SEQ ID NO: 348077 - DNA, 485 bp, Homo sapiens
gctactctggagactgaggctggagaatcacttgaacccgggaagcagagcttgcagtgggctgagatggcgccactgcactccagcctgggagacagtgtgagacactgtcaaaaaacaaacaaacaaaaaacaaacacaaaaaaaggaaactagatagttaaatgtcattctttcccaacctggaccctttaaccttgaacctcagcctctgggtctcaatgcatcctgcttttgagraatgcttccttaaaaatttctcagctaccaggacagcacaggtgccaggttcatttttgttgggtgattttgtgccaccagagctattgccctttaaccacttcaagtgattaaaaatggatcgtagtcctcccttgaccttcgttggtggaagtttctttttttcaggactcatcaagttcaagcagctcagggacacctccactgaggccctctttatggtccacagtgatttatagtagcac

SEQ ID NO: 348078 - DNA, 442 bp, Homo sapiens
atccccaaacactggaagactcatccattccaaccaaaactctttcattcttaatacctctcttcctacttttagcactagccagttatgtctaaatgtgcccttgaagacatttgaaaattcttatatgttgttttaaattttaacttttttaaaacagggagtgtcattgtagaaaaattagaaaatgcaggtaagcaaaagaaaaccytcaccttctagagagaattctatgaatatctaacatgtaagttttcaagccttctttctcctcctatcctctagaacaatgggaaagagggtagttagagaataactgtataacctagaccagtggtccccaacctttttggcaccagggaccagtttcatggacaacaatttttccacagacagagctgagtggggagcatgagattctcataaagagcgcacaacctac

SEQ ID NO: 348079 - DNA, 562 bp, Homo sapiens
ctcacttcccctgtaatttcttctttcatccatgtattacttgtgttgattaattttcaaatattttggaattttccagtcctctttttaaatttatttctaattcgattccacagtagtaagaatacatactctatatgatttcagtcttttaatatttactgaaacctgttttgcagcccagaataggatctagcttaattaaagtttcagatcttgagaagaatttatgctctgcagttatttggtaaatgtaatccataaatattaattagataaattaatctaattgatatcaaaactaccaattattgatagttttaaggagtattcaatgtcttaactgattttctacttgttctatcaattactggaagaragtgtcaaaaatctccgattattattgtaaatctgtcttttacttccttagttctgtaagttacttgctttatgtattttgtggtctggttatcaggtgcatatatatttagaattatcatgtatttattatgaattgaccctgctataattttgaaatgtctctctttttctctggaaatac

SEQ ID NO: 348080 - DNA, 612 bp, Homo sapiens
tggcttttcatctattccatcttgtgcggttttttgtttgtttgtttgtttatatttaagatttacaatatgtgactttaacatatcacattctgccaaaaagcaagatttcattgtttcatgtataatgtaggagctttacccatcttttgtactttgaatacattttaattctccatttgttataaaccrcaaaacatattgttgctatttttgctttaagcagtctattagtctttagggaaaactaggaaaaaagaaaaaaaaggtcttttacatttacaatatatttggcatttccagatctctttattacttctagctctgagattctacctagaatcattttccttctgactgaaggtctttaactttttttcctagtgctggtttgggtggtgacaaattctctgagcttttgtttatgtaaaaatgtcttttattgtaccttaatctttgaaagctatttgtgcatttttgtgggatacagaattcttccttgattttttttttctttcagtgttttaaaaatgctttcttttgtcttctgggttgtgttgtttctaatgagaatttagcagtcaattttatgactgttctcctgtttgtaga

SEQ ID NO: 348081 - DNA, 609 bp, Homo sapiens
ttgcagggctgagttagctgacccttggatctgcatactcttcctccaggcttacaggctcacagatcatttctgtcccctacccccaaggacccaagtgcttttaactctccaggccaaatccactttgctcctgggctgaagcacactgggcacattcttgaacagagttcaaactaacaggatttccctaaaacaagcaactccctggatgccctgggaagcactgtgactacttgtggggattaacttagccagagcaacgtggctgtggtccagaaagaaaatgtatgtgcttacaaaaaaaaagctggctcagagtcttgggaaccccataatcagaagcatactcattctgacagtttcaaaagacccaacacccacctcagtgtgacctggcgaggrttcagagaaatccaccccgtcttttgtcttttggatggaatgcaagagccatgtaagacttcctgcccagaaggcagagagtgggcaggcctttgccactcgcctcagcaatgtagggagacatggaggccatcctttggctcatctttgggtgctgtgacttcatcttatggcatgaggcattctgtgttaattctacatggc

SEQ ID NO: 348082 - DNA, 531 bp, Homo sapiens
agaattctgagaattctagttacagtttagctaagtcaacccaggacaaagccagcatatgtggcaagagagctcggaaaactaatggttggaggagagatgcctgtttggatacagaaatgagctttcatcacccctgagagagggaggtatgtctttcacttcttggtggttggcagcagtaaagctggtgacctcctctctggatggctcctgcactcaggggaagccaggagatctacagcccttggagacctgsgagggccctagctgaccagaggctgccaagaatttgcatctccaggatgtatctctctcaggcttagggaaaagagaacctctttgggccaccccagcctctctctctcccacacagatataatcccacctccctgacaaggccgttgtgagaattcattcgttaatgctggggaaagggctttgaaggtgaagagtgcattgtgaatgctgttataattgtacacagatgcctgaatccagactggtggcattttgctgactaatagtaga

SEQ ID NO: 348083 - DNA, 531 bp, Homo sapiens
agaattctgagaattctagttacagtttagctaagtcaacccaggacaaagccagcatatgtggcaagagagctcggaaaactaatggttggaggagagatgcctgtttggatacagaaatgagctttcatcacccctgagagagggaggtatgtctttcacttcttggtggttggcagcagtaaagctggtgacctcctctctggatggctcctgcactcaggggaagccaggagatctacagcccttggagacctgcgagggccctagctgaccagaggctgccaagaatttgcatctccaggatgtatctctctcaggcttagggaaaagagaacctctttgggccaccccagcctctctctctcccacacagatataatcccacctccctgacaaggccgttgtgagaattcattcgttaatgctggggaaagggctttgaaggtraagagtgcattgtgaatgctgttataattgtacacagatgcctgaatccagactggtggcattttgctgactaatagtaga

SEQ ID NO: 348084 - DNA, 591 bp, Homo sapiens
agaataatgtagcctagcctaactgatatagcagaagtagtaagaatacttttatatatttatgttatacaattgtttatactgcacagaatactttattgattctcataaaaattatgagagataaacagggattataagccccattttataggagaggaaatcgaggcttagagaagtgaaatgattttctcaagaccacacagttggtaggtggtcaaaccaaggttaggatcttggtatttttcccacactctgcaattttataacttcctagcttaatgttataaaagcaagcagtaacctcagagggaatgagggtcccactgtatagagttctgcagattaaattaaacaccttgaaggactaaaaggctaggtagccaggacagacaggtgtaatacattccaatggttcatattcttaagtcaacaagatgytggcatcctgtggctgctcagactcctgggtggtcctgcaggggagtcctaagcctagctttccagcagtccagtaagcagatctccaacctgagtcataggctttgaattaaagataaaaatgcacatgctctgggtgagagccctcag

SEQ ID NO: 348085 - DNA, 597 bp, Homo sapiens
aaagagcctcaagaagcccccacagtctgttttgtagtaggcatcaaaagtgttaaaaatgggtgcactttcctgactatatagtggagtaagactctgcactaaaaaggaataaattagtgatgcaataatatgaatgaatctccaaataattatgctgaagaaaagaaaccagaggaaaagagtatgtattgggtaactccatttataaaaaaccctggaaaattctacctagtctgtagtgatagaaagcagagcagtcattgctatggggaaaggaaggggagagagagagggattagaaagggccacaaagaaacatatgcgggtgacagatgtgtgcatcaccttgattgtggcaatagcttcatgggtatatacatatgtcagaaattacgaaattttgcactttaaatacatgcaacttattgtatgttaattatacattagtaaggyttcttaaatttttttaaatgtgggttcattttgacccaataattccatttctagcaacccttctaattaagtaattgaagaagggcacagtttatgttcaagataatcagcatgttgcttagaatagaaaaaaggaaaaca

SEQ ID NO: 348086 - DNA, 402 bp, Homo sapiens
ggataataccactgattatccacttctataatggacatatttcccatttttggctctttaggtttcaaaccgtcccttccccttgacacgctgatcacccttggagtatgaatgggtggaaatgatcacctctcactattgcagaagccagatcctccacctcactgtcctgttgaagattaggggacttttttttttttttttttttttttgkgaagacagggtctcactctgtcactcaggctggagtgcagtgtatgatctcggttcactgcaacttctgactcctgggttcaagcgattctctttcctcagcctcctgagtagctgggattacaggagtgcaccaccacgcccagctcatttttttgtatttttagtagagacaggttttcaccatgt

SEQ ID NO: 348087 - DNA, 494 bp, Homo sapiens
atcatcattatgacacctgcaggtagtttctataatacacattattgatgaaattttctaaagctgcttttatatcttaaagctgcatacaaagatgactctgacaacaatggaaataaaaatcgctttaaagcaatctcatgtggtaacatctattgttttgctataatgggattctgttaatgtcaatatatttctgaaaatcttctcagttcccatgatcaaaagaaaatagaagagaactatagtcccctagtagctaattagcacataaaaaattgtatttgagaacagaaggagagaaagggatgtgctattttcttaccatttcagttcctttgagttctgcaracttgggtattagacacataactagattaacatcaatttgtaccactctgatttttaatgtttctgcaaaatttattaataaaaatattattttacatatgcatattcttaatatggtacattgtttatatatgtgtatacac

SEQ ID NO: 348088 - DNA, 431 bp, Homo sapiens
agcatttctcaaacatttggtctcaggactcctttatacactttaaaatcattgaagataccaaagtgctcccccaccataaatgtaacttaaatatattcatatttrtcatattaagaattagcgtaaattttaaatagtcttaatacatttaaaataaaagcatattgcatgttaacaacagcaatatttttatgaaaaataactatatttcccaaaacaaaaaagtagtgaagactcacattgttctacttttttttttacaaatctctttaatgtctggctttatagaagacttgctttctcatatctgccccacaggcattcaatctgctgagatatcacgtgccacatatcctctagaaaactccactctaccctcacgatagaatgaaagtgaaagggaaaaatgagatcttaatattattaaa

SEQ ID NO: 348089 - DNA, 497 bp, Homo sapiens
cttgtgtgcttctgtcattacattttattcaagtggctatctcatgcaacagccatgttctactgaatacatatcatcctgttcagattgattactctcttggagaactggctgatttagatgggatgtaactcatccaactgagctcatggggctcaggtctagttgtttttcyaaagcatcgtagtcttacaggggctggagacaaagcaatctcatcccttatggaccatggacaagtaaaaagacaggttgccaggctttgctgaaactcccaaagtctctctcatttccctaaattatacctgccttgggtctggtgaggcttggcccaactgttcattgactttgtgctcaaagaaaccagatatcttaagacaagttcatgtcactacagtttctacaattctctgagaacctataacttcccaggatactccatcgcccatatctgccttaaggctttcaattgctagccctctttatgtaactccaat

SEQ ID NO: 348090 - DNA, 559 bp, Homo sapiens
ttcaaatataactgctgaagcttcagccttcacagttgtgacagacaggaagaaaaggagtaataaaagagttttacttaaagtgtgttggtcacaggtctcttcaagtaaatgtagagagtgtaaatgtagcttttgcgcatagcaccctgccagtattctgttacggaaaaagaacagaagaatagagaggaagtcgaataccagcattttataccacatgacagcttcaaagaaaaactgagttaaataggatcttgatttagaataagatgttcaartttaaaaacaatgcctggtgttggcatctacttatatgggatatagatttttagatcaaacacttgatcaaaggataatgtgtctttttctaagaacattctgtttacatgataaacctaagtcatttttgctgaaagtcaaggagatcacagtttctgtctttatacatagtagactgatctctggttatccatatttacccaagcatgatatttaccaataatacaatttatacacattagatattatttttgttcaaaatacgctatactcatac

SEQ ID NO: 348091 - DNA, 618 bp, Homo sapiens
tcctccacagctcagcatggaatgagtgaagaaagccccaaactcccagcttcttcctgggaagggagttaacatatgcatccaatgttctggctagtcrgaagactgtttgagggtctagtttctgtctcacctaaatcagaccaatgacaagacccagcatacactaggttactggcggccactgaaagcaagagagttgagtgacttgctgctacttcaggggtctcatggaataggaaaaataagttcagaagtctttccccaccgggaaaaaagagttgagtgtgcatccagtgttctagcttttggagagattgctccaggaactggtttctgtctcacccaacttagagcactgacggaacttagcagatgctagaagcctagggatcactgagaacaaaaagagaactgggcagcttgaggaaactccgaagaatctgcagtactgcaggcagacaccagagggtgcaataaattagaagtacctgcaaaaagatatcagcaaatccttctaatatagaatttgctcatacaaatctagagaagacatatcaacagaaaaggtttaaggggtcgcagaatctccagctgggctgactgacgaaggtcttt

SEQ ID NO: 348092 - DNA, 618 bp, Homo sapiens
tcctccacagctcagcatggaatgagtgaagaaagccccaaactcccagcttcttcctgggaagggagttaacatatgcatccaatgttctggctagtcggaagactgtttgagggwctagtttctgtctcacctaaatcagaccaatgacaagacccagcatacactaggttactggcggccactgaaagcaagagagttgagtgacttgctgctacttcaggggtctcatggaataggaaaaataagttcagaagtctttccccaccgggaaaaaagagttgagtgtgcatccagtgttctagcttttggagagattgctccaggaactggtttctgtctcacccaacttagagcactgacggaacttagcagatgctagaagcctagggatcactgagaacaaaaagagaactgggcagcttgaggaaactccgaagaatctgcagtactgcaggcagacaccagagggtgcaataaattagaagtacctgcaaaaagatatcagcaaatccttctaatatagaatttgctcatacaaatctagagaagacatatcaacagaaaaggtttaaggggtcgcagaatctccagctgggctgactgacgaaggtcttt

SEQ ID NO: 348093 - DNA, 564 bp, Homo sapiens
ataattttttaaaaaaagcaatgaagcagtagtttggaactgaagtatacaataattgaatttaaaaattcactacagggcttcaacagcagacttgaacacacaggtagaataaccaataaaatcaaaggcaagtcatttggaattatccagtcaggaacaaagagaaaaaaataataataaagagcgaagaaaatgtaaggaatttatgggacactatcaaatgcatcaatatacacattatttgaataccaaaagatcaggaagaaagatgaagaaagcttttktttaaagaaacaatggctaaaaagtccccaaatctgaggcaggaaatggacatctaaggtataagaagaccagaatgaaaccaagaaaacccataccaagacatgtcataatcaaattgtaaaaatcaaagaaagaattttgaaactggcaaaaaatgcaattcattatttacaaagaagctttcgtaaaactcttagcatattctcagcagaaacctggcagtccagaagcaaataggatgatatattcaaactacttaagaaaaaaaaatattgc

SEQ ID NO: 348094 - DNA, 564 bp, Homo sapiens
ataattttttaaaaaaagcaatgaagcagtagtttggaactgaagtatacaataattgaatttaaaaattcactacagggcttcaacagcagacttgaacacacaggtagaataaccaataaaatcaaaggcaagtcatttggaattatccagtcaggaacaaagagaaaaaaataataataaagagcgaagaaaatgtaaggaatttatgggacactatcaaatgcatcaatatacacattatttgaataccaaaagatcaggaagaaagatgaagaaagcttttgtttaaagaaacaatggctaaaamgtccccaaatctgaggcaggaaatggacatctaaggtataagaagaccagaatgaaaccaagaaaacccataccaagacatgtcataatcaaattgtaaaaatcaaagaaagaattttgaaactggcaaaaaatgcaattcattatttacaaagaagctttcgtaaaactcttagcatattctcagcagaaacctggcagtccagaagcaaataggatgatatattcaaactacttaagaaaaaaaaatattgc

SEQ ID NO: 348095 - DNA, 564 bp, Homo sapiens
ataattttttaaaaaaagcaatgaagcagtagtttggaactgaagtatacaataattgaatttaaaaattcactacagggcttcaacagcagacttgaacacacaggtagaataaccaataaaatcaaaggcaagtcatttggaattatccagtcaggaacaaagagaaaaaaataataataaagagcgaagaaaatgtaaggaatttatgggacactatcaaatgcatcaatatacacattatttgaataccaaaagatcaggaagaaagatgaagaaagcttttgtttaaagaaacaatggctaaaaagtccccaaatctgaggcaggaaatggacatctaaggtataagaagaccagaatgaaaccaagaaaacccataccaagacatgtcataatcaaattgtaaaaatcaaagaaagaattttgaaactggcaaaaaatgcaattcattatttacaaagaagctttygtaaaactcttagcatattctcagcagaaacctggcagtccagaagcaaataggatgatatattcaaactacttaagaaaaaaaaatattgc

SEQ ID NO: 348096 - DNA, 534 bp, Homo sapiens
cacagtggctcacgcctgtaatcccagcactttgggaggccgaggcaggagtatcacaaggtcaggagatcaagaccaccctggctaacacggtgaaaccccatctctactaaaaatacaaaaattagccrggcatggtggcaggcgcctctagtcccagctacttgggaggctgaggcaggagaatggcgtgaacccaggaggcggagcttgctgtgagccgagattgtgccactgccctccagcctgggcgacagagccagactccgtctcaaaaaaaaaagaaaactacaaagcactgctgaaagaaattaaagaagacacaaatacaaagaaatgcatgctgtgtttatggattgaaagaattaatattgttaaaatatcatactacctaaagcaatctatagattcaatgcaatccccatcaaaatctcaatgacattttatttttgtagaaatagaaaaaaatactagaattcttatgaaaccacaaaggaacctgaatatccaagacaatctcaagaagaaagaata

SEQ ID NO: 348097 - DNA, 608 bp, Homo sapiens
atggaaggaaaacctttgaaatcttttcccaaaaaggactttgtgcttgcataatagctttatttttaaagtccttttcctttgttgacattgctttagaattcttatttgtattcttcattttattcttccctagggtttaatgccctctgatgaagaactgaactgttatgtaaaataggtattttgatgtcttcaaatcaccatatctcaatctgcattaaagctaagggaatgactaggaaaataacaagatccaggaccatacaaatgataatatgttccccttaaacttccctgcaaataatttggtcagtgatatggtttggctgtgtccccacccaaatctcaacttraattgtatctcccagaattcccacatgttgtgagagggatcccgggggggtaattgaatcatgagggccggtttttcccatgctattctcatgatagtgagtaagtctcacaagacctgatggttttatcaggagtttctgcttttgcttcttccttatgttctcttgctgtcaccatgcaagaagtgcctttcacctcctgccatgattctgaggcctccccagccatgtagaactgtaagtccaattaaa

SEQ ID NO: 348098 - DNA, 621 bp, Homo sapiens
cagatataaagaggccatgaaatttctctttgtttatttactttatatttcagtctctctgattctgtaccattatattttttacctgtttatccaaattaagacaaatgctcaattttctctaaccgatagcactttggcatatgagcaattttggattatttttcaaaataacctaatttttgtcttgaagaatatccatatatgtgtgtgtataaatgtgttatatgtatttttatatgtgtctatattgtgaataaaatctatgtatttactcttatatttgaatatattttaaagagatttcagcttttctagaaatattccttttaaatggaaatcacttaaagtgacaaagtgttgtggtggtcagcaattagcagccaaaaatagcagctggaaagaagtaaatgagctgcctcaattatgtgctctattctttygaagaatctccccttatagtataaattttgtcaggacaaaacaataacaagaaatggtatcttttgctacttttcatgtttcctatctaaaatttagttggaatttaaaaacatagcagctttccactagtgtcagatagataacacatatcagatcagcaatataaaaatgtcaaaa

SEQ ID NO: 348099 - DNA, 621 bp, Homo sapiens
cagatataaagaggccatgaaatttctctttgtttatttactttatatttcagtctctctgattctgtaccattatattttttacctgtttatccaaattaagacaaatgctcaattttctctaaccgatagcactttggcatatgagcaattttggattatttttcaaaataacctaatttttgtcttgaagaatatccatatatgtgtgtgtataaatgtgttatatgtatttttatatgtgtctatattgtgaataaaatctatgtatttactcttatatttgaatatattttaaagagatttcagcttttctagaaatattccttttaaatggaaatcacttaaagtgacaaagtgttgtggtggtcagcaattagcagccaaaaatagcagctggaaagaagtaaatgagctgcctcaattatgtgctctattcttttgaagaatctccccttatagwataaattttgtcaggacaaaacaataacaagaaatggtatcttttgctacttttcatgtttcctatctaaaatttagttggaatttaaaaacatagcagctttccactagtgtcagatagataacacatatcagatcagcaatataaaaatgtcaaaa

SEQ ID NO: 348100 - DNA, 624 bp, Homo sapiens
aaagcctgaattggccatggagggaagattgtattggggtcactagagtagcagaagaaagaaactcacatatcagaagaatatctcatgacgattccaacagctggaagtcagggagaaaatttagtcaaaccttcctaggaaccatacttaagagctgttctgagacycttatgggtggagcaagatgaagctaccagctgccaccaggaatcccataaatgatgaggcaaacaaagagaagctaaaacttctcctaagcaagtaagaggatatctgccttttctctcttgcttttccacccaacactggaggagccagtaggggtgggtgtggaagaaggggtggtgtatgaaaagcagactacagaccaatcctcgtctctccctgcacatcagtagagccaaggctctgaactattctgggagcatgaaataactttgaatcaggattgagtcttaaaatggaataagattgtttaaaaaactaaaactactccgggtttcaaaagctgacctgtgtcattaaaggggtgacaccccgagatcaggaaagatttggtacagaatgattaagaacatgactggggaaaaactaaagccaaattccgtcttcatatcccaa

SEQ ID NO: 348101 - DNA, 600 bp, Homo sapiens
aagtgcttgttttaggaatacctttcataaaatgtttactttaaaagtaatataattaaaaaaactaaaagcagttcattgatgtttatcatcagtttctttttatatttactctataaaagttaaaaatctctccttttctatattttgagaatggttaatatgaagcctatgacatagttagcattataattgtcaatatcccttaagaggtatttgagccaaatagatatagttggaagtggtttgtaaataattatcagagcacatagtattttgttttctgcatatcattcacatcatgtatttcaaaagaytgtaaaaccaaaatgcagtattgtttgattttgaggttagttttttccattttattttgaatattataaggataagaatgacaattccaagctctgacatgtaaagagcttgggaattgtcatttctctccttataatatcagcataattagaaaaacctgaaaacttgaaaatcaatagcttttcctggacccatgggacaactgaaattttagggaaaatccacctcaaaatctacagagagaggcaaatgcagacagttccagagttcctgctgacttgg

SEQ ID NO: 348102 - DNA, 385 bp, Homo sapiens
agcttttcctggacccatgggacaactgaaattttagggaaaatccacctcaaaatctacagagagaggcaaatgcagacagttccagagttcctgctgacttggaacaaccactgaaagtcttttttagtaaatataatcgatcygctaaaagagtaggtaaaatagaagcataaaatgcatgattaaaactagaaaaggcaggaaaagaagcctctggcaatgactagacaagtactatggtttacatgaaaagaaatatatcaataaccactttaagtgtgattggtaaatatgccaattaaaagacagagattgtcagagtagattaaaaaaataaaacctgactatatgttgtctgtaagaaacccacattaaacgtgaa

SEQ ID NO: 348103 - DNA, 620 bp, Homo sapiens
attttctttataagatgtcaatctataagtagtaccagaaagcatggactaggtagcaataatgatttcaaaagaaagttgataatagtagaacctaggagcgattatgaaaaatttatttgatttgaagaaaagactaagatttaaatctaagtctattgtttttcccacaatatcttatcacctctaatagcaaaaaacaaactaagaaagaccatatggctaaataatatattttcatgatctaaaagttttatcttaagggagagtattaaggagtaaaggagtaaaaccaaccctggaccccacattgagggtgagcctgatataatgggataacccagtcatttcccagctgggcatcaagagctcctgactgggctttccactataagatgcataaaataaatgaaaagccaaaaacatttttattttatttgtagctgttaaagaaaaaaatattatgacaattgcaaaaatggaaaggttgactctattcaagtctatcacaataagtatagggactactacaayggagttttgccttaaaggagaaagactgggctcaattctgaatataataaagaaaaattgtgatttataaccaaggacaagggtgg

SEQ ID NO: 348104 - DNA, 571 bp, Homo sapiens
agaatgcaaataatgagtatataaaattagaacacaaattatatacatatatataattatatacataaatcctaaacatatacatctatttggatttcatgtgctttctcaatttggatgggattaagaacataacgtgaaagtgggtgtctgaggagaggcagcacccagattgaagtcagcatgcccgctttttggctctacatattccaggaacaaatctgggctgtggcatctttgtaaactctctataaactgacaatgtgacactaaagaatgggattttcacatcacctaaaattctatgtgatataagcataatattcaaaaccatagtatggatttagacaaatagagtgccaaaatctctttccctggaaaaagaaattgagaaatataaaaatggaaggctttatgtaaaactgaatcattaatactagctctgcatatctyttcttctaggaaggcatcccaacattctcaattacatctctccttaatgtggcattaccattttagacatgtgctgtttatggcacataacacattgttgtaatcatctcttacaagg

SEQ ID NO: 348105 - DNA, 563 bp, Homo sapiens
atctgctgtgtttgtaaaatcctttatgctttatgatgtacttctgatacattaactcttgatctttacaagaattcagtgcatgctttctgttttgccaaggcataaactaagcctcagtgaagtaaatgccctgctggcattcatgaaaatgacagttggtagagctgaaactacagctgaggcctcctgatgcagagttcacttgtctctgcatcaaaccccagtatgtktttgttacatagcaatttagataaataaatatattttaagtatacattttgtatatattactatggacaataattctatttttagtgttttcctgcagaaatattaaatttgtaaatgtaaagttccttaagtgaaaaccaatataagtataaagtgacattattaaaactcacactatgatggcattgaaaaaattgacttgtctcgtttgatggagaatccaatttaggttaaataactatgtttatgaaattacttcaggatttattggctgtagcatgataactcatcaactatagttgagcttgcaggaatttgagcagaaaagt

SEQ ID NO: 348106 - DNA, 501 bp, Homo sapiens
atctgtaccatttattctgcagaatttattctccagaataaattcttagaagtagaatagctgctgggcaaaggtgatgcaaaactggagcttagcccaggagggttcttgccttcacccaggaaagatttcaagggcaacctagtggtgttagactgcaacttttattgaagcagcagtgtacagcagcagcagaagcagggccaccccataggcagtgtatttttctgttctcacacygctaatacatacatacccgagactgggtaatttataaaggaaagaggtttaattgacccacagttccacatggctgggaagcctcacaatcatggcagaaggcaaaggggaagcaagacatgtcttacatggcagcaagcaagagagcttgtgcaggggaactcccatttataaaaccatcagatctcataagacttattcactaattcactaccacaagaacagtataggggaaccacccccatgattcaattatcttca

SEQ ID NO: 348107 - DNA, 548 bp, Homo sapiens
aaccacccccatgattcaattatcttcacctggaccagcccttgatacrtagggattattaaaattcaaggtgagatttgggtggggacagagccaaaccatatcaggcagtgtgcccagagtggcagctcaggggcagttctgcagctatatttataatgcacttttaattacatgcaaattaaggggcagattatgcagaaatttctagaaaatgggtagtaacttctaggtcttcaggtcattgccatggaaaggagtggtaacctccctttgttgccatggtaatggaaaactgacatggcacagatgggcatgtcttatggagagatgctttcatctcttccctgtttcagctagtcttctatctggtcctgagttcaaatccccatctccaaagtcaagtcccgcctcctatctcaaagggtgtgtgcacttaagtattgattataacagcaacctgccccctaggagggctagtgcaacttacaaccccactaacagtgattagggtccatctcacttctcctcccaccactgtgtattaa

SEQ ID NO: 348108 - DNA, 548 bp, Homo sapiens
aaccacccccatgattcaattatcttcacctggaccagcccttgatacgtagggattattaaaattcaaggtgagatttgggtggggacagagccaaaccatatcaggcagtgtgcccagagtggcagctcaggggcagttctgcagctatatttataatgcacttttaattacatgcaaattaaggggcagattatgcagaaatttctagaaaatgggtagtaacttctaggtcttcaggtcattgccatggaaaggagtggtaacctccctttgttgccatggtaatggwaaactgacatggcacagatgggcatgtcttatggagagatgctttcatctcttccctgtttcagctagtcttctatctggtcctgagttcaaatccccatctccaaagtcaagtcccgcctcctatctcaaagggtgtgtgcacttaagtattgattataacagcaacctgccccctaggagggctagtgcaacttacaaccccactaacagtgattagggtccatctcacttctcctcccaccactgtgtattaa

SEQ ID NO: 348109 - DNA, 559 bp, Homo sapiens
gatatatattctacgtcacacagcaaactcagcagtgcaccaaacaaactggttatcttcccctcaagtctgctgttactccttttcctctgtctaggatttcttttcttaatagctgccagatcttcagggttggttctgagagctctcatctcaggtgtacaatttatgtgtgtctcttggaggcttgaggactctcaaccattgtccaggatgctgcctgctccagaatttgctgctyctgtcagatctagagacctggcaccatctcctaataaaacctgtgcatttgaaaagacacccaagtggccacatatgcctgcttttcatgatctctcattcatgctgctgctgctggcaaaaccagcacttggaaagttaatctgtagttgaaagagatgtggcttgggccgatctgcctgccctggtggcttttgttgctgctgttgctgcagccaaccccaaaataggcctcaatggcccctccagggggtgcacatcttcactccgagttacacttaaggaacagggctctttgctggactggtgggcctgaggg

SEQ ID NO: 348110 - DNA, 552 bp, Homo sapiens
ccaaacatttaagtatgtgtctgctacactcaatttagagtaactaaagctttcaaggaattacagtggagttctccatgaaataatgtggcttttcccaamacttgaaaaatcatatttgtgcttgggacttttttcctttagatttatcaggttggctgttaaatgcaccacgtggttaaaaaaagaggtatgaggaaccgttcggagctgtctggagcagcagctacagcaagagactggaggtttaggggcctctccccttaggccacggctgagcttccagcaggaggctactgcccggggatgcatgcatgaatgaagacagctaagctgagcactcagtgagggcagagataccctctgccacggtcattgccggcaacctcagcatcaagcactgtggctggcagagggctggcactcagtaagcttttgttacatgaatgaataaaaataaaaagggctttgaacaagagaagagaaaatttgatctccctggatttataatcagacaattaaaaaaaatttttactttaattctgggatata

SEQ ID NO: 348111 - DNA, 552 bp, Homo sapiens
ccaaacatttaagtatgtgtctgctacactcaatttagagtaactaaagctttcaaggaattacagtggagttctccatgaaataatgtggcttttcccaacacttgaaaaatcatatttgtgcttgggacttttttcctttagatttatcaggttggctgttaaatgcaccacgtggttaaaaaaagaggtatgaggaaccgttcggagctgtctggagcagcagctacagcaagagactggaggtttaggggcctctccccttaggccacggctgagcttccagcaggaggctactgcccrgggatgcatgcatgaatgaagacagctaagctgagcactcagtgagggcagagataccctctgccacggtcattgccggcaacctcagcatcaagcactgtggctggcagagggctggcactcagtaagcttttgttacatgaatgaataaaaataaaaagggctttgaacaagagaagagaaaatttgatctccctggatttataatcagacaattaaaaaaaatttttactttaattctgggatata

SEQ ID NO: 348112 - DNA, 593 bp, Homo sapiens
aatgagcttttggtaatatgagacatgtcttcatttcactgctattcagtttgtgctgagaaatagggggcatgtgccaggattttggtgataaagggtatgtacattggtaagatggaaacttgctgatggactgtactgcattcactaagtgtattcagatacaatatactggaggtggtggattttagtctaccttcaggaataagttaccttgaaagagtttgcatagcattaggtgtcacatagtaaaagcacatctttaaatattttcattaaggactttccattcattatgcttgtctctgggtacgaaaattccaagtttacctctggcaattctatatcacttatttgtaattgyaactcaaatctcatactacaaatgcagttatgctgtaggcatttgtgataagagcaaggaacgaatgattttgttgaattatcaagtgagggttaattacgtacctatcatgttcccagttatatgccaagggctgaagaagacactaaagaagtgtaaagtgcactttctgtcccattaccatcttgtgaaaatccttagaggttcatttcctttttctatgtagact

SEQ ID NO: 348113 - DNA, 517 bp, Homo sapiens
attatgtctctcaaagtggtagatatgagatactgaagaaggggctagtccagatgtccgaagacccagtrtgtagcctagagcctggcttggctctgccacaaaccccttgtgtgcttgacagcgtgccaatgaagtcctcactctgagcctcagtttcctgatctgtagagtggggatgtggatttctgctgaaggattttgatccatgactcattatattagtttcatagcattgccataacaaactaccactaacttggtggcttgaaacaatagaaatttcttctctcacagtttgtggaggccagaagtctgaaatcaaggtgttggcatggttggttccttctgaaggctctgagggagaatacattccatacctctctccttttggtggctgccagcagcccttggcttgttgacgcagcattgtagtctctgcctctgtcttcacatcaccttctcctttgtgtgtatcagtgtgtcaaatctccctctacctttctcctataaggac

SEQ ID NO: 348114 - DNA, 552 bp, Homo sapiens
gctttctcactgatttatctctcatttctctcttcctctgcagattaccaaactaggaaatatcatccattccatgacagaatatcttctgttaggtctccagatagatgcaaatcatttgtaaataatttattttcagatacagatgcatacaaccaactattttaattgcctccaaatgtattctctttatcattcctgaccactgatttctttactgacaaatagctgctcctggtgcttggacatcgagatgaaggcaatcactggaaaagccgaaaggaggataaatcctgctaggaggtgacatagttgtacaaacaatccaaatagtgaatgccagcgagcatcaatgggcgtgggctggacctcrtatgatcagtacacatgtgagtgcctgtcctggagcacagccctaggaagaatccagctgtaactgacccaagcatgcctccacaccaaaagaaaggcaacacatgcacccacctcctgctatcgtgattccatcttataatggctgtgtgacttacagattgcaccaactgatgaccc

SEQ ID NO: 348115 - DNA, 546 bp, Homo sapiens
gtgtagccactttcacaaatgatcttagctagatcttctagaaaacttgctgcagcttctccatcacttacagtttcacctttcactttcgtgttatagaaacagcttcttttcttaaacctcattagtcaaactccgttggtgtcagacttttcttctacagcttccttacttctctcagccttcatagaattgaagagagttagggccttgccctggattaggttttggtttaaggaaatgttgtggctggtttgatcttctatccagaccactcaaactctctccatrtcagtgataaggctgttcaccctcttatttatatgttcactggagtaacactattaatttccttcaagaacttttcctttgcattcgcaacttggctaactgtttggtgcaagaggcctagcttttggcctgtgttggctttcaacacgcctgcctcactaaatttaatctagatattaaagctagaaatagtttctgatttgaagcaagagatctgcgactcttcctttcacttgaacaccaagaggccactgt

SEQ ID NO: 348116 - DNA, 484 bp, Homo sapiens
aaacaaacgaacaaaaattaataggtaaatggatgtaagtacagcatgttgttataagcactatacagcagtaaaagaacgaactactgctcaaacatcaacttggttgaatctcagaaaccatgtcattgagtgaaaaaagcaaggtacagacgatttcttagaatacgaatccatttatacaaaattcaagagcaaatcaaatactgctaaagatactgaattagttttctagggctgccataacaaaacgrattaagcaacacaattttattttctcataaatctggaggctcaaaatttgaatcagcaggcttgatttcttctgaggcttcttttcttggcttataggtggttctcttctctaaatgtcttcacatggtcttccctctgtacacattctgtgtccaaatttcctcttcttaaaaggacaccagtcatattagatcaaggaccacccatgtgacctcattttaacagaatt

SEQ ID NO: 348117 - DNA, 599 bp, Homo sapiens
acattcatatgataaaatgagacgactttagcttatttctacaatagtaaacccagatgggctcatgcaaacttgaaaaacgatatcctctccactttcctactttacaagctaatggtgtttatacttatagaaaggaacaatagaggaggtgacagttrcaaagtgctctcattgtcaatggaaacattatccaagaagatttgaataaagcatctagaaggataaattggattgtttttctcccctttggaactcttgtggatacagtattttgcactctggcacaagaaggaaataaatcttagaaagtaattacaatacattcagcagacatttatacatagcacttaccaagggactcaattaactgagcacctacaatgtgccagggactacatgtgaagccacagcatataaaacttctacatttttctcctgttcaattgaatttaattaggtcaaaaacttctatatagagactgaaagcagatcactggttgcctggggcttagggtaaaagtgtggattggatgtcatttacttttgagattgaatttttgagattgattagcttgcctgttcaacaagcattttat

SEQ ID NO: 348118 - DNA, 593 bp, Homo sapiens
gttcactctggttggccacccattctcttttcctttgatccgtgggttttaaaaggaacccttgacattcaggggatcaatttattatgtacatgcttatgtacatttttcccacagagagaagattcatggttctcaacagatttctttcaaattgggtccttgacccagaaaagttaagaataattactttaaatagaaagtgactctacatagtaaaacraagagtggaagttataggaatcttaagcaagtcatctttatcctctctgggacttagttttctgaaaataaaaagcggaactaaagaatcttaagattgctctcaactctaacattttctaactttaggttaaaatacacatatatgtgtgtataggtacacaaatacatacacaaacacacacacacacaaacaaacacaccctcgcaatatgctaacaagtagccattgtgagatctaacccttcaggacagaaaattctaaaacatattatattttctaaaacatggtctgttgctccagggttttttgttgtcgtggtggtttggtttggtttgtattgttttgacagttattgatgtctttcttc

SEQ ID NO: 348119 - DNA, 542 bp, Homo sapiens
actgttcttcttgcacaatgatgcagggtcataaaacaacaacctgtgttggttttgtttttgtttctttgggttttttgcattcattttgaatatagtaacagcaacaaagaacaaataccaattagacaaaatcagtactatgtgcgaggccctgttctaagctctttgtgtgcattaactgacttattcctcrcaattgacctaaaatataccattattacacctattttaccaacaaaggcactgaggcacctctaggtaaggtaatttaccagggccacacagctaagtcatcgcagggctgaaattctaacccaagaagtctgactccagaacaaacgaggtaaaataaactggacttggtgagcaattggctatgtgcaagagagaggagtcaaaaatgttcccaggagtctggtttgggcagctaggtggatagtgtgccattcactaaaactggaaataaaggttggggaggagtacaggtttatggaaagtttatagatcatatgggaaacccaattatgaacagtttatgg

SEQ ID NO: 348120 - DNA, 584 bp, Homo sapiens
gtctcgttcctcaatctgagctgggtccaagagagcagtcatagaacggagaaagctggcaagatacatacattagctattcaaaacctcaaaaaggtagattcaacaagctaaatcatttttgtttgggataaatctactaattatttctatttcaaagacaaataccaaacctgaaaccaattagacataacaacagtcttactaaagcacacagactttctgaaaagtcaataaatacataagcatgaacttactttgttttcttactgtttgccataaccacatccttaataggttttgctatatgctcctcctctgaaggttcaacctggcttccggttgtaggtgtacaaacactgctgacatcagccagctcctgagtgtcaggagagacacagaagtactcaggttgtttgtgtgttgacygagagaacagctgagattgagaaccaggataactctttaatgaatcaaagtgcattgcccatctgtcatgttcctcaccctaatgatgacaaataagaattgctaagaatttttccaattattctcatatataattctaaatgacaaccaaagat

SEQ ID NO: 348121 - DNA, 582 bp, Homo sapiens
atgtttattgcagcactacagcaaagacttggaaccaacccaaatgcccatcaatgatagactcgataaagaaaatgtggcacatatacaccatggaatactatgcagccataaaaaaggatgagtgcatgtcctttgcagggacatggatgaagctggaaaccataattctcagcaaactaacacaagaacagaaaaccaaacactgcacgttctcactcataagtgggagttgaaccatgagaacacatggacacagaacatctcatccaacagttaagagaatacacattcttttcattagcataaggattattctccaggacagatcatatgttaggacacaaaacaaatcttaacaaactttaaaaaactgacttcatatcaagtatcttctcaaaccacaatggaacaaaaccagtaatcaataatgagaggaacactggcaactgtacmaataaatagaaattaaaccacatgcttctgaacaagcatccagtcaaggaaaaaatttaaaaaaattcttgaaaaaaatgaaaatttaaacccaacataccaaaacctatgggatacagcaaaagc

SEQ ID NO: 348122 - DNA, 589 bp, Homo sapiens
  misc_feature (1)...(589): n = A,T,C or G
cattttctgtctaattgttctagctaggagttccagtactatgttgaataatggtggtaaaagttgatatccttgtcttcttccccaccttagaggaaaacctatcagtttttccccattcagtatgatattagccatgggtctgtcagatatggcttttataatgttgaggtatgttgttctgtaycccattttgtgagaggttttatcataaagttttatcataaatgttgaattttattgaatgctttttcagtgtcaatttaaataatcatatagtttttgtccttcattctgttgatatgatgtgttacattcattgatttgtgtatattgaatcatccttgcatccctaggatgaatcccgtttagtcgtgattaatgattttttttagtgtattgttaaatttggtttattagtcttgtgctgaggatttttgcatctatgttcctcagagatactggcctgcagtttttattttttttcnattgtgtctttgtctggttttggtatcaggataatactgaacttgtagaatgagtttggaagtattcccactttcttgatttttttgaaatagtttgacta

SEQ ID NO: 348123 - DNA, 589 bp, Homo sapiens
  misc_feature (1)...(589): n = A,T,C or G
cattttctgtctaattgttctagctaggagttccagtactatgttgaataatggtggtaaaagttgatatccttgtcttcttccccaccttagaggaaaacctatcagtttttccccattcagtatgatattagccatgggtctgtcagatatggcttttataatgttgaggtatgttgttctgtaccccattttgtgagaggttttatcataaagttttatcataaatgttgaattttattgaatgctttttcagtgtcaatttaaataatcatatagtttttgtccttcattctgttgatatgatgtgttacattcattgatttgtgtatattgaatcatccttgcatccctaggatgaatcccgtttagtygtgattaatgattttttttagtgtattgttaaatttggtttattagtcttgtgctgaggatttttgcatctatgttcctcagagatactggcctgcagtttttattttttttcnattgtgtctttgtctggttttggtatcaggataatactgaacttgtagaatgagtttggaagtattcccactttcttgatttttttgaaatagtttgacta

SEQ ID NO: 348124 - DNA, 544 bp, Homo sapiens
tatttcatcagtatgtataatccataaagaaaataacaacttyagcttttctaaacatttgtattcatcctcttctatgctccaagacctgggttttgataatatctgtaattcttatattttggttacaaatttttaaaaatatgattttaaaagttccttgcacctcttgtttttaaaagtatctattccgaacagttgcattacactctagaagtatactgtcacccttgttttgatgtagttctaggtttttatctgttgcttttctctagcatattttatggctaaggtctttctcctttttggatatacacatataattgttttatttggttggagtatataattaatattgttaataaaagttataattttgccagtatattttctgaatccttgagcaacttaagaaatgcttagtttgacttcatgtgtaaatgataatttggcttgttaaagcattaaagcttcactgtattctttttagaacaatatagatacttcttaattgagttctagttcttagcattttgtacaacaa

SEQ ID NO: 348125 - DNA, 523 bp, Homo sapiens
ccaccacaaacccataacctgctcctgctacctgaacctgctgactctgtatttaaagatttgggagactgtcttgcacaatttrttattcattctttcaaccacctctttgtttgcctgcatcaagtaacaactcagtgtggtgtcaacttcagtcctgtcccacctgttttatgtcctgtagacaatttctaatgtttcttgtcctctggtggaaaacttcttgggtttccagtgctttcatcaaattactaataattttgctcttgtcatctcaatgggatttttgtgggataaattgataactttctaagtgtgttgtttaccctattgaatgagaagctcaatgatcagttttaaccaattcctactgaggcaaccttaacctgattaaacatccctgcctacttgataaacaacctttgagaatttggaaatacagcaaggctgagtcattcccacaacttatcatgtggcaatgggatctttattatttgtgttcgtattgctcatctcaaggcgc

SEQ ID NO: 348126 - DNA, 523 bp, Homo sapiens
ccaccacaaacccataacctgctcctgctacctgaacctgctgactctgtatttaaagatttgggagactgtcttgcacaatttgttattcattctttcaaccacctctttgtttgcctgsatcaagtaacaactcagtgtggtgtcaacttcagtcctgtcccacctgttttatgtcctgtagacaatttctaatgtttcttgtcctctggtggaaaacttcttgggtttccagtgctttcatcaaattactaataattttgctcttgtcatctcaatgggatttttgtgggataaattgataactttctaagtgtgttgtttaccctattgaatgagaagctcaatgatcagttttaaccaattcctactgaggcaaccttaacctgattaaacatccctgcctacttgataaacaacctttgagaatttggaaatacagcaaggctgagtcattcccacaacttatcatgtggcaatgggatctttattatttgtgttcgtattgctcatctcaaggcgc

SEQ ID NO: 348127 - DNA, 614 bp, Homo sapiens
aagtggtattatgttgtatggttttactgtaacttgttattttatttaacactacattcatgagatttatctatgttgaaatatacaaagctatagtaaactctttttcacagctaaacaggattctattgtattaatatgccacaattcatttatggatttttgtttatttttaaaattttactatcagaaatattgctactatraagactactgaacacatcccagtgcattaggaatatccttagggatgggttgtaaagtatatgcaacttcatttttaaaaaataataacaagttagtttataatattgttgcaagaacttatactttcagcagcaatgtatataattatggttgctttttttcacaatattttgacaaaatgatcgattttgtccaaatttttaacacagtgaagcaacatttttaaagtaatgaaagaaaaatctgtcaacccagaactctgtaacctataaagatatattccaaaaattgaaggcaaattttttaaaaaatatcaacctagaattttatagccaataaaaatatctttcaaacactgaatgcaaaatcaggactttgtcacctttgcaaaagataaaagaattcat

SEQ ID NO: 348128 - DNA, 457 bp, Homo sapiens
ggaaacgagcaaggcacagaattatttacccttcccaggaaaatattttaaaagctctatgagggctccatttcctaaagccacctgtcacctaaagcacatgtaataagccccagatgctggatcccaacctgctaaccctgtgactcgcagagaaaatatttcactcattcctgggcacatccttaattcgttcgaagctaaactttcaggccatattttctgcttaaacttaataactcagctctgacattccttcccagtgaccctaaagttccrtttggccacctcgacacctgctcctaaatgcattagaaacactcagaattttttttttcaagtatcaattttgttttcttttctcagccttgaggccatccattgaatgcacggaagtaaaggatactttgttctattccgttgtgaattgcgttagtatcttaggtttctctactca

SEQ ID NO: 348129 - DNA, 604 bp, Homo sapiens
gccttacttccggggctcaagcggccctcccgcctcagccccccaagtagccgggactacaggtgcatgttaccatgccaagctaatttttttaattttagtagcgctggggtctcactatgttgcccaggctggtttcaaattgctgagctcaagcaatcctcctgcctcagcctcccaaagtgatgggattacaggcgcaagccactgggcccactgaccttttgaaacataaggacattgttattggattaagagcccacctggataatcctggatgatctcaagatctttaactgaataaggtatgcaaagacctttytttccaaataaagtcacatccacaggtcctagggcttaggacacagacatatctttgtaggcaatatcattgaagtcactgcaactccccacagcaaccacttcaagagagaaagtagaagctgccatgccttgtaaggcccagaattggcctgggatcatgggggcccatgtccctatttattacattttgcaggtccagcccagattcagagtatcacctgaacaccaacccaaagaagcatggctcactgggacaatgactgcttatttggggggtcat

SEQ ID NO: 348130 - DNA, 521 bp, Homo sapiens
tacctgcccggtgctcctcacaggtgagtgatcatatgtatattcccggctgagcatgagtgcttaaacccatggatgattggaacattccaagaagtgcagaaaagaagtggacaggtggaactgggcagatgggatggcctgggccaggtgttctaggtgcagargaaaaaaccttgaagattatctagagtcatactcattctatagaggaggaaactgaggccggaggggtgaagggctgagtctagctcccagacttccttttctgtcattattttaacagcatttattgtccactgcaaagaccatctatagatttgtttattgtttacctgctctcctgcctactccaatatcacctaggctggtaagcccccaccacccacagagagctggagcctgtcttgttcatgtctgtgtgctcagagctgtgggcagtgctgtcacataatgggccctgatgaagaggcatgagcaacgtgcctgatgcttctcctgactcccagtccaggggcctt

SEQ ID NO: 348131 - DNA, 595 bp, Homo sapiens
ttagtccatcccactatgaaaaagtggtaagtctagttctagtacatttgcttcagttattcttaaaagtacctaaaaatatattattctcctatgctttagatagcctgactgcgttttcttggttgtttataatttttgagctccttttagccagttgaaagacagtgagttgcaaattaaaaaacaaaataaagatgaaggcatgtactctgccagtgtgcacatttgggtgagaaatgtgatgtcaatggaatatattggcacatcgaccaaatagggtttgccttatttataattgaaattggcacatcaccgtgcatgttaagtttcaggtcctttcctggtctttttatgcrgtgtaacccatacttaaaaaaatacctctcccctgattaaagcctgagcattgtatttttgaagtagctttctcagccagtcaaactgagtcctaaagtactttacaaggagtcaaccacagaaacgttagatttaaggctcagacatgaccatagctgactgaatgaagtggctgcccacagaaaagttcaagttcgtcagactcggatgaacatctgcaaaacaagactagtaa

SEQ ID NO: 348132 - DNA, 486 bp, Homo sapiens
ggcctattcaagttgacacatagaattaactatcacaagtctacctcttgtcaacgtcacccatatgcatcttcctgagtcatattyaatttccaaataaagataataaggtcataattctacctaacatgatataactattttgtgtacaactggaaatgaattaatcccttccccagaagggaaagtaaagtcctcaagtgatgtttatgctcttcctttgtattcgagaacttaaatataatattaataatacttaaatactatgatataaagtcaatacatcttatgttacatcataaaggataagatagggaagaaaacaaagctatttgatgtgtgtgtgtgtgtgtgatacatacacacattcatgttaattacaaaataagggggaatattcgtgacaattacagccactatttccataacttgtcatgaggttgtagttggtacttgtaactcccttcttccactacccattatgta

SEQ ID NO: 348133 - DNA, 486 bp, Homo sapiens
ggcctattcaagttgacacatagaattaactatcacaagtctacctcttgtcaacgtcacccatatgcatcttcctgagtcatatttaatttccaaataaagataataaggtcataattctacctaacatgatataactattttgtgtacaactggaaatgaattaatcccttccccagaagrgaaagtaaagtcctcaagtgatgtttatgctcttcctttgtattcgagaacttaaatataatattaataatacttaaatactatgatataaagtcaatacatcttatgttacatcataaaggataagatagggaagaaaacaaagctatttgatgtgtgtgtgtgtgtgtgatacatacacacattcatgttaattacaaaataagggggaatattcgtgacaattacagccactatttccataacttgtcatgaggttgtagttggtacttgtaactcccttcttccactacccattatgta

SEQ ID NO: 348134 - DNA, 606 bp, Homo sapiens
gactgtaggctgctgggttctaattatgttctattatagaaggccctgggatgagattggaaggtgggagaaagaaaacagccatattacttctgggaggcaccccctcrtgcctcttcatgctccattattagctgcatggcaccttcagtagggccaaaaagttcaggctcaggggtccagccagggataatggcagcttcctcatctggataacactcagacctctctcgctgcttcaggatctgacttctgtcctttttttctgcagctcttctaccacctcagtaaccagttccctgctttcaatatagctctgttttcgtacttttccttgattgacacatttggtttctgcaatatgactgaccagcttttctaaaaattctcctactgcaagcacctagaaatgctggatgaaatacatacatatatattatatatatatatataatatatataatatacttccatttaaattattggtttagtgcaaaagaatgtaaaggaaatacttatgggccagaaacaaagtaggaagtgaaactttaaactttaaaaataacaagtttttagtgaggatttgaagcagttgagcccacgtaa

SEQ ID NO: 348135 - DNA, 606 bp, Homo sapiens
gactgtaggctgctgggttctaattatgttctattatagaaggccctgggatgagattggaaggtgggagaaagaaaacagccatattacttctgggaggcaccccctcatgcctcttcatgctccattattagctgcatggcaccttcagtagggccaaaaagttcaggytcaggggtccagccagggataatggcagcttcctcatctggataacactcagacctctctcgctgcttcaggatctgacttctgtcctttttttctgcagctcttctaccacctcagtaaccagttccctgctttcaatatagctctgttttcgtacttttccttgattgacacatttggtttctgcaatatgactgaccagcttttctaaaaattctcctactgcaagcacctagaaatgctggatgaaatacatacatatatattatatatatatatataatatatataatatacttccatttaaattattggtttagtgcaaaagaatgtaaaggaaatacttatgggccagaaacaaagtaggaagtgaaactttaaactttaaaaataacaagtttttagtgaggatttgaagcagttgagcccacgtaa

SEQ ID NO: 348136 - DNA, 638 bp, Homo sapiens
attctaaaacaagtttaagattttcaaattgtctagtttttacattctgttccacatgtgtatatatgtgtgygtgtgacgaataaacatctgacttgtgaattaaaaaaaatgttagcccagattttaccaaagcagttttttattgctaatcccaggttcaactgcttttaattttacatctattgactcagcagttataggcccagagatacagtccaaagtcctggacaaaaatcaatgtatgtctcactcccaaggtccttgactccattcggccatcttgcaaattgtattgtctgcttccactggggcctgggttgatcctggaagccatactgaggaaagtgcatgaaggagtaagaactatcactaacacactgttcccattgatccaaaaggcagttttggttccaaatatagttttcctcactacaattttgggatgactcagatgatcacttacctcgaggagttcactgtgtccacagtaggatagggcaaaaccacatattctattatattttgtataagacatagcacatagatataatgcgtttactcttcaaggagaggaggtgcataccattgttttatttgatagataaaagctcatggcaaaaacgtaaaagtttaaa

SEQ ID NO: 348137 - DNA, 638 bp, Homo sapiens
attctaaaacaagtttaagattttcaaattgtctagtttttacattctgttccacatgtgtatatatgtgtgtgtgtgacgaataaacatctgacttgtgaattaaaaaaaatgttagcccagattttaccaaagcagttttttattgctaatcccaggttcaactgcttttaattttacatctattgactcagcagttataggcccagagatasagtccaaagtcctggacaaaaatcaatgtatgtctcactcccaaggtccttgactccattcggccatcttgcaaattgtattgtctgcttccactggggcctgggttgatcctggaagccatactgaggaaagtgcatgaaggagtaagaactatcactaacacactgttcccattgatccaaaaggcagttttggttccaaatatagttttcctcactacaattttgggatgactcagatgatcacttacctcgaggagttcactgtgtccacagtaggatagggcaaaaccacatattctattatattttgtataagacatagcacatagatataatgcgtttactcttcaaggagaggaggtgcataccattgttttatttgatagataaaagctcatggcaaaaacgtaaaagtttaaa

SEQ ID NO: 348138 - DNA, 646 bp, Homo sapiens
atggtaaaacaaaataaaaattatgcatgtttgttattgaggttaaatttctataacataaaattaactgttttaaaggataattcagtggcatttaggacactcacaatgttgtacaaatctccctggttccaaaatatttctaccgctccagagtaaaacccctcacccatgaaacagtcactccttactcaccttgccctccagtctctggaaactacaaatctacttcctgtctctctgaatttgcctattctgcacatttcatataaattgaatcctgcagtatgtggtcttttstgcctggcttctttcactgagaatgatgtttctgaggttcgtccacactgaggcatgtatcagaacttcattctttttgatgactgagcaatatttcattgaatggatggattgcatttgtttatccattcacctgtacaaaccatgtatcttcaggacccacagcttgacaaagtggataagagaaggagctctgaaattgcccagctctggtttgaatttcagttctactgatgagaaaccgctaaacaactgggccccaaaatacaacgaagccgtggggttggtgcaagggctaatgagatgccaagacccccaatagagtgctggaggtggcatgcattgt

SEQ ID NO: 348139 - DNA, 610 bp, Homo sapiens
tatggcccatattacgttttatcatgtattttagatatctatgttgttagtatatggaaagtaaacatcttatttatctttattttgtcacaaagcctggcacagttgattgcctatttggtatgtagtagtaaaaaaattcttatgaaatgaattagtgaatgaatatacaatgtattaataaatgattttgctagtggtaaatattcctatacataaggagctaaagggggcatgccagctgatcaatctttctgaaataaaaccttttgaaagtctttctccagtaagatatttgagctcatataactgacaagagtattaggatataaaatatataaaaatcatatgactcaataagaaaaaaactaattataaaaaggggcagagggcaggaacaggagatttcatagaaaataaaacccaaatggccaataaatatatgaaatgttgttccaccttactagtaattatagaaatgaaaactaaaataataagagaacatttcataaattgaacactttggaagtacttagtagtggtaaggatgtaagaaatgagcattcaaaaattcaggtttcaaattgatcrtagtagattcctacaagta

SEQ ID NO: 348140 - DNA, 627 bp, Homo sapiens
atctcttctcagggcttcactctcaccaaatcatttgctaccggagaggaatccaatgagccctcttctctctttcccacatgtgactcaatccagcaatatctaatctttcaaaatacctcacrttgcatctcagaggcatgtcctttgagatatgaatagtcaactaagtcaggccaccagaatgttgtagtaccatggcattgacaagcaggcaattagatgagtcactgggccattattgggtgacatccgagctcctttgccctatcatcgggtcccagatgggtggtagttatgcataactgaaagtcagctgcaagataacttcttggcttgcctgtaagaaatcccttcctgttggatgggtccatgaagctgcttctgtatgtgaaagctggcgaaggagagagatatgatctcagttccttcctccaggggctggaggacaccattcagagaatcaggcaaactgctcctgaaagagcttcccttatgtgggactctgcagctgcagtccaacccctgggcttatttctgtcagtttccagctttgtcacttttagtgagtcataacaatttactacacctcagtttccacatgtacttaagaaaaaaaaaaagagg

SEQ ID NO: 348141 - DNA, 598 bp, Homo sapiens
actcttacaaatctaagaactaaactctttaagagttttagcatagatttctgataggcaaatcataaaaaatcataaagtgsgggggggggcattccaggattgtttgaggatagagaatgcacacatatcttaactttccattgagacatattgtttaatcatattttaatccaatatttcaaaccaaggagatttatgacttgatgacattgttgggggtgtgaggggggtggtgattactctgtaaaaatgcttcactgagacaggtgtgagcattagaaactcaagatgtcacgctgccttctctcatagtgcagcatgacctgaagtgcaactgtccttcagagaggaacctcagctggagacctcagggcttgcaggtcctctgcccttggatggagatagtgcctccatggggataaggattatgcctggcttttctactactgcatttccacagcctaaagcagtgttttccgatagtgagtggtcaaaagtaattgctgctgttgttgctgagagacaagttttagaatagaagacaattattaaacgtttggtctcatcatagaactcaataggtcaacaagaacaa

SEQ ID NO: 348142 - DNA, 549 bp, Homo sapiens
tggattccacttgttaaaaaatctgtctgttggtgtcacagcgattttgtctttatgttcacggagagaactgatcttgtggtcaagatgactgggaaaaaagcctctcagcttcagtcttcaggtgggatggggaacaaggtgtggaagaaattaatgggaatttctagatacttaaaaggtggccttgttctcaagcttcctgataatggtgttttggtttcattatctcccagctcactgcttccagctcaccctttctgaccrcagcctgaatgtgttggaacaaagttattctcatggcttctggagccaagttcctcattcaaaaatatgtattacgtgtcttgtgtctgccaggtactgttctagttgctgcagggaccaaaaaaccatggagctttcagcctcttggggaaaagacagacaataaagagatgcacaaacaaacaaatattgcaagtagtgcctgacacgatgaagaacatacacaaggaaaggggaagggagtggcaggttaagggtggtctcccttgaagaggaccaggg

SEQ ID NO: 348143 - DNA, 549 bp, Homo sapiens
tggattccacttgttaaaaaatctgtctgttggtgtcacagcgattttgtctttatgttcacggagagaactgatcttgtggtcaagatgactgggaaaaaagcctctcagcttcagtcttcaggtgggatggggaacaaggtgtggaagaaattaatgggaatttctagatacttaaaaggtggccttgttctcaagcttcctgataatggtgttttggtttcattatctcccagctcactgcttccagctcaccctttctgaccgcagcctgaatgtgttggaacaaagttattctcatggcttctggagccaagttcctcattcaaaaatatgtattacgtgtcttgtgtctgccaggtactgttctagttgctgcagggaccaaaaaaccatggagctttcagcctcttggggaaaagacagacaataaagagatgmacaaacaaacaaatattgcaagtagtgcctgacacgatgaagaacatacacaaggaaaggggaagggagtggcaggttaagggtggtctcccttgaagaggaccaggg

SEQ ID NO: 348144 - DNA, 574 bp, Homo sapiens
tagagaatttgtttcttctgtaacagaggtcttgtgtacaaggtcttgagtcttactgaggagagaggcctcttcccagaaaaagcatctttgcagcatgactctctgagtgtagggagtytgtgtggacaccagactgcattgtccatggtgtcaatatcacggtcagccttgtcaactgcattcccaaccacattcttcaccaatctagaactcctgccttcttacaagattctgggaagagaagacagaaaaagacccaagtcagtagcacactcttgccttgcctataccctgggagcaaatggacttgtgatgtttttgccttctggtgctatctgttgttctccaagggatgagaatgggttccaggtggtcatcgaaaattttcacagccaacactcaaatatccttcttatgagaagacattttcaggccagacttatgtgccaagctcatgtcaacctgtccaaatacctactcagtagtcaaataaatatttatattcaaaataaaactcaccctctcctccctgccagaccaatgcctgcatatcctatctcatcaaatgcac

SEQ ID NO: 348145 - DNA, 574 bp, Homo sapiens
tagagaatttgtttcttctgtaacagaggtcttgtgtacaaggtcttgagtcttactgaggagagaggcctcttcccagaaaaagcatctttgcagcatgactctctgagtgtagggagtctgtgtggacaccagactgcattgtccatggtgtcaatatcacggtcagccttgtcaactgcattcccaaccacattcttcaccaatctagaactcctgccttcttacaagattctgggaagagaagacagaaaaagacccaagtcagtagcacactcttgccttgcctataccctgggagcaaatggacttgtgatgtttttgccttctggtgctatctgttgttctccaagggatgagaatgggttccaggtggtcatcgaaaattttcacagccaacamtcaaatatccttcttatgagaagacattttcaggccagacttatgtgccaagctcatgtcaacctgtccaaatacctactcagtagtcaaataaatatttatattcaaaataaaactcaccctctcctccctgccagaccaatgcctgcatatcctatctcatcaaatgcac

SEQ ID NO: 348146 - DNA, 550 bp, Homo sapiens
gtgaaatgaatatttgatactttcacctgcagctgggaattaggacaggaggtggtcactctcaacactyctctgttcaaagttacactgcaggccttcacagtgcattaaggcaaaggagaaaacaaaaggtatgagcttggaaaggaagacttaaactgtcttcgggatgaggtatggtggctcactcctgtcatcccagcactttgggacgtgaggcgggaggactgcgtgagcccatgagtttacggctgcagtgagatacgatcatgagaacttatctctcaaaaaacaacccccaaaactgtctttgttcacatacaacattatgtacatggaaaatatttttgaaatatacaaacaagctgttagaattaataagtgaatttagcaaggctgcaggttagaagatcgatataaaaatcaattgtatttctgtatagcagcgaaaaataattggaaagtaatattttaaaatgtgaaaagcagaccatttataatagcatgaaacgttaaatatttaggaataattataataatgatatgtaag

SEQ ID NO: 348147 - DNA, 550 bp, Homo sapiens
gtgaaatgaatatttgatactttcacctgcagctgggaattaggacaggaggtggtcactctcaacacttctctgttcaaagttacactgcaggccttcacagtgcattaaggcaaaggaraaaacaaaaggtatgagcttggaaaggaagacttaaactgtcttcgggatgaggtatggtggctcactcctgtcatcccagcactttgggacgtgaggcgggaggactgcgtgagcccatgagtttacggctgcagtgagatacgatcatgagaacttatctctcaaaaaacaacccccaaaactgtctttgttcacatacaacattatgtacatggaaaatatttttgaaatatacaaacaagctgttagaattaataagtgaatttagcaaggctgcaggttagaagatcgatataaaaatcaattgtatttctgtatagcagcgaaaaataattggaaagtaatattttaaaatgtgaaaagcagaccatttataatagcatgaaacgttaaatatttaggaataattataataatgatatgtaag

SEQ ID NO: 348148 - DNA, 595 bp, Homo sapiens
ggaaggtctgttagttttctcttaatatgaagttttaaaatcctaggacattgtcctgcccctggagtgtagccagggtctagagaattcactrtgatcttctattctgtctgggcttgaattgcagtgtctcgacagccatgtgcagccacttacatttctacttaccattcggactctcaggaactgtttcctgcaaggcctctgggagtcctgccttgcacacgtacagcttagcagtggaccagggacctgagggaatccttagtcagatctttggcattccttttctgccattccctcctctgctctccaaatcccagctgctgtggcagccccaaccaaattctgatcttagtgtcctgcaacagaagaggcctctgcagctcgggctctgtttcccaggagagaggttgcaagaacgccctcagggaaaacgttaggggaggcggggccccgtgatgagaggcactgatctacaggctcagggatctgcctgtggacagcggtcgcaggggctgtgacgctgtgtgtccggggccctgtgctgacaggcactgctttccttttctccttctcctgcccctgcgttgtg

SEQ ID NO: 348149 - DNA, 621 bp, Homo sapiens
cagtctccttttgttttatcgagtatttattcctgtgcttcagtcagtaacagcccaaattattggtgatccatcactacatggagatgtttggtagtggctggaattcttcctcaggtcaattttcaatgctctttgggtgctccccttgtttgtgcttagcaaagtagtgaatgccatttggttccaggatatagctgacctgacaattgaggtatcagggaggaagcctcacccattccctagtgtcagcaaaataattgctgacatgctcttcaaccttttgctgcaggctcttttccccattcagggaatgtttgtgattctctttctcatccatcttgtmggtcagctggttagtctcctgcatatgtcccttctctagtcactgtactgctttgaatatcgttggttcagtaaaggaactgaaatacaccagcagttgtctaacatagagagcaattggccttactactttgggtttggtttgcccttggcttttctcatagcaatgcagtcctcatatactatcagcagctgccttttctctatcctctttcctttattcattatcagcgccaatgaagcaaagacccctggaaaagcgtatctcttccagtt

SEQ ID NO: 348150 - DNA, 573 bp, Homo sapiens
tacaccaaaccttgacctcagaggcaggcctgcagatctttgtctttactgcagccctgtgacttatattcatctcctctcaactgtaggccaggacaagtactgcctgcaaagggacctacccagtcacttaatgggagctctcccaaagacctggaggaaaccatacccatccacaaacctagtaacaggcctaccatctgtggactctgaaatggatcctcattctagcaccaaccctactgcccaatgtactggaggtaattcagtccacccggggggaaccagacagaatccatacccactggaggccctggtaacaggtctrttaagcacagatcccattgtagatgaagaggcagccacatgatctagctcgaaacccactttactaggatcctgggggcaatctcaccagcatagaggctcaacaggagaaagcttttatctgccaaaagcagtgtttaaatgccagaaaagatgtttattcagacatcaatgcgcagacatcaatgcaatctatacagataatgaagaattaggcaaatgtgacaccaccaaaagaaactagta

SEQ ID NO: 348151 - DNA, 573 bp, Homo sapiens
tacaccaaaccttgacctcagaggcaggcctgcagatctttgtctttactgcagccctgtgacttatattcatctcctctcaactgtaggccaggacaagtactgcctgcaaagggacctacccagtcacttaatgggagctctcccaaagacctggaggaaaccatacccatccacaaacctagtaacaggcctaccatctgtggactctgaaatggatcctcattctagcaccaaccctactgcccaatgtactggaggtaattcagtccacccggggggaaccagacagaatccatacccactggaggccctggtaacaggtctattaagcacagatcccattgtagatgaagaggcagccacatgatctagctcgaaacccactttactaggatcctgggggcaatctcaccagcatagaggctcaacaggagaaagcttttatctgccaaaagcagtgtttaaatgccagaaaagatgtttattcagacatcaatgcgcagacatcaatgcaatctatacagataatgaagaattaggcaaawgtgacaccaccaaaagaaactagta

SEQ ID NO: 348152 - DNA, 602 bp, Homo sapiens
attattcatcatattcagtcaagtgagggcctagtggcggttaaaggttgattagttgaaagaagattcaaatgaaagtcttttgggaaagcaatgaggcaaggctaagcaatgaccataagtttagatttcctcattgttttgaatagacaggaaatcatttgtccagaaggaggtattatgtagggaaacttttacctttctgtatataaaaacatataactaatacacacacactcatacacaaatatcaatggaggtatacattgtgtttactttttctatgtttatgtacaatagtaatatctttatagttatactaaygttattaaaataagtaattatattaactaagtttaggaccagtttctagtaagtaagaaagaaaaaaaatcatctccaaattctatgaatagatataatgaatttcaagaatgcctgatgaattaacttaggattcaggaaacaaaaaaagttgctattgaatagaaaaatggaaaagtaacagcaacaaaattctggtagcagatgccaataatttcccaagacaaaatgatgtagtaacttcagaagtatataaatgaagactggataccagcaag

SEQ ID NO: 348153 - DNA, 380 bp, Homo sapiens
acatttgttcattaaaataaactcaccatctaattataattgactcatttgtagatgagaaagttcaaagtcaatgaatggcccaagcttcaggaaacaccaataaaaattaagaaagtwcatcattatattttcaagattttaagcattaaaagagaagcttttctatatttcctcatcagagctttcactagaaattacttttcacttctttctcattgatattacaatacctttttaaaaatatgtttttagggtaattccattcaatgaaattcacctttttaagggtactgttcaacgaattttgaaaatgggtatattcttcagcaaaaacaattaatatgaatgtttttgttcattaggacattttcatcaac

SEQ ID NO: 348154 - DNA, 568 bp, Homo sapiens
atttatttccagccaaggcttcagcaccaattccctggtgagcttattggatcatatggaaatttctaggatctatataaacatatgaataaaaagacaaaaataaaatatatcaaactattaataataattattaaatggtggcatgatattaaattgaatcatatgaaattgccaatatccatttgtttttaactaaagggcagttttagatattacaacctaatatgctacttttttttcttccttaatgtttatgtatttgtctacattcttttcagkgaatgtatattatcttcatgattagaaaaataaatattatttacaaagaacaaagaaaccagagtacttcaaagaaggtgttatttttcaaatggtgctaaaatgacacatctcctctgcaaatgcataaaacaccagagcagcttttagatataaaaatctgctaaaacacattttgagaaacctgagcctaacaaggaatatgtatattgaacctgagcaggcttaccttataaaaccaggagccaggtgttacattataactctgtgactccaagggtagaca

SEQ ID NO: 348155 - DNA, 534 bp, Homo sapiens
tactagttagcacttgacattctactgtagaattcccctttctcctatttattatttgtttgtttatttttatggcatgaactcgtggattcacacctttttttttttttttttttttttgaaactaagtcttgcttttgttacccaggctggagtgcaatggcacaatctcggctcaccacaacctccacctcccaggttcaaacgattctcctgtctaaacctccgggtagctgggattacaggcatgccccaccatgcctggctaattttgtacttttaataaaaagagggtttctccatgttggtcaggctggtctccatctcccaacctcaggtgatccacrtgcctcggccttccatttttgttttatgatactttaagttctggggtacgtgtgcaaaacgtgcagttttgttacataggtatacacatgccatggtggtttgctgcacccatcaacccatcatctacattaagtatttctcctaatgctatctctaccctagccccgaaccccctgacaggcccca

SEQ ID NO: 348156 - DNA, 555 bp, Homo sapiens
taatataatttgggcccgaagtataagagcacatagttaggggaagtaatttgagagctcacagggggagcaatttgcagtcagtgttctaaatgtagaaatagaagtatgtaaaaggtaccaaaaatattttgatggaagaggatttaaggaaagtttcgaagagaacataggtttgcctggttgacaaggtatagggcaaagcaaaatgaacaaaatgtgtaaaagtaaatatacatgacattaaattaacttttttaatgcaacatgcttaataaaaatcaaatcctcaacaaacaagaatayagaatcaacaacatttcacctggaaattattctgctctttgtgctgagggtttaaaacgaccagtttcaactcaagcctaataatttgttttgcacatttcataattgatccattttgctctgaactaaacacattcatattaaaacagacgtctagcaatgctaataaccaaagtgagaaccgctttataaatgtaatcctgtccaaataacagcacaacttttgaaaattttgtaaataaatgtcag

SEQ ID NO: 348157 - DNA, 621 bp, Homo sapiens
attgcggtgttcttcctatctattttgagaccattttctactaaggaagagactgaattatgcaggcattgaaaattccctgtgatatacagcacgacaataagtgtgctccagcctgctggctgctgctgctgttgcctgaggaagtarctgctattaaggtcctgattttaagcagtgttttatatctttgaattatccaagtaagtgaaactgaatcaagcctgaggtacagcagtgatttgaattctggtgtgtaaacactcatgtgcacaggctatctattgatcctctcgccccaacaaatcaaaaaaataaaaatctttacacaccaaaatattgaaactcttgtgtaaccatgttgtgtgtttgtcttcaaaataaaatgtgtgtgcaccatgcgagaaatttgcctgcgaccaaaaatgtgaaaatcattacataaatgtgaagctctctaaaaccaccagcacttttaaaagctcattttatcacatttaattttcatgtgtactaaacctacttcatgtgtgtttcatgtgtaagagtatgtttttatttgctactgaaaatctaactggcaaatagtgatgcctttgcgtaatccatgcgttatagagt

SEQ ID NO: 348158 - DNA, 309 bp, Homo sapiens
ctacatactgatttaaaagctgggtgagttaggacatgtacatgattgggaggtaagatttcatggtcacaaaggtatttttgactttaattttctatctgccaggtagtagggctagactttctcaaaatttgtgttctaaggaacacaaattctaaggactatgaaaggtggatacaataaagttttcttatcartaatgactggcaaacactggttgaaacagatcacttcaggacttctcatcctttgttatgcccttttgcactgtaaatccataagagtcaagggggatatattgtattgcat

SEQ ID NO: 348159 - DNA, 414 bp, Homo sapiens
aagataagttaggaggtaacaactcacgaactgagatgatgattgtctcaattatttgcaaatagaatgttttcttcccattcccttcccttgtacatagaccacctcctccgtttcctaaccttagaaaaacattttcttaccttcagaaatatggtaaattattttaatttatttttattaatttaatttatccacgtattattttatttttaagtaaaattacatagcattaaaggattgaaatgatatatgatctctgtcattaagggtatcttatacttttcaatgagcatgyttcatatgataatacgtcatgtatataattttcatttcctacagtcaaaaataaagtttagaatttgctaatcttgtctgtgtaacagcaaaaaacaatgggaataaatagccgtt

SEQ ID NO: 348160 - DNA, 621 bp, Homo sapiens
attgcggtgttcttcctatctattttgagaccattttctactaaggaagagactgaattatgcaggcattgaaaattccctgtgatatacagcacgacaataagtgtgctccagcctgctggctgctgctgctgttgcctgaggaagtaactgctattaaggtcctgattttaagcagtgttttatatctttgaattatccaagtaagtgaaactgaatcaagcctgaggtacagcagtgatttgaattctggtgtgtaaacactcatgtgcacaggctatctattgatcctctcgccccaacaaatcaaaaaaataaaaatctttacacaccaaaatattgaaactcttgtgtaaccatgttgtgtgtttgtcttcaaaataaaatgtgtgtgcaccatgcgagaaatttgcctgcgaccaaaaatgtgaaaatcattacataaatgtgaagctctctaaaaccaccagcacttttaaaagctcattttatcacatttaattttcatgtrtactaaacctacttcatgtgtgtttcatgtgtaagagtatgtttttatttgctactgaaaatctaactggcaaatagtgatgcctttgcgtaatccatgcgttatagagt

SEQ ID NO: 348161 - DNA, 274 bp, Homo sapiens
ttctactatttttatcagctactcttcaaaagcaatctgaaaacagggtcacagggctgtcttggaattgctaatcatggagttacttgtgaataggctagtatttgtcagagatgcaaagtgagaggaagaggtgacttgacggtaaacagcattagatcagttagttgtttcacatactaataatacaaggatgagtctggcagaattcaaattttgctgaatacattgaggtacaacttctgttcstgattttttgttttcttcctccctc

SEQ ID NO: 348162 - DNA, 621 bp, Homo sapiens
attgcggtgttcttcctatctattttgagaccattttctactaaggaagagactgaattatgcaggcattgaaaattccctgtgatatacagcacgacaataagtgtgctccagcctgctggctgctgctgctgttgcctgaggaagtaactgctattaaggtcctgattttaagcagtgttttatatctttgaattatccaagtaagtgaaactgaatcaagcctgaggtacagcagtgatttgaattctggtgtgtaaacactcatgtgcacaggctatctattgatcctctcgccccaacaaatcaaaaaaataaaaatctttacacaccaaaatattgaaactcttgtgtaaccatgttgtgtgtttgtcttcaaaataaaatgtgtgtgcaccatgcgagaaatttgcctgcgaccaaaaatgtgaaaatcattacataaatgtgaagctctctaaaaccaccagcacttttaaaagctcattttatcacatttaattttcatgtgtactaaacctacttcatgtgtgtttcatgtgtaagagtatgtttttatttgctactgaaaatctaactggcaaatwgtgatgcctttgcgtaatccatgcgttatagagt

SEQ ID NO: 348163 - DNA, 563 bp, Homo sapiens
gggtcatatattctctgtcacaactaatccattttagtgtgaaggcagccatagacaatagataagtgagtaggtatggctgagttcccataaaactttattaacaaaaataggtggctatcctgtaggctgtagtttgcagacctctgttctagaacagtgctgtctagtagaaatataatgcatgccacatatatagtaaaaagaaatagataaaattaattttagtaatatattttacttaacacagtatatccaaagtgtcaccaatatgtaatcaatataaaattattaatgagatactttgcgttcttattctcatactaggtcttccaaatccagtgtgtaytttatgcctttatcacatctcaattcagattagccgcatttcagtagccacatgtagctagtgactaccttattggacagcacagccctagcctctctctagtaaagcttaaaaacggatcttgaagattagcacttaacttcactgcctagcaaaagaaagtccaatactatttaaaggaagacaacataatgcagacacttaataatgtaat

SEQ ID NO: 348164 - DNA, 592 bp, Homo sapiens
gttgggtatggtggctcacgcggatgatcccagcaatttgggaagttagagtgggaggattgcttgagctcagacgttcaagaccagtctgggcaactaagtgatactccatctctaccaaagataatttaaaaattagttgggtgtggtggtgcatgcctgtggtcccagctacttgggaggctaaggtgggaggatcatgaggttgaggttgtagtgagctgtgattgtgccactgcgctccagcccgagtgacagagtgagaccctgtctctaaataaaataaaataaaataaaaataaacaaaaacacaataataatcagaaaacaatgaaagataaaaaagaaccatgatgaaaaaaatacaacatctgaaatgaaaatttcactagatgggattaatagattaggcaatggattagtgaacctacaaatacagcaaygttacctatgcaagatgaatcacagagagaaataaaaaactgaaaaaaaaatagtgaacagagacccagtgatctgtgggataatatcaagcagtctatcatacatggagaaaaggataagggacagaaaaagtatttgaagaaataat

SEQ ID NO: 348165 - DNA, 447 bp, Homo sapiens
ggagataatggaatcatgggggtggtattccccatcctcttctcgtgatagtgagttctcataagatctgatggttttataagagtcttcctccttcactgggcactcattctctatcctgccaccttgtgaagaggtgccttctgcagtgattttaagtttcccgaggcctccacaacaatgtggaaccaagagtcarttaaacctcttgcctttataaattacccagtcttaggtatgtctttattagcagtgtgagaatggactaatacactgactctaaaaaactgctcaggtggtcttttaagatgctttctccaaatggcaatttcaagggtgataaataagatgcttccttgcattgcatgaatgcaaaaagttcaaatcccccaactggagtacaagaagctggggttgccaccctcttctgggtgtggtgtcttctct

SEQ ID NO: 348166 - DNA, 447 bp, Homo sapiens
ggagataatggaatcatgggggtggtattccccatcctcttctcgtgatagtgagttctcataagatctgatggttttataagagtcttcctccttcactgggcactcattctctatcctgccaccttgtgaagaggtgccttctgcagtgattttaagtttcccgaggcctccacaacaatgtggaaccaagagtcaattaaacctcttgcctttataaattacccagtcttaggtatgtctttattagcagtgtgagaatggactaatacactgactctaaaaaactgctcaggtggtcttttaagatgctttctccaaatggcaatttcaagggtgataaataagatgcttccttgcattgcatgaatgcaaaaagttcaaatcccccaactggagtacaagaagctggggttgccmccctcttctgggtgtggtgtcttctct

SEQ ID NO: 348167 - DNA, 504 bp, Homo sapiens
atagctataataaaaaagaaaaacaattacaagtattggtgaggatgcagagaaattggaattttcatactctgctgttgggaatgtaaaatggtgcacactggaaaactgtcagtttctcaaaaggttaagcatagagttacatatgatcctgcaattccacttctggatatatatacccaagagaattgaaaacatatgtgcacacaaaagcttgtgcatgtgttttcatgcttgtgtatgaaaacttgcatgcagcattattcatgtgagctaaaatgtagaaacaaaaaaataaagcatgcagcactattcatattagacaaaatgtagaaacaaaaygaatgtccatctaccaatgagcagataaataaaatgtggtgtatctctacattggaatattatgtagccataaaaaggaatgcagtattggtacatactatgacatgaatgtttcttaaaaacatgctaagtgaaaggagccaggcacagaggactacatat

SEQ ID NO: 348168 - DNA, 454 bp, Homo sapiens
ttgcttgtctcttattttttcactgaaaactgtgcactttacaaaacactatatagcaactctggagactgatctccccttctttagagtttgttgttgttttcttgtttatttgtttagttacttggctagactatttcagtaaagagtataaagcktctgatattcttcagagcccaaggacatgagtatgtacacagtcttctgcccttcaaggtttgactgggttaagccatgctgtctttaaatatcattttccttgagttccccattaagcttcttgatggcctagcctttactaatttctaaatgatgcctccactgtatattattttttacaatccctgagaatgtgttgctcctggttctaattgattgtagttaggccctttggcaaagaccactatttgaaatttggccaggccctccatggggagaacttctgttcatggaa

SEQ ID NO: 348169 - DNA, 548 bp, Homo sapiens
aaagcctaatccagagtaaggtcttaactcttttaaattctataatgtctgagagtggtgaagaaactgcagaagaaaaacttgaagcaatagaaattgtttcaagaggtttaaggaaagaagtcatcattataccataaaaatacaaagtgaagcagcaagaactgatgtcaaggcttcaaggctgtagcaagttacctggaaaatctagctaagataattgatgaagataactrcaccaaacaacagatgtccaatgtagatgaaacaaccttatgttgaaaggagatgccatgtaagactttcatagctagagagaagaactcaatgcctggcttcaaagcttcaaaggaaaggctggctctctgtattagtccattttcatactgctaataaagacatatgtgagactgggtaatttataaagaaaaagtggttgaatgaatggattcacagttccacgtagctggggaggccacagtcatggtgtaagttgaaggaggagcaaaggcacatcttacatggcagcaggcaacagactgtgtgca

SEQ ID NO: 348170 - DNA, 591 bp, Homo sapiens
ttcacatcatcaccaacacttgttatcttttggctttttaataatagacattctgttttttgtgatttgttcccccaaaactatttttttgtactttgtcactaatttacaattttgattcctttttaatgtgtgaagaatttttaatcgtttctgagcagagtgagataactatgtgaaatggaaactttaatgctgaaatgaggcctcatgggacttttgggtgctaaagatttaacatacaatggtctttattaaaaggctagctacatgaaaagtaggataarattaataattaatcacacataaaaattctatttttggctgtattttacttaaaaagtcaagttctgaagattcaattaaattgtcctatgtttaactttaatatttaaaatgttctaactgtttaatgatagtgatcttttgacatcaagacagtcaagtacttttcctgggagctgttttaaagaggagcaaaccaacttttcagaagagtaaagaatctgactagtagagaagggctctctgcctgggtgaaaccatgctaattagtaatacttcacctgggtgcaactgtgctaattagct

SEQ ID NO: 348171 - DNA, 602 bp, Homo sapiens
ggtagtgataatgatagtaatgatggataataattttgaactagtttccagacactttgctaagtgctttacgtgaactatctctttcaatgcaacaacaatttgaagtagagcaatgtattaatttttgatagatcacatagatctgggatctaattcatattttagaatagttgagttttcagcctccaataagaaatcagatctgggtttattaatgttactttattagagagatctctgtwactttcacagcttatcttttgacacatggtaggcacaggctaatctacctgtggccaatgtaatatgactgcattctgtttatcatttttgagtgggtaagtttaagagccagtgtgtgggctacttaattacctttaatttccatgctgacagccagttttcctgatggtggaggctctagtaactccagaagtgagaagacgtggatcaaaacccttaatgtgatgaatacatttcttggaagctactaagttgttggggattcttttatataggaagcagggggttaattgtatgcttattcattaattcaacaaactttttttagtacctccccagtattaataactgctcta

SEQ ID NO: 348172 - DNA, 545 bp, Homo sapiens
aatgaactagacaggcaatcagctaccagctttggcctaccataaaccaaggagaaaagtaaaaataacgttaatcattgctaaggctattgtgaataagtaaacaagcaaacatactaacaaaattaggcyaggtgtggtggctcacagatattatctcagcacttgcactttgagagtctgaggcagaaagatcgttttagcccaggagtttaagatcagctgggccaaataaggagaccctgtctcttcaaaacaaaacaaaacaacaaacgaaacaaccaaacaaagaacttagctgggcgcagtaaagcactcctgtggtctcagcttctcggaaggcagaggtgaaagcattgcctgagcccaagagatcaaggctgcagcgagccatgattacaccactgcgctcagccggagtgacagagcgagacgctgtctcaaaaaaataaaataaaatagcattttaaaaaatctctaaatgtataaagtatatcaattgcagatgagtctttgcagaatgaacatgattatcatcattaatt

SEQ ID NO: 348173 - DNA, 545 bp, Homo sapiens
aatgaactagacaggcaatcagctaccagctttggcctaccataaaccaaggagaaaagtaaaaataacgttaatcattgctaaggctattgtgaataagtaaacaagcaaacatactaacaaaattaggccaggtgtggtggctcacagatattatctcagcacttgcactttgagagtctgaggcagaaagatcgttttagcccaggagtttaagatcagctgggccaaataaggagaccctgtctcttcaaaacaaaacaaaacaacaaacgaaacaaccaaacaaagaacttagctgggcgcagtaaagcactcctgtggtctcagcttctcggaaggcagaggtgaaagcattgcctgagcccaagagatmaaggctgcagcgagccatgattacaccactgcgctcagccggagtgacagagcgagacgctgtctcaaaaaaataaaataaaatagcattttaaaaaatctctaaatgtataaagtatatcaattgcagatgagtctttgcagaatgaacatgattatcatcattaatt

SEQ ID NO: 348174 - DNA, 549 bp, Homo sapiens
tttattatggtctctgtatagtcaaacctctccgccaatgctaatctgtatttgcagccaccccccagcatgagcatcaccacctccgctccacctcagatcatcaagcagaagattctcataaggagtgggcaacctagatccctcatatgagaagtacacagtagggtttgtactcctatgagaatctaatgccactgctgatctgaaaggaggyggagctcagatggcaatgcagccaatgggaagtagctgtaaatacagatgaagcttcccttaatggcccattgcttacctcctggtgtgcgccctggtttctaacacgccatggattggtacaactttatggcccaagggttggacacccctgctataactaagaattactcatccatacttcaatagtgaactgaggcagagcagtcagtggctagttagattaaaggcatctctcagagagaaggcccagaagatgaaatatagccactgttctccttgatgatagaactgtgacccctatctcatgcctaccaacccaagccttcattt

SEQ ID NO: 348175 - DNA, 615 bp, Homo sapiens
tccttcttgctcatggagatacgtttttatctcattaaagagttttactgattagatctggcccactcatattatgaagagtgattttcttaatatctaccaatttaaatgtaaatctcatccaaaaaacaccttcacagaaacattcacaataagatttgaccaaatatctgagcactgtggcccagccaagttgacacacaaaattagccatcccaaagaacaagaaagaatatgtgtgggactcaggtgatttattttgtgcctctctttcttgtcatattttggtatagaatttccaacccatcaccacaatttgtgatggttagttacccatcttgatttagaaacaaaaacaccttgtgagaaaaaaacaattttaaaaatctgcacagtcacaagatttgttaaatgtataaaactaagaaatcagaaaacttytttatttatacttacttctaacgacactgaggataaaaattcagtgtttcagcaatgtgacagtcaggtgacagttttataggttaaaaatttccaaaagtaaagtatattatttgcaatgtaattattttcaggatgaaagagtggtgatgggctccatttagtctattacga

SEQ ID NO: 348176 - DNA, 297 bp, Homo sapiens
ataaaaaagccaaagtgataattaggtcagaagatagcattatactaagattggttttattattttattacttttgtattctcttcaggacaaagaggaaatttccaatatttacctcacaggcattcaggtatactatttcgtggcctttagcaaagttacctgttctatttatgctgctgagatgcctagctataaaacagaccataaatattcaaawttttcagtgaccaacctttttcctgatggggacaaatttcattttttaaaattttattcaattcattataaaaaaaa

SEQ ID NO: 348177 - DNA, 592 bp, Homo sapiens
gataatgattcagcaaaaaaagggaaaaaatggttcaggagagagatgggaaaattgcctgaaaaatatccctgaggaggaaagtacagatggggcataatgttcaagtgtgggttttgggctttacaaagagcacaaagaaggaactgggggtgtgttttcatcttaattgctctttcaggagcactcttcttaaaatacccttattgaaataatatcttccaatgcttttctttttctaaatttcattttacctactttgaaatgaacagatataatataggttgtgacaaatgaatacatacatakaaagcacctttattaaaatatagacatagctccctttcgtcttagttcccagtcaataacctcccactcaccaaactcctaaaagcaacttctatttcactttctttttaccatgtaatagttttgccagtgtcagaagtgtatataaaaagaaacataaagtatgtactcttctcctgtaacttcttttgctcagcttaatgccttgagattcataaatattattgcatgaatgagtaatatgacctttttatttttgtttatctatacctgatgatggaca

SEQ ID NO: 348178 - DNA, 592 bp, Homo sapiens
gataatgattcagcaaaaaaagggaaaaaatggttcaggagagagatgggaaaattgcctgaaaaatatccctgaggaggaaagtacagatggggcataatgttcaagtgtgggttttgggctttacaaagagcacaaagaaggaactgggggtgtgttttcatcttaattgctctttcaggagcactcttcttaaaatacccttattgaaataatatcttccaatgcttttctttttctaaatttcattttacctactttgaaatgaacagatataatataggttgtgacaaatgaatacatacatagaaagcacctttattaaaatatagacatagctccctttcgtcttagttcccagtcaataacctcccactcaccaaactcctaaaagcaacttctatttcactttctttttaccatgtaatagttttgccagtrtcagaagtgtatataaaaagaaacataaagtatgtactcttctcctgtaacttcttttgctcagcttaatgccttgagattcataaatattattgcatgaatgagtaatatgacctttttatttttgtttatctatacctgatgatggaca

SEQ ID NO: 348179 - DNA, 570 bp, Homo sapiens
aaagtattcttctacaattctgactgagaatatgggtaggggagtctctggagttgttgagggtgcaggagctggagccacttcctgctatcaagccatgacagcaggcaggcagatacatttgggagagctgcagcccggtggttgttgcttttctttttgtttttcttcttatgaaggaaggcttcagggacagtgctgaaaaacacaaagatgctctacgcctctctatcctctcacctccttgggtctgasattccagggcatttgtgaggttggttcctaggaactcagttgtttcactctctcagcctcagagactttgtgagactgctattactcttcttttcaatgaaattaaccttaaacccaaacatcattaactccagaaaacttttccttcacctgccggacaccaacaagacttgttctgtacctctaaccaccaccatttttcctcttttaacacacagttcatctcactgtttttgttttataaaaataatgtctcaatttcctctgtctcaggattatgttaggtttgttttccactttgtttccaaacctaaa

SEQ ID NO: 348180 - DNA, 583 bp, Homo sapiens
gtgtgagccacaattcctggccaatttttaaaattatgtataaaaacttgtacttccacatagattgaaatatataatttttaaatgtcttaagaagttcattcctaccccttctcagtcaaatatcttttgatatctagcaacagagatttatattgtatggtttagaagttaatgtaatgaactcatgcagcaggtacctttttgtctctctcttcagtttactcaactttatgtcaataagwttactcatgtccttgtgtagttgcactttttattgttgcatagttttcatgctgctgataaagacatacctgagactgggcaatttacaaaagaaagagttttaatggacctctttatgttccatatgggtgatgaggcctcacaatcgtagcagaaggcaaggaggagcaagtcatgtcttatatagatggcagcaggcagagagagagcttgtgcagggaaactcccatttttaaaatcatcagatcttgtgagattcattcactatcatgagaacaacacagtaaaaactgtccctataattcaatcacctcccatcacattcctcccatgatac

SEQ ID NO: 348181 - DNA, 566 bp, Homo sapiens
ttcactctgctgataaagacatacccaagactgggaaatttacaaaagaaagaggtttaatggatttacagttccacatggctggagaggcctcacaatcatggcagaaggcagagcaagtcatgtcttacatggatggcagcaggaagagagagagcttgtgcaaggaaactgccatttttcaaaccatcagatctcatgggactcattcactataactagaatagtgcacaaaagacccgcccccataaatcaatcacctggcaccaggttcctccaatgacaattgggaatcatgggagttacaattcargatgagatttgggttgggacacagccaaaccatattaggtacatagccaggttcccagtgtttaaaaggattatgttagtagatatctgccaaacatttttcaaattgtatctaacattcacccttccactaccaatatacatattttgcagttgttccatttccttacttaatattatttcatttctttaaatgtttttgtactgatcaatgtgtagtggtattcactgtagttttgattaacgttccccca

SEQ ID NO: 348182 - DNA, 560 bp, Homo sapiens
caaaccatattaggtacatagccaggttcccagtgtttaaaaggattatgttagtagatatctgccaaacatttttcaaattgtatctaacattcacccttccactaccaatatacatattttgcagttgttccatttccttacttaatattatttcatttctttaaatgtttttgtactgatcaatgtgtagtggtattcaytgtagttttgattaacgttcccccagtatttaattgtgttgagaactttttcatatacttcttgaccatttgcatattttccttggtatgttcaagtattttgctcatcctcttattaatgaatataaattctttctagccaatggatataatttctttattggatacacatattacaaatattttctcccaataaataatttgccttctttcttaatttttttattaagtcattcttaattttaattttactgtataattcatttttatggtcagcactatttttgtactgtttaagaaaactttgattaccctaatgtcatgaaaatgctcttatttacatacacacagtcagca

SEQ ID NO: 348183 - DNA, 590 bp, Homo sapiens
ttatgttatatataaccacaaatttaccactttgaagcagtttatttatttattattttatttatgagacagaatctctctctgttgcccaggctggagtacagtgatgtgatcttggctcactgcaacctccacctcatgggtccaagtgattctttgcctcagcctcccaagtagctgggaccacaggcacgtactaccatgcccgactaatttttgtatttttagtatagacagggtttcaccatgttctccaggcyggtctgaaactcctgacctcaggcgatccacccacctcagcctctcaaagtgctgggattacaggtgtgagccaccatgcccagctgaagtagttcatttctttctgcatattgacatttgatattttttggtgtccccgccaaatctcatcttgaattcccaagttgtgggagggaccctgtaggggataattcaatcctgggagtggtttcccctatatagttctcgtggtagtgaataagtctcacaagatttgatgatttgataaggggaaacctgtttcacttggctcttattctttctctttgcctgctgccatccatgtaaaa

SEQ ID NO: 348184 - DNA, 571 bp, Homo sapiens
gctgttagaagagttactttattaggtgtttttcagctttgatttgcctttttcccttgacactcatcaaatatgtatttatttttatattttttactattcatgtttggattgtttagtatttcttgcatatatagattcctatcttcagttttgaaatattcttactcattatgtatgtcttcaaatattattctttctcattctgtctttcatacctgttaatctaccatagtctatattactacagcttttttttttttttaagacagagtcttgctctattgcctaggctgragttcaatggcacaatcttggctcactgcaacctccgcctccccgattcaagagattctcctgcctcagcttcccaagtagctgggattacaggtgtgcagcaccacacccagctaatttttgtatttttttaggaaagatggggtttcaccatgctggccaggtggctgttctcgaactcctgacctcagacgatgtgcctgcctcggtcttccaaagttttgatattacaggcgtaagccactgtgcccagcctgactatggctatttttaa

SEQ ID NO: 348185 - DNA, 571 bp, Homo sapiens
gctgttagaagagttactttattaggtgtttttcagctttgatttgcctttttcccttgacactcatcaaatatgtatttatttttatattttttactattcatgtttggattgtttagtatttcttgcatatatagattcctatcttcagttttgaaatattcttactcattatgtatgtcttcaaatattattctttctcattctgtctttcatacctgttaatctaccatagtctatattactacagcttttttttttttttaagacagagtcttgctctattgcctaggctggagttcaatggcacaatcttggctcactgcaacctccgcctccccgattcaagagattctcctgcctcagcttcccaagtagctgggattacaggtgtgcagcaccacacccagctaatttttgtatttttttaggaaagatggggtttcaccatgctggccaggtggctgttctcgaactcctgacctcagacgatgtgcctgcctcrgtcttccaaagttttgatattacaggcgtaagccactgtgcccagcctgactatggctatttttaa

SEQ ID NO: 348186 - DNA, 568 bp, Homo sapiens
ttttaatgttcatatccaatcatgatatatttatatataaatttggtattatcacagggaaaaatgactcttcatattaccgaaaatcttgaataaaaatttttataaaggatattattcctataatactatcataacaatactacattaactttccatctgcaaatatttgtctcagtactttgcttatgttttcaatgtcatttgccaggcactttaattacattatttggggttttttwattattagtattggtccctctctatcagtgagtcatgtactgtatttgtcttttttatctcggtagctactatgcttggtacaatatgtgcatattttagttgctccataaatagttgttaagctagtacatatatttcttatccttattgttaaatttgcaggcattcatgggttcacttttatagcttcaaaaatagattaaattgtagttcagtggagtaataaagcttaaacagtaaaatggagaagtgaaatttcaaacatggtgaacatgcatgcattttaattttgaataaactattgtagatgtagggataactcatt

SEQ ID NO: 348187 - DNA, 568 bp, Homo sapiens
ttttaatgttcatatccaatcatgatatatttatatataaatttggtattatcacagggaaaaatgactcttcatattaccgaaaatcttgaataaaaatttttataaaggatattattcctataatactatcataacaatactacattaactttccatctgcaaatatttgtctcagtactttgcttatgttttcaatgtcatttgccaggcactttaattacattatttggggtttttttattattartattggtccctctctatcagtgagtcatgtactgtatttgtcttttttatctcggtagctactatgcttggtacaatatgtgcatattttagttgctccataaatagttgttaagctagtacatatatttcttatccttattgttaaatttgcaggcattcatgggttcacttttatagcttcaaaaatagattaaattgtagttcagtggagtaataaagcttaaacagtaaaatggagaagtgaaatttcaaacatggtgaacatgcatgcattttaattttgaataaactattgtagatgtagggataactcatt

SEQ ID NO: 348188 - DNA, 568 bp, Homo sapiens
ttttaatgttcatatccaatcatgatatatttatatataaatttggtattatcacagggaaaaatgactcttcatattaccgaaaatcttgaataaaaatttttataaaggatattattcctataatactatcataacaatactacattaactttccatctgcaaatatttgtctcagtactttgcttatgttttcaatgtcatttgccaggcactttaattacattatttggggtttttttattattagtattggtccctctctatcagtgagtcatgtactgtatttgtcttttttatctcggtagctactatgcttggtacaatatgtgcatattttagttgctccataaatagttgttaagctagtacatatatttcttatccttattgttaaatttgcaggcattcatgggttcacttttatagcttcaaaaatagattaaattgtagttcagtggagtaataaagcttaaacagtaaaatggagaagtgaaatttcaarcatggtgaacatgcatgcattttaattttgaataaactattgtagatgtagggataactcatt

SEQ ID NO: 348189 - DNA, 568 bp, Homo sapiens
ttttaatgttcatatccaatcatgatatatttatatataaatttggtattatcacagggaaaaatgactcttcatattaccgaaaatcttgaataaaaatttttataaaggatattattcctataatactatcataacaatactacattaactttccatctgcaaatatttgtctcagtactttgcttatgttttcaatgtcatttgccaggcactttaattacattatttggggtttttttattattagtattggtccctctctatcagtgagtcatgtactgtatttgtcttttttatctcggtagctactatgcttggtacaatatgtgcatattttagttgctccataaatagttgttaagctagtacatatatttcttatccttattgttaaatttgcaggcattcatgggttcacttttatagcttcaaaaatagattaaattgtagttcagtggagtaataaagcttaaacagtaaaatggagaagtgaaatttcaaacatggtgaacatgcatgyattttaattttgaataaactattgtagatgtagggataactcatt

SEQ ID NO: 348190 - DNA, 585 bp, Homo sapiens
aaaaaagtttttttttttatctctaaaagctcagacaatgcctgcaaagaagagcccgtactttaatccttgcacataaattagtttaatgcatcaygataatctagatatgcctatactcatcaacagaaagatatatgttcatgtctcagaaaaatagaaggaaatttagaaaggaaagagaaataaacaaatttgtttcaaagtttagaatccaaagctcagcttatgtttcattttctctgacatccaggattccttttcccttcctccctcaattagtgaatagacatgcaaaaaagtgtgaaatcaggagtgcattaaatttgtattgagaaaacccagacatttaggccaactgtaatttcaaatccatatcctttttattaaaaatttttgtggttgttctctttaatgaaatctctatcctctgatcagttgtgtggcatgtagaacaaaacaaggagtgctttccaaactttaccctcctatattagcttctcatttatagtagctattccaccttcttaagtcagcaccaagtcagttgtttttaagatgattttcacgttacgtatttttttt

SEQ ID NO: 348191 - DNA, 576 bp, Homo sapiens
cacttacatgcattcagcaaataacgttagcattctgttctcattttcttggttataaagtgagaatatcaaaccttgctttcagtgttataagaattaattatttaatgtttataaagttctttccagctctaaagtataaaattcatagaagaagttcttatactcagaatagatggtctcataaatgcaaatcatagttagaatgtaaaaatcagtattagaaatggaagcaaggagaagatgacatagtgcatgatacatattgcaattatttattagaggtgtgagtttatatgttttattgttttttatttccagctatgctgaataacacaaatttaagggataggtcaagatggtctgatacagtaaagatgagtacttctgtgaatctraaaccattcaatgaaaaccaaattaaatcaatagagtcacatagtataactttgcagtggacagctatgcaagttgggagctgtaaaagcaaggcagtggggaaaagtcttacctggatcaggctttgattattagactctgtaaactatcatcagaggatgactgctgttggtattt

SEQ ID NO: 348192 - DNA, 586 bp, Homo sapiens
ccaaaaattggcaagctgatgaaagtgttaatctttctccttaaacctttttattggtaaagtagggtttttttatcacaatgaacttttgggattgtaatttyaagaacaatcagtaacatgaagcctgtagtacgaatgtcattgctcttttagaaatgattgataggaagggatgcttttaaaaccctaagctgtccagttttggtctatgacaaataccatcaacataattatatctggaataagaatatgaaatccctcccaaatgcttaaggtctgtgctaagtcaaactctagaatacatattagcattttgtgtttctgaatagcgaaaatttattgaagtaaaaatgatgaacaaaaacaataatggcaatttttttagtcaaatttaatttaaaaggcttctgatcaaacatacaactttgagcaacaaattatttcccacttggtaactttgtcaaatgtcttactttgtgtttagcagctgcaacataaaagtgtctatgttgccaataaaactaagaaggggtagttacactacataaaccaatgtaaatagggtattgtactgtttcaagaa

SEQ ID NO: 348193 - DNA, 586 bp, Homo sapiens
ccaaaaattggcaagctgatgaaagtgttaatctttctccttaaacctttttattggtaaagtagggtttttttatcacaatgaacttttgggattgtaatttcaagaacaatcagtaacatgaagcctgtagtacgaatgtcattgctcttttagaaatgattgataggaagggatgcttttaaaaccctaagctgtccagttttggtctatgacaaataccatcaacataattatatctggaataagaatatgaaatccctcccaaatgcttaaggtctgtgctaagtcaaactctagaatacatattagcattttgtgtttctgaatagcgaaaatttattgaagtaaaaatgatgaacaaaaacaataatggcaattttttwagtcaaatttaatttaaaaggcttctgatcaaacatacaactttgagcaacaaattatttcccacttggtaactttgtcaaatgtcttactttgtgtttagcagctgcaacataaaagtgtctatgttgccaataaaactaagaaggggtagttacactacataaaccaatgtaaatagggtattgtactgtttcaagaa

SEQ ID NO: 348194 - DNA, 564 bp, Homo sapiens
acattcatttgaagggcttatggctgtgtgattctctttcagcactccccacagagaagccctgggtagcagcttatcttccctgtccttgagagcagcatccagtcaagttggttcaaaagaaaactactcacatgcctattgtgctgttgaattgcatagaattggatccttaaacaatgttagttgattgccttttgatgaatttgtctaagttcctcacatttttttgtctcctcatataactggaaatatacatatattttgttgcatatatatatataatatatatataaattatatatawtatatatatatataaaaccaaagatcttaaagaattgttgtttttttaaaaaaaaaatcttaaaaattagtaaggtagcaaaaagaaaaccgaagattctgagacacacaaacaaacaaacaaacaacaatgcagctagtccattgttctattccccatgtctgaaagtgatctatctacaggaaaattactctggtcatcatttcagtaaatgagaaaggagccatgggaaagaggatttactccactgtgttgcc

SEQ ID NO: 348195 - DNA, 564 bp, Homo sapiens
acattcatttgaagggcttatggctgtgtgattctctttcagcactccccacagagaagccctgggtagcagcttatcttccctgtccttgagagcagcatccagtcaagttggttcaaaagaaaactactcacatgcctattgtgctgttgaattgcatagaattggatccttaaacaatgttagttgattgccttttgatgaatttgtctaagttcctcacatttttttgtctcctcatataactggaaatatacatatattttgttgcatatatatatataatatatatataaattatatataawatatatatatataaaaccaaagatcttaaagaattgttgtttttttaaaaaaaaaatcttaaaaattagtaaggtagcaaaaagaaaaccgaagattctgagacacacaaacaaacaaacaaacaacaatgcagctagtccattgttctattccccatgtctgaaagtgatctatctacaggaaaattactctggtcatcatttcagtaaatgagaaaggagccatgggaaagaggatttactccactgtgttgcc

SEQ ID NO: 348196 - DNA, 508 bp, Homo sapiens
aaattctaatgtgggtgaatttcaaaattctaaactttgtctgtagctacactttagtgtggtatagttgttaataaagttttagtagaaaaataaattatttttctaaaaattatattatttttatactctcatgaccacaagccctatgttgattgtttaaaaaaaaagaaacaaggatagcagtatcttagcaaacagactcaatcacacttttacttacctgttttaaagccaaataattggctattaaaatgtttgttttcccacttggaataaacagaaacttgcctcattagtaagtggtttcttaytcgttttggtagagacttgagtgctttggaaaattcaacataataaaattgagggtctattaataatggcagtgacagcccatgtaaagcagcccctgtgaagaagccagctgcagcaggggaggtgtggccagggttgcccgctccacaggtccagcgggagccaggaacaggtgggagccctgccccctacc

SEQ ID NO: 348197 - DNA, 606 bp, Homo sapiens
ggagaggagaccctcagtggctagctcctttctgcagstggtattcctgaggtctctgtgagtctggctgagtatagggtatttaataggattcagaagggaagaagtgcatgctgattggtccatgggcagctgtgggtgggcccagaaaaagcaccgtaagttctcactctgagccactgacttcacctggaattgacacccagcccccatgcttcaggccatccctggcttgaagatggggcttcactggggacctgcccatttccacccaagagcttgtctgcctccttttgccattgctcatgttgtccatggtgctcaggttgtttgggcagaggggcgcctacaagcccggccaagccgccctcaatgccccctcagcctccctctcccatgctcattggtgcccaaagtctggagggggccaaggcagcagggggctggcatgtcagcgcctccttgagctcccacacacctggccgggtcacaacggtgcctgggcttggcctcaactttgctccaaaatctgaatgagcacctagagcacggggaggccaggcagtgagagcaggcacttctgagcctgtgggaatagaaggcctc

SEQ ID NO: 348198 - DNA, 606 bp, Homo sapiens
ggagaggagaccctcagtggctagctcctttctgcagctggtattcctgaggtctctgtgagtctggctgagtatagggtatttaataggattcagaagggaagaagtgcatgctgattggtccatgggcagctgtgggtgggcccagaaaaagcaccgtaagttctcactctgagccactgacttcacctggaattgacacccagcccccatgcttcaggccatccctggsttgaagatggggcttcactggggacctgcccatttccacccaagagcttgtctgcctccttttgccattgctcatgttgtccatggtgctcaggttgtttgggcagaggggcgcctacaagcccggccaagccgccctcaatgccccctcagcctccctctcccatgctcattggtgcccaaagtctggagggggccaaggcagcagggggctggcatgtcagcgcctccttgagctcccacacacctggccgggtcacaacggtgcctgggcttggcctcaactttgctccaaaatctgaatgagcacctagagcacggggaggccaggcagtgagagcaggcacttctgagcctgtgggaatagaaggcctc

SEQ ID NO: 348199 - DNA, 560 bp, Homo sapiens
acaatttatttttttttacaattcctgttatttagagtcacaaacttaaatgttcaagcactgttttaaaatatttcattrctctcattttattcaacttacatacattccttgagctggtgagaatattaccgtgatatttactatcactgtacattatattttgtacagttagcaatttttactatttgttaaataaaactgcctttgtttccccaatatttatttccctaattcatcagggagattaaaaaatatattgaagattaaagtttaaagccttcatgtgtattatcttcagaataaaagtttgataatatgtttaagtatagaatgtaaataagcatatttgtttcttatgcagcaaagattataaaataggttaaaagatagcaaggacccttcaagcctctcttgtgcctgttttgtaaaaacaatttatcaaagacaacatgcttttattctcacaactcttcaattttatttacagaccatagatacagaaatgcaattactttgcaaatgtaagagtatctggagacatgtactcttaaccaatg

SEQ ID NO: 348200 - DNA, 482 bp, Homo sapiens
tatttacctgaaaaatctgaccagttttaaaatctagtaatacagttgaaacacagctgtgagaattttacaagtgcagaataaaaacaaattctagataattctgaaaagatggtagtgtaggaagcatcagaaatctatctccccatttagacatcartggcactgacagaatctgactgatgtaactattttgaaatgttggagtccattgaaggcatttaaatttcaggagaaatcttagaggttaaattacagttaatttcagtcaattttagctcttagcacagtagcagctacccatcctttaccccagccatgtaacagatggctaagcatgcattccaggaacagctggcacatagtttgagggagccagaatgggtaaaaatcaacctgtcctccaaatatcagagatctgtgctcttatatctggttgctgcttgatgatcacagaggagtagagagacaagtgaccattg

SEQ ID NO: 348201 - DNA, 482 bp, Homo sapiens
tatttacctgaaaaatctgaccagttttaaaatctagtaatacagttgaaacacagctgtgagaattttacaagtgcagaataaaaacaaattctagataattctgaaaagatggtagtgtaggaagcatcagaaatctatctccccatttagacatcagtggcactgacagaatctgactgatgtaactattttgaaatgttggagtccattgaaggcatttaaatttcaggagaaatcttagaggttaaattacagttaatttcagtcaattttagctcttagcacagtagcagctacccatcctttaccccagccatgtaacagatggctragcatgcattccaggaacagctggcacatagtttgagggagccagaatgggtaaaaatcaacctgtcctccaaatatcagagatctgtgctcttatatctggttgctgcttgatgatcacagaggagtagagagacaagtgaccattg

SEQ ID NO: 348202 - DNA, 567 bp, Homo sapiens
tggaaaggcttaagtttacacctcagggtgattactgacaatcaactaccctacaataatgaaaaagacaataaagaaaatcaataaccataagcagtagcaataggaaacagaaataatctaatttctagagttaccacattattagatgcaatgctcatttttcaacagaaaatcacaagacatacaaagaaagagaaamgtatggactattcaaagaaaaataaataattaccgtaaacggtctctgaaaacacatcatggcaagtcgactagacaaagagtttaaaacaagtatcttaaggatactcaaagaactgaaagaagatatggaggagaagtaaaaagaaaagaaaagaaaagaaattctggaaagttctattgataaaaggtacaataactgaaagaaaaacttactagatggatttaaagacagatttcagctgacagaaaaaaaaatcagagaacttaaagatatgaaaaataaaattattgagcctgaggaacagaaagaaaagagattaaagattggagtgaatagaacctagaggacctctgagacaccat

SEQ ID NO: 348203 - DNA, 567 bp, Homo sapiens
tggaaaggcttaagtttacacctcagggtgattactgacaatcaactaccctacaataatgaaaaagacaataaagaaaatcaataaccataagcagtagcaataggaaacagaaataatctaatttctagagttaccacattattagatgcaatgctcatttttcaacagaaaatcacaagacatacaaagaaagagaaacgtatggactattcaaagaaaaataaataattaccrtaaacggtctctgaaaacacatcatggcaagtcgactagacaaagagtttaaaacaagtatcttaaggatactcaaagaactgaaagaagatatggaggagaagtaaaaagaaaagaaaagaaaagaaattctggaaagttctattgataaaaggtacaataactgaaagaaaaacttactagatggatttaaagacagatttcagctgacagaaaaaaaaatcagagaacttaaagatatgaaaaataaaattattgagcctgaggaacagaaagaaaagagattaaagattggagtgaatagaacctagaggacctctgagacaccat

SEQ ID NO: 348204 - DNA, 567 bp, Homo sapiens
tggaaaggcttaagtttacacctcagggtgattactgacaatcaactaccctacaataatgaaaaagacaataaagaaaatcaataaccataagcagtagcaataggaaacagaaataatctaatttctagagttaccacattattagatgcaatgctcatttttcaacagaaaatcacaagacatacaaagaaagagaaacgtatggactattcaaagaaaaataaataattaccgtaaacggtctctgaaaacacatcatggcaagtcgactagacaaagagtttaaaacaagtatcttaaggatactcaaagaactgaaagaagatatggaggagaagtaaaaagaaaagaaaagaaaagaaattctrgaaagttctattgataaaaggtacaataactgaaagaaaaacttactagatggatttaaagacagatttcagctgacagaaaaaaaaatcagagaacttaaagatatgaaaaataaaattattgagcctgaggaacagaaagaaaagagattaaagattggagtgaatagaacctagaggacctctgagacaccat

SEQ ID NO: 348205 - DNA, 417 bp, Homo sapiens
gccttgtcctgtgatgtcactgctaaagctcccatctaaatgaaggccaccaaattttgtctgtatctgatgcccctggttctgcaagctcttttgtagcactggactctgtctctagcctctcttgagtcacccctgacaaggcttagctttctatctggtattctggttttcattccrtgcttttccttccatgcagttcccagccctgagcctgtctggagttgaacttctctgggattggtcttctccttagggactggtggccactgataacggctcttccagaacagggtttgcaaaaaggtagggaagcaagcctgaggaccaaggggaaatactactttcaccttagtggccctttttctactcagatttagaataaatgtgtgctaatagtagtctttttttgaaaat

SEQ ID NO: 348206 - DNA, 538 bp, Homo sapiens
atgagacccataaaagtgttgctagtaatgtagaagcgaagtcatgacataacaagcaaaagttgaattgcctgagatgtattgcagattgatatctgcagctgggatagcacaccatttcaagataaatgaatccagcataaggagtattgtaaaaaaaaaaaaaaaaaagaaaagaaaagaaaatttctgaagccatcactgcagctatataccccaggcataaaaaccttgcacttttaataaaatacctttttatctcatattggaaatgcagcttttacatgggggcaatattgctacaagaaagacatacctatagactctaatatgagtwtttaaaaatttgaagtcattatattataagataaaacaaaaggaaaatgagaatctaatgtgaagaatttagagtcagcaaaggatagtttaatacttttacaaaggtgtttggtttttaaaaaatgtcaagataacagaagaagcagcttatgctgaccaaaaaaacaacagatggatttccagatgccgttaagaaaat

SEQ ID NO: 348207 - DNA, 563 bp, Homo sapiens
cctgcctctgatgtctcatacttgtggaattaacagcatttgaatagtaagtcaataaaaatgtttaaagaaatcaaaacaaaatgcacttccttgaccagtcatgtcctctccatatatggtaaaaatctgtccccagactaaatcagatacacctgacatgaattcccattgttctcagtctgaaacttctatttaaataataaattacataaataatcatatttaaattaaaaattacataaatcatcatatttaaataataaattacccaaatcatcgtatctaaataataaattacacaaatcaccttctartgagtttttttctggcaaatacaaactctttgagatcagagctagatttgtctttttaaatattcatcttgtttattataatataaactttgaggaaagagattattaaaactttcttcttcactacagtcttttaaagagcctcatactgttcttcgcatgtggaagtctctcagtgactatttgctgagataaaaaataaaactagattcttagacactctatattttggtgtctaaaattagg

SEQ ID NO: 348208 - DNA, 538 bp, Homo sapiens
atgagacccataaaagtgttgctagtaatgtagaagcgaagtcatgacataacaagcaaaagttgaattgcctgagatgtattgcagattgatatctgcagctgggatagcacaccatttcaagataaatgaatccagcataaggagtattgtaaaaaaaaaaaaaaaaaagaaaagaaaagaaaatttctgaagccatcactgcagctatataccccaggcataaaaaccttgcacttttaataaaatacctttttatctcatattggaaatgcagcttttacatgggggcaatattgctacaagaaagacatacctatagactctaatatgagtttttaaaaatttgaagtcattatattataagataaaacaaaaggaaaatgagaatctaatgtgaagwatttagagtcagcaaaggatagtttaatacttttacaaaggtgtttggtttttaaaaaatgtcaagataacagaagaagcagcttatgctgaccaaaaaaacaacagatggatttccagatgccgttaagaaaat

SEQ ID NO: 348209 - DNA, 563 bp, Homo sapiens
cctgcctctgatgtctcatacttgtggaattaacagcatttgaatagtaagtcaataaaaatgtttaaagaaatcaaaacaaaatgcacttccttgaccagtcatgtcctctccatatatggtaaaaatctgtccccagactaaatcagatacacctgacatgaattcccattgttctcagtctgaaacttctatttaaataataaattacataaataatcatatttaaattaaaaattacataaatcatcatatttaaataataaattacccaaatcatcgtatctaaataataaattacacaaatcaccttctaatgagtttttttctggcaaatacaaactctttgagatcagagctagatttgtctttttaaatattcatcttgtttattataatataaactttgaggaaagagattattaaaactttcttcttcactacagtctyttaaagagcctcatactgttcttcgcatgtggaagtctctcagtgactatttgctgagataaaaaataaaactagattcttagacactctatattttggtgtctaaaattagg

SEQ ID NO: 348210 - DNA, 563 bp, Homo sapiens
cctgcctctgatgtctcatacttgtggaattaacagcatttgaatagtaagtcaataaaaatgtttaaagaaatcaaaacaaaatgcacttccttgaccagtcatgtcctctccatatatggtaaaaatctgtccccagactaaatcagatacacctgacatgaattcccattgttctcagtctgaaacttctatttaaataataaattacataaataatcatatttaaattaaaaattacataaatcatcatatttaaataataaattacccaaatcatcgtatctaaataataaattacacaaatcaccttctaatgagtttttttctggcaaatacaaactctttgagatcagagctagatttgtctttttaaatattcatcttgtttattataatataaactttgaggaaagagattattaaaactttcttcttcactacagtcttttaaagagcctcatactgttcttcgcatgtggaagtctctcagtgactatttgctgagataaaaaataaaactagattcttagayactctatattttggtgtctaaaattagg

SEQ ID NO: 348211 - DNA, 594 bp, Homo sapiens
caggtatccagtgaaagagcagttaagggactgcccggcagtaggtggccgaagagtgagcagtctcaataagctggagctctttgcttttattcagtacagacctaatgccaaaagcctggaaccaacacaatctgtgggtaattaacattgttgttcccccttgtgggagcagtctcgaatgggatgatcaaaagttggtttctggacaacataagtaaacaagcctatttagataaactctcttatatttccttgtacctactcctcaccctctgcttcagggtaagagaacagctgccttcagcttattctcctccaaagttttgcagagccttctgacatttcaaaaggtctgcttctttccctacagcttcttccatcaygctgaccaatcccccataagagataatgcaaaacttcacttgctagcctgaacataattttgtgctctatggctatcaaaatatttaaatgatggacaaattcttgtatgagtaaattatccttatgtctagtaaggatgactattcagtctagagaattctaattatggactcttgacaataagactttgaatattttctgtttcac

SEQ ID NO: 348212 - DNA, 561 bp, Homo sapiens
catatcatatttgaccctgaaaatcttaactactcatagcctactgttgactagaaggtttttcaataagaaaaagtcaattaacacatgttttgtgtgttgtatgtattaaatactgtattcttacaataaagtgaactagagaaaacaaaatattattaagacaatcataaggaaaagaaaatatacttactattcattaagtggaagttgattatcataaaggtcttcatcctcatcatcwtcatgttgatggacatggctaggatggccatcagatggctgagaaagaggaggaagagggcttggtcttgtcacagtagtggcagaggagaaagaggtgaaggaagtgaaagggaaagcaagacaggtgtgcatactcagtgtagatttatggaaatacattgcaatttctgccggacatttttttcgttttttttctctaacaatatttctatatgataccaatccttcttccaccatgtccttcagtttcagtgcccaaataatacaaaagtccatatcctaaaaaaaggcaaaagcagtcttgagtaatcagaa

SEQ ID NO: 348213 - DNA, 401 bp, Homo sapiens
ataaaactattaaaatgacttcagggctaacaaaaatgcttatatcaactcatactgtttataattgctagtattttttttctattttttcttaatgacaataatacaagctactaattcaggatgtaaatttaaatgtacataaaataataatgtagttcataaattaaaaaaatcacccattgaaactttaattatcaaaatatttcaatgyaaaatgcgccatgataagatactgagctaaatatattcaagtaacaggcattcagtcttcatataagaatactgagagtattaggaaggaaaatgtaaatgaaatgaaaatgtaattggagaaaaaaaagatgtgttataaagggacaattttgcctctttgcttcaactccagttctctaaaacta

SEQ ID NO: 348214 - DNA, 538 bp, Homo sapiens
ccaaccctgtctgattgtccccattttaaatacttaaataattcttatttcttktaacagatcctctacagaagaatggcattaaaagcaaaaccaataaaaagccatctatctttgcatggaacaactctagtgctttcacctagcagatttactggccagattcctcctcaggactgaggctctcattcctccactgactacaaaatgtgactgctgataactcacagctgaatcccacttcaatacagaggaaaatgctttagtcatggttaagttcttcagtcctcattcaaatgcctggtcaatggagagatacaaaatctggctctccttattccaatttggatatcactgaaggaccagcccaggtccagtattatcatgtgatctgctgggtgcttgttgtaaccaagttgcagcttaatttcttgttttttccatttcggcttccctcaatctttacagttatgatatctccagttctccctcacaaactacctgccctcaaatatatgtctcagaatctgttttttga

SEQ ID NO: 348215 - DNA, 538 bp, Homo sapiens
ccaaccctgtctgattgtccccattttaaatacttaaataattcttatttcttttaacagatcctctacagaagaatgkcattaaaagcaaaaccaataaaaagccatctatctttgcatggaacaactctagtgctttcacctagcagatttactggccagattcctcctcaggactgaggctctcattcctccactgactacaaaatgtgactgctgataactcacagctgaatcccacttcaatacagaggaaaatgctttagtcatggttaagttcttcagtcctcattcaaatgcctggtcaatggagagatacaaaatctggctctccttattccaatttggatatcactgaaggaccagcccaggtccagtattatcatgtgatctgctgggtgcttgttgtaaccaagttgcagcttaatttcttgttttttccatttcggcttccctcaatctttacagttatgatatctccagttctccctcacaaactacctgccctcaaatatatgtctcagaatctgttttttga

SEQ ID NO: 348216 - DNA, 538 bp, Homo sapiens
ccaaccctgtctgattgtccccattttaaatacttaaataattcttatttcttttaacagatcctctacagaagaatggcattaaaagcaaaaccaataaaaagccatctatctttgcatggaacaactctagtgctttcacctagcagatttactggccagattcctcctcaggactgaggctctcattcctccactgactacaaaatgtgactgctgatractcacagctgaatcccacttcaatacagaggaaaatgctttagtcatggttaagttcttcagtcctcattcaaatgcctggtcaatggagagatacaaaatctggctctccttattccaatttggatatcactgaaggaccagcccaggtccagtattatcatgtgatctgctgggtgcttgttgtaaccaagttgcagcttaatttcttgttttttccatttcggcttccctcaatctttacagttatgatatctccagttctccctcacaaactacctgccctcaaatatatgtctcagaatctgttttttga

SEQ ID NO: 348217 - DNA, 538 bp, Homo sapiens
ccaaccctgtctgattgtccccattttaaatacttaaataattcttatttcttttaacagatcctctacagaagaatggcattaaaagcaaaaccaataaaaagccatctatctttgcatggaacaactctagtgctttcacctagcagatttactggccagattcctcctcaggactgaggctctcattcctccactgactacaaaatgtgactgctgataactcacagctgaatcccacttcaatacagaggaaaatgctttagtcatggttaagttcttcagtcctcattcaaatgcctggtcaatggagagatacaaaatctggctctccttattccaatttggatatcactgaaggaccagcccaggtccagtattatcatgtgatctgctgggtgcttgttgtaaccaagttgcagcttaatttcttgttytttccatttcggcttccctcaatctttacagttatgatatctccagttctccctcacaaactacctgccctcaaatatatgtctcagaatctgttttttga

SEQ ID NO: 348218 - DNA, 577 bp, Homo sapiens
attaaaagaggcatgttttcagttattttgcgacttgttaaatttatcatttataccatcacctttccagagagacttgagattcattggtctctaattaatcaggttcctcttggggccttaaatttgtaatataacattttccagaaaactggctatttattaattatacattttaggagagagttcttttgcctcattcttggtttcattaaaaattatggataaatgtcatctgagcctggtgatacatcttttatgcartcaatgtggcttacaaaatcatgactgccagctattgttcaattttgtacctgtgacctgacaattttggtgaagaagttttcaaatgtgtgtctctttgtagaaacagatacatggaattaattaaatctataaactatttccttttctttttttctttctttttttttttttttttttgaaacgtagtcgcttgcactgtcacccaggctggagtgcaatggtgcaatctcggctcactgcaacctctgcctccgggattcaaacaattctccagcctcagcctcccgagtagctgggattacaggagccc

SEQ ID NO: 348219 - DNA, 577 bp, Homo sapiens
attaaaagaggcatgttttcagttattttgcgacttgttaaatttatcatttataccatcacctttccagagagacttgagattcattggtctctaattaatcaggttcctcttggggccttaaatttgtaatataacattttccagaaaactggctatttattaattatacattttaggagagagttcttttgcctcattcttggtttcattaaaaattatggataaatgtcatctgagcctggtgatacatcttttatgcagtcaatgtggcttacaaaatcatgactgccagctattgttcaattttgtacctgtgacctgacaattttggtgaagaagttttcaaatgtgtgtctctttgtagaaacagatacatggaattaattaaatctataaactatttccttttctttttttctttctttttttttttttttttttgaaacgyagtcgcttgcactgtcacccaggctggagtgcaatggtgcaatctcggctcactgcaacctctgcctccgggattcaaacaattctccagcctcagcctcccgagtagctgggattacaggagccc

SEQ ID NO: 348220 - DNA, 518 bp, Homo sapiens
atcttttgggggacacaattctacccactacaggcccatatcttatctaggatgttggtggcaagaaggtgaagattactacctcttttgatataactagtttctgaggtatttaaaaatttggttttaaaaatattaagctttttgctcatttgcatgtatacttttctctcaacattgttttggtttatttaggttatttgttaaaacttcagtaaatactaaagttacttgtattagaacataataaaagtagagaattaaactacctaaataaaygcatcaaaaaatatatgtctgctgaaatacagaatttcctcacatttaatttctttaataacctacagtgatcataaagcaagctcattcttaagagaagaaccattcttcattctgattctccagagtttggtgctgttgacattatagcatttgaaaatgctcagaatggaaaaatcaaaattgagaaaagaaagtaattctactgaataaacatcttttgggaggtaaatgaacaa

SEQ ID NO: 348221 - DNA, 579 bp, Homo sapiens
cccactagctaagttccttccaagtttctgactcacagaaactatgtgagatagtaaaaattttaagccactaaattgtggcataatgtgtcatgcagcaatagattacaaatacagtgttgtatggaaacttttgaaggtactatcttctctcaaattctagagcgctaataaaataattgactttgtttatctagtgtctatgtgtacaatttaatctccatttgaaaatgttttcagaattctggaaattttatttctttaccttagtatttaccaaattttaacaatagcacttgatgattcaaaagttgggccttggaatcaacaaattttagtttaaatcacagtcctgctattcattaccagtaygacccaaagaaagatgggcctctgttttcttgtctgaatcatgattataataaacacctaacctaaaagactaacatgaggattaattagataattgcaggatcccctagtttcctcttgctttcttcctgtgtccttactgaaaatcacagagtgccttgaccattttgtgacccagccagctgcaagtttttcccagcaggcctg

SEQ ID NO: 348222 - DNA, 540 bp, Homo sapiens
attagttgaggtgatgttggcacaaaactttttagttggattggaatcagattgcctggggacagtgttggaagtgataatgattttgagaaagagactcagtatccttaattttgatattcctccaaagatcttaaattcctggcaaccggcaggatgactaacttctttatgtaactgccctactcagaccaaacaagccatgcatttgccagctataactgccatgatttaactttctagcaaggattgtgttgatctccctgagttctcttcactttccaaaaaaaggtcacaggaaaccccaggcaaaggacttggtttacaaccaggtgtattaaaaaagtacggttgcggcatgaagctactttcagtctgaaggacactctttgatggaagcatgagattctcagtgccatgctcaggacacattaggagatagcyctaaggatacttaaagagacatttgatataggacaaaatatggctgcatgggatgaaggggttgtttgaggcattataactaatgtgatggacaca

SEQ ID NO: 348223 - DNA, 554 bp, Homo sapiens
ggatacttaaagagacatttgatataggacaaaatatggctgcatgggatgaaggggttgtttgaggcattataactaatgtgatggacacaaactatcctgaagaaaacacaatagtcatgcccacattttcacctatgcctgtgaactatgggaccaaaatatgagagttctgtatgtgtactccaaacatgattrtttccaaatgaaagctatggtgtgcctcacctcagaaatattcctttctttgcatctttttctctcttcctaatttgaaaattataatcttgttcatccacccagtccagcagaggcctgtgatgtggatcttggccttcccaccaaccatatattaaatggaaggcaaaatacaccaagtgccatggaaaaggccatttcatggctgttagacaacgcaccttttgtggggagagagcatttccattgcaaggtgggttatgaggagtgccttggatttctgggaaaattctacttccttacacaaagggacaaaagaagaatgcatgtgcaaagaggaattttcttggaccccc

SEQ ID NO: 348224 - DNA, 583 bp, Homo sapiens
ccactgccaacatttccttcagtgtcagcacttgacctagagtggtatgtgtctctgaagctaggatggcattactggagtgctctgcagagccagggggcctcagacagcttaatttgtataataacctcagatctgccaaatactccaacctgacacacagacactgggctatgtttaatagctagggggcaatctttctcatagaatatgccttgccttagctgccctagcttagtgaatagaaaaactgtacaagwtaatctagatcagggattggcaaactatggccagcaggcaagtctggcccactggctattcttgtacataaaattttattggaacacagccatactcatttgttaatgtattgctgatggctgtcttcactctacagtaacagaattgagtggctgcaacagaaaccatgtggcctgcaaagcgtaaaatatttactttctaccctttacagaacaagtttgctgacccagatctagattactcctcatggttttacaccccgattcaaatcctcaggcattgtttatgggtagctaagcacatacaggtggtgttgagctgt

SEQ ID NO: 348225 - DNA, 566 bp, Homo sapiens
ttttatacctttctgagactaagtacttaattttagatgcaatcattggctttccagtatttcaagccattctattttaaggcaacaaatagtgtcgtggcattgtacaaatgggaaaaataaaataaagcacaaacattacaaccaccatttttcacaatcacatttgaaatcatgccaaacctaataaaagaacatatagagcataaccaagagaatgggtaggtttggctgatatatgattcaaagagcagaccatcatagtgaaaacttaaatacgtattacaactcagccagctagtcttgatatattccaagaaactataaggagattcgtgatccaaattactcatttactagcttggtttacaacagaatcaatcccattctgtggtatgttttgactgaacaatgggaacaaaggaattgtttgtctagtcacaagtacaggggggaaggaggtgmatagaaagcttatatcctgtgttgaagtataaaaagaaatagtcataaagggaaaaaatgcaaccattcaatcaacttaataaaattaaaataaaaactgc

SEQ ID NO: 348226 - DNA, 601 bp, Homo sapiens
atatgtttctaatattagcatgcagaaatatttaagctaaatggaaatatttgaaatttagttatcaatcttattaaatgagtaaactccatgctgagaattcttgtaaagcaaatgaccagtacttaaattatgyggaaattcacatagtacattttgttcaaaataagatgtactggttagaacctatcttagttaaatccattctagaacagcattgacatgttcaaaagcttgctgaaggttagccttctctctctatctccatataagttctagtatatctaccagaactttgcctaagtaagttttttttaacatttgggagttgatatttgaacataatattatgaaaacagaaatagagtggcctacaggtaatatttgttagggattaagaaggctcatgtgaaaaataacctccaagaagtatcaaataacagctatctagccaattatatgcactcagagtagcaaggcaagggacattttaattctgtcatctagaaacaaacctgtttaaatatgtgttttaaaaaagaagtctataagaataatttttaagcttatatgtatacactccatgtttattttattgtgt

SEQ ID NO: 348227 - DNA, 588 bp, Homo sapiens
ccgggcacctcctgatgaggtgaccaacaggaaaagtggcagcaatttggagaagagcaacagtgactgtgagaattacctgaccatccctcttaaaggaagctctgctgcaggggagcttcttagcaggcctggggcttccagggaggggccccccaactcctcagctgccactctctgtagtttacccccgctgagtgcccgcagtcaggtccccagtagctccaaaggctctcaggttagtggaaccagccgaccagcttggcgtaccaaacctgacaacccccgggagacagtagctgcccccccagggccacagagccccgagcatccccccaccaccatctaccaccagccgccgctgcccttcaccctacagggggcccagcctcaggtcctctgcttctccccacccagcatgcctgccccagcacctgcagcctcagctcccgtccccacagaccccttccagcrggcacagcctcaacagacccagcgtaagatgctcctggatgtgacaacaggccagtactatctggtggacacaccagtacagcccatgacccggagactgtttgaccctgagac

SEQ ID NO: 348228 - DNA, 430 bp, Homo sapiens
agagttttagtatatgcttaacactgacagattcagggtcagtttcttaccttattccctttccctgccctttcccccaagccacaacacacacacacacacacacacacacacacacacacacacacacacacacacacmccctccgcggcagtaaaacggccagaagattctatttcctctgaatgaaacagaaatttggaaaattagcagcagggcagccagtcaattccaactgtgttcttttccaccatccacaaggactttaatgtttcatataattaaccctttaacgtactgatgtggccgagaggaaaaatgcaatggctgaaaaattttggagaagttaggtagtgggaaagtcctgacacaaagaacaaataagagaagagggacaatttacaacaaagaactgagaccagcgagcaga

SEQ ID NO: 348229 - DNA, 587 bp, Homo sapiens
gattagaatatgataactatctccagaatcaaatgaactagtcattagatttttttttggtatcccagaaactgactttttttggccttatcaattattcttctactcatttaaagaaaattcatctttccctgggtttctactgtttygttttaattctgaaactgaatgttctaaactgaatgcaagttcctggtgcactggggatggtcctggaacatgacctgaacgctgcatcttacctgaatggagcttcatccttgtccatctgcatgcaaactaagaatgggtactgagaaaactgcactgtggagataaactccaagcctgcttctgtttctgtactggtttccaggccagctttcacaaaagaggagtccactgtgatgtcagtggttattaccacagtcaccctaaacatttgagaaaaaaagaaaaaacttgttcatattatatttaatggtattggactaacagctgtaactttacagggtctgaacgtatgatgccagtgactggaaggaaacacttaagggattcagaggtgacctggatgtgcttagagttctgctggtaaccagggcctg

SEQ ID NO: 348230 - DNA, 567 bp, Homo sapiens
aaaaacttgttcatattatatttaatggwattggactaacagctgtaactttacagggtctgaacgtatgatgccagtgactggaaggaaacacttaagggattcagaggtgacctggatgtgcttagagttctgctggtaaccagggcctggtgagtctcagatattgggcagggaaggtttgcccttcccctgagctctcccctgccttcagttgcagatgtggggagtgtctgtaagatactacattgttttgtatgggcataacaaagaccaaaatgaaaacattcttggaacccagtcctctcagcaggtcagaaatacccaagttatattaaaatggagtctaaactcaccaagaagacaatcgatgcttatagttttttgttaactatctctctgttggcttctaggcagctattttaattccatttcattaccttctccaaagagtctctagaggcgtaagcccttgattgccaagatatttgaaaaaatattgtgttacaaaaaatcattcttacagtggggcatgtacagtaggtcctaggaggaaaaatatggtgg

SEQ ID NO: 348231 - DNA, 546 bp, Homo sapiens
tgtgttacaaaaaatcattcttacagtggggcatgtacagtaggtcctaggaggaaaaatatggtgggtcctttaatgatgctctagataactggataaacagattgcattggctggggaatgtgccctggataatgatgaagaggataaataatttcaacagaagacttacttctactgtaattgaattgtggactttaaatcaaactgtgagaaactgctttcacaattaaatgagagttttatgcccttatgttttgacaggaatattaatttttgctgygcaaattaaaacccctgctgctgttatgatcagtgtaaaaataggtcagaggtcgttttaatccctgaatcacttagagtaccttctgatgtcctatattcagcaaaggtttaaaagatatttttttcaaatgaacaagtggaaatggaagacagattggttacaatatggataagggtagattcttaaggatactgtgtacttttttaaaaaatccaaattactttttgttgttgttgctgttgttgatttctctttgcaaa

SEQ ID NO: 348232 - DNA, 533 bp, Homo sapiens
tgtggctcatggccgtggttgcttgtgcctctactaatttggcagggtcaaaatgatgcactgtatgcatcttcatcatctctgtcattacaaatgtcatcagtgacttataaggccacatagttcagctcctgccttcaggataaatatcacctaagccctcgtgcctgagagagccaagtgaggagacagtggtagctctattctgttgtgtcctaamctttcttgtttctgttaacatcaacattttctctttgcctccaattaaaggcacttattaatcatctaatatatgaaattataacatatctatagtaaaggagaaaggggaccaataccaagagggccaagtgcttggaatatgagctccaagatgggcacaattttgtcttgtatcctccaagaactaagcatatttaaaacgtgcctggcgtattttagggactcaataaatactcacagactgaatgaattacctgagaatgatctattagcagaataagtcctttcaccacactgatagggtcgccaga

SEQ ID NO: 348233 - DNA, 533 bp, Homo sapiens
tgtggctcatggccgtggttgcttgtgcctctactaatttggcagggtcaaaatgatgcactgtatgcatcttcatcatctctgtcattacaaatgtcatcagtgacttataaggccacatagttcagctcctgccttcaggataaatatcacctaagccctcgtgcctgagagagccaagtgaggagacagtggtagctctattctgttgtgtcctaaactttcttgtttctgttaacatcaacattttctctttgcctccaattaaaggcacttattaatcatctaatawatgaaattataacatatctatagtaaaggagaaaggggaccaataccaagagggccaagtgcttggaatatgagctccaagatgggcacaattttgtcttgtatcctccaagaactaagcatatttaaaacgtgcctggcgtattttagggactcaataaatactcacagactgaatgaattacctgagaatgatctattagcagaataagtcctttcaccacactgatagggtcgccaga

SEQ ID NO: 348234 - DNA, 546 bp, Homo sapiens
caaaactaacagttttgttgcttttaagtcacttaaaaattctaaatgcacttgaagggcaaatgaaagagattctgacttttttggctaatattactttctgttttggttttatctaacaacagttatcaaaaaatrttactatacatactctgaagagcactatcctacaaaaggaattaagtcaacaatataaatgggacatgccccaatgcccagtgttgccagatctctgcaaagcataaacagagaaatacttatcaaaaaggaaagtataagaggatgacactctagcacagtccaccttatttgaaccgttttaggctttatctcctgttgaaagaggtaggaaacagtttggaggaataaagggcccattcttttctgtgctttaacatttcctactcatagtcaaaaattgatttattatatggccagtaaagtagaggtaagaaaagaagtgaataacataatagtttggaaagctttggaatttaagaaaggttaccttcctacaaatgtttcgtagttattttaaccagagga

SEQ ID NO: 348235 - DNA, 607 bp, Homo sapiens
gcttatatttgccttaacgatgtaaatataaaaatataacttagttgttacagttagtagcctttcatttgatactcatgaagatttttgagtcgtttaaatatgaaagagaggaccttgtcrttcaaaaatgaaaaggaagtttttgttaagcttaataattctagacatgttacaagaatgttgatacttatattggaaaacatgaaaaacatcccaaaccgttgcatttatttatattccatgtgtatggaaaatatttttttaatgagaagtttaaaacaatgtacacacttttgcttgttttatttccccaaggtaacgattctgatttcttctgtttcagattcccgacagttaagcaatggggagacatttggctttgctcctgcttctgctccttctcttccaacattttggagacagtgatggcagccaacgacttgaacagactcctctgcagtttacacacctcgagtacaacgtcaccgtgcaggagaactctgcagctaagacttatgtggggcatcctgtcaagatgggtgtttacattacacatccagcgtgggaagtaaggtacaaaattgtttccggagacagtgaaaac

SEQ ID NO: 348236 - DNA, 586 bp, Homo sapiens
acttttcatttcaaaaatatattctgatgaggaatctgcatatttcactcttttaagttttttaagtcatcttttactgtaagtyccagatttaaatacattgcctgaattcttgcttaattccaagggttcattatgtatgtgaagataagtctataaagtaaaaataataaaggcttctatacactgcttaggaaatattagtcatgatttaatctgtatccttcatagaatattaaggttagagctttgtgataatctgcaacacagacactgatctggcattatctatagccaattttgaggcagcgtaaggtgggtggtgacctctttctgagctattggaaatgagtcctctacagagcagccacctgcagtgttgttaccagcctcgtggttgtgcctggattttctgttaatttgagaaggatggatgttttattttcctatgttatccctctctatatcccctccccaacacagtcctgcctcacatttctcactcttaacgctttattcatctgtccatttaccaatccaacaatagtggacctcctctgtgtcaaacattgggccagacacaaca

SEQ ID NO: 348237 - DNA, 639 bp, Homo sapiens
taagcaagttccttgaattcacacagttgattagtgacaaagctggagctaggttccacatttgatgttctcccaaccccttcctttttgtttgatttgttagtttgcaaacttggttgatttgggaagtggtgagattggaaaataactggaagagctgttattttgcaatggcgaaagggtgaaaagtctatatagttgtcccttggtctctaagggaggtttgggattttatacccaaatctgagaatgctcaagtccctgatataaaatggggtactatttatatttttactgttttattgtttattttaaagacgttctcaacctgaggttggttggatccatggatgcagaactcttatatagtgaaggccaatcgtataacttaggtttgatggtattttaggaggaatgttacgaggtgtttgagagaggttagagctgaaattgcagatttggtgcactgatccttcatgatttgaggcagagtagatgagatctttaagggtggtaataaatgcatgtggaggaagagttggaagacaagtttgtaatgccagagttktaggtgagtcagtgtagagtataaaagagtatggaagagaatcaggagaatgttgtcattcatttttcata

SEQ ID NO: 348238 - DNA, 603 bp, Homo sapiens
gtcaacagtccattgagcttctccttgggcaaagtttgtcctggaatgtggatgaggagaaagtggttggaggataaggaatatatagagaggggaaagaagagaatagcacaggaatgcctcaccctgccagaaatagacacacagccgctgcctacctgtcctgtcttgtcgttcccaggagcacagaacaactagaacccgtcatcttcgtaatgccaacagacatgttttataggttcatgtagataactaggttttatatagaggctgtttgaaaaataggacatctgtttatctttcttaagggcaggaacacttcaggaatctattttggattgattaaatcatgtacatggtgaagttttctgaaaaagccagattgtagttccacactgtcattgtcagtaaagaccattctcagggttaaattggaaccggtkgttgatcatgtgaaggcaatatttaaagtatgtcttgctagagttaccagattattgcagccccagtcaaagataacaacatataaatggagttagcagaagtgattaaatgacatataccaagcctaaggctgctgctcaatttctagggtcacagctt

SEQ ID NO: 348239 - DNA, 332 bp, Homo sapiens
aagaaacagggaacctctgtcctacagttagcaagtacagttagcaagaaaatgagaccagttctacaagtgcaagggactgaattctaccaagagcctcgtgagctccccagcctcagatgaaaccacagcctagctgacagcttgattccagcctgtgagaagctgagcagaaaacctggccatgccatgcccgggggttttgatctatgcaatgagaagtaataaatgggggtaattttaagccactaaatgtacggccatgtgctgtggagcaayagaacactgataccccaatgttcttccaaacactggaaaccggtggtgtgagc

SEQ ID NO: 348240 - DNA, 536 bp, Homo sapiens
tgttttgtctgatataagaatagctacttctgcttgcttttggtgtccgtttgcatgcctgctcacttttggtgtccatttacatgaaatgccttttcccacccctttacgttaagtttatgtgagtccttacgtgttaggtaagtcccctgaaggcagcagattgttgattagtgagttcttatccattctgcagttctgtatcttttaagtggagcatttaggctatttacgttcaatgttagtattgaaatgtgaggtatcattgcattcactgtgctctttgttgcctgtgtactttgtttttttgtttttgtttttttgtttttgcttattagtttgtatttttcttttataggccttgtgtgagttatgttttaaagaggttctgtttcaatgtatttccaggattcatttcaagatttggacctcsttatagaagttcttgtagtggtgtcttggtaatggcaaattctctgagcatttgtttgtctgaaaatgattgtatctttccttcatatatggtacttagtttt

SEQ ID NO: 348241 - DNA, 587 bp, Homo sapiens
aatttctttcttctactcattcaattctattgctgagactttccagagcatttcacrtttctaaaagtgtgtccaaagtttcctgaatttttaaattttttaagctatctatttcattgactatttctccctttactttttgtatcatttttttggatttccttgcattgggctttgcctttctccggtgcctccctgattagcttaataactaacctcctgaattctttttcaggtaaatcagggatttcttcttggtttggatccattgctggtgaactagtgtgatttttttggggtgttgaaaggccttgttttgttatattaccagggttggtaatgtaacaggtaatattacagggttggtacagtattcaatgaatttcataagatatttaacactgtattataaaataggctttgtgttgttgatgattttgctcaactgtagcctaatgtaagtgttctaagcacttttaaagtaggctaggctcagctatgatgtctgtagtttaggtgtatgaaatgcatgtttgacttatgatattttcaacctgcaatgagtttatgacataaccccataataa

SEQ ID NO: 348242 - DNA, 500 bp, Homo sapiens
attaaaccttcaagttccaaagtgatctcctttgactccatgtctcacattcaagtcacactggtgcaagaggcaggctcccacagccttgggtagctctgtccctgtggctttgcagggtacagcctcccttcctggctgctttcatgggctggcattgagtgtctctgggttttccaggtacacagtgcaagctgttggtgaatctaccattctggggtctggaggacattggccctcttctcacagctctgctaggcactgccacagtggagactctgtgtaggggctccaaccccacatttcccttccycactgccctagtagagtttcttgatgagatccctgcccttgcagcaaaattctgcctggacatccaggcatttccacacatcctctaaaatctaggtggagggtcccaaacctccattcttgacttctgtgtacccacaagtgtaacaccacatgtaacccactaaggtttgggacttgtaccctct

SEQ ID NO: 348243 - DNA, 609 bp, Homo sapiens
cttgcttccatttgctggtcatgtcctcttcctccaggtcccgcaggttgatgacttagttggacaagctgtctggttttaatttccattttgcccttgaatgctgtccctgtttttttttttttttctccccaagaggccagcttccagctttattccaggccttgccccaccctcaaatacactaacagaagtatcaaccccatgctttcagagcctatgttctttgtcccaggtgctcactcaactgggtttggaaattgttcattttctttcctttccttccatgtagccaataaaatatgtcttggaggtatgacttatttgggaaggcaaataattttaagaaaagtaaagaacataaggcactagggaaggcacacatggttgggtaaattgaaagttcccatcctaccccattcccaactctctgccatgccttctatcaaaagtgaaatataaagattggaaaagaggcattttggcayggtgccatcttttccagaggggttggcaagaactatcctcagttaatatgggaggctttaaaaagagtgtcagcccaggggaagatgaataaattgtttgcatgatagggtgactgtatta

SEQ ID NO: 348244 - DNA, 609 bp, Homo sapiens
cttgcttccatttgctggtcatgtcctcttcctccaggtcccgcaggttgatgacttagttggacaagctgtctggttttaatttccattttgcccttgaatgctgtccctgtttttttttttttttctccccaagaggccagcttccagctttattccaggccttgccccaccctcaaatacactaacagaagtatcaaccccatgctttcagagcctatgttctttgtcccaggtgctcactcaactgggtttggaaattgttcattttctttcctttccttccatgtagccaataaaatatgtcttggaggtatgacttatttgggaaggcaaataattttaagaaaagtaaagaacataaggcactagggaaggcacacatggttgggtaaattgaaagttcccatcctaccccattcccaactctctgccatgccttctatcaaaagtgaaatataaagattggaaaagaggcattttggcatggtgccatcttttccagaggggttggcaagaactatcctcagttaataygggaggctttaaaaagagtgtcagcccaggggaagatgaataaattgtttgcatgatagggtgactgtatta

SEQ ID NO: 348245 - DNA, 456 bp, Homo sapiens
tgacccctacttgcaggtctgagggtaattggaggaaatgatgtttaaatcaaactttgcgggaagaggagaatgatcacaggtgaaacagtgaaagggaggaggccatcttagtcagggaaaggcaaaaaccaggagtcccctacaaaataacaataaataaaataaaggagtgattaagcaaaatcatagttaacattgcttcttaactgctaggtacttataaaacactttatacgcattattacttgtagttcatktagtccttaaccaactctgcaagataaattttattattatattatccccattctacagatgaggaaaaggaagcacagagaatgaagtatcttgcccaaaaccgaactggggccagtttatggatagagaggagcactatgcctcccaccagtcagggaaagaatgctggttcttcctaataggttagagttactt

SEQ ID NO: 348246 - DNA, 615 bp, Homo sapiens
actctttgagcactgacatgctgtcacaagtggaaagttccacacctgacttcatgtgacaggtggcagtcaaaatgcagtcaaaactttgtttcatgcaccaaattatgaaaaacattgtatcgaatactcttcaggctatgtgcatatacatataagaaacacaaaggaatttcatgtttagacttgcattccatccctaagatttgtcactatgtatatgcgaatattccaaattgtgaaaaattccaaaatttgaaacacctctggtcccacccatttcggataagggatattcacttgtattagtaatgatgacacaaacatctctgtcacatgtttacatctactctacctagttaaatgacaagtttcctgaaggcaaatcctgtatgtctctgcttcatatgcacatcagtaycttgcagatagactatttaagtttgttaacctgatgtagtaggttaaaataacagaacaaactggacttacaatggactgtcgtcgttgttctacagtaagctcatcatcagaatcactatagtattttgagtaaagatatggtttgtggacatacgcatgccgtacactttttgtttttccttcactagaatc

SEQ ID NO: 348247 - DNA, 611 bp, Homo sapiens
gggcttctgcatcctgcccactgttcttcccaatttccaaatcctactgaggcacaaccacctctggagtacaggttgaggctcagtgtggtagcaattctacttaaacaaggtgtattgggattttgagaattttccattccttatttgtgtttcaaggagatacttggcatcatagaaagaactgtggatttaaaattagctgtgtgaggccggtcgcggtggctcacacctgtaatcctagcactttgggargccaagatggggggatcatgaggtcaggagattgagaccatcctggctagcacagtgaaacaatgtctctactaaaaatacaaaaaattagctgggcgtgtggcgggcgcctgtagtcccagctacttgggaggctgaggcaggagaatggtgtgaacccaggaggcagagcttgcagtgggctgagattgcgccactgcactccagcctgggcgacagagcgagactccatttcaaaaaatataaataaataagtaaaaaaaaactaaattagctgtgtgaatctaggcctcagtttcctcaagtggaaaatgaagcatttggacttatgacttctgaggttctcttccaagttt

SEQ ID NO: 348248 - DNA, 310 bp, Homo sapiens
agtatgggatgggtgaagccccrtgtctgtgttgtgccagctgtgtggcagagtgacatctttacataaacttgaagttattgttccttacactaagatatggctacatctggacacatggtgattgacaggagttatataaacctatagcacaagggtggtgcatcttcttctatcatcataatacaaaaacaaacacatgtttagaagtataatatacaactttcctgaatgctaatctaaaacatgagattatgaaagtttttcttttgtggcattcacttcaggcttttagcatttcccagcagta

SEQ ID NO: 348249 - DNA, 570 bp, Homo sapiens
atgcaaaaaaacaaagttggtggttcccatgtttgatagtttactaaaatggctcacagaactcgggaaaggactttacttgttcctctcagtttattacaaagggtacaactcaggaatcatcaaatggaagagaagcatagggtaaggcataggggaagaagtgcagagcttccatgccctctctgggcacaccacccttctagctcctccacgtcttcaccaattgggaagctctctaaactttaatttttagacttttaatggaggttccatttctataagcatgattggtaaaatcaccggccattggtaattaacttaatcttcagcccctctctcctcactggaagttggggagtgggactgaaagttctaacattttaatcacatggttggctcctctggcaaccagacctgatcttgaagctctctaggggcttagcaagagtcccctcattagcacagrctcagatatgttggaaatgatgcaagacagaggcttctgcatcatttttaatcaaggggagtctcggctgggaatatggaggaataagatgcttctccagg

SEQ ID NO: 348250 - DNA, 557 bp, Homo sapiens
taagtgactatagttactctgttatgctttcaaattgtaggtcttattcattctttctaaatatttttttgtacccagtaaccatccccactaccaaccccgcaccctcccactacccttcccagcctctggtaacttctactctctatgtccacgagttcagttattttgacttttagatcccagaaataagtgagaatatgtgatgtttgtctttctgtgcctggcttatttcacttaacataatgatctccagttctgtccatgctgtctacggccataccaccctgaatgcacccaatcttatcttttcatttcttaacagtctattacagagcaatgtttttatttggatgaagttaaatttatcattttttttcttttaagggttgtgcttttggtgtcaaccctgagaaycctttgcttaggtctagatctaaagatttttttattatgtaattttttgtttacctaaaatccatgatcgtttttgagttaattttttaataaggcaagtaaggtatgagatttgggtttagattcttttttttttcttg

SEQ ID NO: 348251 - DNA, 569 bp, Homo sapiens
catttttccccctagggttgaataccagctccataactacttgctttgggacttgggctgatcagtttacttacatctctagggctcagtttcatcatcattacaataagaataataccaccaacctcattgtgtgtagatgtatctgtgtgtgggctgyggggtggggggtgttggggatgggatggggtggtaaatgatatggttcccattaaagtctttgctgaagacttggtgcattggctgtcaataaataatagctctaattatattattcagtaagttctcacacatgctcagaggtaataaaagaaaaacttcatccaaattaaatttaaaagagtttaattgagcaatgaacaacttgcgaatcgggcagccttcccagccagagtaggctcggagactccagcacagccacgtggtggaaaaagatttatggacagaaaaaggaaagtgatgcccagaaaatggaagtgaggtgcagaaaacagaagtgagttacagaattggtttggctacagcttggtgtttgctttatttgaacatggtttgaacagttgtacatt

SEQ ID NO: 348252 - DNA, 529 bp, Homo sapiens
gctaaccactgctaacagtcactttgtaactccaaccctccacctgctcagattggcaggcagtgcagtcatctctaacttcttgtcttcaggagccctttcatggaatgcccaagaacccctgttggtgctctgcagatgagaaaaatagctactgagatccttgttcccttgctgaagctggaaggcctcgtggtctggagaaatgccagcttttgctgtggttcatctgagaacagtggatgctggtctttctctgggtaatccttggtcgagaatactctccccaattggcctgggttgccagggaagagagtattagaaactgctttgacagtatcattaatatcatcattttacagacaaggaaacagaagcttagaaatggtaagttgatcaatgtcataagaggtaacctgacctgaccataagacctgaccataagagatcaggtcttscacttcacccaagtgaagccaggcttcccaaggcacagctcagcacctgcggagccacattgcagtgagtt

SEQ ID NO: 348253 - DNA, 467 bp, Homo sapiens
attgaataagtgagcttacttgaaggaagagaataagtaagtaatagtacaggtggtataggattatggccaacatgattgacatttgggaaaatgggcaaagtgacctccacaggccctcctggctctgacattctagcattccttctcctccccatcttttctcttgtttcctctctgtggtcatgtcctcctcagcrgagagggcattacaatgtgtactttcagattcaaaacagtggccttgacatgcgtgaggtctgtgctcggtgtgtccccttggccctccctacgagagctttactttggtcagggagcagctctgttttcccaccttcagtttctgatgaggtacatgaaacccacaggaagcaaaccaaagtgaaagcaagaaaaacaaggcttggcagagagcggctatccgcacttcacttggaattagagaaggtgcttttggctccattagc

SEQ ID NO: 348254 - DNA, 467 bp, Homo sapiens
attgaataagtgagcttacttgaaggaagagaataagtaagtaatagtacaggtggtataggattatggccaacatgattgacatttgggaaaatgggcaaagtgacctccacaggccctcctggctctgacattctagcattccttctcctccccatcttttctcttgtttcctctctgtggtcatgtcctcctcagcggagagggcattacaatgtgtactttcagattcaaaacagtggccktgacatgcgtgaggtctgtgctcggtgtgtccccttggccctccctacgagagctttactttggtcagggagcagctctgttttcccaccttcagtttctgatgaggtacatgaaacccacaggaagcaaaccaaagtgaaagcaagaaaaacaaggcttggcagagagcggctatccgcacttcacttggaattagagaaggtgcttttggctccattagc

SEQ ID NO: 348255 - DNA, 467 bp, Homo sapiens
attgaataagtgagcttacttgaaggaagagaataagtaagtaatagtacaggtggtataggattatggccaacatgattgacatttgggaaaatgggcaaagtgacctccacaggccctcctggctctgacattctagcattccttctcctccccatcttttctcttgtttcctctctgtggtcatgtcctcctcagcggagagggcattacaatgtgtactttcagattcaaaacagtggccttgacatgcgtgaggtctgygctcggtgtgtccccttggccctccctacgagagctttactttggtcagggagcagctctgttttcccaccttcagtttctgatgaggtacatgaaacccacaggaagcaaaccaaagtgaaagcaagaaaaacaaggcttggcagagagcggctatccgcacttcacttggaattagagaaggtgcttttggctccattagc

SEQ ID NO: 348256 - DNA, 320 bp, Homo sapiens
tactttagaattttaatggacctgaatctgtccaacagataactgctccaaagaaagctggccagggttgttggaggaaacattgtgagcaatctcagcacagtaagatttgttgcacatcagcagcacttcctgctccttgaccttgtggrccaggaacttctggaagccactgggcagcatatgctttgtttttttgttgctcccataagtaatgttgggcatcaagatctggagcttgaaccttctatgaaccctgttgtcactacctctgggtttctgccagtcacgcttaattttgacatatcagtctgaccggt

SEQ ID NO: 348257 - DNA, 538 bp, Homo sapiens
tcctcaaccatgaaataccattgagtgccctctcatcatagcaccaactatccccacacttttccaaaatatccttgggtgtggtgccacccctacaaaaaccctgattctaactcagctctctcattttacagttgaaggaatcatccctttggggagggaagaattactctctggaaaacatagggatttaaacataaagmctggaccaggaccgcagacttctgacttcttaggctaaatcccagttgtatccaccatagcaattgaagccaaggattagagtcaagtaggcttgggatcaaatcctggctctgaccttgggaaaactgcttcatcttttcgagcctctgtttcatcatttgcataaatgagattaaaaatagcatttaccttaaagaattgttatgaggactaagagaggttatgactttgaattcttggcacatagtgaactcttaattaatggtagcaattatcacactgctattcctccctttaaagctcattcatttaagtgccaacagaaattgtcata

SEQ ID NO: 348258 - DNA, 583 bp, Homo sapiens
ctaaatcccagttgtatccaccatagcaattgaagccaaggattagagtcaagtaggcttgggatcaaatcctggctctgaccttgggaaaactgcttcatcttttcgagcctctgtttcatcatttgcataaatgagattaaaaatagcatttaccttaaagaattgttatgaggactaagagaggttatgactttgaattcttggcacatagtgaactcttaattaatggtagcaattatcacactgctattcctccctttaaagctcattcatttaagtgccaacagaaattgtcatatcctagagaacttctatactggaactttttcctctgtagagaaatacttgtttatcatttgtttccaatacttcaaatcattccttttcaggtcaaggcctccttctaatctctccattttcctccaagatggcctgggccaaatttaagggaaaaatgtcttgagcagagtagctyggagcattctcataccttgactcttacttaaagaaaggaagaagaaactttggggctttgatttggtttgaaaaggaggaagggaggtgatattgagcacttatt

SEQ ID NO: 348259 - DNA, 537 bp, Homo sapiens
agttgaaggactggtattgattcatggcctatgggttgggaactcctgtcctagagcattgttgctacgctttcttttagtaattttatagttttaggctttatgcttaagccattaatcaattttgagttgatttttttttttttttttttttttgagatggagtttcrcttttgtcacccaggctggagtgcactggcaggatctcggctcactgcaacctccgcctcctgggcttaagcgattctcctgcctcagcctcctgagtagctgggattacaggtgcccaccaccatgcccagttaattttttgtatttttattagagacggggtttcaccatgttggccaggctggtcttgaactggtgacctcaggtcagttgatttttttgtatgtggtgagagataggcatctagtttcattcttttgcatatggatatccatttttctcagcagcatttattgaaaaggatgttattttgccaatgcatgttcttggtgcctctgctgaaaatcagttggctgtacatctgta

SEQ ID NO: 348260 - DNA, 537 bp, Homo sapiens
agttgaaggactggtattgattcatggcctatgggttgggaactcctgtcctagagcattgttgctacgctttcttttagtaattttatagttttaggctttatgcttaagccattaatcaattttgagttgatttttttttttttttttttttttgagatggagtttcgcttttgtcacccaggctggagtgcactggcaggatctcggctcactgcaacctccgcctcctgggctyaagcgattctcctgcctcagcctcctgagtagctgggattacaggtgcccaccaccatgcccagttaattttttgtatttttattagagacggggtttcaccatgttggccaggctggtcttgaactggtgacctcaggtcagttgatttttttgtatgtggtgagagataggcatctagtttcattcttttgcatatggatatccatttttctcagcagcatttattgaaaaggatgttattttgccaatgcatgttcttggtgcctctgctgaaaatcagttggctgtacatctgta

SEQ ID NO: 348261 - DNA, 537 bp, Homo sapiens
agttgaaggactggtattgattcatggcctatgggttgggaactcctgtcctagagcattgttgctacgctttcttttagtaattttatagttttaggctttatgcttaagccattaatcaattttgagttgatttttttttttttttttttttttgagatggagtttcgcttttgtcacccaggctggagtgcactggcaggatctcggctcactgcaacctccgcctcctgggcttaagcgattctcctgcctcagcctcctgagtagctgggattacaggtgcccaccaccatgcccagttaattttttgtatttttattagagacggggtttcaccatgttggccaggctggtcttgaactggtgacctcaggtcagttgatttttttgtatgtggtgagagataggcatctagtttcattcttttgcatatggatatccatttttctcagcagcatttattgaaaaggatgttattttgccaatgyatgttcttggtgcctctgctgaaaatcagttggctgtacatctgta

SEQ ID NO: 348262 - DNA, 629 bp, Homo sapiens
tggaaatagggttttaccgatgatgaagctacaatgagatcattagggtgtacccaaatccaacatgattggtgtccttataaaaagtgaaaagttagacagtgacggaggtgcacacagggagaatgcatgtgaggatgaaggcggagataaggatgatgcatctataagccaagaaatgccaaagattgccagaaaactaccagtagctaagagaggaatctggaacagattctcacagccctcaaaaggaactaacgctgctgacaccttgattctcgacttccaatctccagaacagacagaaaatctgtgtatgttgtataagccctgcagtgtgtggtactttgctwcaacagccaaagcaaatgaatacagcctccatggtaggcaatgggacaaggattcagcattcaggatcctacctgtgtcttcttcaggaggtatgtaaaccaatatccctctctcagctccagtagttgtacacagggacctcttttccttctcccctgcctctgcccctgggaggatggttgaaataatattatgttcctccttgttccttatcccttaaattgggtcagatctcccagactccaccccgaggtgtgccctgttcagagtggtac

SEQ ID NO: 348263 - DNA, 425 bp, Homo sapiens
tctttacaggtgaagtaagtttcttgtagtcagcacatacttggataattttttaaattcatttagtttacatctcttaaatgggattgtaattcatttacattcaagsttattattggtaggtgatgacttatttctgtcattttgtgaattgttttctggttgttttgattatcatttgttcctttctttctctgttataatctaccaccacagtttggtgactttcttgttgttttgaatacgctttgttcctttacttctctcttattaggtttcattgcagtttggtggttttctgtagtactaacatttggcttctttctctttctaaattgtgtgtccgacctactagcgtgttttatattttcctttgtttttgtgatgataggttttatcatttttcttccagacgtagatagacc

SEQ ID NO: 348264 - DNA, 430 bp, Homo sapiens
tgcatctatgtcctcttattttacactctttcatttttcaacaggtatttattgtgtttattacatgtcagtagtatactatgagttagatataattggtaaattaataaataaaataaatattgactctacctctctggggtttacgttctcatgaaagataagaaataagagttaggtatggactcccttttgaagatgagaaaattcatgctcaaataacacrtaagtcacccatgaagaaaaatgacacttgcagggatcaatactgcagccaaaagctcccactgtaatttctctcttccacttagttatcctgagctcctattccattgtctcatgtggcccctgatctcagactgacagcttctggattgcactactctggtatcttttggacaatattaacttttgggggctttacatggta

SEQ ID NO: 348265 - DNA, 590 bp, Homo sapiens
actctactttaccaaacactcagaggtctcttctttccacacccctaggcactacatagtgacttgtggacaaaactttcctcttgtctaaactgatgactaccaaggcctcaatattcccagaggcacgatgtgggaaaccgtaattttcactctactgataaaattaggatctccatattctgtctctcttatgtcccttacagcattcaactgtttgaaacatagaatacattcagtaaatatcttaattctaggataattatgatatttcaagcctagagaacctcatggaaaataagaagcccatcaaaattagggagcacagtatggcagatctttagttagaagccatgaaatgactggaccattgtagtatctgaaaaaaatttttcaatttcttatttgtacagactgctttagagtttacarttatatataactttggagtaggcagtaatgcattaatttcccaaatttacaggggccatgcaaatttcaataatagattcagggaggtttaaggctgaattccctgcttgtaagattttgcttatttctgtgataggcactgagtgaagtattgagaa

SEQ ID NO: 348266 - DNA, 519 bp, Homo sapiens
gaagcccatcaaaattagggagcacagtatggcagatctttagttagaagccatgaaatgactggaccattgtagtatctgaaaaaaatttttcaatttcttatttgtacagactgctttagagtttacaattatatataactttggagtaggcagtaatgcattaatttcccaaatttacaggggccatgcaaatttcaataatagattcagggaggtttaaggctgaattccctgcttgtaagattttgcttatttctgtgataggcactgagtgaagtrttgagaaagcaggttctggggccagattaaaattatgactctgggttaaaattctgattctgtcatgtaccaattatttaacttctatgtgcctcaattttctcatgtgttaaatagggggtgatggtggtactacataggttcatcatgaaaataaaataaacatagataaggcactagcgagactaataaagaagaaaagagagaatatccaaataaacacagttagaactggca

SEQ ID NO: 348267 - DNA, 502 bp, Homo sapiens
tcatcagcccagagaaaggagaagtgtttattatgaatttttaaaattaaggtaaaattaacatataataaagtacatggattttaaatgtatggttcaatgaactttggtaaatgtatacacctatgtcgccaccattccagtaagggcatagatcattgtaccattccagaaaactccacctctcccactccagtcacaccctaaagaagcaaccattgtcctaatctctactaccatagcttkttagcccactctagaactatgcataaacggaatcatatagcatgtccttttttctgtctagtatctttccatgaacttcatgtttttgagattcacctatgttgttttgtttatcagtattttgttcctttatattgctgagtaggattcagcgatacagaatctacagcaatgtgtttattcatctgtggaaggatatttaggctgttttccagtttgaactattattaataaaactgctataacaattttgtaa

SEQ ID NO: 348268 - DNA, 587 bp, Homo sapiens
gaaatttttctttttgtagaaagttttaaaataactaatgtcatcatttattatagttcarttaagattttctatttcttgagtcagttccagtaatttttatcttgctacgattttgtccatttcatcttggttatcaaatttgttggcatagctgtttatagtatccttttataattttttaaattcctataagtagtgatggctcgtctttcattgctgttatgagaaatttgagttatctctctcactttctgtcagtctaattaaagatttgtcatttgttggtctctttaaagaaagagcttttgatttttctctattgttttcctattttttattttatttatatattttccagtctttattattcctttcccctacttgcttaggtttcagtttgctcttcttttttatttcttaagatgaaaagttaggttacttactcatttgaaatatttcttattcttctttttaaaatatagatgattacagctatacacttctctctaagcactgcattagctgcgtatcatgagttttggtatgttgcatttttgtttacattcatctctaaatattcactt

SEQ ID NO: 348269 - DNA, 514 bp, Homo sapiens
ttttgatttttctctattgttttcctattttttattttatttatatattttccagtctttattattcctttcccctacttgcttaggtttcagtttgctcttcttttttatttcttaagatgaaaagttaggttacttactcatttgaaatatttcttattcttctttttaaaatatagatgattacagctatacacttctctctaagcactgcattagctgcgtatcatgagttttggtatgttgcatttttgtttacattcatctctaaatattcacttagagaatatgtcttgtaatttcttctttgatcaattggttatttaggaatgtattaattaatttccatatakttgtgaatttcccaggttttattctgtgttttatttctaattttattttattgtggtcagggcacatgttttgtataacttcaatcttttaaaatttattgtttttataggcagacatatggtctaccctggagaggtttcattgtgcacttgagaagaat

SEQ ID NO: 348270 - DNA, 565 bp, Homo sapiens
atgatagagttggtggactcttaattcttgaaaacttttattgtgagctgtgtgatctcgaacaatccacttaacttctctaagcctcaatttcttcattagaaactagaaataataatataactgttgtgggtgrttagcaattaaccatctgtattattagttctagtttattattgtgttataacttcttgtttattattatttttagtttattcgtcaaaaaccaggaataataagatggccattgtagttagttaagagcagcaattctcaaagatttaggtgttagggccactttaaatccttaagaatgattgaggatccctaagcacttttgtttacatttgttgtaactattgatatttaccatattaaaaattaaaactgagaattcaaaaggtatttattaattcattaaaataacagtaagaatgcattgcatgttaaattagtaacattttaaataaaaatatattttctaaaacaaaaaatatggtgaaaatgtggcattgttgtacatttttgcagatttcttacagtttaatagaagggagcgggattt

SEQ ID NO: 348271 - DNA, 565 bp, Homo sapiens
atgatagagttggtggactcttaattcttgaaaacttttattgtgagctgtgtgatctcgaacaatccacttaacttctctaagcctcaatttcttcattagaaactagaaataataatataactgttgtgggtgattagcaattaaccatctgtattattagttctagtttattattgtrttataacttcttgtttattattatttttagtttattcgtcaaaaaccaggaataataagatggccattgtagttagttaagagcagcaattctcaaagatttaggtgttagggccactttaaatccttaagaatgattgaggatccctaagcacttttgtttacatttgttgtaactattgatatttaccatattaaaaattaaaactgagaattcaaaaggtatttattaattcattaaaataacagtaagaatgcattgcatgttaaattagtaacattttaaataaaaatatattttctaaaacaaaaaatatggtgaaaatgtggcattgttgtacatttttgcagatttcttacagtttaatagaagggagcgggattt

SEQ ID NO: 348272 - DNA, 569 bp, Homo sapiens
acttttattagtttgctagtgctgccataacaaaagaccacagaggaggtggtttcaacaacagaaattcatttgctcaaagctctggaggtgacaaaaccaaaatgaaggtgttgtcaggtttgatttttcctgaggcttctcttcttggcttgcagatggctacttgagtctcattgtgtcctcatatggtctgccctctgtgtaagcacatccctggtttctttctgtgtgtccaagtttctttttataaggacaccaatcagattggattagagyccagtctgacagccgtgttttaacttagccacttctttaaaggctgtctgcaaatacagtcacattctgaggtactggggctaagctgtcaacatatgaatttgatggagaggcacaatccagcctataaagacatcaagctatatattttatataacgagtttaaattttcataatttaatgattagtactatcagtaaatgtattttacagatataaaatttgtggcaaaaagagatcaggtattttctttaaggtcatacaactggtaatgcagagccagaatttat

SEQ ID NO: 348273 - DNA, 569 bp, Homo sapiens
acttttattagtttgctagtgctgccataacaaaagaccacagaggaggtggtttcaacaacagaaattcatttgctcaaagctctggaggtgacaaaaccaaaatgaaggtgttgtcaggtttgatttttcctgaggcttctcttcttggcttgcagatggctacttgagtctcattgtgtcctcatatggtctgccctctgtgtaagcacatccctggtttctttctgtgtgtccaagtttctttttataaggacaccaatcagattggattagagtccagtctgacagccgtgttttaacttagccacttctttaaaggctgtctgcaaatacagtcacattctgaggtactggggctaagctgtcaacatatgaatttgatggagaggcacaatccagcctataaagacatcaagctatatattttatataacgagtttaaattttcataatttaatgattagtactatcagtaaatgtattttacagatataaaatttgtggcaaaaagagatcaggtattttctttaaggtcayacaactggtaatgcagagccagaatttat

SEQ ID NO: 348274 - DNA, 579 bp, Homo sapiens
taaacttatgaaaaaattctcaacatcactaatgatcagggaaatgcaaatcaaaaaaccacaatgtaatctaccttactcctgcaacattggccattatcaaaaagtcaaaacaaacaaacaaacaaacaaaaacagtagatgttggccaggatacagtgaacagggaacacttctacactgctggtgggaatgtaaactagtacagccactaatggaaaacagtgtggagattccttaaagaactaaaagtgctaccatttgatccagcaatcccattactgggtatctacccagaggaaaagaaatcattatttgaaaaagrtacttgcacacgcatgtttatagcagctcaattcacaattgcaaaatcatggaaccaacccaaatgcccatcaatcaactagtgaataaagaaactgtgatatatacatatatatacacacacacacacacacacacacaatggaatactaagcagccataaaaaggaatgaattaacagcatctgcagtgatgtggatgagactagaccctattattctaagtgaagtaactcaggaatgggaaaccaaacat

SEQ ID NO: 348275 - DNA, 579 bp, Homo sapiens
taaacttatgaaaaaattctcaacatcactaatgatcagggaaatgcaaatcaaaaaaccacaatgtaatctaccttactcctgcaacattggccattatcaaaaagtcaaaacaaacaaacaaacaaacaaaaacagtagatgttggccaggatacagtgaacagggaacacttctacactgctggtgggaatgtaaactagtacagccactaatggaaaacagtgtggagattccttaaagaactaaaagtgctaccatttgatccagcaatcccattactgggtatctacccagaggaaaagaaatcattatttgaaaaaggtacttgcacacgcatgtttatagcagctcaattcacaattgcaaaatcatggaaccaacccaaatgcccatcaatcaactagtgaataaagaaactgtgatatatacatatatatacacacacacacacacacacacacaatggaatactaagcagccataaaaaggaatgaattaacagcatctgcagtgatgtggatgagactrgaccctattattctaagtgaagtaactcaggaatgggaaaccaaacat

SEQ ID NO: 348276 - DNA, 522 bp, Homo sapiens
aaaaaaacaagtattagaactaacagattcagcaagtgtcagattataaaatcaaaatatagaaagtatttctgtttctatacactaacaatgaacaatttgaaaataaaataaaggaaattattttatttacaatagtattgaaaacaaatagcartgccctttaaaaaagaggtgtaaaacttaccccatgaaattataaaacatcattgctattgaacattttctttccttttagtatgtcccaagatctaggttttagaaaaacaagagttaatacttcttaaaaattatgaatccatggaagcttaagggaagagtagacaggttctaattctgttttcaacacctattaattgtgataccttgggcaagttacacaactccatttgacttttcaaaaaactgactttagacacgtaactgtacgtacctataggtgttgtaacaaattagtacaaatttggtggtgtaaatacaaattatgttacaattctaagttcagaaggtctaaaatcaaag

SEQ ID NO: 348277 - DNA, 522 bp, Homo sapiens
aaaaaaacaagtattagaactaacagattcagcaagtgtcagattataaaatcaaaatatagaaagtatttctgtttctatacactaacaatgaacaatttgaaaataaaataaaggaaattattttatttacaatagtattgaaaacaaatagcaatgccctttaaaaaagaggtgtaaaacttaccccrtgaaattataaaacatcattgctattgaacattttctttccttttagtatgtcccaagatctaggttttagaaaaacaagagttaatacttcttaaaaattatgaatccatggaagcttaagggaagagtagacaggttctaattctgttttcaacacctattaattgtgataccttgggcaagttacacaactccatttgacttttcaaaaaactgactttagacacgtaactgtacgtacctataggtgttgtaacaaattagtacaaatttggtggtgtaaatacaaattatgttacaattctaagttcagaaggtctaaaatcaaag

SEQ ID NO: 348278 - DNA, 522 bp, Homo sapiens
aaaaaaacaagtattagaactaacagattcagcaagtgtcagattataaaatcaaaatatagaaagtatttctgtttctatacactaacaatgaacaatttgaaaataaaataaaggaaattattttatttacaatagtattgaaaacaaatagcaatgccctttaaaaaagaggtgtaaaacttaccccatgaaattataaaacatcattgctattgaacattttctttccttttagtatgtcccaagatctaggttttagaaaaacaagagttaatacttcttaaaaattatgaatccatggaagcttaagggaagagtagacaggttctaattctgttttcaacacctattaattgtgataccttgggcaagttacacaactccatttgacttttcaaaaaactgactttagacaygtaactgtacgtacctataggtgttgtaacaaattagtacaaatttggtggtgtaaatacaaattatgttacaattctaagttcagaaggtctaaaatcaaag

SEQ ID NO: 348279 - DNA, 465 bp, Homo sapiens
agttattcactttattttatatttcacaatataagctcctactgatctctaaaaaccttttagtaagtcacgatattttatctacaaaagcagtggagcaaattgtaattttattgagtatttaatatatgtgtttggcagtatgaaatccactgaaaatgttatattaaagttaacattaaggaaatcttggtgtcacacttgaaaacaaggctgtgatgcctattttctgtataaactttattttcatatatatrtcataaaaaatttacaggttacatttatgagttttatttcatattatgacttactgcactttctacaatctatgaattgaaatgtaaaatgtcagttgattccatagtgtgagccaaatcacagctgatagagtataatgttgactatttaggagggcagaaccaactgctaaatatgtacagatacacagacacaaactcaacatca

SEQ ID NO: 348280 - DNA, 588 bp, Homo sapiens
ctcctactgatctctaaaaaccttttagtaagtcacgatattttatctacaaaagcagtggagcaaattgtaattttattgagtatttaatatatgtgtttggcagtatgaaatccactgaaaatgttatattaaagttaacattaaggaaatcttggtgtcacacttgaaaacaaggctgtgatgcctattttctgtataaactttattttcatatatatatcataaaaaatttacaggttacatttatgagttttatttcatattatgacttactgcactttctacaatctatgaattgaaatgtaaaatgtcagttgattccatagtgtgagccaaatcacagctgatagagtataatgttgactatttaggagggcagaaccaactgctaaatatgtacagatacacagacacaaactcaacatcaatctcaatccataaattactacttgtgaacttgagtgaacttgkcatcaaccagataacagagaaacagacattgtacattcaatagatatgataccttgtttattttacataacatgcaaatacactttgtattcagctagatattgtacattagta

SEQ ID NO: 348281 - DNA, 588 bp, Homo sapiens
attccccaaacagtaaataacgagagtattccctggaagagcattattctagttagaagataaataacacgcaagtcttcaaattttgattataggtgatactgttttgcaaaccgaagacacaaatgaattaaaatggctcttcaaaataagggttttgttgttagacgccatgaattaaacatttcactccatcaattactacttgtgtgaacctgagaaatgcacataatctgtttaagtggaaatatttatagtattattcataagggtatttatgataattaaattcttgttactgtgtctggtatggatagcatatacataattctatcaatagaatacaaaaatattaacattattattaccacyttgaagatagttttcatattttacatgtaacttttttatttcatgacatctatattcagattatgtaacatacttttcttttttgctttgttttgattattatccattttcttttaagaaacgtgatgccttgtttacacatttaaatgtattcttatactattcattgtaatgtgctttaggcttgtttttaagctacagcttttgtcttaactc

SEQ ID NO: 348282 - DNA, 588 bp, Homo sapiens
attccccaaacagtaaataacgagagtattccctggaagagcattattctagttagaagataaataacacgcaagtcttcaaattttgattataggtgatactgttttgcaaaccgaagacacaaatgaattaaaatggctcttcaaaataagggttttgttgttagacgccatgaattaaacatttcactccatcaattactacttgtgtgaacctgagaaatgcacataatctgtttaagtggaaatatttatagtattattcataagggtatttatgataattaaattcttgttactgtgtctggtatggatagcatatacataattctatcaatagaatacaaaaatattaacattattattaccaccttgaagatagttytcatattttacatgtaacttttttatttcatgacatctatattcagattatgtaacatacttttcttttttgctttgttttgattattatccattttcttttaagaaacgtgatgccttgtttacacatttaaatgtattcttatactattcattgtaatgtgctttaggcttgtttttaagctacagcttttgtcttaactc

SEQ ID NO: 348283 - DNA, 588 bp, Homo sapiens
attccccaaacagtaaataacgagagtattccctggaagagcattattctagttagaagataaataacacgcaagtcttcaaattttgattataggtgatactgttttgcaaaccgaagacacaaatgaattaaaatggctcttcaaaataagggttttgttgttagacgccatgaattaaacatttcactccatcaattactacttgtgtgaacctgagaaatgcacataatctgtttaagtggaaatatttatagtattattcataagggtatttatgataattaaattcttgttactgtgtctggtatggatagcatatacataattctatcaatagaatacaaaaatattaacattattattaccaccttgaagatagttttcatattttacatgtaacttttttatttcatgacatctatattcagattatstaacatacttttcttttttgctttgttttgattattatccattttcttttaagaaacgtgatgccttgtttacacatttaaatgtattcttatactattcattgtaatgtgctttaggcttgtttttaagctacagcttttgtcttaactc

SEQ ID NO: 348284 - DNA, 505 bp, Homo sapiens
aagcttggaacttcctagagattggttaaatggttgtgactgaaatactgatagtgctatggacagtgaagcacatggtgaaaaggtctcagatgcaaatgasgagcctattgggaactggagcaaaggtcacacatgttatgctttagcaaagagcttggctgcattgtgtccatgccctagggattggtgaaagtttgaactttagaatgacaaattagggtatcggatggaagaaatttctaagcagcaaagcattcaaaatgtgctcttgctgcttctaacagcctgtgctcaaattcaggagcaaataaatgactcgagtttgtatttaaaagggaaggacagcttgaaaatttggaaaatgtgcagcctagccatgtgacaaagaaagacaaagtttttggcgttttgttttgttttttttttttttagatggagtctagtgcttttgccagtttggagtacagtggcacgatgtcagctcactgcaacctccacctcc

SEQ ID NO: 348285 - DNA, 505 bp, Homo sapiens
aagcttggaacttcctagagattggttaaatggttgtgactgaaatactgatagtgctatggacagtgaagcacatggtgaaaaggtctcagatgcaaatgaggagcctattgggaactggagcaaaggtcacacatgttatgctttagcaaagagcttggctgcattgtgtccatgccctagggattggtgaaagtttgaactttagaatgacaaatyagggtatcggatggaagaaatttctaagcagcaaagcattcaaaatgtgctcttgctgcttctaacagcctgtgctcaaattcaggagcaaataaatgactcgagtttgtatttaaaagggaaggacagcttgaaaatttggaaaatgtgcagcctagccatgtgacaaagaaagacaaagtttttggcgttttgttttgttttttttttttttagatggagtctagtgcttttgccagtttggagtacagtggcacgatgtcagctcactgcaacctccacctcc

SEQ ID NO: 348286 - DNA, 548 bp, Homo sapiens
aaaaacagcctaatacagttagggacagtctatattttagggtttttttgaaatataccataaatcattattaaccacagtcagcctattgtgctactgaacactagatcttatttcttttatayagttttttgtaataattgatgatgccctttattcctcactccccactatccttgtcagcctctctaaccacattctattctctgttcccatgaggttaatattttttagctcacacttaagagtgagagcatgtgatatttgtctttctgtgcctgactcatttcacttaacagtgtcattttccatccatgctgttgtgacagaatttcacatttaatggctcaataatattccattgtgtatatgtaccacatttatttatccattcatatgctggtggacactttcattgattcctgattgagaatagggatgcaataaacatactagtgaagatctctctttgatatactgatttcctttttaagatatgtacccagctgtggtacttctgaatattatggtaattccatttttagttt

SEQ ID NO: 348287 - DNA, 548 bp, Homo sapiens
aaaaacagcctaatacagttagggacagtctatattttagggtttttttgaaatataccataaatcattattaaccacagtcagcctattgtgctactgaacactagatcttatttcttttatacagttttttgtaataattgatgatgccctttattcctcactccccactatccttgtcagcctctctaaccacaytctattctctgttcccatgaggttaatattttttagctcacacttaagagtgagagcatgtgatatttgtctttctgtgcctgactcatttcacttaacagtgtcattttccatccatgctgttgtgacagaatttcacatttaatggctcaataatattccattgtgtatatgtaccacatttatttatccattcatatgctggtggacactttcattgattcctgattgagaatagggatgcaataaacatactagtgaagatctctctttgatatactgatttcctttttaagatatgtacccagctgtggtacttctgaatattatggtaattccatttttagttt

SEQ ID NO: 348288 - DNA, 548 bp, Homo sapiens
aaaaacagcctaatacagttagggacagtctatattttagggtttttttgaaatataccataaatcattattaaccacagtcagcctattgtgctactgaacactagatcttatttcttttatacagttttttgtaataattgatgatgccctttattcctcactccccactatccttgtcagcctctctaaccacattctattctctgttcccatgaggttaatattttttagctcacacttaagagtgagagcatgtgatatttrtctttctgtgcctgactcatttcacttaacagtgtcattttccatccatgctgttgtgacagaatttcacatttaatggctcaataatattccattgtgtatatgtaccacatttatttatccattcatatgctggtggacactttcattgattcctgattgagaatagggatgcaataaacatactagtgaagatctctctttgatatactgatttcctttttaagatatgtacccagctgtggtacttctgaatattatggtaattccatttttagttt

SEQ ID NO: 348289 - DNA, 607 bp, Homo sapiens
atgttttcatttacctcaagatattttgaaattttccttttaatttcttatttgacacattggttgttcagaagcatcagtagcatggtgcataagtagcctgggagcaacagtctccatttagccacagtatgtacaaggttgtgttatctatgtttatgtaagcaaactctatgattctrcacaatgatgaaattgcctaatgacacatttctcagaatgcattcacattattaagcaacacatgattatatttgtgaatttttttgaaattccttgttattgatttccagttttgtagcattgttattagaaaaggttctttatatgatctcaatcttcttaaattttctaatacttaccttgtgacctgacatacaatttatcctggataatattttttgtgtacttgagaaaattgtgtattccattgctattggaagaaatattctgcaaatgtctgttaggttcatttgttctaaagtattgttcaagtccagtttttccttattaattttctgtttggatgatatttttattgttgaatgtatttgttattgaagtgcttttctattattgtattgaaatctacctcttctttttagat

SEQ ID NO: 348290 - DNA, 607 bp, Homo sapiens
atgttttcatttacctcaagatattttgaaattttccttttaatttcttatttgacacattggttgttcagaagcatcagtagcatggtgcataagtagcctgggagcaacagtctccatttagccacagtatgtacaaggttgtgttatctatgtttatgtaagcaaactctatgattctacacaatgatgaaattgcctaatgacacatttctcagaatgcattcacattattaagcaacacatgattatatttgtsaatttttttgaaattccttgttattgatttccagttttgtagcattgttattagaaaaggttctttatatgatctcaatcttcttaaattttctaatacttaccttgtgacctgacatacaatttatcctggataatattttttgtgtacttgagaaaattgtgtattccattgctattggaagaaatattctgcaaatgtctgttaggttcatttgttctaaagtattgttcaagtccagtttttccttattaattttctgtttggatgatatttttattgttgaatgtatttgttattgaagtgcttttctattattgtattgaaatctacctcttctttttagat

SEQ ID NO: 348291 - DNA, 607 bp, Homo sapiens
atgttttcatttacctcaagatattttgaaattttccttttaatttcttatttgacacattggttgttcagaagcatcagtagcatggtgcataagtagcctgggagcaacagtctccatttagccacagtatgtacaaggttgtgttatctatgtttatgtaagcaaactctatgattctacacaatgatgaaattgcctaatgacacatttctcagaatgcattcacattattaagcaacacatgattatatttgtgaatttttttgaaattccttgttattgatttccagttttgtagcattgttattagaaaaggttctttatatgatctcaatcttcttaaattttctaatacttaccttgtgacctgacatayaatttatcctggataatattttttgtgtacttgagaaaattgtgtattccattgctattggaagaaatattctgcaaatgtctgttaggttcatttgttctaaagtattgttcaagtccagtttttccttattaattttctgtttggatgatatttttattgttgaatgtatttgttattgaagtgcttttctattattgtattgaaatctacctcttctttttagat

SEQ ID NO: 348292 - DNA, 607 bp, Homo sapiens
atgttttcatttacctcaagatattttgaaattttccttttaatttcttatttgacacattggttgttcagaagcatcagtagcatggtgcataagtagcctgggagcaacagtctccatttagccacagtatgtacaaggttgtgttatctatgtttatgtaagcaaactctatgattctacacaatgatgaaattgcctaatgacacatttctcagaatgcattcacattattaagcaacacatgattatatttgtgaatttttttgaaattccttgttattgatttccagttttgtagcattgttattagaaaaggttctttatatgatctcaatcttcttaaattttctaatacttaccttgtgacctgacatacaatttatcctggataatattttttgtgtacttgagaaaattgtgtattccattgctattggaagaaatattctgcaaatgtctgttaggttcatttgktctaaagtattgttcaagtccagtttttccttattaattttctgtttggatgatatttttattgttgaatgtatttgttattgaagtgcttttctattattgtattgaaatctacctcttctttttagat

SEQ ID NO: 348293 - DNA, 424 bp, Homo sapiens
ttattgtattgaaatctacctcttctttttagatttttgaatatctgctttatatggtaggtgtttccgtattgggagaaacagtcaaccctttgtatctgagggctctgcatccacagatctaccaatcaaaactactttttaacagacaataaaaagatgaataaaaacratacaaatagaaaacaatagagtataattactgtttgtgatagtatttacattgtataggtattataaataatttagagatgatttaaattatatgggaaggtatgaattagttttatgcaagtactattcaattttatataagatacttgagcattcaccaagttgtgtattttcagaaggttctgaaatgaatgcctgatagcaaggggtgacttcacataacaatttttatactattttgaagaattga

SEQ ID NO: 348294 - DNA, 566 bp, Homo sapiens
gctttatatggtaggtgtttccgtattgggagaaacagtcaaccctttgtatctgagggctctgcatccacagatctaccaatcaaaactactttttaacagacaataaaaagatgaataaaaacgatacaaatagaaaacaatagagtataattactgtttgtgatagtatttacattgtataggtattataaataatttagagatgatttaaattatatgggaaggtatgaattagttttatgcaagtactattcaattttatataagatacttgagcattcaccaagttgtgtattttcagaaggttctgaaatgaatgcctgatwgcaaggggtgacttcacataacaatttttatactattttgaagaattgatccatttatcattatataatgtactccttttttttctatttacagattttgacttaacgtttattttgtctgatataagtatagctacttttgctttcttttggttttcatttatgtggaatgcctttttccatacctacactttcaatctgtcaatgtccttaaaagcaaggtaaatttttgtaagc

SEQ ID NO: 348295 - DNA, 566 bp, Homo sapiens
gctttatatggtaggtgtttccgtattgggagaaacagtcaaccctttgtatctgagggctctgcatccacagatctaccaatcaaaactactttttaacagacaataaaaagatgaataaaaacgatacaaatagaaaacaatagagtataattactgtttgtgatagtatttacattgtataggtattataaataatttagagatgatttaaattatatgggaaggtatgaattagttttatgcaagtactattcaattttatataagatacttgagcattcaccaagttgtgtattttcagaaggttctgaaatgaatgcctgatagcaaggggtgacttcrcataacaatttttatactattttgaagaattgatccatttatcattatataatgtactccttttttttctatttacagattttgacttaacgtttattttgtctgatataagtatagctacttttgctttcttttggttttcatttatgtggaatgcctttttccatacctacactttcaatctgtcaatgtccttaaaagcaaggtaaatttttgtaagc

SEQ ID NO: 348296 - DNA, 566 bp, Homo sapiens
gctttatatggtaggtgtttccgtattgggagaaacagtcaaccctttgtatctgagggctctgcatccacagatctaccaatcaaaactactttttaacagacaataaaaagatgaataaaaacgatacaaatagaaaacaatagagtataattactgtttgtgatagtatttacattgtataggtattataaataatttagagatgatttaaattatatgggaaggtatgaattagttttatgcaagtactattcaattttatataagatacttgagcattcaccaagttgtgtattttcagaaggttctgaaatgaatgcctgatagcaaggggtgacttcacataacaatttttatactattttgaagaattgatccatttatcattatataatgtactccttttttttctatttacagattttgacttaacgtttattttgtctgatataagtatagctacttttgctttcttttrgttttcatttatgtggaatgcctttttccatacctacactttcaatctgtcaatgtccttaaaagcaaggtaaatttttgtaagc

SEQ ID NO: 348297 - DNA, 566 bp, Homo sapiens
gctttatatggtaggtgtttccgtattgggagaaacagtcaaccctttgtatctgagggctctgcatccacagatctaccaatcaaaactactttttaacagacaataaaaagatgaataaaaacgatacaaatagaaaacaatagagtataattactgtttgtgatagtatttacattgtataggtattataaataatttagagatgatttaaattatatgggaaggtatgaattagttttatgcaagtactattcaattttatataagatacttgagcattcaccaagttgtgtattttcagaaggttctgaaatgaatgcctgatagcaaggggtgacttcacataacaatttttatactattttgaagaattgatccatttatcattatataatgtactccttttttttctatttacagattttgacttaacgtttattttgtctgatataagtatagctacttttgctttcttttggttttcatttatgtggaatgcctttttccatacctacastttcaatctgtcaatgtccttaaaagcaaggtaaatttttgtaagc

SEQ ID NO: 348298 - DNA, 626 bp, Homo sapiens
ccttgcctggggatagttgctagatgaaatttatgtgaaatgtagtgaagtctgagattccctcttctgaaatcttgctgacatcacttatctatatagtatgtttttaagctaagtgtatagggaagtgtttaagacttctcaagcccaaataataaaaaataaggctaaattattcaaatagttgaaatttaaaaacactgttaaaacactttaaaaagaataaaaaattcagatgctcagagaagatctttgcagcatatatgtaatctctataatttkcagcatctaaaatgttagtacagcacacagagattattattagactttaacaagtcaataaataaaataaaaccaaatgaaaaaaatgatatatgacatgattgagaatgttacaaagagaaccagggtgagtactcacatgcaaaaaagttcattagtcatcacagaaatgcaaatttagataacataatacatccaatatactcgtcaaaacttatgtctaattatgaaaagtattgttgaagatatggaacaacttgtatacattgctagtgaaaatattaatttgaataacatttaaaaatttggtaatttaaaccatgtttcaataattttgtttctac

SEQ ID NO: 348299 - DNA, 521 bp, Homo sapiens
  misc_feature (1)...(521): n = A,T,C or G
accgttaacaatttcacagaatttaaaaagttctacaatggtgttttatatgttaaatattcttttgataaatacattaaattaacaaaataaatctggaaggcaagacaaattctgcacacatgctatatttattttttgtaaatagtacaaatttccagcaragaaattacttcactatcttcagacaagcttatattacagtcatataacttcttttattttatgcaaattttatccagtcattctgtttctttttgcttacatccataggcacttgatttctggcatttgctagaggataattttgcaaaccactacaaaaatgatttcatcatcactggtgaaatcttcttaggggctaaaatgtttttataaatgactccttgaaaaactcaaaagtgctattttaaaattcaagatgagatttttcctctcattgacttaacaccgtttaatgttatgtcatttttgaaatggcaaagtggatattcaaacaaaggatacctcagtaagctnnn

SEQ ID NO: 348300 - DNA, 521 bp, Homo sapiens
  misc_feature (1)...(521): n = A,T,C or G
accgttaacaatttcacagaatttaaaaagttctacaatggtgttttatatgttaaatattcttttgataaatacattaaattaacaaaataaatctggaaggcaagacaaattctgcacacatgctatatttattttttgtaaatagtacaaatttccagcagagaaattacttcactatcttcagacaagcttatattacagtcatataacttcttttattttatgcaaattttatccagtcattctgtttctttttgcttacatccataggcacttgatttctggcatttgctagaggataattttgcaaaccactacaaaaatgatttcatcatcactggtgaaatcttcttaggggctaaaatgtttttataaatgactccttgaaaaactcaaaagtgctattttaaaattcaagatgagatttttcctctcattgacttaacaccgtttaatgttatgtcatttytgaaatggcaaagtggatattcaaacaaaggatacctcagtaagctnnn

SEQ ID NO: 348301 - DNA, 623 bp, Homo sapiens
ggaggattgctctcccgttgtgtaaattgctctcctccccagatttctacccagcttaccccacctgcaatacaatctccaagccttggctccttggccagggccttagaactgatgacccagtactttaacaactggaactgtgtctacaacaacacaatagatcgggataaaaaggaattgagtaaattaaaaggaggcgcatattcctatagtggcaaatgggggcaacaagcaaatgtccttccgctgtgtttccaaaatccatccacagagagagacagagatagagagagacagagatagagagagagagaaaaaaagaaagagagacagaaaaaaaagaaaggaagagagagaggaagagacagagagacacagagggagtccaagagagagagatagaagtagtaaagagaaaacagtgtaccctattccttttaaagcaaggtaaatttagaacctataattagtaattgaaggtcttctccgtgaccctataayattccaataccaacttgttgtcagtgtaaaaaagggcgtagcccgaagaccactgacaacccatagtcttcctatcaaaaattcttaacccagtaacccacggatggcccaaatgcatt

SEQ ID NO: 348302 - DNA, 510 bp, Homo sapiens
accacagcaaaacaatgtctctgttaaacctcacttatcatttccccttgtttagcaaatttctccttaaaatattgtttttctttccttctaatttaaccctataaagaaaggccttttttgtttgaatttgaaatgcctgcagttatctgaaattcgtgttcttcctattgtaatagtatttcttctgaataaaatagttccttaaagtccagatttgtgtttattggacaatagatatagacrtattcacattattttttttagtcagatttgatagcttgcattcttcaaagattaagcctatttcaacaagattgtacaatttatttgcatgcagttttaaaaataatagctctttattatcagtatatgcagtatctgtaatgatttccattctcttattcctcatattactattgtcatttctgaaatgtttttattactctgaccagaggtttgtcaatcatattaaccttctcaataaaatccacttcctattatttattt

SEQ ID NO: 348303 - DNA, 581 bp, Homo sapiens
tattatgttactttagatatactcagagacattagaaaatatccttataaaatattctataatattcaatggtttatacttgtagaatttattttttaaaaaatagagacattgaagggcagataatgagaaaaaccacaactcaaatatatattaagctcttctctactctcatttaattttgacaaaataatcagtattgagtatagtaaaaaagcagaggaagmagtcacacattctttattatttttattttcacccttagttttcattattgattataaattaattagatttttacgcacattctctaataattgatttagctggaacttacccaagcaaaaatacacaattgaaaaatgaatttgtaaagatttctaggaacatggcggatgacaggcagaactagattgcagctccagacagagaagcatgtggaggtttgcactgtaaattttagctccgaacagacggcaagaacaaataagcaatcccgagaggacccatagaacttctgaaggaagtagactgcacctgcagcacccaggaaacaccccaaatactgtgagtttcccaac

SEQ ID NO: 348304 - DNA, 561 bp, Homo sapiens
aaaacccttctaaactttggtttaggcaaggatttcatgaccaaggactcaaaagcaaatacaaagataaatagctgagacttaattaaactaaagagcttttgcacggcaaaaggaacagacagcagrgtaaacagacaacctacagagtgggagaaaatcttcacaatctatacatctgacaaggactaatatccaaaatctacaatgaactcaaacaaatcaacaagaaaaaaacaatctcatcaaaaagtgggctaaggccacaaatagacaattctcaaaagaaggtatacaaatggccaacaaacatatgaaaaaaatgttcaacatcactaatgatcagggaaatgaaaatcaaaaccacaatgtgataccaccttactccttcaagaatggccataatgaaaaaataaaaaaacagtagatgttggcatggatgtggtgaacagggaacacttctacactgctggtaggaatgtaaactagtacagctactatgaaaaacagtgtggcgattacttaaagaactaaaagtagaactaccatttgatccatcaa

SEQ ID NO: 348305 - DNA, 542 bp, Homo sapiens
agcattcaccacaggctacctaaaaagtcatttagccttgagtgaacattggtagtagctaggcagtactcattacagacctggggtggtggttgccaagggtatagactcctctgtttgtggtaagggtaggaatgagtaggaaggactttgtcttattgcttgggtgccagytaagctgcagaagaaaagatcaccaggtagattcctaaggtttttgactccaggacccagaatatctggatctgtctgggacagaggggatcttgccacccagaagggaaggacacaagcttggctggcttttccacctgctgattataaagcactagggccttgagttaacataggcagtagcctaaaagtgattatcttaggccttaggtaagacccactaacacgctggcttcaggtctcacccaatgcagtctctgtggtagtggcaagaggggtgcttgtgtcacccttcccccagctccaggcaactcagcaccgagagatagactctgtttgtttaggagaaagtaaggaaggagaacaag

SEQ ID NO: 348306 - DNA, 542 bp, Homo sapiens
agcattcaccacaggctacctaaaaagtcatttagccttgagtgaacattggtagtagctaggcagtactcattacagacctggggtggtggttgccaagggtatagactcctctgtttgtggtaagggtaggaatgagtaggaaggactttgtcttattgcttgggtgccagctaagctgcagaagaaaagatcaccaggtagattcctaaggtttttgactccaggacccagaatatctggatctgtctgggacagaggggatcttgccacccagaagggaaggacacaagcttggctggcttttccacctgctgrttataaagcactagggccttgagttaacataggcagtagcctaaaagtgattatcttaggccttaggtaagacccactaacacgctggcttcaggtctcacccaatgcagtctctgtggtagtggcaagaggggtgcttgtgtcacccttcccccagctccaggcaactcagcaccgagagatagactctgtttgtttaggagaaagtaaggaaggagaacaag

SEQ ID NO: 348307 - DNA, 541 bp, Homo sapiens
tagtaaaatatttattgtggtaagttatgtaaaaaactgtcattagctctcaatgtgttaatgcattattgaagattatttaaacagaagtgaataaaagccaaaacttccaagataaacagctgtgtgaaataaagtctcattggttattcacaattttggaataaagcagagggtacctttaaaatatgttcctccttgaaaaccagaatatttacttcaaaactgagcactaagacatatcaattgaaatatcatttgttaataactgaaaggaatttaatataaacatttaacaaggaactactgatccttaaaaactctaattgtattaaagtcacttcattttctacactaacatctataaaatcaaccatgtacragaagatagttgcagttataaattggcaacagcacaaataactcgtattaaactccaatggcttaacaaatccccatttaattttgttcacataacaagatgtttcctttaaagtggatggtccagagctgatgggagacttttcaaggttgaaaatat

SEQ ID NO: 348308 - DNA, 588 bp, Homo sapiens
acttatgataacattttatatttttgctttatacatatgtacttttttgctttcatttaacattaatcaagctgacttttttggagaattgtgtagttgcatgagttataaccatgcatagatttgtttaaccaccaccatgatcagaatatggaacagttctgtcaccctagaaaactcctcatagyacccttttgtagtcccattatcttccaccactggcaaccactgtgctttttctgtctgtgtttgtttttcttgtcaagagtgttgtgtaaatggaattacaaccttttgaatctgatttctttcactcaaagtgcctgtgggctcaggggttaggtagagttcttagacatgacactgaacgtacaatctatttaaaaaatgagaaatgctatttaaaaaaacttaacaatttgctgtgtggaaaacaccgttaaaagactagaaaagttaagctacagaagaataattactttcaaatcatatatctggcaaacaaattgtttccagaatgttttaaaaacacttttgaaatttgtagaaagaggtttttatctttaaaaaaatggaaataatcaatgc

SEQ ID NO: 348309 - DNA, 702 bp, Homo sapiens
gtaggctttgaagtgcctgctcccactccctggcctctccccgcttctggtgcctgctctggttcagaaaaaagtagtaacagagcccactgccctcacgaactggccaggtgtgcacgcactcagggcagtgctaacgtggcagccaccccctgctgccttggtcccctatggacgttgggcaccaacaagcacagaagagagggcagtgggggggactgagggcagttttctttataaattacctagtcttgggtatgtctttatcagcagcataaaaatgcactaatacagtagttgacaagtagaaggtcatgaaaataaactgaatatactgcagccaggaacaagagtaggaaaaatggggcagaaaaagactgcaatgaggaaatacttatgcaagttgtagcccaaagacacatctcaccaaaaagaatgatatatatatagaaggctttctctccccgacaccttactaccacattaaaagagatccagtaagaggggattaaaactgaaagtgctcgaaattgtaccatttagaaaaacttgtgcaagaatgtwcataacagcaaattcaaaatatccaaaaagctaaaatagcccaaatgcccattagctgttgaacaagtacagtttatcactttataatgaaatactattcagccataaaaaggaataaaatacttgtatatactacaa

SEQ ID NO: 348310 - DNA, 567 bp, Homo sapiens
aagaatgggaaaagactagactagcttagccttccagcctacatcttcctcctgtgctgaatgcttcttgccctcaaacatcagactccaagctcttcagctttgggacttgggctgactttcttgttcctcagcttgcagatggcttattgttggatcttgtgatcctgtgagttaatattccttaataaactcatatatatatatatcataataatatactcatttatattaatatataacatattaataaactcatatatatgtcctattagttctgtccctctagagaatcctaatactgattttaatacaaagagtgtttctagaggaacagaatattaaggatggagtccttttgttggtttgggggtttctgaagttggctgcttaatgtgattagaccctaaaatgctaaggactctacatctaacaatatggagaacactgagagtctttggcatgaactgtttggagagttatgcaaaatraatgcattggacactcttgattcaccccttgtgagaggcaaggagtttagtgactctatacataatacctttgacc

SEQ ID NO: 348311 - DNA, 646 bp, Homo sapiens
gatttatgcccccagcataattttattttgtatgtcattttcacatgtacatagggtaataattaagttactttcagttgatgtttcatgagtggaattttaatcattgttaaaattagttttatgagagttatatacaatttttcaaataattattcacagtttatttgaaaagatcttatctgtataatttactacatagrgagatagaaaaaaaggagtctattatctaagtactccctattttaaatcattaatcaaacattttgtaataacattaatactataaaagtgcctctaacattaaaagggctgttatctatctattgtctgttgtggtacatagcaatttcaatagtaattagtacaactttctggatacttaatatatttttaagataagtcatctctcattctgtgaaataaaagtgtatatttttttctaataatattttctaatgaaaagtgtatttttttctaatttctaacttcattagaaattcaaaacaaaaatgtattattcaaagtttgtgtgtgtgtacttgtacatttgagaaagtggaattcaaaactgtaggtccaatgtcaacaggtgccttcaaggtaattcagttctgaaatacataatttcaactctatttgctta

SEQ ID NO: 348312 - DNA, 646 bp, Homo sapiens
gatttatgcccccagcataattttattttgtatgtcattttcacatgtacatagggtaataattaagttactttcagttgatgtttcatgagtggaattttaatcattgttaaaattagttttatgagagttatatacaatttttcaaataattattcacagtttatttgaaaagatcttatctgtataatttactacatagggagatagaaaaaaaggagtctattatctaagtactccctattttaaatcattaatcaaacattttgtaataacattaatactataaaagtgcctytaacattaaaagggctgttatctatctattgtctgttgtggtacatagcaatttcaatagtaattagtacaactttctggatacttaatatatttttaagataagtcatctctcattctgtgaaataaaagtgtatatttttttctaataatattttctaatgaaaagtgtatttttttctaatttctaacttcattagaaattcaaaacaaaaatgtattattcaaagtttgtgtgtgtgtacttgtacatttgagaaagtggaattcaaaactgtaggtccaatgtcaacaggtgccttcaaggtaattcagttctgaaatacataatttcaactctatttgctta

SEQ ID NO: 348313 - DNA, 604 bp, Homo sapiens
tggctcaaggagtggctttgattcgatcattttagtacatgctatgtatctgtatgctgaaatgagctttaaacccatatcaaccataatcatccagacaaaatacttttctgaagcattttctcatgcttgagaattttcaatgctatagccttgctgtgagtaaggtaaagtttcatatctctgatgaccaaattgaaaattgtagagtttgaagaatttctcagagctatacatatggtaaaaactgcatgaaatttcaacatagaatttttgattacatccagttttgtcagttaaaaaactgcttctatcctattcctctacataagtttacacctaatatctttattcayttttaccattcacagcttgtaaaatgagtcatacatttcaaaattctttaaaaaagattttaataatttttttactttaatttttattgagatataattcacatgcttaaaattcactattttaaggtgtaaaatctagatgttttatgtatacttacagaattgtgcatccatcaccaccatttaatttcaggatattctgcacccattagagaaactgtgtactcataagcagtcactccttattc

SEQ ID NO: 348314 - DNA, 623 bp, Homo sapiens
ctttgcttttttattggaccattacttcttgaatgtatttgcatttatcttaaaatatttaattctttcttttttgtgagaaatatatctttttcctataatctcaagattatctctcattttataaggttctttggagtaattttttaggttcccacttaccaccattatacatggaatccatctataaatcttcctcactttactttcacagtatatttgaaacctatccatttctgatatgaatcaactccttgacttttaattcctctctagcctggatcatctcatgtttcccaaatggtctcacatacrtgtgtctgctatctgtgctcacagactagtcacaatacaacattcagagtgtttctttttaaaaggagacaagtttggactctacttttggccttctgtcttgttcataataaaagtgaaagactttatattggtctaagtgacttacattagctgcggccctgctacttctctgatgtcttttcctctccttctgccatgttttcactctagctacaagcatctcagttttccccttaaatacagatgccaactcccacattgggacctttatagttgtttgtccttctgcctggactattcaacaa

SEQ ID NO: 348315 - DNA, 598 bp, Homo sapiens
caagaatttaggtattcttaggtaatactgcccatttaccttctacagggattatacaatgctttgtttttatcagtccaaagccaacaatttcaccaccaaggcgaagaaggtgttataacatgagaagacattagaaaaactaaccaggaagatgttagagaacaacaatagaaacarcactttgcagtgatgtcctctcataacagatttaccagaatgtctctatcaatgcacctccatagcatttctttctaaactctcaatgagtgtttctaactgccttccagaagcaaaggcaaatcatccttggataagtctcaaattatctctgtaatttttaaataatatatccagcatttaattaaaaattgattagaataagaagaaacaagatgaaatttccaaaattgcaacagaagaagaaggtcaatattcttataagaaattcaaatatttattttctcaagaaattgaagacaacatgaaggattttgaaagaaggaagtattgtttttacaaaaaaatcaaatggaaatgttagaactgaaaaatgcaataactaaaagtaagaactaaaaataataggggtttaacg

SEQ ID NO: 348316 - DNA, 565 bp, Homo sapiens
tctggctccaaatcactcattttcccagatcctactattagccaaacaccaaaaagggcacacaattgttaacacattaacacataattaggcaatatattaataattaacatataatattatatatattacatatataagagaattctatgatgacccacgaataacacaaattgggagggaaatgatgaggtatctctgtacttagggtatcagagtgcctactatgtgccaggcactaggcattctaagtgttttatgcatgttatatcatttaaccctccaatcatgctattgtttttttctttttattaatgagaaaggcttagaaaatttactaacttttccaaggtctggcaacaataagttttaaatccaagtctatttacttayttattcatttaacaaataattactaagcatctatgttgtgtgagacagtgtcccaaagatgatcagtgaagtcttatgacaaagatgttaaatctgacatgttgttagacacctaagtgtaattgtcaagcaggcaattgtaattgtcaagcaggtgaatatatgagagaag

SEQ ID NO: 348317 - DNA, 516 bp, Homo sapiens
tcatgctattgtttttttctttttattaatgagaaaggcttagaaaatttactaacttttccaaggtctggcaacaataagttttaaatccaagtctatttacttacttattcatttaacaaataattactaagcatctatgttgtgtgagacagtgtcccaaagatgatcagtgaagtcttatgacaaagatgttaaatctgacatgttgttagacacctaagtgtaattgtcaagcaggcaattgtaattgtcaagcaggtgaatatatgagagaaggcaacatttgggtaattgcctaaaggtagccagggagtttggcatgcagacctctgagtggaaagcacttaagggagaataaacaacaagtagaaaggcccytggatgaaaggctggtatggctgaggctaagtgagaacacggaaaagcaccagaaaatgaaatcagaatgacaaagggtggagaggggaagatcatacatgaccttgtagatcatagtcaggtctttaagcttgt

SEQ ID NO: 348318 - DNA, 611 bp, Homo sapiens
agatttatcatgaggaattggttcatttgattatgaaggctgagaagtccccaaatcttccctctgcaaattagaggcctgggaatgctgcggcatagttccagcccaaacccgaagtcctgagaaccagggaagcccgtgatctaaacccaatccaagtctgaaggcctgaaatcaggagtaccgatatccaaaggtggaagaagayggatggctcagctcctgaaaagagaacaaatttgcccttcctccggatttttgttctgttcaggccctcagtggtctcagatgatgtccactcatcagtgagggccatctcactaatccaaattcaaaactcttacagaaatatcctcacaatcaaaccgagaaataatattttaccagctatctgggcatccttaagtctagtcaagttgatacataaaatgaccttcacaacacagttgctaaactcttgtcagaactctgtgttgacatgtctatgcagctctttctctttttcaagcagtagccttgagcatcatatcttcaaacagcaatgttcataacaggaagtaaaaggatgagccctctgcataggcatctctgtttcgtaatcagagagaaag

SEQ ID NO: 348319 - DNA, 611 bp, Homo sapiens
agatttatcatgaggaattggttcatttgattatgaaggctgagaagtccccaaatcttccctctgcaaattagaggcctgggaatgctgcggcatagttccagcccaaacccgaagtcctgagaaccagggaagcccgtgatctaaacccaatccaagtctgaaggcctgaaatcaggagtaccgatatccaaaggtggaagaagacggatggctcagctcctgaaaagagaacaaatttgcccttcctccggatttttgttctrttcaggccctcagtggtctcagatgatgtccactcatcagtgagggccatctcactaatccaaattcaaaactcttacagaaatatcctcacaatcaaaccgagaaataatattttaccagctatctgggcatccttaagtctagtcaagttgatacataaaatgaccttcacaacacagttgctaaactcttgtcagaactctgtgttgacatgtctatgcagctctttctctttttcaagcagtagccttgagcatcatatcttcaaacagcaatgttcataacaggaagtaaaaggatgagccctctgcataggcatctctgtttcgtaatcagagagaaag

SEQ ID NO: 348320 - DNA, 587 bp, Homo sapiens
gtgtttgcattaataacccataacaagatattgttttgctttgttaaactagaagcaacattttgtgcttgttaatcttaaaaagtagaaatgaataccttgaactattatgtggagctatgtatttttctttctctcagaaaaaaatattggtgcttaagttctcgtttaaaaaaaatagagcttcttactcatttggaacaagttttaacaattgatgttcataatttttcaggtaatgatccttataacaggggcacacaaggcatttgccctgtacaaagcaatagaagaaggagtcaatcacatgtggactgtttccgctttccagcagcatccccggactatttttgtatgcgatgaagatgctactttagaattaagagttaaaactgtgaaatactttaaaggtgagcactgaatttcaaaagccgactgagataatctgttgtgagtgacaattaaaacttactgtgactgtggrgttaaatctcacactgtgacctattgaaaagtggcaacacatagctagttctttcaagtaatggaaagttctcacctcagataatagtatcttcaaagtagta

SEQ ID NO: 348321 - DNA, 575 bp, Homo sapiens
ttaactcatttctttaccctccaaaatataaaatctctggttcattaactgggtcagtctttttagaacttttttctccccaaagaaatatagtactgaggcattaaaacaggagtaactggaagatcagctatttcccaagcagcttccatagctaagagcagtctgcaagtatatgtaccaattacaaaatgaaagttataatctaccggatttaaaatcgtaatttctattctgaattaaatgatttaatacaggttgttttctgtcttgttttagtaaccctccctcagtgtagaatttgtaatcaacctttgtcataaatacacatgccaaactattggaaagtaatttrccagacgaatggatagggtaatgtattaagagtgagacagcagttctgagcccctggctggagtctagtagaggaactgccagaggatcaatatcaacatagacttttagatataattaaaacctattatctaagtcagtattcaaatttgtcatgcttaatctctttgaagacaagaaatgctcttctggttactcccaaagtacctgtacacattcta

SEQ ID NO: 348322 - DNA, 575 bp, Homo sapiens
ttaactcatttctttaccctccaaaatataaaatctctggttcattaactgggtcagtctttttagaacttttttctccccaaagaaatatagtactgaggcattaaaacaggagtaactggaagatcagctatttcccaagcagcttccatagctaagagcagtctgcaagtatatgtaccaattacaaaatgaaagttataatctaccggatttaaaatcgtaatttctattctgaattaaatgatttaatacaggttgttttctgtcttgttttagtaaccctccctcagtgtagaatttgtaatcaacctttgtcataaatacacatgccaaactattggaaagtaatttaccagaygaatggatagggtaatgtattaagagtgagacagcagttctgagcccctggctggagtctagtagaggaactgccagaggatcaatatcaacatagacttttagatataattaaaacctattatctaagtcagtattcaaatttgtcatgcttaatctctttgaagacaagaaatgctcttctggttactcccaaagtacctgtacacattcta

SEQ ID NO: 348323 - DNA, 617 bp, Homo sapiens
tacataaagaaataatatataattttaaaggttattaggcatactaaatgcttcatacactgctactatgactcttaaatgtacagcttgcctgctttaaagccattaaattctcccccagataaggcctggggacatacagagttagccatggctaactcccttctgatttggagttagccatgccccctagctatgcttgtaagagtcaaaccttatctgcacttccatctgatgtcctaggctccacacctagtacataactaaaatcrtttacttaccaggttgtacactaaaagtaaaagttgctaagtgctaacagtgtaacatatatttgaggttactggaaaaacagttttcaatgcaaggcatgtaaggaaagtagaatgtacttttagtaaaagattataagaaggcataggaatgtaattttttttgcctagcttagagggttaaaggattgttattaggtggataggataaagctgaaggttaaagcaagttgtaggaggtttgtcaaataattttgtcaaagaaattctgtgtgtgatcatgttggctaaagttaaaggggtatttttcagtttttccataaatttaacattggaataaaagca

SEQ ID NO: 348324 - DNA, 519 bp, Homo sapiens
tctactgataattactaataagaacatcctaattagaaaaatgtttcaaatataataatgaactccctagaaaaataagaaagaaatttatattactgtatcctatatatcacagcttcttcctcaagaacttatttcttaacacatcctaaatgatctcccacatataatttcatcacacatatgwaattataaactgataaacagcacaaagtgaaacaatatgctggaattagtggttatttaaaataaccagaatgtgtattttttccttaaccactgagacagacttttagtttaaaaatatcatggccctcaacctttgaatttgtgaactcctcacctgcaaataccattggtttcgctgatttaaacccaggcaagggctccactggttgcttatgtaaacataatgtatctcctatttgcgcttcagtgacatctttcatcccagcaatcagatagcccacctgtcctgcatatctaaataaaattattatatgcaaatatttactgctt

SEQ ID NO: 348325 - DNA, 562 bp, Homo sapiens
ttagctggcatataccaaataagaatctgaatgaattttattaagattaaaatcagaatagttaattgtattttaatataacataatccaaaatataaaaccatatataacttgctcttttgaaaattaaattagcttgaaagaaaaacattacattgctgtgctgacatactttacactaccatgtagtatagcagtttggctgtggctgtttaacaagcagatcatcatttcaaaggtaaataaaaattcaaatttaaaatggtagcaactttgrtataaataaaatctattgtttcctagcactacaactagctttttataaaataggtttttgtcagttccaagaatgatacatacaaaagccctgaaattagtttgaacctgctcttcaaagacagtatttccactgggcaaactgacacacaagaaatactgcagggagtttcagaaggcctgtgttttagtcctggcacattggctaactaaacctgtgatcttaggaaagtgataaaacctttgagcctcagttcctttaactacagcatcgcaataatttctg

SEQ ID NO: 348326 - DNA, 528 bp, Homo sapiens
agcccaggactctggagcagccccaagggtcggcgcggaccggggccccggggccaccagaagcgcggccccagtggctcgtggcgcgagagcgcgtgcgcacccccagccccgacccacgagggtccacatgacccgggcggcggaggcgtcaggagagggtacccacacgcaacagcagcatagcccgttttttttcgaaggtaccccccgtaggatccggtggacaggactcaaacagatcctgtgaagcgaagacaatgaaccccggggagctctgcccaagtaccagatccggaagcaacccgaagcggcggcgcagcttgccgacgtctgcacgccgcacgctgtcgtgacatcagcgcgtcttggcgccgggtagtggagtggtcacgtgagtggaggctttcgattsactccctaaaacgcagggtgtagacagagtacatattagcttatattgtctgctgagtgctgtgccaattcctttgcattgtctctttcttactactgccctgtggtgtgtgt

SEQ ID NO: 348327 - DNA, 542 bp, Homo sapiens
ttcatgttcctggtaattgtagccactgcaaggttagaaagattttacacagaggagtagcgtrgcaattttgtgtctcatttagatcattttcacagctgcttggaggcagggaataaattagtttcaagagataaatgatggcaacctacatggggacagtgatactgtgtctgcagaagaaatgaatttgactggatggtaaatttatcctgccttaatatagaatatgaaaaaagcaattgcatattacaaacccagagtaaagaaaatttttgcatttcacacttgaaatgtatcatctgattcctggtttccattatgcctccattatcatctattagttaaaaaaattaagcagggcaggggagagggaatattttgtttagttttgcactgtggagacttgtgtcattcttgtcagatgaagaccaattcaactactttctaagcttgttgttatattattctaaaacaaaaatctcaaagcaaagtttattgttctccaattctttagtgaatcttactgattcaggaagtta

SEQ ID NO: 348328 - DNA, 589 bp, Homo sapiens
tttgtcttgtcaggtaaattatctggttttcttagaaaatgagaattgcaccatgttgacatgacatatgtgaggataagatcttatacatttaattagttttttaaaagattttggtgtcaagacatatttaagtttgtcagttttactgacgagttattgtattagttacctactactacagaacagcacacattttttatcttatagtttctttgggtcaggaaactgggcatggctgaactgggttctctgctatacaacctatcacaaggctgcaattgagatatcagacaaagatccacagtctcatctgaagacacaactgagaaaggattcttttccatgctcattcagtgatttggggctgtattcagatcctgtggtctgatggactgaggacctcattttctacccatccrtgagaaatgggttgggtagaaagtgaggcctcccttatttccatgccacctgggtctctcccatattttagcttgcttcatcaaagtgtgcaagccacaaaggcaatagagtctgctaacaatatagaagtcataatatttttcatttaatcacagaaatggcatcc

SEQ ID NO: 348329 - DNA, 609 bp, Homo sapiens
gattggctaccctgatatcaggtactcactcttggtccagttccagtgactggaagtatggatttatatgaggaaaccagggtcatgtaggtatataacagagaaattctcttagcagaagaactaggcatgtataatattataattatgtaacttttttttcccctgagatagggtcttgctctgtcatccaggctggagtgcattggcatgaacaccgcccactgcagccttaacctcctgggcttaagtgatcttcccacctcagtgcccctacccccacccccctgctagtagctgggactataggcacatgccaccacacctggctaagtttctaattgttggagaggggtcttgccatgttgctcaggctggtcttgaactcctgggctcaagcaaccctcccaccttggcctcccaaaatgttggggttacaggtgtaagccaccatacccagccttgttttgacttctttagtgaagtccagtttaaattaactacaaaatgrgatgaaaagatttatcatttttcttacttaacaggtgacaataaattccttcccctctctgttcccccatccctcctttctttccttccttcccttat

SEQ ID NO: 348330 - DNA, 410 bp, Homo sapiens
tacacttaatcatttactaactcaaatgtatgctcattaagagcaagagcctggtgtaataatatttgaacctgccagaatgtatggtgattacctgctattattgttcacttagccatatgtaatattcctaatctattttccagcaaaataggcacatcatcaaaaacactggtagaaacaaattagmaataggaatccgaatggcttttttattgataaaaatcccccaatacctatttttttaatgtaagcctttccagaaaaatgaaagggacacacaaagatgactaaatggaccaatgtctaagtaagactatgtcattgccatacttgtctggcctcaccataactcatgtcaggtgctactaatcaggcttgagtaaacataaccttcactgttattagct

SEQ ID NO: 348331 - DNA, 479 bp, Homo sapiens
tttcctaattttagtataatagattccctaaaatgtgacgttcaaagaacatgttttttttttaactaatattattttccagaaagagacttggacttcagaggaatcatctattcactttcagagtcttgtggacttttatatcttcagcattcagagatagaattagcaaaaaagagggctagtttggccattcttatctgtgtcaactacagaggaactgtcacctagctcatrtcactgaaaatttttctttctgattcctgttcagttccctggaaaggtatgtatggtttgttttaaaatgtacatttcttctgtcaaggcatatatccactgctaaaatataaaatatctttttaactgtatttaacttttattccccatatgccttggcagaattagctaaacctgcagatatgaatattaagattgggtatgaatcatgtaggtgtcctattaggagctttcacaaatcc

SEQ ID NO: 348332 - DNA, 604 bp, Homo sapiens
acattgctccctgcattctggccactccagctccagccttggggcaaatgagcccagttacagctcactgcttcagaggatgcaagctataagtcttggtggcttctgcatagtgtaaagcctgcaggggcacagagtgcaagagttgaggctttgaagctccacctagattccagaggatttatggaaaagcctggatgtccaagcagaagcctgctgcaggggtggagccctcatggaacacctctactagggaagtgtggaatgaaaaagaggggttgaagcccccacacagagwctccacacagagtccctcacagtgcagctgtgagaagagggccatcatcatccagaccccagaatggtagatcccccagaaacttgcaacctgcatctagaaaagcctcagacattcatcaccagaacatggtgtgccctgcaaagccacagggttgatgctgcccaaggccttgggagcctaccctcttgcatcagtgtgacctggatgtaggacatgaagtcaaatgaaattattttgaagctttaacacaggggtgtccaatcttttggcttccctgggccacactggaaatagaagaattgt

SEQ ID NO: 348333 - DNA, 604 bp, Homo sapiens
acattgctccctgcattctggccactccagctccagccttggggcaaatgagcccagttacagctcactgcttcagaggatgcaagctataagtcttggtggcttctgcatagtgtaaagcctgcaggggcacagagtgcaagagttgaggctttgaagctccacctagattccagaggatttatggaaaagcctggatgtccaagcagaagcctgctgcaggggtggagccctcatggaacacctctactagggaagtgtggaatgaaaaagaggggttgaagcccccacacagagtctccacacagagtccctcacagtgcagctgtgagaagagggccatcatcatccagaccccagaatggtagatcccccagaaacttgcaacctgcatctagaaaagcctcagacattcatcaccagaacatggtgtgycctgcaaagccacagggttgatgctgcccaaggccttgggagcctaccctcttgcatcagtgtgacctggatgtaggacatgaagtcaaatgaaattattttgaagctttaacacaggggtgtccaatcttttggcttccctgggccacactggaaatagaagaattgt

SEQ ID NO: 348334 - DNA, 498 bp, Homo sapiens
caatcttttggcttccctgggccacactggaaatagaagaattgtgtagggccacacataaaatatgctaacactaatgatagcggatgagctgaaaaaattgcaaaagtatctcataatgttttaagaaagtttatgaatttgtgttgggccacattaaagccaccatgggctgcacacagcctgtgggctgtgggttggacaaatttgctttaagatttaatgactgcactgctgggttttaaacttgcatgggacattccctttttttggccaatttatcccttttagaatgcctacacctctattgtaacttggaagttactaatttgtttttgattttacaggatcataggcagaagggagtagccttgtgtcaggtgagactttggacttggacttttgagttaatgctggagtgagttaagactttggggaactgttrggaaggcttaatttgaactttgaaatgtgaggacatgagatttgggagggtcc

SEQ ID NO: 348335 - DNA, 542 bp, Homo sapiens
gaatttaaatgttgctgcatccaaatcaggacttagatttaaatgctaagcatctgaagcagggaaggccgtcaacctggtactgtaaaattatgagctttcctcatctggctacattaatttccatctctttgtcattttgatttctaggaaatgttcagtcaaatggaaaaagaaaattggagtgcgtggggtgggtggataaagccgcggtccatgagtccttgcttagggagaaagttttttctctcttattgtgcattttagtttaatttaatctgaaaatatcaatgctacccaaataycaatcttatctggaaaagagggttgagaaaagaaacagaaggtttaaggcaactagttcctttctacaaaacagaacagagcttaaaaatcttagtagatatctttcattgtggattgcaaatttagagtgaccacctttgtataccttagtgctcaaactactccctgtgcctcaaacattttcctgttttttttcaccttccaaagtgtaaatcataaaaggcagcctgactagt

SEQ ID NO: 348336 - DNA, 630 bp, Homo sapiens
tctgcaagctggtaggccatgaaagccagtggtatagtttcagaccaagcctgaagacctgagaaccagggatctgatggtgtaagttatggttcgaatctaaggcccaagaatgaggaaagccaatgtttgtagacaggagaagatggatgaccctgttcaagtagagagagmaaatttgtcttttctctattttttaattttgtttggactttcaatggattggattatgcccatctacattggtgagggccactttcttaatctacttattcaaatgctaatatcttccaaaaattccttcatattaacaccaagaaataatgttttaccagctgtctgggcattctttagccctgtcaacttaacatataaaattaaccgccacatcttgatttcactattgccttcaaacaatcttctacagatagccaccaaagtaatttcaaacataaattgtaccataaaatattctgtaactaaaatgattgttttggatatatattctctaactcttaaatggtccttaatcaataaatctgcaccatacattaaatccattcagttagtttggcatacatttggagcatctacaagaaaggaatattgctcaaggttaaagattctata

SEQ ID NO: 348337 - DNA, 570 bp, Homo sapiens
ctctcccccctctctccttaccttcatcctttccttctctccctcagttctctctctgaactctctcttaagttgatcctatctattcccatggctttatatatcatctatatatagacaattcccaaagttacatatgcatccttgacctttcttctcaggatcagactatttgatagacatttcaaacttaacataatccaaactggattcttaaagtctttacccttcccaacccaacactgccttctctatttcaagaaatgacatcacaaagcactcactcaaatcagaaatcatctaatttttcaacaaattctatcaattctgtctcttaaatatatctctcactaaccaatttcctccatttccactgctatcagcctggttgaagtcaccattttctcccacttataattctctttgtaattattttaaaaagtgaaatatcacttttacagtagcagattggtaggagataacaaagctyacttaaaaagactgtaaaaatacacctttaatgacttgacaaaaccaggaaagattcttctgtggttgctaactgcaatt

SEQ ID NO: 348338 - DNA, 570 bp, Homo sapiens
ctctcccccctctctccttaccttcatcctttccttctctccctcagttctctctctgaactctctcttaagttgatcctatctattcccatggctttatatatcatctatatatagacaattcccaaagttacatatgcatccttgacctttcttctcaggatcagactatttgatagacatttcaaacttaacataatccaaactggattcttaaagtctttacccttcccaacccaacactgccttctctatttcaagaaatgacatcacaaagcactcactcaaatcagaaatcatctaatttttcaacaaattctatcaattctgtctcttaaatatatctctcactaaccaatttcctccatttccactgctatcagcctggttgaagtcaccattttctcccacttataattctctttgtaattattttaaaaagtgaaatatcacttttacagtagcagattggtaggagataacaaagctcacttaaaaagactgtaaaaatacacctttaaygacttgacaaaaccaggaaagattcttctgtggttgctaactgcaatt

SEQ ID NO: 348339 - DNA, 553 bp, Homo sapiens
ttacttactattttgactaaaatcctttaggtactgctcagtaaggacgtatgtttatgttgaccatatttcctttagcaaagaaaggtgaaattcttcacaatgttctgtcatagttatgtttttttatgacaacattgctatttcatggcctatgcaattgcaccattattaagatttttgtcaaagtattccaagtttattgtgaaaattttattatgatcagcaggtgagaattgttaagayagtttgaggaaaatgaccagatatagtatgtttttaatgtaattgtcaatatacaaattctatttcataaagagtatctctaccttctttcgacaggagaagctaatgacttacagcttagaattttaacttaatttgaacatttactcaaacatcgcgtttatatggggagctcttcaaaggaaaactttctgccttgcagtatttatgtttcatacacaaatctgagctagggatagtaaggtatagcatgacaaaataatgttttaaatacaattgaatcttcttttaaaacaaatatagttga

SEQ ID NO: 348340 - DNA, 553 bp, Homo sapiens
ttacttactattttgactaaaatcctttaggtactgctcagtaaggacgtatgtttatgttgaccatatttcctttagcaaagaaaggtgaaattcttcacaatgttctgtcatagttatgtttttttatgacaacattgctatttcatggcctatgcaattgcaccattattaagatttttgtcaaagtattccaagtttattgtgaaaattttattatgatcagcaggtgagaattgttaagacagtttgaggaaaatgaccagatatagtatgtttttaatgtaattgtcaatatacaaattctatttcataaagagtatctctaccttcttwcgacaggagaagctaatgacttacagcttagaattttaacttaatttgaacatttactcaaacatcgcgtttatatggggagctcttcaaaggaaaactttctgccttgcagtatttatgtttcatacacaaatctgagctagggatagtaaggtatagcatgacaaaataatgttttaaatacaattgaatcttcttttaaaacaaatatagttga

SEQ ID NO: 348341 - DNA, 569 bp, Homo sapiens
aaatgtggaggaagcaacgttctcagactttcaaggttggataagaagctatttagcttttgcctgggtcccttggaacacttgttctttgagtccractgccatgtaataagtacctgagattgtgatgctgaagaggctgtatggggagaccacatggagagactgtgactacaagatgagagagaaagagatgcccgattttcaagtccccagctggtcgagtcatcccagttgaggccacagacatcacagaaacaagtcattcctgcctgactttcccaaactgcagatgaatacacaaaaggaatgattgttgtgagtcactacattttggagtggtttgtgatatagcagtaaataactagaacacatttggtgaatggaattggtttttgaaaatgttacattgcatctgagaccaagtagtaggaaaaagatggaaacaccccaaggggactattagtggaagctcaaagggtcccaggcttaggatttgaaggagagtgaaaaatatgtttttgtaggatggaaaaaattgagacttattttatgtagtaccaaaaagt

SEQ ID NO: 348342 - DNA, 569 bp, Homo sapiens
aaatgtggaggaagcaacgttctcagactttcaaggttggataagaagctatttagcttttgcctgggtcccttggaacacttgttctttgagtccgactgccatgtaataagtacctgagattgtgatgctgaagaggctgtatggggagaccacatggagagactgtgactacaagatgagagagaaagagatgcccgattttcaagtccccagctggtcgagtcatcccagttgaggccacagacatcacagaaacaagtcattcctgcctgactttcccaaactgcagatgaatacacaaaaggaatgattgttgtgagtcactamattttggagtggtttgtgatatagcagtaaataactagaacacatttggtgaatggaattggtttttgaaaatgttacattgcatctgagaccaagtagtaggaaaaagatggaaacaccccaaggggactattagtggaagctcaaagggtcccaggcttaggatttgaaggagagtgaaaaatatgtttttgtaggatggaaaaaattgagacttattttatgtagtaccaaaaagt

SEQ ID NO: 348343 - DNA, 606 bp, Homo sapiens
ctcttagcaaaaattctccaaagtagaaaatggcttcagcacaaagataaaacttaggatgccaccattaaagtatgggctcagagataaactgaaggttgtgactataaaccatttgttaagacttcagacagatgtaagggtatacttagcmgggcttctaaatatctcatgggcacatcttgtgaaccctctcagttaaacaacaagggttttagaaatattaacatcctacaagaaccacacagggggtctaacgtagaaaagggcctgtcttgggaagaaacactggttgtgaagtggattataaattgatccataagaaactcaaatagggaggcagcaaattgactgagcatctctgttctttggatagaagttggtaagatttgtaaatagtaaaatttcttacacaaagtttgcaagtactacaggttccatttgttgcaatatgcatttgtcatcccttgtaaagggtacacatgtctctttatgtcatcttcttaacaacaataaaaagcagcataattttttaatcttatatatttcccaccagggaggagacagcattcattgggaggtgagaattattgggcttaaaccttc

SEQ ID NO: 348344 - DNA, 606 bp, Homo sapiens
ctcttagcaaaaattctccaaagtagaaaatggcttcagcacaaagataaaacttaggatgccaccattaaagtatgggctcagagataaactgaaggttgtgactataaaccatttgttaagacttcagacagatgtaagggtatacttagccgggcttctaaatatctcatgggcacatcttgtgaaccctctcagttaaacaacaagggttttagaaatattaacatcctacaagaaccacacagggggtctaacgtagaaaagggcctgtcttgggaagaaacactggttgtgaagtggattataaattgatccataagaaactcaaatagggaggcagcraattgactgagcatctctgttctttggatagaagttggtaagatttgtaaatagtaaaatttcttacacaaagtttgcaagtactacaggttccatttgttgcaatatgcatttgtcatcccttgtaaagggtacacatgtctctttatgtcatcttcttaacaacaataaaaagcagcataattttttaatcttatatatttcccaccagggaggagacagcattcattgggaggtgagaattattgggcttaaaccttc

SEQ ID NO: 348345 - DNA, 606 bp, Homo sapiens
ctcttagcaaaaattctccaaagtagaaaatggcttcagcacaaagataaaacttaggatgccaccattaaagtatgggctcagagataaactgaaggttgtgactataaaccatttgttaagacttcagacagatgtaagggtatacttagccgggcttctaaatatctcatgggcacatcttgtgaaccctctcagttaaacaacaagggttttagaaatattaacatcctacaagaaccacacagggggtctaacgtagaaaagggcctgtcttgggaagaaacactggttgtgaagtggattataaattgatccataagaaactcaaatagggaggcagcaaattgactgagcatctctgttctttggatagaagttggtaagatttgtaaatagtaaaatttcttacacaaagtttgcaagtactacaggttccatttgttgcaatatgcatttgtcatcccttgtaaagggtacacatgtctctttatgtcatcttcytaacaacaataaaaagcagcataattttttaatcttatatatttcccaccagggaggagacagcattcattgggaggtgagaattattgggcttaaaccttc

SEQ ID NO: 348346 - DNA, 546 bp, Homo sapiens
accaaggatggtattttagtctctaggaacatctatctaaatttagacttttcctgcagcaatatttctttaaactgtacaccacgaaccacaaattatccagttacatcacttcgcttttaagtsattggtttttttaaaaaaaataggtaaatagtgacccccagtggcaaaacttgttagtatccgcacactgtaaagaattgaaataaaatgagatgctggtcaggacagttttgactgattgtaggatattagtgtccagtaaacataccctaacaaacattaaaaaaaagaaaatgactctcatgtattcctatggaatatctctaaaagagagatggcaagttatttcttattgtgtaattgaatactattgtttacttttacttgtagtgccatttttttttactatattcaaaaattaatttggaaattgatttaaaaagctataaccatgaatataaactaacatattcagaaataactgaccttaagctacatttttatgttggtgctactccggtaaaatccagaacacaatcc

SEQ ID NO: 348347 - DNA, 546 bp, Homo sapiens
accaaggatggtattttagtctctaggaacatctatctaaatttagacttttcctgcagcaatatttctttaaactgtacaccacgaaccacaaattatccagttacatcacttcgcttttaagtcattggtttttttaaaaaaaataggtaaatagtgacccccagtggcaaaacttgttagtatccgcacactgtaaagaattgaaataaaatgagatgctggtcaggacagttttgactgattgtaggatattagtgtccagtaaacataccctaacaaacattaaaaaaaagaaawtgactctcatgtattcctatggaatatctctaaaagagagatggcaagttatttcttattgtgtaattgaatactattgtttacttttacttgtagtgccatttttttttactatattcaaaaattaatttggaaattgatttaaaaagctataaccatgaatataaactaacatattcagaaataactgaccttaagctacatttttatgttggtgctactccggtaaaatccagaacacaatcc

SEQ ID NO: 348348 - DNA, 410 bp, Homo sapiens
tactgtttacttatttttgcatcctctggtgttctagacataatcttyttcccatggtagtgggcagcagtatatgtaagctaaaattgttatgatatataaaattgttctcttactgccagaaggaacaataaaggaatatcaaatatgagaaatcacatattaagtcagttggcatatattactgataattgcaaatcatttgctaaaaaataaaagtggcaatccagcagaaaaataagcacttttaagcactattacataaggtaattgtcagtgatgggttcaattgggatcaaatagccatgaaaagaagcaaaatcacaacttcctaaatcatcagaacttcttaaaataagtggtgaactaagatacgagcaagtattaaattgtagtgtgtattcactcct

SEQ ID NO: 348349 - DNA, 410 bp, Homo sapiens
tactgtttacttatttttgcatcctctggtgttctagacataatcttctycccatggtagtgggcagcagtatatgtaagctaaaattgttatgatatataaaattgttctcttactgccagaaggaacaataaaggaatatcaaatatgagaaatcacatattaagtcagttggcatatattactgataattgcaaatcatttgctaaaaaataaaagtggcaatccagcagaaaaataagcacttttaagcactattacataaggtaattgtcagtgatgggttcaattgggatcaaatagccatgaaaagaagcaaaatcacaacttcctaaatcatcagaacttcttaaaataagtggtgaactaagatacgagcaagtattaaattgtagtgtgtattcactcct

SEQ ID NO: 348350 - DNA, 410 bp, Homo sapiens
tactgtttacttatttttgcatcctctggtgttctagacataatcttcttcccatggtagtgggcagcagtatatgtaagctaaaattgttatgatatataaaattgttctcttactgccagaaggaacaataaaggaatatcaaatatgagaaatcacatattaagtcagttggcatatattactgataattgcaaatcatttgctaaaaaataaaagtggcaatccagcagaaaaataagcacttttaagcactattacataaggtaattgtcagtgatgggttcaattgggatcaaatagccatgaaaagaagcaaaatcacaacttcctaaatcatcagaacttcttaaaataagtrgtgaactaagatacgagcaagtattaaattgtagtgtgtattcactcct

SEQ ID NO: 348351 - DNA, 410 bp, Homo sapiens
tactgtttacttatttttgcatcctctggtgttctagacataatcttcttcccatggtagtgggcagcagtatatgtaagctaaaattgttatgatatataaaattgttctcttactgccagaaggaacaataaaggaatatcaaatatgagaaatcacatattaagtcagttggcatatattactgataattgcaaatcatttgctaaaaaataaaagtggcaatccagcagaaaaataagcacttttaagcactattacataaggtaattgtcagtgatgggttcaattgggatcaaatagccatgaaaagaagcaaaatcacaacttcctaaatcatcagaacttcttaaaataagtggtgaactaagatacgagcamgtattaaattgtagtgtgtattcactcct

SEQ ID NO: 348352 - DNA, 583 bp, Homo sapiens
taaataggtttcacaaagttcaatgtgcgttaaagaacaaaaaaraaatcaccttgttttattttatacttgaattcctattactgcattaaaatatttgtttctgtattgattcaacaaatgtttccatgttttctacatgtttagcaatgagctggcatgattctaatagtaaaattaagtatcaccttatattaatataacatttgataatttataaagccctttcacatgcatcatcacaacagattatcaaatattatttaataatcttatgagatggccagattagccaaatctatttccctcatttcctccaccttttttaacacacaaaaggaaattttgatgctcaagaaaaataagtgacttgttcaatgtcacaactgggtaaatactgagacaggacttggatctgtcttctgactcctaacttggacatctttatagtcacactttaatttacttggttgtagtccagatagggcaattaactagtagacctttctgtaggagagtttcctcacttataaaaatgtgtggattggataagataatgtctagggcaacagttttttttttt

SEQ ID NO: 348353 - DNA, 577 bp, Homo sapiens
gcgttaaagaacaaaaaaaaaatcaccttgttttattttatacttgaattcctattactgcattaaaatatttgtttctgtattgattcaacaaatgtttccatgttttctacatgtttagcaatgagctggcatgattctaatagtaaaattaagtatcaccttatattaatataacatttgataatttataaagccctttcacatgcatcatcacaacagattatcaaatattatttaataatcttatgagatggccagattagccaaatctatttccctcatttcctccaccttttttaacacacaaaaggaaattttgatgctcaagaaaaataagtgacttgttcaatgtcacaactgggtaaatactgagacaggacttggatctgtcttctgactcctaacttggacatctttatagtcacactttaatttacttggttgtagtccagatagggcaattaactagtaracctttctgtaggagagtttcctcacttataaaaatgtgtggattggataagataatgtctagggcaacagtttttttttttcaaacttctgactgtaaccc

SEQ ID NO: 348354 - DNA, 585 bp, Homo sapiens
tcaacaaatgtttccatgttttctacatgtttagcaatgagctggcatgattctaatagtaaaattaagtatcaccttatattaatataacatttgataatttataaagccctttcacatgcatcatcacaacagattatcaaatattatttaataatcttatgagatggccagattagccaaatctatttccctcatttcctccaccttttttaacacacaaaaggaaattttgatgctcaagaaaaataagtgacttgttcaatgtcacaactgggtaaatactgagacaggacttggatctgtcttctgactcctaacttggacatctttatagtcacactttaatttacttggttgtagtccagatagggcaattaactagtagacctttctgtaggagagtttcctcacttataaaaatgtgtggattggataagataatgtctagggcaacagtttttttttttcaaacttctgactgtaaccyttgtaagaaataacatttgatattgcaatctagtatatatatatatatatatacacatatacaacacaaacatataaaatataattaagacaaga

SEQ ID NO: 348355 - DNA, 601 bp, Homo sapiens
gggtaaattagttcaatcattgtgcaagacagtgtggcaattcttcaaagatctagagacagaaatattatttgacacagcaatgtcattactgggtatatacccaaaggaatataaatcattttatatayccataaattttttattttacacccaaattaaaaagacacatgtacatgtatgttcattacagcactattcacaatagcaagaacatggaataaacctaatgcccatcaatgagagactggataaaatgtggtacatatacaccatggaatactatgcagcaataaaaagaaactagatcatgctgtttgcagggatatggatagaggtggaggccattatccttagcaaactaacacaggaacagaaaaccaaatactgcatgttttcacgtataagtgggatctaaatgatgaaaacccatggacacatgtaggggaacaacacacactggggcctgtcagagggtggtgggtgggaggagggacaggatcataagaatagctaacggatgctgggcctaatatctagctgatgggatgattggtgcagcaaacaaccatggcacacatttacctatgtatcaaacccg

SEQ ID NO: 348356 - DNA, 546 bp, Homo sapiens
atattgtggcatacaaagaaagagaaaagtatggcctatgtataagcaaaaatacattcactagaagatatgcctgaagaagctcggatgttggttyactagacagagacttttaatgagttagatatacatctgtatgtgtgtacacatatataaacatatttttcaagtactaataaaaaccatgtctaaagaattaaagatatgtataagaacaatgtcataataaggaaaatcaataaaatatagaaattatttaaaaaaacaaacaaaaattctggagttgaaaagcataataaaattttgaaattttattttgaaatgaaaatttactagtggggctcaacagaagagttgagctggtggaagaaagaaatagcaaactagtatctattttactagaaatagaaagataggttagttgagattatctagttgtattagtccattctcacactgctataaagaaatacctaagactgggtaatttatataaaaagaagtttaatgggctcatggccacaggctgtacaggaaacatggtgg

SEQ ID NO: 348357 - DNA, 597 bp, Homo sapiens
tactccataaattttcttatttttttaaatacagaacttgccctaagtgttcttttatcagtctttgacattgttgattatgcccttcctttgcctttatagtgcattctctcatttttctaaatacatatgtggccgtttctgaatatttttaaataaatgttgctttcttaacatttaaatattgatatgctttagagcctacccataagcccactcactccctttatatatcttccatcatcattatatatgtattttttctcttaatttatatttctagtcacrgtatgtcccctgaggcccagacatttataattaatattagaatgtctaataaacacctcaaaatcaatatgccctaaattagttcctctcctgtgatttccttctgaataagtgatagtagagactcataactgcttcaaaaggaaacacttttcattccctctttccaggaaaccaaacaattagcaaatcctattcattccagatttaaaacatttttcatgtatgtctacttcactggatcctacccaaatccagatcaccaacatcttttgtggtatctaatggacatagctggactttctacct

SEQ ID NO: 348358 - DNA, 597 bp, Homo sapiens
tactccataaattttcttatttttttaaatacagaacttgccctaagtgttcttttatcagtctttgacattgttgattatgcccttcctttgcctttatagtgcattctctcatttttctaaatacatatgtggccgtttctgaatatttttaaataaatgttgctttcttaacatttaaatattgatatgctttagagcctacccataagcccactcactccctttatatatcttccatcatcattatatatgtattttttctcttaatttatatttctagtcacagtatgtcccctgaggcccagacatttataattaatattagaatgtctaataaacacctcaaaatcaatatgccctaaattagttcctctcctgtgatttccttctgaatragtgatagtagagactcataactgcttcaaaaggaaacacttttcattccctctttccaggaaaccaaacaattagcaaatcctattcattccagatttaaaacatttttcatgtatgtctacttcactggatcctacccaaatccagatcaccaacatcttttgtggtatctaatggacatagctggactttctacct

SEQ ID NO: 348359 - DNA, 411 bp, Homo sapiens
gcacaataatagtaggggtcttcaatactccactgatcaaattggacaggtcatcaagagagaaagtcaacaaagaaacaatggacttaaactatacrctagaaaagactggacttaacagatatttacagaacattctatacattctatttattagcacatggaacattttccaagatagaccatatgatagaccacaaaacaagtctcaacaaatttaaggaaacagaaattatatcaggtattctctcagaccacaatgaaatatattggaaatcaactccaaaagaaatcatcaaaaccaggcaaatacatgaaaattaaataacctgctcctgaatgattgttggatcaacaacaaaatcaagatgggaattaaaacattattttaactgagtgataagtaacaca

SEQ ID NO: 348360 - DNA, 568 bp, Homo sapiens
actggaagtaaaactgtcactgctcactgatgatatgactgtatacctagaaaaccctacagactcatccacaaccttctagaactggtaaatgcattcagcaaagttttaggatataaaattaacatacacaaatcagtaactctgctatacaccaacaacaaccaagctgagaatcaaatcaagaatgcaatcatttttacaatagctgcaaaaagaaaaaataaattaggaagatacctaactagggaggtaaaagacctctacaaagaaaactacaaaacactgctgaaagaaatcatagatgacacaaataaaggggtacatggatggatagaagcaatattgtgaaaaggaccatactgccaaaagcaatctacaaatcccttgcaattccaatcaaaataccaccatgattcttcacagaactagaaaaaaaaaatcctaaaattaatatggaaccaaaaaaagagcttgcatacccaaagcaagactaagyaagaagaacaaatatgaaggcatcccattaacaaacttcagactataatataagcctatggtcacccaa

SEQ ID NO: 348361 - DNA, 641 bp, Homo sapiens
tttttgacagaaaattttggatataaaaaagcaatggaatgcataaatgtcccaaaatatctcatttatgaaaaagaaatayaactagttgactagaatgtctgagctaaagtggacccataccgttgaatatttgataacctacactacaatagagtcaacaacagaagagttttcatttatgtagcaacagctacacgtccaattcaatacacatacctaagcagttctcatacctcagtttgatttctttagaagctatttctctttggaatataattttatattttcagtaacaggtatacaatagaaattaataaatgtaatattaggattgcttgcctactattttgagaagagaaagaaagaaaaaaagaaaagaaagaaagaaagaaagaaagaaagtagcaggaggaggacaaggagaatgaggagaaggagaaccagaaggagaaggagaagaaacgtaggaaggaaggaaggagggagggagggaaggaaggaaggaaggaaggaaggacgggaggaaggaaggaaaggaaaaaaacatggaggaaagaaagacccttcaaataccatgctatttaatgagatttttaacgtaaatggttaacattttctaatagattgaaatagagatg

SEQ ID NO: 348362 - DNA, 514 bp, Homo sapiens
tactaattagtaagcaaataaatgagcagagagatgataatttcagaaatataccarttggactcttaatttaagaaggctttattgtttttatatttgcacttgctcaaacattggtgaataataaatgtttaatcataatctattttgtcttaccccaatggcattttttgtttgtcatatgacaaactcttgtttgtgatgttatttatttatattttgaccattgcttctgaatcataaacatcttttggagaagaaaagattccgtatggagactccatttctccaacagcataaatgtaggaggttgatacttagaatttacaaatattatttaaaaatacagtattttaatgttcaatgttatagctataattaatgttataaaaagttcttctcactttttccccctattttaagaattggtgaccgaatttaagcttaaataaggacactatatgatttataagagaataatctctatctggtaaaactttaggcatattttact

SEQ ID NO: 348363 - DNA, 480 bp, Homo sapiens
tattaagaatataaatagatatacacacatgtacacacacgtatatatacacaaacacacatataccttactacgtaaacaaatctttaactgattattaataacatcatcacttatacattatacaattatatataatatacattwtatataattatacatagatattgaaatatattatgtacatgcatatatatgaatgtacaatatatacacagcgtgatagataagggggagggagggcatatttatgaatgtataatatacacataacagataatggggagggagagctagagaagagaaagaagaagaaaaaaaggaggagaaaagaagaggaggaggaaggggagggaaaggtgagggaaggagaggaaaaggaaagaagaatggccacttttcaacataggatcaaaattgaatatatagagataaaagtttcttaatttttccatttcttaaaatggtagccaaaaattt

SEQ ID NO: 348364 - DNA, 632 bp, Homo sapiens
agaggctcagatgttttctctagctgcccctaagcttatctgttcacagtgcagcctctggtatgagttttccttgcttacaactttacaactttggaatctccttaaatataggcaaatctgtggctctcttcatccctttgttgatatgaggacaaccatggtgaagaccacataggccctacatctgcccagacctgtgaggtagttatttttactctgttgtggttgactgccccattttagggaaggacagtcacctaggttgccttcttcaatagtttcatataagtgagaaaaaaatctctgtattaaaattcacaatattacctatctaggtaatttatcatctccactacgtgctgtaatcattaaaaggggaacaataatcaraggctctcattcctgtcacaattctctcttttctttttacaaatatcccacctcatcatccctgcctagcacggaatattagcttttctttttatgttaggaaaattgctctattatcaccaaacattattttccgaattatattattattgtgataaactttgaaaacattgtgaattaactcttgatttgaaaagtatttttttttcagaatcaaaacaagcaaaagaaaacaaaaa

SEQ ID NO: 348365 - DNA, 632 bp, Homo sapiens
agaggctcagatgttttctctagctgcccctaagcttatctgttcacagtgcagcctctggtatgagttttccttgcttacaactttacaactttggaatctccttaaatataggcaaatctgtggctctcttcatccctttgttgatatgaggacaaccatggtgaagaccacataggccctacatctgcccagacctgtgaggtagttatttttactctgttgtggttgactgccccattttagggaaggacagtcacctaggttgccttcttcaatagtttcatataagtgagaaaaaaatctctgtattaaaattcacaatattacctatctaggtaatttatcatctccactacgtgctgtaatcattaaaaggggaacaataatcaaaggctctcattcctgtcacaattctctcttttctttttacaaatatcccacctcatcatccctgcctagcamggaatattagcttttctttttatgttaggaaaattgctctattatcaccaaacattattttccgaattatattattattgtgataaactttgaaaacattgtgaattaactcttgatttgaaaagtatttttttttcagaatcaaaacaagcaaaagaaaacaaaaa

SEQ ID NO: 348366 - DNA, 632 bp, Homo sapiens
agaggctcagatgttttctctagctgcccctaagcttatctgttcacagtgcagcctctggtatgagttttccttgcttacaactttacaactttggaatctccttaaatataggcaaatctgtggctctcttcatccctttgttgatatgaggacaaccatggtgaagaccacataggccctacatctgcccagacctgtgaggtagttatttttactctgttgtggttgactgccccattttagggaaggacagtcacctaggttgccttcttcaatagtttcatataagtgagaaaaaaatctctgtattaaaattcacaatattacctatctaggtaatttatcatctccactacgtgctgtaatcattaaaaggggaacaataatcaaaggctctcattcctgtcacaattctctcttttctttttacaaatatcccacctcatcatccctgcctagcacggaatattagcttttctttttatgttaggaaaattgctctattatcaccaaacattattttccgaattatattattattgtgataaactttgaaaacattgygaattaactcttgatttgaaaagtatttttttttcagaatcaaaacaagcaaaagaaaacaaaaa

SEQ ID NO: 348367 - DNA, 580 bp, Homo sapiens
tctctgatgtgacaattatgaaacttaggtctattgaaagcttraaacttccagcagaagaattggatggcaaattgcagttagtttcaggggattttagctcatagctcagcgacagctatccattcttctaccccagacctgtggtaggcagcctgcacatgttcctagaggagcttacacagcttgttggagccatctaggcaataaagatcctgttctacaaatatcagagatccatatttggattactaattgctgcttctaaccaagggaatataaacacaaaggtaacggtcattgttgcacatccttcattgcttcaacctccccacctcctcagagacttccaggagatttaaaaggcaagtgtgctttcttccttcccacattcatttttctcttttcccattattgatagccagaaattaaagactaggacactccaaaaagtgcatataagggtgaaattagaaagatatcatgcatactagggaaagtcaaagactgaaaaaaaaatctgaaatgacattaagtttttacccctcaggctaatctttagtagacagatagcataaga

SEQ ID NO: 348368 - DNA, 546 bp, Homo sapiens
cattaaaattaaaaacttctgctctgtgaactacaccaaagacaaataaaaagacacaccccagactgggagaaactcatatctgacaaaggattggtaccccaaaaatacaaagaactcttaatactcaataataataacccagttaaaaattgggcaaaagatctgaacagatacctgaacaaagaagacatgcagatgaaaaataagcatatgaatagacactctacatcatatgtcatcagggaattgcagattaaaacaatagtgagatacagctgtgctyttattggaatgatcaagatacagaacactgttaaacaccagaggttggcaaggatgcggagtaacaggaactgtcacttattgctggtgggaatgcaaaatagtacaaccactttggaagacagtttggccatttcttaaaatactaatcatattcttatcatataatctaacaatcatgcttcttaatatttgtacaaatgagttgtaagcttatgctcacatagacacacacatatacacatttgtggcagctttact

SEQ ID NO: 348369 - DNA, 546 bp, Homo sapiens
cattaaaattaaaaacttctgctctgtgaactacaccaaagacaaataaaaagacacaccccagactgggagaaactcatatctgacaaaggattggtaccccaaaaatacaaagaactcttaatactcaataataataacccagttaaaaattgggcaaaagatctgaacagatacctgaacaaagaagacatgcagatgaaaaataagcatatgaatagacactctacatcatatgtcatcagggaattgcagattaaaacaatagtgagatacagctgtgcttttattggaatgatcaagatrcagaacactgttaaacaccagaggttggcaaggatgcggagtaacaggaactgtcacttattgctggtgggaatgcaaaatagtacaaccactttggaagacagtttggccatttcttaaaatactaatcatattcttatcatataatctaacaatcatgcttcttaatatttgtacaaatgagttgtaagcttatgctcacatagacacacacatatacacatttgtggcagctttact

SEQ ID NO: 348370 - DNA, 578 bp, Homo sapiens
aaacagtaataaagagatgggatttaattaagctaaaaagtttctgcacagcaaacgaaacaatcagcagagaaaacagaaaactcacagaataggagaaaatcttcacaatctgtgtatctgacaaaggactaatatccataatctataaggaacttaaacaaatcagcaagaaaaagacaattccatcagaaagtgggctaaggacatgaayagacaattctcaaaagaagatatacaaatggctaacaaacatatgaaaaaatgctcaacatcactaataatcagggaaatgcaaatcaaaaccacaatgtaatgccaccttactcctgcaagaatggccatagtcatacaatcaaaaaataatagatgttggcgtggatgtggtgaaaagggaacacttttatattgctgatgggaatgtaaactagtacaatcactatggaaaacagtgtggagattccttaaagaactaaaagtagaactacaatttgatccagcaatcccactactgtgtatctaccaagaggaaaagaagtaattatccaaaaaagatacttgcacatacatgtttatag

SEQ ID NO: 348371 - DNA, 578 bp, Homo sapiens
aaacagtaataaagagatgggatttaattaagctaaaaagtttctgcacagcaaacgaaacaatcagcagagaaaacagaaaactcacagaataggagaaaatcttcacaatctgtgtatctgacaaaggactaatatccataatctataaggaacttaaacaaatcagcaagaaaaagacaattccatcagaaagtgggctaaggacatgaatagacaattctcaaaagaagatatacaaatggctaacaaacatatgaaaaaatgctcarcatcactaataatcagggaaatgcaaatcaaaaccacaatgtaatgccaccttactcctgcaagaatggccatagtcatacaatcaaaaaataatagatgttggcgtggatgtggtgaaaagggaacacttttatattgctgatgggaatgtaaactagtacaatcactatggaaaacagtgtggagattccttaaagaactaaaagtagaactacaatttgatccagcaatcccactactgtgtatctaccaagaggaaaagaagtaattatccaaaaaagatacttgcacatacatgtttatag

SEQ ID NO: 348372 - DNA, 578 bp, Homo sapiens
aaacagtaataaagagatgggatttaattaagctaaaaagtttctgcacagcaaacgaaacaatcagcagagaaaacagaaaactcacagaataggagaaaatcttcacaatctgtgtatctgacaaaggactaatatccataatctataaggaacttaaacaaatcagcaagaaaaagacaattccatcagaaagtgggctaaggacatgaatagacaattctcaaaagaagatatacaaatggctaacaaacatatgaaaaaatgctcaayatcactaataatcagggaaatgcaaatcaaaaccacaatgtaatgccaccttactcctgcaagaatggccatagtcatacaatcaaaaaataatagatgttggcgtggatgtggtgaaaagggaacacttttatattgctgatgggaatgtaaactagtacaatcactatggaaaacagtgtggagattccttaaagaactaaaagtagaactacaatttgatccagcaatcccactactgtgtatctaccaagaggaaaagaagtaattatccaaaaaagatacttgcacatacatgtttatag

SEQ ID NO: 348373 - DNA, 578 bp, Homo sapiens
aaacagtaataaagagatgggatttaattaagctaaaaagtttctgcacagcaaacgaaacaatcagcagagaaaacagaaaactcacagaataggagaaaatcttcacaatctgtgtatctgacaaaggactaatatccataatctataaggaacttaaacaaatcagcaagaaaaagacaattccatcagaaagtgggctaaggacatgaatagacaattctcaaaagaagatatacaaatggctaacaaacatatgaaaaaatgctcaacatcactaataatcagggaaatgcaaatcaaaaccacaatgtaatgccaccttactcctgcaagaatggccatagtcatacaatcaaaaaatratagatgttggcgtggatgtggtgaaaagggaacacttttatattgctgatgggaatgtaaactagtacaatcactatggaaaacagtgtggagattccttaaagaactaaaagtagaactacaatttgatccagcaatcccactactgtgtatctaccaagaggaaaagaagtaattatccaaaaaagatacttgcacatacatgtttatag

SEQ ID NO: 348374 - DNA, 532 bp, Homo sapiens
gagttcaagtgattctcctgcctcagcctcccgagtagctgagattacaggtgcacgccaccacgcccagctaatttttgtgtttttagtagggacagggtttcagcatattggccaggctgatcttgaacttctgacctcaagtgatccacccacctcagcctcccaaagtgctaggattacaggcctgaaccactgcttctggctatcttcttgatttcttccataaggctagcattagtaaaataacagattctgataaacacattacaataaacaaaaactacagaccaatatatctcatgaacatagacgcaaaaatttttcaacaaartttagaaaataaaattcacaatgcaaaaaaaagaacaattataaattaatttcctaatttatgtgaaatattacaaaaattgaagggatgaacagaaacaacaaaatttacatctttcaaattttatgccaaagtgaaacctataaaaaaggatgagtttttttgaactacttttccattaacttctgctccaagcac

SEQ ID NO: 348375 - DNA, 532 bp, Homo sapiens
gagttcaagtgattctcctgcctcagcctcccgagtagctgagattacaggtgcacgccaccacgcccagctaatttttgtgtttttagtagggacagggtttcagcatattggccaggctgatcttgaacttctgacctcaagtgatccacccacctcagcctcccaaagtgctaggattacaggcctgaaccactgcttctggctatcttcttgatttcttccataaggctagcattagtaaaataacagattctgataaacacattacaataaacaaaaactacagaccaatatatctcatgaacatagacgcaaaaatttttcaacaaaatttagaaaataaaattcacaatgcaaaaaaaagaacaattataaattaatttcctaatttatgtgaaatattacaaaaattgaagggatgaacagaaacaacaaaatttacatctttcaaattktatgccaaagtgaaacctataaaaaaggatgagtttttttgaactacttttccattaacttctgctccaagcac

SEQ ID NO: 348376 - DNA, 609 bp, Homo sapiens
attttaatttaagtgttttcaactttttctgagaacttctctgccttctcraagagaaataattagtggaaaataataacccccccaaatcacaattcactaatttcaggatgtatttactaaatataaaactattgaataaattaacttttagcttagactggatacagaaattgacactttctgaaatgaaacctaagaaaatgaaaacatgacaacatgtgtttcattactggttgcaataagtaatcatcattaataatttgtaaataacctacttatgctaccgtaatactacctctgaacagcttaaaaagatgggactctcaaaatttaattaacatactgacacttattctcagagaacgtttcctgaatatgactagtataacaaatctgtattgacctcagctgagtagtgaaaccacctttgcaaaaattataacagaaaattatgacagtgaaaaagaactgacctaactgactccatcttgcttctaacctccaagctgtctgttcattcctgggcttaggctgaactaacttttggaggaacttagtttatagtttaactttgaaacaaagacaataaccgccctttcccaaaac

SEQ ID NO: 348377 - DNA, 609 bp, Homo sapiens
attttaatttaagtgttttcaactttttctgagaacttctctgccttctcgaagagaaataattagtggaaaataataacccccccaaatcacaattcactaatttcaggatgtatttactaaatataaaactattgaataaattaacttttagcttagactggatacagaaattgacactttctgaaatgaaacctaagaaaatgaaaacatgacaacatgtgtttcattactggttgcaataagtaatcatcattaataatttgtaaataacctacttatgctaccgtaatactacctctgaacagcttaaaaagatgggactctcaaaatttaattaacatactgacacttattctcagagaacktttcctgaatatgactagtataacaaatctgtattgacctcagctgagtagtgaaaccacctttgcaaaaattataacagaaaattatgacagtgaaaaagaactgacctaactgactccatcttgcttctaacctccaagctgtctgttcattcctgggcttaggctgaactaacttttggaggaacttagtttatagtttaactttgaaacaaagacaataaccgccctttcccaaaac

SEQ ID NO: 348378 - DNA, 609 bp, Homo sapiens
attttaatttaagtgttttcaactttttctgagaacttctctgccttctcgaagagaaataattagtggaaaataataacccccccaaatcacaattcactaatttcaggatgtatttactaaatataaaactattgaataaattaacttttagcttagactggatacagaaattgacactttctgaaatgaaacctaagaaaatgaaaacatgacaacatgtgtttcattactggttgcaataagtaatcatcattaataatttgtaaataacctacttatgctaccgtaatactacctctgaacagcttaaaaagatgggactctcaaaatttaattaacatactgacacttattctcagagaacgtttcctgaatatgactagtataacaaatctgtattgacctcagctgagtagtgaaaccacctttgcaaaaattataacagaaaattatgacagtgaaaaagaactgacctaactgactccatcttgcttctaacctccaagctstctgttcattcctgggcttaggctgaactaacttttggaggaacttagtttatagtttaactttgaaacaaagacaataaccgccctttcccaaaac

SEQ ID NO: 348379 - DNA, 535 bp, Homo sapiens
aagttcttgtcactcagaacaaggaggaactgcaagtcttagtaattaaaaagaagttttaatgtacgtgatttattgaagtatttattgtggtcagacgactggtgactgggagaaaaagaatacatgatactgtttctagagattttttaatgtacaacaaaattagcaaatacttcaatttaagtgacaaaactaaataaaacatgttctttatttgttctttcagtcttttcaaataattcctctctctttgtctctgattataaatctcttcattctctaaggagctgaatgccttctccttgtctgacatggaagaaaaggaaaccaaatggaaatcaaaagaaacttgaatgtcatatttacrtaatgaaaattaacataatagactcctgcattaagcagttttctaaattccatgtattctgctatttcccattctattctaccttattgctttctgactttcaaaatcctgagcttcccttctcattaattccagatcttcaaaaaggaaaatctgaggtggaag

SEQ ID NO: 348380 - DNA, 535 bp, Homo sapiens
aagttcttgtcactcagaacaaggaggaactgcaagtcttagtaattaaaaagaagttttaatgtacgtgatttattgaagtatttattgtggtcagacgactggtgactgggagaaaaagaatacatgatactgtttctagagattttttaatgtacaacaaaattagcaaatacttcaatttaagtgacaaaactaaataaaacatgttctttatttgttctttcagtcttttcaaataattcctctctctttgtctctgattataaatctcttcattctctaaggagctgaatgccttctccttgtctgacatggaagaaaaggaaaccaaatggaaatcaaaagaaacttgaatgtcatatttacgtaatgaaaattaacataatagactcctgcattaagcagttttctaaattccatgtattctgctatttcccattctattctaccttattgctttctgactttcaaaatcctgagcttcccttctcattaattcyagatcttcaaaaaggaaaatctgaggtggaag

SEQ ID NO: 348381 - DNA, 627 bp, Homo sapiens
acagttaacagaggactacagcttggaagtcaacttaatcctatccttgcacagagaaactgctttcttaatttctccttyaacctaaaacaccctttattccaaggaaaatcagtgtggggcagatttttctttctcagttcctacaatcaccctagcaatcatgaaaaatggttctggttttgaagtaatctaaaggtcattttaaacaaaatgacataattcaaatgagtttgaagcaaaagaaaattacaacacacacccgtttacacgcaaccacacacagcaagtttctaaatcttccttttcttcagttgagaaataaactgagaaaggcagctcagattgtttggcccaaagctacactcccacagacttaagtcccagaaggttccaaaaaattgttaaaagtcagagttctgaaaacatctgtcctaaaactttgaagaaatcggtctaaaaatattcatgtcttgttccatatgctggaagagatgaattcagttttaaattagcgatgtttagaaaagagaggaaggtaggctacattaaaacaaatcatatatatgtaaatgtaaacatatataaggacagaattgtgttccaacccaaattcatatgttgaag

SEQ ID NO: 348382 - DNA, 617 bp, Homo sapiens
tgaaagattaggtcttacagcagaagatttgatcaactgtcatttcacatctttaattttacatgcccttcctacagtaaacctacagtatagcatcaatatacaatgtgtggaaaataataaattgtcatccgaattttttttggtcttctttaagttttartgtattctttttcttattttctttctttagtaatttatatatttcagttgtcttattttactttaaatgcttttaacagattataacttaaataatagattgatgatattttgttatttaaatgaaaataaatctaaatatcactttataaacatactaattcaactttaatttaaaaagatgtaaataataatgttatataataaataggtttgtgtgatgcttacatttttcatatcaattaagatcagaatgatagctacttaggagacagttgtaatcatgatttttttttgcgtgttcatcagtacctaggcaaagtaactaatgaaaacgataatatatttacattgtttaaaattcttatatgttgagtctttaattggaatgattgaacaaaatatatttgcaattactaaacatggaattcaataacaaagaggggaaaatgctt

SEQ ID NO: 348383 - DNA, 617 bp, Homo sapiens
tgaaagattaggtcttacagcagaagatttgatcaactgtcatttcacatctttaattttacatgcccttcctacagtaaacctacagtatagcatcaatatacaatgtgtggaaaataataaattgtcatccgaattttttttggtcttctttaagttttaatgtattctttttcttattttctttctttagtaatttatatatttcagttgtcttattttactttaaatgcttttaacagattataacttaaataatagattgatgatattttgttatttaaatgaaaataaatctaaatatcactttataaacatactaattcaactttaatttaaaaagatgtaaataataatgttatataataaataggtttgtgtgatgcttacatttttcatatcaattaagatcagaatgatagctacttaggagacagttgtaatcatgatttttttttgcgtgttcatcagtacctaggcaaagtaactaatgaaaacgataatatatttacattgtttaaaattcttmtatgttgagtctttaattggaatgattgaacaaaatatatttgcaattactaaacatggaattcaataacaaagaggggaaaatgctt

SEQ ID NO: 348384 - DNA, 558 bp, Homo sapiens
tttataatgctatataatgcttcttacaaagtcacaggaatccgtacaatatgtctgtgatgccataggattgaaagccttccattagaaattagaaatcctgaattatttaaggaaacaaaacatggtaagtataaacaatcatgaatggttcctttgtcatagcttcctcatattcctcaaatttaaagtcactttttcttattttggtgttttaagctttttacttgaaaagcattcattattgtataatgaktaaatggcatgtgacttatttagcaagttgatttagatattaaatagcattaacattctatggaattcaaacttcatactaagtatttgcttgtaaaaagactcctagaaaaatttaatttcaaaaattacattaaaatgtaagaggtcttataatcctgttatagtcttaatttcttattattccttgcctcgtttgtattttacacattgttaaaatttttttcagttatgggagaatttattctgaattaacacatcccattctctatgtaaacaaagttataaatttgaggggaaaat

SEQ ID NO: 348385 - DNA, 583 bp, Homo sapiens
atgatagcatattcactgtcatttaatttataatgctatataatgcttcttacaaagtcacaggaatccgtacaatatgtctgtgatgccataggattgaaagccttccattagaaattagaaatcctgaattatttaaggaaacaaaacatggtaagtataaacaatcatgaatggttcctttgtcatagcttcctcatattcctcaaatttaaagtcactttttcttattttggtgttttaagctttttacttgaaaagcattcattattgtataatgattaaatggcatgtgacttatttagcaagttgatttagatattaaatagcattaacattctatggaattcaaacttcatactaagtatttgcttgtaaaaasactcctagaaaaatttaatttcaaaaattacattaaaatgtaagaggtcttataatcctgttatagtcttaatttcttattattccttgcctcgtttgtattttacacattgttaaaatttttttcagttatgggagaatttattctgaattaacacatcccattctctatgtaaacaaagttataaatttgaggggaaaa

SEQ ID NO: 348386 - DNA, 583 bp, Homo sapiens
atgatagcatattcactgtcatttaatttataatgctatataatgcttcttacaaagtcacaggaatccgtacaatatgtctgtgatgccataggattgaaagccttccattagaaattagaaatcctgaattatttaaggaaacaaaacatggtaagtataaacaatcatgaatggttcctttgtcatagcttcctcatattcctcaaatttaaagtcactttttcttattttggtgttttaagctttttacttgaaaagcattcattattgtataatgattaaatggcatgtgacttatttagcaagttgatttagatattaaatagcattaacattctatggaattcaaacttcatactaagtatttgcttgtaaaaagactcctagaaaaatttartttcaaaaattacattaaaatgtaagaggtcttataatcctgttatagtcttaatttcttattattccttgcctcgtttgtattttacacattgttaaaatttttttcagttatgggagaatttattctgaattaacacatcccattctctatgtaaacaaagttataaatttgaggggaaaa

SEQ ID NO: 348387 - DNA, 638 bp, Homo sapiens
aatccctgggcatgctgtttggaggttccatcaaatctaaataccagtgttcagaaacaaaatgaaacaaaattatatagtcagaattagatcatgttatcccactgtaaaagtagtctgcaagctccttattatgaaatatcagctaccttgcatggtaaatggaggtcagtcacaatctggagaataacctataacatcctctcaaatcataacccaacattctatgttctaacaccataaactagcaaattcattttaaaagcatattttcacacttctgtttcatgctacccactggctargatatttttctctctttccttagtgtgagaaacactactaaagaattttcagtgatgtgctctcttatttctttaggaaaatcctttatgtcactgataattatcatgtgatatgtcttttcttttctttgattcttccacattgtttacatagccatttttttcatgagtctgagaacttcctgaagttaggggcatatttagcctgatattcttaatatcgtgatagctcagaggagaaacatatttcttgtgaaaaggaaagaaaggaggaggccagtgaataagttaggcaggcagaaagacagggagtgggggcaaaaggagagagaa

SEQ ID NO: 348388 - DNA, 638 bp, Homo sapiens
aatccctgggcatgctgtttggaggttccatcaaatctaaataccagtgttcagaaacaaaatgaaacaaaattatatagtcagaattagatcatgttatcccactgtaaaagtagtctgcaagctccttattatgaaatatcagctaccttgcatggtaaatggaggtcagtcacaatctggagaataacctataacatcctctcaaatcataacccaacattctatgttctaacaccataaactagcaaattcattttaaaagcatattttcacacttctgtttcatgctacccactggctaagatatttttctctctttccttagtgtgaraaacactactaaagaattttcagtgatgtgctctcttatttctttaggaaaatcctttatgtcactgataattatcatgtgatatgtcttttcttttctttgattcttccacattgtttacatagccatttttttcatgagtctgagaacttcctgaagttaggggcatatttagcctgatattcttaatatcgtgatagctcagaggagaaacatatttcttgtgaaaaggaaagaaaggaggaggccagtgaataagttaggcaggcagaaagacagggagtgggggcaaaaggagagagaa

SEQ ID NO: 348389 - DNA, 607 bp, Homo sapiens
cagggaggttgataaagaagaggatatgcaaaacattctatctttctgagtttcacaaaatcaagagcttccacaggaaaactgaaaagcagatcctcttgggaactccttcttttataaccaaaatatgaagcctttcaggaacactaaagattcacgaatgtaggagaaaaatacagcataaactttcttttggaaaagttcctttttctcctacaatcttttatctttctccaataatatgcaggcattatctgcttcccttagtttctccaagtctcgcctcctcaatgatttcagtgagagccttctccccaggagtcagaataaattctttgaactatttttctctttcatattcaccctgcacactgcatttagatatgtcttcctaagtctttttacatacatcaaatgctgatactggttcycataactgttgtcacttcaaccagtaacttttcttttgctagatataaatctagcactgcactgaaattgatgtcatgcttaaagttattaattcacagacataagtagattggaaaaaaaaaggaaggtggcagatttttctgtactattattaaacaatagtcaacagaagcca

SEQ ID NO: 348390 - DNA, 605 bp, Homo sapiens
aacaaagattgagagtgtgagggaggagttgtctacaacagacatgcaggaatttgggggttagaaccactttaaattttcattatggtgatggttacactactatatacatwtatctgtactcacagaactacattaaaagtgaattttctttgtatgtaaattgtacttttaaaaagctcatttagaaatttgaaaatctttcatttaatatacatacttaccaattgttcagaatctccccatcaacaccccaaatctggattccatttcctttactgttctacaaatcctacatcttgcttatcaaattgattcactgagtggcatctctcaagcatttctgtctatttcaagggtgacttgagtttattgcagtcattgtcaggacttctcactcatacgagtgtcaatattcagcaactattgaacaactaataagagccatgtgaagtgatataaagatttaaaaaaaagtatagtcacacatccctccaaatggttcagtcttctgtttgaaggcatacaagtagccaggtaatttccatgcagtcagtgataccactgatgttcaagttgtgaccaggtgctccaggaatgtaaaa

SEQ ID NO: 348391 - DNA, 584 bp, Homo sapiens
atgcctactaaacaccattaataccaagttggaaccaaagctccattccctacaactttcaacttctgccctgtttcctacactacaatctacttcgaactatcatctttacaaaggaattagtatcccagtaaycttaggataattgtataagcttcctatcctcataggctttcttcagagcaggatcctgcaattacacatctgccattgtcaatatgacatatgtattttgtacctatgaaatgtcttcctcaatcatttatgtaattatttctgtgagatgttatagtggattttattatacaaatacggctgcagcatagctttcattctgcaaattaatatataatgggacctcgatattgttcccagaaatcctcatatatgtaccttcatttgaatgagcaggggctgacatgactcatttgtaaccaatagaatgcagcagaagttacaccgcatgctttctgataatacattagaaaaagcaatgcaaattatgccttgcttgctggaacactctatttgaagccctgagccagtgtataagcattatgactaccctgaggctaacaggccaa

SEQ ID NO: 348392 - DNA, 584 bp, Homo sapiens
atgcctactaaacaccattaataccaagttggaaccaaagctccattccctacaactttcaacttctgccctgtttcctacactacaatctacttcgaactatcatctttacaaaggaattagtatcccagtaatcttaggataattgtataagcttcctatcctcataggctttcttcagagcaggatcctgcaattacacatctgccattgtcaatatgacatatgtattttgtacctatgaaatgtcttcctcaatcatttatgtaattatttctgtgagatgttatagtggattttattatacaaatacggctgcagcatagctttcattctgcaaattaatatataaygggacctcgatattgttcccagaaatcctcatatatgtaccttcatttgaatgagcaggggctgacatgactcatttgtaaccaatagaatgcagcagaagttacaccgcatgctttctgataatacattagaaaaagcaatgcaaattatgccttgcttgctggaacactctatttgaagccctgagccagtgtataagcattatgactaccctgaggctaacaggccaa

SEQ ID NO: 348393 - DNA, 527 bp, Homo sapiens
ttgaacctaaaataaaggttgaaaaaaataaaggtcaattggttataaacatgtggctttatttctgggttgtctattcagttctattgttctatgtgcccatttttataccagtaccatgccgttttggtaactttagacttgcagtataatttgaggtcaggtaatgtgatacctccactttttgtggtacttacattaaaatcactgtattgaaaatgtctctcccaaatgaggagaagggtggatggagactaccatatctagtcttctctaataagcccattggtattcaaaatcctctaaaaatttttggttgagatcttaaaawatttctaaataataatccctagtaattttctggtttactcctttattttggctacagaagaattagaaagcacaattttattatttaaaggtttaatggagatgatattttattatctcaggggtattggtttcattttcaaccattgcctttctcatcagactcaaatacttatttgttttgcccataaaactag

SEQ ID NO: 348394 - DNA, 569 bp, Homo sapiens
ttttctgactgttttcaaggtataggcccattgttgtgtttttcatagttgacttgaaaagagagaaaaaaacacgagagtagagacctcataagaagttcttctarctgaagtgactcaaattctagcactttgggaggctgaagttggtggatcacctgaagttaggagttcaagatcagcctatccaacatggtgaaaccctgtctctactaaaaatacaaaaattagccaagtgtggtggcacacacccataatcccaactacttgggaggctgaggcacaagaatcacgtgaacccggagaatggaggtggcagtgagctgagatcgtgccctgcactccagcgtgggtgacagagtgagactgtctcaaaaaaaaaaaagaaaaagaaaaggaagaaagagaaaaaaagagagaaagaaagttgacacaaattctgctacccagggataagtcttagcaatggcaggacttcagaggggaagctcacatagaagcaggttagttctaaagaatcagggctgtagcttgcactagccagggattgcaggaaagtttccatatct

SEQ ID NO: 348395 - DNA, 569 bp, Homo sapiens
ttttctgactgttttcaaggtataggcccattgttgtgtttttcatagttgacttgaaaagagagaaaaaaacacgagagtagagacctcataagaagttcttctagctgaagtgactcaaattctagcactttgggaggctgaagttggtggatcacctgaagttaggagttcaagatcagcctatccaacatggtgaaaccctgtctctactaaaaatacaaaaattagccaagtgtggtggcacacacccataatcccaactacttgggaggctgaggcacaagaatcacgtgaacccggagaatggaggtggcagtgagctgagatcgtgccctgcactccagcgtgggtgacagagtgagactgtctcaaaaaaaaaaaaraaaaagaaaaggaagaaagagaaaaaaagagagaaagaaagttgacacaaattctgctacccagggataagtcttagcaatggcaggacttcagaggggaagctcacatagaagcaggttagttctaaagaatcagggctgtagcttgcactagccagggattgcaggaaagtttccatatct

SEQ ID NO: 348396 - DNA, 569 bp, Homo sapiens
ttttctgactgttttcaaggtataggcccattgttgtgtttttcatagttgacttgaaaagagagaaaaaaacacgagagtagagacctcataagaagttcttctagctgaagtgactcaaattctagcactttgggaggctgaagttggtggatcacctgaagttaggagttcaagatcagcctatccaacatggtgaaaccctgtctctactaaaaatacaaaaattagccaagtgtggtggcacacacccataatcccaactacttgggaggctgaggcacaagaatcacgtgaacccggagaatggaggtggcagtgagctgagatcgtgccctgcactccagcgtgggtgacagagtgagactgtctcaaaaaaaaaaaagaaaaagaaaaggaagaaagagaaaaaaagagagaaagaaagttgacacaaattctgctacccagggataagtcttakcaatggcaggacttcagaggggaagctcacatagaagcaggttagttctaaagaatcagggctgtagcttgcactagccagggattgcaggaaagtttccatatct

SEQ ID NO: 348397 - DNA, 638 bp, Homo sapiens
ggttgctgttcagtaggaaagcaagaagaggaactaaggtacttcacttaaatttcattttgcattgttaaattcctcgtatgcctttgayagtttgcagtgttttcagatccttaactctcagcctgtcttttaagaatttgttagctctataaagaataatgattctgcatgctgaaacagcatcccggtataggcctcatatatttttaccctagtggtttatgatatctaattttaaattgcacaccacatatataggaaattattcccatatgagaaacaatggcacaatattaaataagtcatctctatgtaatatgttttcataaagcattttccatgtttcttgtttcactcagaacaaaagtcggatcttcacgttgccactacacataccagagagaacacagtcatttaattttttattagttattttctttaagatattaggcttagccgggcacagtggttcacgcttgtaatcccagcactttgggaggccaaggagggtggattatctgaggtcaggagttcaagaccagcctggccaacatggtgaaaccccgtctctactaaaaatacacaaattagcccggtgtggtggcaggtacctgtaaccccagctacttgggagg

SEQ ID NO: 348398 - DNA, 638 bp, Homo sapiens
ggttgctgttcagtaggaaagcaagaagaggaactaaggtacttcacttaaatttcattttgcattgttaaattcctcgtatgcctttgatagtttgcagtgttttcagatccttaactctcagcctgtcttttaagaatttgttagctctataaagaataatgattctgcatgctgaaacagcatcccggtataggcctcatatatttttaccctagtggtttatgatatctaattttaaattgcacaccacatatataggaaattattcccatatgagaaacaatggcacaatattaaataagtcatctctatgtaatatgttttcataaagcattttccatgtttcttgtttcactcagaacaaaagtyggatcttcacgttgccactacacataccagagagaacacagtcatttaattttttattagttattttctttaagatattaggcttagccgggcacagtggttcacgcttgtaatcccagcactttgggaggccaaggagggtggattatctgaggtcaggagttcaagaccagcctggccaacatggtgaaaccccgtctctactaaaaatacacaaattagcccggtgtggtggcaggtacctgtaaccccagctacttgggagg

SEQ ID NO: 348399 - DNA, 586 bp, Homo sapiens
gtgtttgctcaatcagagaatagataggatccataattttccttacccaggaggtcattttcaaaagcttcctatgaaattttagctcgagaacacaatattgctttctccagatatcttttctcaattttatatccttgggtgttttttttttctttttatgatctgtgagtgttttaacaacactgttttcttcaaccaataaagtctgttgacagtgctgggctccttccccactttccccaactctcagtaactagtagcctaaggtgagaaggccaccaagtatgagctggctctgcaagtttgaaggttctgcttttctgaacgtgcttgtctcccagggacagawaggtttgccaggatctggcacttcagattgctttagtggaaaactaattgttttgggaatcttgaaaaagtcatgatttatttatgaagagaagcctgcctctctttctcctttgaaattcaaccaacaatgatgcattcattaaacagatatgtattgaacagtcaatgctaggccttgtgcgtgatgctggggacacaaaggtgaatgaaacatagtttatggggtggcctt

SEQ ID NO: 348400 - DNA, 586 bp, Homo sapiens
acactgttttcttcaaccaataaagtctgttgacagtgctgggctccttccccactttccccaactctcagtaactagtagcctaaggtgagaaggccaccaagtatgagctggctctgcaagtttgaaggttctgcttttctgaacgtgcttgtctcccagggacagaaaggtttgccaggatctggcacttcagattgctttagtggaaaactaattgttttgggaatcttgaaaaagtcatgatttatttatgaagagaagcctgcctctctttctcctttgaaattcarccaacaatgatgcattcattaaacagatatgtattgaacagtcaatgctaggccttgtgcgtgatgctggggacacaaaggtgaatgaaacatagtttatggggtggccttagtaatctaccaggttaatgtacacactccgttagttttcagacttctgatcatccccgggtttcatttcttcctttataagtgattcttttaaagcttacatatgacagcacttataatgtacctttttcaatgtttagttatagcatatttctaaaataggtggtcttgggtttcctaag

SEQ ID NO: 348401 - DNA, 633 bp, Homo sapiens
catcttgtcatggcattattttacttcatcaggacataacccctcagctgctatgataaattttaacactagattttcctggctcagtttctaataaataaaatgttgagcagcagggcctgttttcaaggacartatttcacattgtgtgccagcctaaataattagttactaaaaatcaaattagcaggaagagctactcatatccatcttagggacattgatttgttgtccctgatttttctgttatgctgatagaggatttaggattaaagcattagagatctttctacccacacttttttaaaaaatacaatttattctgaacccacattgatataatttgtagataacactggcacatcaacatgtacagttaacaatatcctaagtattgatcattaaatttgataagctagaaatctgcatttatgttattgtttaactgccaagaatgtacaaaaatcttttttgcaataagtttgaatctttagctatatgctgagcggtataggagaagttacctaaaatctctgaggtatttgggtcaagtttaaaatagaaaccataagcagcttgcaaagttgttgttaaaatgagtgataacatatgtaaaatgcctagtaccttgct

SEQ ID NO: 348402 - DNA, 609 bp, Homo sapiens
ctatgtcccagatacttaggtgctagatataaagcagtaaaagcacaaaaacctctgccctcaaggaatttactatctggtggagagaggcaggcaataaacatctaactaactaaagtgcattgtgcatttataatgataggtactatggataaggctaccaaatgtcctgatatacatgggaagttacagtttatgccaagtgtctggatatcattattaataatatccccttcattcattgttagtggtgttccaggttggacaataagtcatgtggttagctctgttagtttgctagggctatgttgtctacccaaggttctccaaagaaacagaactaatagactatgtatacaaagagagaaacagaaagaggttgatttattatgggaattggctcacatgattacgaagaccaaaaagtcccatgagaggccacctgcaagctggagaaccaggaaagtcagtggcataatcaagytggagtctgaaaggggcactgatgtaagttctggagtccaaaggcctgagaaccaggatgcccaagggcaggagaagatggaagccccagctgaggaagagagggaacttaccctcctatgcctt

SEQ ID NO: 348403 - DNA, 562 bp, Homo sapiens
ccagaccatccagttcctcctcagaagccagaaatccaacattctaagtggaatatgtgtatttttagtttttggcccagttaatttaaaaaaaaagtgtttgagctaaaaagctccaactctagcccaccaggaatcagcttgcaatatcaaaagtctacagttcttaagaaaacctatctggcatcatattttcccaaagcagaacagtggttctcaggtttggcctcccattagaattacctgatgcagttggtctggaatgatcaggcatggctaattttttaaagccaccttggtgattctaatgagcaatcatggccaagtaatggatattcacaagattgtaaagactttgcttcattgactattctatttgattttcttcccrggtgcctggcacagggtctaccttatatccaataaatacttattggttaaattaatgaataaagacttttattgaatataaatacattgttaaaagatgaaaattaaatacagtgacacaaaagaactcaggaaaggaaagtactgtctcacatcaaaaattataatggat

SEQ ID NO: 348404 - DNA, 533 bp, Homo sapiens
attagaggtagcatttctagcaaaggaatgaaagacaccatgctctcaggactatattcaagacaagatgggttaagaagcttaaccaaagaggcagagaaggaaattaaaaccataccacaaagagaaacaaattttctgcagctagaaactacacaattagacacatccaataagtgttccattttgtggagccattgttagtgcagtacagaagtcagaatgtcagacccaggagctagacagatgaacaagtgttcacattcctgatactgccacttacaaactgcgtgcatctttaccatcaatttcctctgctataatttggctttcataatgttatcttccacaagtggggctcttgtgaaggttaaataatatgatgcttgtaargtacttagcacatagaaggttctctttgttcttattgttgttagagcattgcatcttaggcattatttgtctgcatcttttcttagaacaagatcatgttcaagatgaaatttagaggactttcttgttctattgtttaa

SEQ ID NO: 348405 - DNA, 532 bp, Homo sapiens
ttcctatcttagatatgtgagtcaataaacctttaacttaagatactttgaatgggtttttgttacatgtactcaaaaatatcctaatttataccagaatagtattattttcttgctctttgttctttacagggtggctacaaaggaatcaatgtagcytcgtagtttctctggatggtatttcagtgctttgggagataaccaccacataaatgagagagttcctatttttctttgttattgttttactatctaaccccagctacaagaaaggatatattggtttattttacaaactttatcttcacaatcagaaggatgtgagctgtagagcattattttaaagaccagtcggaagatgaaatggtgcaaaaaataaaaaaagaagaaaaccaaattaatctgcaaacacattagaattttcaagatttaatttcactgttatttttgcccatttgaagcaaatctattcactagatctctattaaatccctactgtaagccaggtacaaataaatgagatgaacaattt

SEQ ID NO: 348406 - DNA, 532 bp, Homo sapiens
ttcctatcttagatatgtgagtcaataaacctttaacttaagatactttgaatgggtttttgttacatgtactcaaaaatatcctaatttataccagaatagtattattttcttgctctttgttctttacagggtggctacaaaggaatcaatgtagcctcgtagtttctctggatggtatttcagtgctttgggagataaccaccacataaatgagagagttcctatttttcttwgttattgttttactatctaaccccagctacaagaaaggatatattggtttattttacaaactttatcttcacaatcagaaggatgtgagctgtagagcattattttaaagaccagtcggaagatgaaatggtgcaaaaaataaaaaaagaagaaaaccaaattaatctgcaaacacattagaattttcaagatttaatttcactgttatttttgcccatttgaagcaaatctattcactagatctctattaaatccctactgtaagccaggtacaaataaatgagatgaacaattt

SEQ ID NO: 348407 - DNA, 532 bp, Homo sapiens
ttcctatcttagatatgtgagtcaataaacctttaacttaagatactttgaatgggtttttgttacatgtactcaaaaatatcctaatttataccagaatagtattattttcttgctctttgttctttacagggtggctacaaaggaatcaatgtagcctcgtagtttctctggatggtatttcagtgctttgggagataaccaccacataaatgagagagttcctatttttctttgttattgttttactatctaaccccagctacaagaaaggatatattggtttattttacaaactttatcttcacaatcagaaggatgtgagctgtagagcattattttaaagaccagtcrgaagatgaaatggtgcaaaaaataaaaaaagaagaaaaccaaattaatctgcaaacacattagaattttcaagatttaatttcactgttatttttgcccatttgaagcaaatctattcactagatctctattaaatccctactgtaagccaggtacaaataaatgagatgaacaattt

SEQ ID NO: 348408 - DNA, 604 bp, Homo sapiens
ttgcctttaccttttttgagttttatttcttttacttttatttcctgagatctgctagtttccatttcatgcatattgctgtttcaccatctctcttgtgtgcttttttatttctgtactatgttcttgctttacagaggcaactacttcaatgyattttactcatttgttttaaaatttatcacaaaatatttgaccatagttttcatctattttgttgcaacttgttttcttttcaggatactttgccatttgaccttcttatttttttttaatttattttccattatattattatatagatcctgttcttccttgcttcttgttttactgcttattatcaaaggacatgaattttccccactagctatttgtaagcagtttatatagggtgggttgggaggtaaaacagaaccatgcttagggctaaaaattactcaatatgaactaaaaatctgaaaaacctgaaaatactcactataagaaaacaatttcaaaagatattaaatatctgtaaaaagttttcaaagatatctggtttggtgagttagtgtttccaattatgttagtaagcagcagaactgggttttgaaacaaggggtat

SEQ ID NO: 348409 - DNA, 606 bp, Homo sapiens
acagcaaagcaggctcaagcagctttgactccagagcccacatacacttaacaatttcagaaggttttcagactcaagctttggaactttagtggcgttgtcttgcttatttgttttctaagatctacaagtttttggtgactaaattaaaggtggcccaactgccaaaaaagtgattgtgaattcagactgacgtacaccaaatgtaatatccaaaatggagatcagagtctctgggccccattcccagaaatagttaatttttwaaattatctaatgtaggaatgaggctgtcaccgttcataaaaaggaaatagccttcttgaaagaaatttacccagacaggcaccaagcttaggaaaagaacaatcccttaagaaaaagaactggaaatcgcttttctagctatcatggaggacactactgcccccttgtgcctcattatgatgatacaaccctaagaatgtttggtccaactcacgctgagcgccgtctgagctccagagagccctcggaagcgttctgccccagcttgctcagagtcaacaggcccgggagtttccttttgggtcattttgcctggcatggagaggagacagaggcttt

SEQ ID NO: 348410 - DNA, 541 bp, Homo sapiens
tacatatatatatataaatttgcttttgaaaaataacctatctatatatatatatataatatagatatatacatggtatacaatatagatatctacttgctttttgaagaataatctaaaataggggaatctaatatattcttatatctatgtgtatagatatatagagatagatgtctataggtagatatttgctttttgaaaactatgtatatctatatctatagatctatatctctatagatgtatatatgctttattcaaattggaatatagttgaatttgggtacatgctaagcactggatgtctaatgacttacttgttagacawcactttataagttttatcgcaatggtaatattatacatatattcacacatacagatttgagagtcacctccctaaaaaaagttagaaaacacagatttgttcttagccctacaaagagttgtcagaggacaaatctgaaaatagtgcctttattgtggttacttttattctgtcccttgagttcctccagaagctaacataatctttctc

SEQ ID NO: 348411 - DNA, 515 bp, Homo sapiens
atctatattttataaataaaaatgacagaatttgacaaataggttgaatgtggctaggagggaaagagcaacaatatagatgattccaagttttctgacttaaacaactaggcaggtattcttaccatttactaagatgcagaaaactggggggaaattgttgagtgagattggggggtgttaagaattagtaatcaaaatttgaatttagtcttctaaagtttgataaattctagtggttggatacataattttatagagctaagaggggtgtttggggctgaaaatacatatttaagggtcaccagcatatatgtaacatttaaggccatgggaattgatgattactaacaattgtaagaaaaataacatgcattgaatgcatrtaatgaaccagctctgcccaaaatactttaggtatgattaaccctctttattctcttagcagccctacgaaataggtttttttaaaataataataataataaaagaaatgggcaaggaattgttaagtg

SEQ ID NO: 348412 - DNA, 559 bp, Homo sapiens
ggaaaattcatttccccttcccactgtttcactcctctacttcataatggtactattttttctcctagattgcacacagaaaccacacatatattttctattagtgcataaagctactgaaaatctcatgagaaaaataggccacatcaccacaattttacaggatgaggcaagtgcaccataacaactgcaaagaggtaaacacttctaaaaagccactctgaggttacgtgggcaggaaatgtgggtggaggtcagagaagagagctctttggggcagaaatcatasagagaacctgagagagttaggggtcattttataagagaggagattgtgagtgaaggtggacagagctgattgtggtatgaccacaaagtaacttgaaggactgtaggaggtagaggaacatggaaaattgaactaattcatttttttttctctgaagctgtctgcttcaggaataaactcaaaaatatgcattttggggcatcataaaatttattccccttttccagccatatgggaaaagaatgaaaaatgggagagtgtaagaatgca

SEQ ID NO: 348413 - DNA, 565 bp, Homo sapiens
agataaaacaattgctttaatggtaatagcacatttattaagtacttattgaatgcctggtactgtttcttttcttttttttttctttttgagacagagtttcgctcttattgcccaagctggagtgcaatggtgcaatcttggctgactgcaacctcctcctcccgggttcaagcgattctcctgcctcagcctccccagtagctgggattacaggcacccaccaccacacctggctaattttttgtatttttagtagaaacagggtttcaccatggtagccaggctggtctygaactcctgacctcaggtgatccgcccaccttggcctcccaaagtgctgggattacaggcatgagccaccgcgcctggccatgcctggtactgtttcaagtgctttgcaatactgattcagataattttcaaaacaaccctatgagtgaggtatattattatcccatttacagatgaggaagttgaggcccagtgcaattaaataatttgctcacaattggtcagctacagaggaattttaagaaagacattcattctgtccagctgctta

SEQ ID NO: 348414 - DNA, 515 bp, Homo sapiens
ttccatacatccatgaagtctcactacaatrtgcaatggcaagggtctaaagctggaatggaaggatgtgtaggttttctataggaaggggaacagatagaaaagtagagagcataaagggtatattggctctaatgtgcaaaatatgtttaggaggtgaaaaatagccctttgtgaattccaggatagggacatttgaggaggtgggtaaggtctaaatactaaatgttatacaaaggaatttggactttatctggaaggcaagggggagcaaatgaaagttttgactgctctctcttgtatctcttatgtctagtggagttcctggcaaggcagacatggcagaaacgtgttgcctgaattagtgaaggactgtgggctttttcgttagaactaggctttagacagactgctctcatggaagggtgagacatagatgaatctgcataaccagttataatactattgtaataattcagtgcagacggggtaagggactgataagggagggggca

SEQ ID NO: 348415 - DNA, 511 bp, Homo sapiens
ctaaaataaaactaccatctctccctaactgaccttcatggccttccctctatgttccttatcttgataaatttcaccattatcattttggtggagtcacttcatctctttcctatctttcactcaatatcacaaattgtttttcaatatttccaattacgcacaattccaccatgtgtttcaaatttatcctctcccttccaccacgattgccatgttttgacttttgtcatctcttgtaggcagggcagtctagtggtaaagacactaagctttggtattatgccattgaaggtaaaatccctgctttgatgtgtcataattgttaggtgctgggtgagtgatttaatttctttgtttagttttctcttttcagtggaggttgtaattgtaccttcctcayagacttgcagtaaatattaagagtaattgttcaggcttaaaatagcattatgctcaagtgttagctattgatactgtcttgcacagacttttcaagcagtttccaact

SEQ ID NO: 348416 - DNA, 535 bp, Homo sapiens
tcaccgatgcttacacagagcaacaaaggaaaacggaagaacatgtctgctaatgtctgtgactgtccacagaggaaggaccctcacaatgcctataaggcctttacatttcccagtttaagcgtattaagctaaaacacttgtatatgatttttttgcatattcttgtcattaatgtagatattacaaccctagcattgttttaagacaacaaaaaagagcacaggaatttatttcagataatcagtggattatatgattacgtcaaacaaaaagtttaagtagcaatatatattactctataaatctaacagtaacatatatttcttttttccccaacgtttaagttcagaggtacatgtgcaggatgtgmaggtttgttacatgggtaaacatgtgccatggtggtttgctgcacagatcatcccatcgcccaggtatgaagcccagcatccattagctgttcttcctgatcctctccctcccccaacaggtgcccagcatgtgttgttccctggcagtgtccatgtgttct

SEQ ID NO: 348417 - DNA, 359 bp, Homo sapiens
cttgcacatgcacgtttacagcggcacaattcacaattgcaaaatcgtggaaccaacccaaatgcccatcaatcaatgagtggataaagagactgtgatatatttatataatggaatactactcagccacaaaaaggaaagaattaatggcatttggagtgacctgaatgagattggagactattattctaagtgatgtaactcargaatggaaaaccaaacctcgtgtgttctcactgatttgtgtgagctaagctatgagaacgcaaaggcataagaatgatacaatggactctggggacttgcggggaagagtgggagacaggagagggataaaagactacaaatattgtgcagtg

SEQ ID NO: 348418 - DNA, 359 bp, Homo sapiens
cttgcacatgcacgtttacagcggcacaattcacaattgcaaaatcgtggaaccaacccaaatgcccatcaatcaatgagtggataaagagactgtgatatatttatataatggaatactactcagccacaaaaaggaaagaattaatggcatttggagtgacctgaatgagattggagactattattctaagtgatgtaactcaagaatggaaaaccaaacctcgtrtgttctcactgatttgtgtgagctaagctatgagaacgcaaaggcataagaatgatacaatggactctggggacttgcggggaagagtgggagacaggagagggataaaagactacaaatattgtgcagtg

SEQ ID NO: 348419 - DNA, 453 bp, Homo sapiens
attgaacacgcatggaaataaatatgggaacagtagacactacagactactgggaaggcgggacattgaaaaactacctattgggtactatgctcactgccaaggtgacaggatcctaattccaaacctcagcataatgcaatactcccatgtaacaaatctgaacatgtacctactgtatctaacatagaatttgaaaaagaagaacattaytgtaaagagatagacatacaggtaatgtatttatgcaaaatatcatgcctaattcataagatgttactgtgttgccttagaaagtaggcagtacacagatggaattgattacctagtgagttaagcagagtttggataagcatagttataataaatttttgctggtatattagggggatgatttgcagctaatatcagtgatgacaaaagtattctgcactaaaacatttatccatctat

SEQ ID NO: 348420 - DNA, 453 bp, Homo sapiens
attgaacacgcatggaaataaatatgggaacagtagacactacagactactgggaaggcgggacattgaaaaactacctattgggtactatgctcactgccaaggtgacaggatcctaattccaaacctcagcataatgcaatactcccatgtaacaaatctgaacatgtacctactgtatctaacatagaatttgaaaaagaagaacattactgtaaagagatagacatacaggtaatgtatttatgcaaaatatcatgcctaattcataagatgttactgtgttgccttagaaagtaggcagtacacagatggaattgattacctagtgagttaagcagagtttggataagcatagttataataaatttttgctggtatattagkgggatgatttgcagctaatatcagtgatgacaaaagtattctgcactaaaacatttatccatctat

SEQ ID NO: 348421 - DNA, 582 bp, Homo sapiens
ttgagcagaaaattgcattaaattagaactcgtcacctagacacacaacagaaatcctacaaaaacagcaagttatttaaggtgaaaagatgttacgtttgtaaaagatttgatcacatgtgtttaaggtagttgaaataaaagtggcttgcctaggaaataataatagctaatatttactgaaattttaataagtatataggattatttctaaacactttgcaaatagtgtctcatttaaacttagtaagatctctatgaaggctgggcatggtggctcacacctgtaatcccagcactttgggaggcygaggcaggctgatcacctgctgtcaggagttcgagaccagtctggccaacgtgatgaaaccctgtctctactaaacatacaaaaattcgccgggcatggtggcaggtgcctgtaatcccagctactcaggaggctgaggcaggagaatcgcttgaacccaggaggtggaggctgcagtgacccgagatcgtgccattgcactccagcctgggggacaagagcagtactttgtctcaaaaaaaaaaaaaaaaaaaactctatgaagtacatac

SEQ ID NO: 348422 - DNA, 477 bp, Homo sapiens
tgtagttattccagtattgtctacaggtatctgattttatgggagtgccatatttaaacattcattatcaactcatgcaatcagacttaagtgcacctaagtacaccatctgtctttttctttctcatatattcctctgtagtcacacatggatatctgctattctagtagtgtctggagcctatttagctgcaccagttacagtgtaatcagcagagaaggcattcccttccaacctctgattttcagaatttaacagcaccaatgcttttaatggctctatccttaaatgtgatacatacacgcttttctacacrggtgtatgttttttgtttttagttttttttccaatgctccagaggcaaagtctatctttaagggaagagttcaaagcttggacctctttttaaaaagccaaaggatgacagaaaatgctttacaaatgcaagcagtttctggtcaagctgcacagtcatg

SEQ ID NO: 348423 - DNA, 477 bp, Homo sapiens
tgtagttattccagtattgtctacaggtatctgattttatgggagtgccatatttaaacattcattatcaactcatgcaatcagacttaagtgcacctaagtacaccatctgtctttttctttctcatatattcctctgtagtcacacatggatatctgctattctagtagtgtctggagcctatttagctgcaccagttacagtgtaatcagcagagaaggcattcccttccaacctctgattttcagaatttaacagcaccaatgcttttaatggctctatccttaaatgtgatacatacacgcttttctacacaggtgtatgttttttgtttttagttttttttccaatgctccagaggcaaartctatctttaagggaagagttcaaagcttggacctctttttaaaaagccaaaggatgacagaaaatgctttacaaatgcaagcagtttctggtcaagctgcacagtcatg

SEQ ID NO: 348424 - DNA, 573 bp, Homo sapiens
tgatctctcttttaccatttatcaaaactccatctctggcaaattacagtgaattacagtggagtgttgctaattcatactaatgactggrgttcccagtgcagattgaattctgagaactggcaactgagcaacaaaggaaaaaaaacagtaaattgagaccactgcataaaaaaatcttttgttcatttattttttttttcagtataagctagttttaattaatttggttaatgtatcattgataccagtacaaattatatccctaaatctctccaacattaaatattagtttaaaaattagttgcaactttatttggcagtgaattgaaataaaacactggcagaatagcaaggtaagatttagatagtagtaaatttactacatttccacttaatataatattcttctcttttcttttcagccttggaatcagtacctggtattaaataggctttctgattgtcacacaacaaaattgactagtactctagggaagagttatccactgttgaacgctcaacctgcttaaagggatggcaactggatgttcataaagaattaccatagtt

SEQ ID NO: 348425 - DNA, 619 bp, Homo sapiens
tcatgctcatcacagacatttaataatgtttcatacattaattgttattcgtgccatgcccataaactttttaaagtaaacagcttcaaccaagcacttaactccaggaattcttagggaacattgtttccaccataaagcttagatgattgaatgattggtagccacactctacatgtggcctatgaggtggccaagaaattatgacctgtgctggtgtcaaaatctgagtggrgtccaagagtctgacaaacttttgcttgagtcctgaaagaatcagaaagaatttacagagagaagtaatgatataaggccaaggcatgagcagtcactgaggttatgaggaatgagaatataagcaaagtgggcaagttcagagagatttatagagagaaagaataaatgagtttatggtgagagaagcagatagacccagagaaaagcagacatatttagaaaggctgagtcacataaatggcaaagcataagattaaagccacccacctttctgttgaagtctttgctacttccagtagatcatctagaggcaggatggtccaggaggagtctgtatggtggaactgtgaatgatacagcttgggaataagagtagctgggc

SEQ ID NO: 348426 - DNA, 508 bp, Homo sapiens
ctgagtagctgaaactacagatgcacactattatccagggttttttttttttttttttttttttgagatggaatcttgctttgttgtccaggctggtcacaagaattattttgtgcaattcatttattcatttgtatatttattcactttacaaatatgtattgaattcacactatgctgaagtacaatttgaaaacaaaacaaaacaaaacaaaagtagtcyctgtacttgttcagttttaaggtcttgtggtagtaaacaaatgatgaggaaggatttgaaagctgacatcaaaagatgaaaaatctgcttactcccttgcctcatttagatagtgactcaaaagtgagttcttacctaaccaaccatattagccaggataagctaggtaatatggtggtaacaaattaacacccaattactggcttaacacaacaaacatatatttcttgctcatattgtattacatgtttaaagtgggcttgtcaggcagatggttttccacac

SEQ ID NO: 348427 - DNA, 556 bp, Homo sapiens
tctgtctcctaaatagaatgtaagctgtaagcaggagggcattcttgtttatttcatactttgatrtatccctaacacctaaaacaatgtttggcacagagagggcactcaataaatatctgctatataaatgaataaataaaactttgtagtggcaacataagtagtaaatagcataaaaaagatcctgggacaggaaggaacttgtcttgttcaagcaagagagaagaaaaaagaaaaaaaaaacagcctggctagaacagaatggtaagaaaaaaaaaaaagtggcccaatattaatatgcattttctttaaggcttacaagaaactttaaagtaagagttgtgatattcctggaatataaaaaactaaatcttggaaaagttaggtaacattcccaaggacagacagctagcaaagtgaagaaccaaaattcatcctgaggttatggaatttttactctcccagaaaaggggtgcttgtctggctgattcaaactaatctatagctgccaggaaaccagatccataaaatcattgttatgtgaccaactaag

SEQ ID NO: 348428 - DNA, 597 bp, Homo sapiens
acacagatacatagatatatagatactcacaataaggattctggtgagagtgtcctaccgaagctattacaaaatatattttttaattttttcttactrtactgccaactagatgtggagtttctagtacgttggagaagttccatcaatatagaatgatgaatgcaatacaagcagattttggtttcagtcagacggtagcaacaaaagtacacaaattttaacaattaaatacctctaacagatttcttttgaagattaatattttattcctggaggcattatatataggacgagactttcaaaaataagttttaggaccaactggactttgcccaaatctgggcagttttccagctaccttaaccctccattccctcctcaataaaatgggaagagttgtatacctaccttacagtttgtttaggaggattaatgaagaaaattcatgtaaacagctaagtaaaatgactaaaagataaatccacaataaatgttagctaataccatcatcatctttgtcattatcttcactgttttaatcacatcctgaattcactggactttcaaatggagggcagcttttcatatttgctt

SEQ ID NO: 348429 - DNA, 562 bp, Homo sapiens
tactacccattctgtagtcatagctggtattgatgattaccttcttctactacccttcttctacccatttcctttgccttcagcaaacacctcagcaggtcgtggttttttacctggtggagtgacccaaacctttattcccaaagagtctgggccatttgtaatcctgcctggattgggttgttgtaggttttcattgatcttaattacagggcatggtaatactaagagacaccctaggggatctcctgtattctacacatactcttccttacctccattgtggagtagtagactgcttttatcttgataatctgggtcaatcaccccaaccagcactgtaactcccttcttggccattgacttagaggtaggaggagcccaaagtggccagtggcaatcttaacttccagtttaatggaatcattgttgtgtctcctggyggcagcattcctctttctagaactaagacctctaggcctgcagaacctaatgtcgcaggaagaggaagcaaaatttttgctaatgggtcataggggtgatggtgagtggtgccacttcc

SEQ ID NO: 348430 - DNA, 589 bp, Homo sapiens
tacatcacatttaaactggcatacagataaagccagatatagaagctctttcttgccattaagttatggctctcatgccattgctttctcrtcatttcccagggaagaatgcagggtgttagaggcccttcagtacataatggctttttttctcgctccatcatcacaaagcactttcttaaaggatggtggagaagatagagttcctgtgataccaccattagcttctgcccggatgattggaataaacttccactatcacttctgccatcctgcaacacactctctaacctgcagctagtggaattttaaaaatataatctccccttttctgtcccctgtttttaagccttgggaactatttgagcccttcataatcttacctctgattaactctccatagattactgtggtttatccagactgattttctataagttccctggataggctgtgccattcctttcatccaggactttcacatataattctggctctctagaatagtcatccctttctattcttcaggtctcagcttaaccctcatttactctggtttttttttttccctaattattcagaagcccat

SEQ ID NO: 348431 - DNA, 589 bp, Homo sapiens
tacatcacatttaaactggcatacagataaagccagatatagaagctctttcttgccattaagttatggctctcatgccattgctttctcatcatttcccagggaagaatgcagggtgttagaggcccttcagtacataatggctttttttctcgctccatcatcacaaagcactttcttaaaggatggtggagaagatagagttcctgtgataccaccattagcttctgcccggatgattggaataaacttccactatcacttctgccatcctgcaacacactctctaacctgcagctagtggaattttaaaaatataatctccccttttctgtcccctgtttttaagccttgggaactatttgagcccttcataatcttacctctgattaactctccatagattactgtggtttatccagactgattttctataagttccctggataggctgtgccattcctttcatccaggactttcacatataattctggctstctagaatagtcatccctttctattcttcaggtctcagcttaaccctcatttactctggtttttttttttccctaattattcagaagcccat

SEQ ID NO: 348432 - DNA, 587 bp, Homo sapiens
caaattcaaaatgacacagctctttataaaacagtttggtagtttcttatgaagttaaacataatttaccacacatctcatcaatgcattccttggtgtttaccaaagagaagtgaagatacatgtctacacagaaaactgtatgtggattttaatagtgactttatttataattgtcacaaacttgaaacaatgccaataattgccagcttgtgaatgattaaacaaagtgtaaaacaccactcagcaataaaaagagaaatgaagttctaaagcatgaaacagaatagcatattacgctaagtgaaaaaagtaagactcaaaaggctacaagactgtatgattcctcttacatagcattcaaagaaggcaaactaaagggaaagacttcagatcagaggttgctagggtctgggagtgaggaaagtgtatcgcctacaaaggaacacagagaaatttggcagtgtgtggggcgaagggtagtgatagaaayatcgtacatcttgacttttggtggttacttgactacaaaagtttatcaaaatgcatagaaatgttcatctaaaagagtatattttattatatgc

SEQ ID NO: 348433 - DNA, 535 bp, Homo sapiens
tccatgtggtaacagtgggagaaagaaccctactggcaagatgaaaatcaatggaaaacatctgggcccttcctatctagggtctttttcccaacttattttccattgaaactttgagttttattagtaacagactccattgccccatagaattatacygaaacacaaacttggctccagggagagataatcaagttagttcttaccagttcctattttgccttagagaaaaatagtggaaatgagtttattagatcttgtacactgattaaggcatgtcttccttggaatgcatggagagtaggactattttcttaaaaataatgaaaaaagagctttagcttcgtgaggtccaaccaaggataggacacagaactatcaggctttggccaaccagggaacaacttgaaggacctgagcacagggggagaaacaaacatgaatgataaacaagaagtgaaattgagactggagcaagaataagtgaaattgagactggaaatgtactaagaataacatgatagcaacttagtca

SEQ ID NO: 348434 - DNA, 588 bp, Homo sapiens
tcataattcccatcttctaccatctatttcaggttcctcacaccttggctggwtgagtggtgacccaaacctttatttcaataggtctgtgtccttagtgatcttgtctttggtgggagttgaggaggacactgggtagattcggttttctattcattattactattagataagaagtattaagagatgtccctagggacatttgatgtttgaaatctggccctccttgtattcattgatgccagcaatccaatgacccaggattagccacctgtgcaagcatagacactcttgtcttaccactgatgtgcagctgcataaggaacatgaaatagctgaggggaagaatcagcttctatttcaagaaaatcaggctcagtatcttgttgcaggtgtctctcactggcattaggatctccaaatccattaagcttttgtatgattaaatcagtgagtgtcacgggtattagcccattgttgcattgcccttgccttaaaatgtattacctggttggaggtcatgttctgaagggtactctgttagtttcctaggtagatgtaacaaagtaccacaaactgagtggctta

SEQ ID NO: 348435 - DNA, 602 bp, Homo sapiens
gatctgctgggagagaactcatttattccaaggcttgtctgggatcccagccttgggatatgagttctcttaaagttgatgtgacattgcagagggtatccaagccatgaaacggactcaaagatccggaagaagaatactagtatttcatattcacataatatcatgaagacgatgctaaattcttgtgactattttttctaaggtaacagacaagatatcaaagagattttgatcttgtgttagcccatttcaggctctgttcccaggcacacaagrgttcagattcactgtgcatagaactgggatgggagactttgaagagtgctaacaagagtgactttctcttctaatggaaatacaagacaaataaatttactgtatctagtaatctgactctattattggaacataaataatggtgattgtaataaaattctttagatcattcctattgtaccctaacctacaggctctctcaatctctcccacactaaaaactctatagaatattgagtcacaagacaaaataatttttgtacctatgtcacaagtgtaatacaacagatgcagcaaagtgttttctccacttttgacacaga

SEQ ID NO: 348436 - DNA, 602 bp, Homo sapiens
gatctgctgggagagaactcatttattccaaggcttgtctgggatcccagccttgggatatgagttctcttaaagttgatgtgacattgcagagggtatccaagccatgaaacggactcaaagatccggaagaagaatactagtatttcatattcacataatatcatgaagacgatgctaaattcttgtgactattttttctaaggtaacagacaagatatcaaagagattttgatcttgtgttagcccatttcaggctctgttcccaggcacacaagggttcagattcactgtgcatagaactgggatgggagactttgaagagtgctaacaagagtgactttctcttctaatggaaatacaagacaaataaatttactgtatctagtaatctgactctattattggaacataaataatggtgattgtaataaaattctttagatcattcctattgtaccctaacctacaggctctctcaatctctcccacactaaaaactctayagaatattgagtcacaagacaaaataatttttgtacctatgtcacaagtgtaatacaacagatgcagcaaagtgttttctccacttttgacacaga

SEQ ID NO: 348437 - DNA, 618 bp, Homo sapiens
aaataacatctattgagtttaacgtgtgctaggttctgtgccaactgctttacatttagtgtttctttcagacttcatgataactctttgagttatatatgtttatcacatccatgatacagtcaaggaaactgatgcatcacaagttagtcttttaagagacactgtcagaattcagaatgtttcttactcctaggctaacctcttaacttccatattatatctctcaggttattacaataatataaccatatttttagccatttatatattgtgtctatatgggtatttatttagcaacaataatatattttgtgggaatactatttcaaaattttggtttatatacataaaggtatatctattcatatgtacttaaaagtgctatgttcacatagataaataattaccaaagtayatgtgaagccaggatggtggctcacacctgtaatcccagcattcggggaggttgaggtgggaagatcacttgagcccaggagttcaaaactagcttggacaacatagcaagacaccatttctataaaaaattaaaaattagccaggtatggtggtatgggcctgtggtcccagccacttgggaggttaagatgggaagat

SEQ ID NO: 348438 - DNA, 641 bp, Homo sapiens
gagagataataaatgtatgtaaaatgcatagtgtagctgctagtacatttttagtgtttaataaatggcagacactaatggttggtcttgtaacacaattgtaagtcaatcaaaaatggagaatgtcaggagttcaagacaagtccgtgcaacatggagaaaccgcatctctaaaaaatatataaaaatcagccaaacgtggtcacctgcacctgtagtcccaggtactcaggaggctgmggtgggagattgaggctgtggtgagctgagatttcactactgcactccatcctgggtaacagaataaaaccttgtctcaaaataacaaacaaacaataagggtatgggagtcaatggaaaggggattataaggaaagacattctagaagaagggacacccataatgggagctaaattttgcatggacggccatgcagatgataagtattagggtatgaaatactctctgcctgactttcatgaaaacgtgctgctggttgtccttctgcctcttttcttgcaatttttcatgatttttcttagctggattttcctcttctattcactggctaattctgaaatgtttccagggctttgtcctcaaccctctttgttggttcttggaattcctcaaaagtgaa

SEQ ID NO: 348439 - DNA, 636 bp, Homo sapiens
ggacacccataatgggagctaaattttgcatggacggccatgcagatgataagtattagggtatgaaatactctctgcctgactttcatgaaaacgtgctgctggttgtccttctgcctcttttcttgcaatttttcatgatttttcttagctggattttcctcttctattcactggctaattctgaaatgtttccagggctttgtcctcaaccctctttgttggttcttgkaattcctcaaaagtgaactcctccattcccatgactttaaatgctacctttatgtaggtaactttcaaatttatattatcaactgtagcagaccctctaagctccaggcctatatacccaattccatactcgtcttcttcatttgagtatctcaaaggcatccccaaacttgtctgctcaaatatgaaaatgtgtttactcctaaaacctggattttccccattcattgccattaaagtttctattacttttcagttgctgatgccaggactctgggggttatccataatgatttcttttttttctagcaacatgaaatccattaaaatctgttatcggcttcacctccaaaaatatattttgaatctacctcacctctcccactattgccatcatcactattc

SEQ ID NO: 348440 - DNA, 636 bp, Homo sapiens
ggacacccataatgggagctaaattttgcatggacggccatgcagatgataagtattagggtatgaaatactctctgcctgactttcatgaaaacgtgctgctggttgtccttctgcctcttttcttgcaatttttcatgatttttcttagctggattttcctcttctattcactggctaattctgaaatgtttccagggctttgtcctcaaccctctttgttggttcttggaattcctcaaaagtgaactcctccattcccatgactttaaatgctacctttatgtaggtaactttcaaatttatattatcaactgtagcagaccctctaagctccaggcctatatacccaattccatactcgtcttcttcatttgagtatctcaaaggcatccccaaacttgtctgctcaaatatgaaaatgtgtttactcctaaaacctggattttccccattcattgccattaaagtttctattacttttcagttgctsatgccaggactctgggggttatccataatgatttcttttttttctagcaacatgaaatccattaaaatctgttatcggcttcacctccaaaaatatattttgaatctacctcacctctcccactattgccatcatcactattc

SEQ ID NO: 348441 - DNA, 506 bp, Homo sapiens
agaaaggtaggaactagatttttttaatatatataatttgtaaagtttatttactcttttttttttttaagttccaggatacatgtgcagaawgtgcaggtttgttacataggtatacgtgtgcagtggtggtttgctgcacctattgacccatcctttaagttccctcacctcgctcccacctcccaacaggccctggtgtgtgttgttaccctcacagtgtccatgtgaaactggaattttctatggtactatgtggtgtcacggactcagtcaaaggtaagactgattgaatgtggaacagattcatttaccctgggctttgacagagtgagacgtttagaaatggaggcaagtagctgactttaattttgcaaacacaggctcaactactgcaaacgagcttttctattgacaaaaagggtctagataacattgttgttttttgttgttgttgttgttgttgcttccccatagctagggtctgggcaatcggaggaggagaa

SEQ ID NO: 348442 - DNA, 506 bp, Homo sapiens
agaaaggtaggaactagatttttttaatatatataatttgtaaagtttatttactcttttttttttttaagttccaggatacatgtgcagaatgtgcaggtttgttacataggtatacgtgtgcagtggtggtttgctgcacctattgacccatcctttaagttccctcacctcgctcccacctcccaacaggccctggtstgtgttgttaccctcacagtgtccatgtgaaactggaattttctatggtactatgtggtgtcacggactcagtcaaaggtaagactgattgaatgtggaacagattcatttaccctgggctttgacagagtgagacgtttagaaatggaggcaagtagctgactttaattttgcaaacacaggctcaactactgcaaacgagcttttctattgacaaaaagggtctagataacattgttgttttttgttgttgttgttgttgttgcttccccatagctagggtctgggcaatcggaggaggagaa

SEQ ID NO: 348443 - DNA, 506 bp, Homo sapiens
agaaaggtaggaactagatttttttaatatatataatttgtaaagtttatttactcttttttttttttaagttccaggatacatgtgcagaatgtgcaggtttgttacataggtatacgtgtgcagtggtggtttgctgcacctattgacccatcctttaagttccctcacctcgctcccacctcccaacaggccctggtgtgtgttgttaccctcacagtgtccatgtgaaactggaattttctatgrtactatgtggtgtcacggactcagtcaaaggtaagactgattgaatgtggaacagattcatttaccctgggctttgacagagtgagacgtttagaaatggaggcaagtagctgactttaattttgcaaacacaggctcaactactgcaaacgagcttttctattgacaaaaagggtctagataacattgttgttttttgttgttgttgttgttgttgcttccccatagctagggtctgggcaatcggaggaggagaa

SEQ ID NO: 348444 - DNA, 506 bp, Homo sapiens
agaaaggtaggaactagatttttttaatatatataatttgtaaagtttatttactcttttttttttttaagttccaggatacatgtgcagaatgtgcaggtttgttacataggtatacgtgtgcagtggtggtttgctgcacctattgacccatcctttaagttccctcacctcgctcccacctcccaacaggccctggtgtgtgttgttaccctcacagtgtccatgtgaaactggaattttctatggtactatgtggtgtcacggactcagtcaaaggtaagactgattgaatgtggaacagattcatttaccctgggctttgacagagtgagacgtttagaaatggaggcaagtagctgactttaattttgcaaacacaggctcaactactgcaaaygagcttttctattgacaaaaagggtctagataacattgttgttttttgttgttgttgttgttgttgcttccccatagctagggtctgggcaatcggaggaggagaa

SEQ ID NO: 348445 - DNA, 484 bp, Homo sapiens
actgcttttttaaaaggatgcattgcccttaatctagcagctaagcaggggttttgaataggtgaatcagattcggagagaagacaattacatttctggaatgatacacaccctcaaagtattatagcattggatgtctgctgcccattaaatttccccagccaatgctaattgccacaaactctagcaaaagtttttctctctgatattttgattacataataasagaaaaatatgtttaacataggcaggtaatagcccttctcctaccctattgtttgttgtatggcttctggcagtgccataggagtagtccccttaatattcctgttttccagaatgctcctcatatttctggatgaggtatgatgattgaattcaacctttttctttgtcctgaataattagtgttttgtctatcttattctgttttcctttaataaataatattgataccaaatacttcaacttcatttatatgctg

SEQ ID NO: 348446 - DNA, 590 bp, Homo sapiens
cactatttgcatttcttttcccctgacaaacccattggtcagaattgagaaaactatccttgacgaactgcttttttaaaaggatgcattgcccttaatctagcagctaagcaggggttttgaataggtgaatcagattcggagagaagacaattacatttctggaatgatacacaccctcaaagtattatagcattggatgtctgctgcccattaaatttccccagccaatgctaattgccacaaactctagcaaaagtttttctctctgatattttgattacataataacagaaaaatatgtttaacataggcaggtaatagcccttctcctaccctattgtttgttgtatggcttctggcagtgccataggagtagtccccttaatattcctgttttccagaatgctcctcatatttctggatgaggtatgatgattgaattcaacctttttctttgtcctgaataattagtgttttgtctatcttattctgttttcctttaataaataatattgmtaccaaatacttcaacttcatttatatgctgttatcttataagatagctttgtaataacagggtggtagcc

SEQ ID NO: 348447 - DNA, 583 bp, Homo sapiens
  misc_feature (1)...(583): n = A,T,C or G
tagagttgaaanaaaccaaannacaaaaggaaacaaaaagagaataccctggcagaactgtgtccatgtcntagggctttatggaaggcagaatttaagagcaataaactaggatatctagtagaacaaatttcgaagcaaaatattaaaggagctgcacagcttcctttaaccacatacaataaaatgagaatggaaagaaatgtcttaaaggcagactttataattaaaagggaagcagaatacaaagctttggaaaatttgcagcctggtcatgtaaaaaaaaagaaaaagaaaaagaatttaaaaaataaaaaaacctgcaagggtgccaccaacggacactttgataaagagatttgttaatggaaaaaactaactctgtacaatattttaaagaggtttattctgagcctatatgagtgtccatggcctgggaaaaaagtcttagaagagcctgcaaargtgcatctgaggcagtctggattacagtttggttttatacattttagggaggcaagagttacaggcaaggacataaatcactatatggaatttgcccccaaaaggcgggacatcttga

SEQ ID NO: 348448 - DNA, 579 bp, Homo sapiens
gcccctgggacacggaccgtgtctaactgtgtgctaggcagcaactcctgtgctagggctttgcagtctgtgttaaataataacaatatgacagtgtgtttgccctgagtcattttatttttttatcagcaaagttaatgctctaactacatcaattaggtcacttaaatttgactggttaatgaaatgcctttatggaatgcagccttggaattatttttttaagcagcgaggaaaaaaaacaaaacaaaaatcactattaatgacatttcaatcaatgtatttaataaaagacaactcaggttcrggttttattttaattaataatctgtattgaggaggtttcctcagctttgcagggttatctttgcctagatactttttttctctaacacgctgcagagacactaggctggtgaaacagtgtggtttcagagaagctgaattgttggaaagtgaccctgggtccttactctggaatgtttggacaaagagacagtggggccagcttctccttccatagtgttttccacagtggaagaaattgcatccaagtttggctttccctgaaacagggcc

SEQ ID NO: 348449 - DNA, 614 bp, Homo sapiens
cctgggcaacaaaatgagacctccatatttacaaaaaacatttttcaaaaaatcagagatgtgggggcatgtgcctgcagtcccagctaattgggaaactgaggtgggagagttgcttgagctcaagagtttgaacttgcagtaagccatgattccaccactgtgctccagcgtrggcaacagagccagaccctgtcgctaaataaattaaagaaaaaaaaaaagaaaaaaaaaaaagtaaaactacatttcgcaagtgaattttgtgtacaagggactgttttaaatagttttcacccaaaattaatcttcaaaattgctatcaggaataggtacaaatatcagaccaatttaatatttggaaaaattgaaaacagaggttaaaaaacctttgaattcatacgtccagaaagtggtagaaatgagttttgaactaatactgtccaatctcttagactgcactcataaccacatgccttaatccagtaatgactgccaacctgaacagaactcagaaatgcagagctctgaataaactcttattctcttcaaatggttatgtaaaggctagcaacaattgtaaactaaagatttggagtattgcatacggtgat

SEQ ID NO: 348450 - DNA, 614 bp, Homo sapiens
cctgggcaacaaaatgagacctccatatttacaaaaaacatttttcaaaaaatcagagatgtgggggcatgtgcctgcagtcccagctaattgggaaactgaggtgggagagttgcttgagctcaagagtttgaacttgcagtaagccatgattccaccactgtgctccagcgtgggcaacagagccagaccctgtcgctaaataaattaaagaaaaaaaaaaagaaaaaaaaaaaagtaaaactacatttcgcaagtgaattttgtgtacaagggactgttttaaatagttttcacccaaaattaatcttcaaaattgctatcaggaataggtacaaatatcagaccaatttaatatttggaaaaattgaaaacagaggttaaaaaacctttgaattcatacgtccagaaagtggtagaaatgagttttgaactaatactgtccaatctcttagactgcactcataaccacatgccttaatccagtaatgactgccaacctgaacagaactcagaaatgcagagctctgaataaactcttattytcttcaaatggttatgtaaaggctagcaacaattgtaaactaaagatttggagtattgcatacggtgat

SEQ ID NO: 348451 - DNA, 547 bp, Homo sapiens
cgagttcatactgcttttgtataaagttgctttgatttgaatcaaggcagtctgaccccagaacctgtgttattaaccacctgatattactactcatagctcctcagaatagtatgaagaaaagctaacatagaaggactaatatccagaatctacaagaaactcaaacaaattaggaakaataatcccatcaaagagtgggctaaggacatgaacagacaattctcagaagaagatatacaaatggccaataaacgtatgaaaaaatgctcaacatcactatgatcagggaaatgcaaatcaaaaccacaatgtgacaccaccttactcactcctgcaagaatggcaatagtcaaaaaatctgaaaataatagatgttgtggtggatgcagtgaaaaggggagacttctacactgctggttggactgtaaactagtacaacccctgtggaaaacagtgtggagattccttaaagaaataaaagtagaactagcatttgatccagcaatctcactactgggtatccacccagaggaaaagaagtcat

SEQ ID NO: 348452 - DNA, 547 bp, Homo sapiens
cgagttcatactgcttttgtataaagttgctttgatttgaatcaaggcagtctgaccccagaacctgtgttattaaccacctgatattactactcatagctcctcagaatagtatgaagaaaagctaacatagaaggactaatatccagaatctacaagaaactcaaacaaattaggaataataatcccatcaaagagtgggctaaggacatgaacagacaattctcagaagaagatatacaaatggccaataaacrtatgaaaaaatgctcaacatcactatgatcagggaaatgcaaatcaaaaccacaatgtgacaccaccttactcactcctgcaagaatggcaatagtcaaaaaatctgaaaataatagatgttgtggtggatgcagtgaaaaggggagacttctacactgctggttggactgtaaactagtacaacccctgtggaaaacagtgtggagattccttaaagaaataaaagtagaactagcatttgatccagcaatctcactactgggtatccacccagaggaaaagaagtcat

SEQ ID NO: 348453 - DNA, 547 bp, Homo sapiens
cgagttcatactgcttttgtataaagttgctttgatttgaatcaaggcagtctgaccccagaacctgtgttattaaccacctgatattactactcatagctcctcagaatagtatgaagaaaagctaacatagaaggactaatatccagaatctacaagaaactcaaacaaattaggaataataatcccatcaaagagtgggctaaggacatgaacagacaattctcagaagaagatatacaaatggccaataaacgtatgaaaaaatgctcaacatcactatgatcagggaaatgcaaatcaaaaccacaatgtgacaccaccttactcactcctgcaagaatggcaatagtcaaaaaatctgaaaataatagatgttgtggtggatgcagtgaaaaggggagacttctacactgctggttggamtgtaaactagtacaacccctgtggaaaacagtgtggagattccttaaagaaataaaagtagaactagcatttgatccagcaatctcactactgggtatccacccagaggaaaagaagtcat

SEQ ID NO: 348454 - DNA, 517 bp, Homo sapiens
cttctcaaaatctatctctgtcttccagctatgcctgtttattaggccctagaaactgtaggctgtcctaggccctgctcttgaagggcttcacccagaggccaataatctattcaggagattggcaaatgaaaaatcttacaagtactgaatttgcttttgttcatctgtgtaattttatatttcttatgggcatgatgtttatataaaaaagctctaggaaaataagcacttagatcaaatattttttgaagaaaaataaaagctgtaatacctttcgagttcacatgattataatctttaagaaataaaggcagttttaaaaataattggtaaaatacaaatgtctttaaaacgtaaatatgtgggctgaatcatgtaggtcagacactaggttagctaaatgmttcaaagttattaactgcttctttggcttttaagaactatttgataaagtttggctctgtgtccccacccaaatctcatcttgtagctcccgtaatttccatgtattgtg

SEQ ID NO: 348455 - DNA, 468 bp, Homo sapiens
atagatgtcaatttgatattattaaactttgaattattttgctaaacccatggattgaaagtataattttatgaaatcttaggtaccacaggaagaagtataaattgatacaactgatttgaaaaaaagttagtctgtgattaaataagtatccacatatgtttgctcctaaaattccttggatagttatatgttgtagataaacttatgcatataattctgagagcatatgtccaagtattttcatattgactttgctcctaagcacccaaactttaaaataacacamatgtgtataaggaataaaatagaaaattctcatctatataaacaatcaaatattatagagcagtgaaaataaataaattacaactgcttgcatcaacagggctgtcactcataaacatatgttgaacaaaaggagtgtggcacaaaataatacagaaagaggatttcatattaattatc

SEQ ID NO: 348456 - DNA, 468 bp, Homo sapiens
atagatgtcaatttgatattattaaactttgaattattttgctaaacccatggattgaaagtataattttatgaaatcttaggtaccacaggaagaagtataaattgatacaactgatttgaaaaaaagttagtctgtgattaaataagtatccacatatgtttgctcctaaaattccttggatagttatatgttgtagataaacttatgcatataattctgagagcatatgtccaagtattttcatattgactttgctcctaagcacccaaactttaaaataacacacatgtrtataaggaataaaatagaaaattctcatctatataaacaatcaaatattatagagcagtgaaaataaataaattacaactgcttgcatcaacagggctgtcactcataaacatatgttgaacaaaaggagtgtggcacaaaataatacagaaagaggatttcatattaattatc

SEQ ID NO: 348457 - DNA, 468 bp, Homo sapiens
atagatgtcaatttgatattattaaactttgaattattttgctaaacccatggattgaaagtataattttatgaaatcttaggtaccacaggaagaagtataaattgatacaactgatttgaaaaaaagttagtctgtgattaaataagtatccacatatgtttgctcctaaaattccttggatagttatatgttgtagataaacttatgcatataattctgagagcatatgtccaagtattttcatattgactttgctcctaagcacccaaactttaaaataacacacatgtgtataaggaataaaatagaaaattctcatctatataaacaatcaaatattatagagcagtgaaaataaataaattacaactgcttgcawcaacagggctgtcactcataaacatatgttgaacaaaaggagtgtggcacaaaataatacagaaagaggatttcatattaattatc

SEQ ID NO: 348458 - DNA, 525 bp, Homo sapiens
atttaaccactgcctaccagagtagtacatagagaagcaaacctaatctataagcaacaatgagagcatgctacagataacttttaatattgtaaatatatatgatacggatgataaaatctttatgaaataatctataggagaggtgaaatgggtctctgccaggagaatgcaaaggcagtaaaaaattaaaaaccaaaatattgagaattattttgaggaaagtgttagtagaatttaataatacatttaatagaaacataagattaaaaatgcaaagatgaattcaaagttgcttacattcaaaaataactcattaaatgtacagtattttaagcacacttttgatctatgaagagtataaatatgaataagacatagttctttatgctagacatagagaatattttttgtacagaaataaaatctagagtatgtaatattaggggaaagaaaatgcctcatagatgtcaataaacyttgttccctctatttttttttactcatttcatttcctgtaataat

SEQ ID NO: 348459 - DNA, 359 bp, Homo sapiens
cagccaatagcaaagaagtgccagaaaatacgtaagcaaactgtgacctctttttacctcttgattgacttttakgttaaataatgaatgtaccttatgcttgaaagaatttgaaatagtatttggcagtgaagaatttactcctcccatattttcattcaagagaaatttccatgaggagggttgttggtgggttacctccaactcaaccacttcagagctactacagtgataatgcatgttgaagaaaagagtcaaaccgtgaaatatttgaagagatttattctgaggcaaatatgagtgacctcggcctgtcacacagcccaggagatcctgagaacatgtgtcaaggttgttgg

SEQ ID NO: 348460 - DNA, 359 bp, Homo sapiens
cagccaatagcaaagaagtgccagaaaatacgtaagcaaactgtgacctctttttacctcttgattgacttttaggttaaataatgaatgtaccttatgcttgaaagaatttgaaatagtatttggcagtgaagaatttactcctcccatattttcattcaagagaaatttccatgaggagggttgttggtgggttacctccaactcaaccacttcagagctactacagtgrtaatgcatgttgaagaaaagagtcaaaccgtgaaatatttgaagagatttattctgaggcaaatatgagtgacctcggcctgtcacacagcccaggagatcctgagaacatgtgtcaaggttgttgg

SEQ ID NO: 348461 - DNA, 536 bp, Homo sapiens
aacgggattctctacaaaatggagattttccccacagaaacagctttgtagggccatttcaaaatatgtcaaagaaatgtatttttttggtgaaatactttttctttcaaggcctgctatctgtcatgttgatatcttattgctacgaagagtctgttttgtcattcttaagtctctactttaatgttaacactgttcagctatgcatgaattccgaaaggatgaaagtaaataacgaggcatgttcaaccacccatttccatcatggcctccattactgtttcaggtttagtttaaaatgcccttggccaagataaagggcccatttagttggttaacggacattgaattttatttttggyttacatgcaggtgccatgctctccttaggttgctccctgccaatgctgagcaaggaagatattacagggcttttcattcttgtcccacgtggactcatctaaaggtcaaaattcactttggtgctctttcactgacaatttctcagatctgcactcttctctgaggctcctcct

SEQ ID NO: 348462 - DNA, 536 bp, Homo sapiens
aacgggattctctacaaaatggagattttccccacagaaacagctttgtagggccatttcaaaatatgtcaaagaaatgtatttttttggtgaaatactttttctttcaaggcctgctatctgtcatgttgatatcttattgctacgaagagtctgttttgtcattcttaagtctctactttaatgttaacactgttcagctatgcatgaattccgaaaggatgaaagtaaataacgaggcatgttcaaccacccatttccatcatggcctccattactgtttcaggtttagtttaaaatgcccttggccaagataaagggcccatttagttggttaacggacattgaattttatttttggtttacatgcaggtgccatgctctccttaggttgctccctgccaatgctgagcaaggaagatattacagggcttttcattcttgtcccacrtggactcatctaaaggtcaaaattcactttggtgctctttcactgacaatttctcagatctgcactcttctctgaggctcctcct

SEQ ID NO: 348463 - DNA, 591 bp, Homo sapiens
atttcactatattaactatatttttagatatgtttattacttttgaaataatttgtttctcttgcctacttttctgtaaatctttattatgaatacatgtaaaatgtcatcaaatgcttttctacttttaataaaataatcctatacaaatttttaaaatcaaaatgtaggtctgtagttttctgttaatctctacctatttttttcctttaagggtaatatgtacctcatataatatgctgttagggttgcttcctcttttatttctgttttattttgattttatttatttgcatagaattgttactatttattctttaaagattgtgagaatacaagagtgaaaccttcctgacctggaattattttgtgtgtgagtttcaaattatagatttaatgtatttaatagttgcaggattattcatggtgtctctttatttttaagtgaattttgtaaactcttttctctcaagtaatgtgtcygtttaccaaacttttaaaatgtatttgcataaagtttaaacactgtgtgcttactatcattttataacctatagtataattagtgacagtctttctttcattactggc

SEQ ID NO: 348464 - DNA, 482 bp, Homo sapiens
aaatgggaaaaagttatggtgacttaaagcctatatattgtgatctggagaattagaatttaatttgtctatacaaagtaggtcatgatcctgataagtttagcaattagagtatttataaaaagtaagagctaaataatttgtttcagggatgcacttttatttcaattatctagacctgaaattatattttttgagatcgttcaggaagaagaaattacatgaggagarctttctaatcagtatgcttagtgtaaatatatctggtgagttcataagtctgtttcatttattattcttcagtataggtctgtagcatgacacaaacaattcctgatgacttcagctacctttttaaggaaggtagacttgctccatcccctatcttgtattttgcatctgaaagaggatcatactcctgtttaagtaaactttattaatgtttttcaaagtatttcttctcttgccaatataaaataatg

SEQ ID NO: 348465 - DNA, 482 bp, Homo sapiens
aaatgggaaaaagttatggtgacttaaagcctatatattgtgatctggagaattagaatttaatttgtctatacaaagtaggtcatgatcctgataagtttagcaattagagtatttataaaaagtaagagctaaataatttgtttcagggatgcacttttatttcaattatctagacctgaaattatattttttgagatcgttcaggaagaagaaattacatgaggagagctttctaatcagtatgcttagtgtaaatatatctgrtgagttcataagtctgtttcatttattattcttcagtataggtctgtagcatgacacaaacaattcctgatgacttcagctacctttttaaggaaggtagacttgctccatcccctatcttgtattttgcatctgaaagaggatcatactcctgtttaagtaaactttattaatgtttttcaaagtatttcttctcttgccaatataaaataatg

SEQ ID NO: 348466 - DNA, 482 bp, Homo sapiens
aaatgggaaaaagttatggtgacttaaagcctatatattgtgatctggagaattagaatttaatttgtctatacaaagtaggtcatgatcctgataagtttagcaattagagtatttataaaaagtaagagctaaataatttgtttcagggatgcacttttatttcaattatctagacctgaaattatattttttgagatcgttcaggaagaagaaattacatgaggagagctttctaatcagtatgcttagtgtaaatatatctggtgagttcataagtctgtttcatttattattcttcagtataggtctgtagcatgacacaaacaattcctgatgacttcagctacctttttaaggaaggtagacttgctccatcccctatcttstattttgcatctgaaagaggatcatactcctgtttaagtaaactttattaatgtttttcaaagtatttcttctcttgccaatataaaataatg

SEQ ID NO: 348467 - DNA, 250 bp, Homo sapiens
aagaaaaaaaaaagagagagagaaagttgaaggagaggggaaaactgccacagcaggttaagcaacttgctttaaaataattgggattagtaagtgtgcaaagatagaactggtgatgaaagagtgagactggaattaggaattaatctgtaacattaatgttgcaggttgggtcctggttatgagactragcggatgctcattctttggagctataactctgaccagtgccacattaacagatttggaa

SEQ ID NO: 348468 - DNA, 540 bp, Homo sapiens
atttgagtgcagctgctgttaggcagaaactctggactccaaactctcagtaaaacttctgaagacactkctgttgctattgcagctgtcagcaccattgattcagctgagaagcagcccagaatttcacactgacacccacgctgttggttgtgttttttgaaccagattgaaattaatatctattgtatggttcaattgctatgaagttcaatgtcaagcaaatgtaatttataaagataaaagtaagaacagtggttgcctatagtaatgattggaggttcacaatagagactcctggattctagtaatactcaattcatattcatgtaggttgtgatgacattctaaaaatgtttaaagctatatgcttaagatctgtgtctttcacatgtgcatatcatatttcatattccaattaataaatcagtaaaaaaagttccagttcaggatacaatactgtagaacaatccaaattattaatttattcctaaagtttttaaaatattagaataaatacacagcattttgttaaaacaa

SEQ ID NO: 348469 - DNA, 540 bp, Homo sapiens
atttgagtgcagctgctgttaggcagaaactctggactccaaactctcagtaaaacttctgaagacactgctgttgctattgcagctgtcagcaccattgattcagctgagaagcagcccagaatwtcacactgacacccacgctgttggttgtgttttttgaaccagattgaaattaatatctattgtatggttcaattgctatgaagttcaatgtcaagcaaatgtaatttataaagataaaagtaagaacagtggttgcctatagtaatgattggaggttcacaatagagactcctggattctagtaatactcaattcatattcatgtaggttgtgatgacattctaaaaatgtttaaagctatatgcttaagatctgtgtctttcacatgtgcatatcatatttcatattccaattaataaatcagtaaaaaaagttccagttcaggatacaatactgtagaacaatccaaattattaatttattcctaaagtttttaaaatattagaataaatacacagcattttgttaaaacaa

SEQ ID NO: 348470 - DNA, 394 bp, Homo sapiens
aggtaattgatggtaaaaataactttaaaaaaattaaacccagccaggggacagtgaggcaacctacaatttagcaacaatgggaggctactatcaccttcccttggagaacagggataggaggctgtactactggagctgcagggagggatatctgggggaagttggaaccacagtgggcctatgtaaaggagcaggagcctgtaaaaaatgcaactrttattagggatgacagggagaaattgagacaatatctagatttctccttgttcctgcctttcatctttctacatgagtttcctattgtttgagcctacctggaagccagctttcagaaaatctgagatacgtaatccacagtgttcatcccctctgtcttatgaactgagctggg

SEQ ID NO: 348471 - DNA, 405 bp, Homo sapiens
tgggaaaaatacacaccaaactggaaacactggttgtctctgaagaagagacagggctttggcaatattcaaattaggctttaactgtttctgaaagtytcagttctctataagaagaaggtattacttatgtaatttttaaaaattacatataaagtactaaatgactgaagcttcttagaattgatgggggcaggcatcacatgggcagcaaggcattcacataatggagaatcatggtctcctgtagatgtctaggagtgataaaattaactaccttttaggtggtgtagtttcctggctgagctgataattattaagttaatgattagtaggttatttctcaacacagaagagattattagtgtttcaaagttttcactgtaattcatctgtaaaaccatt

SEQ ID NO: 348472 - DNA, 405 bp, Homo sapiens
tgggaaaaatacacaccaaactggaaacactggttgtctctgaagaagagacagggctttggcaatattcaaattaggctttaactgtttctgaaagtctcagttctctataagragaaggtattacttatgtaatttttaaaaattacatataaagtactaaatgactgaagcttcttagaattgatgggggcaggcatcacatgggcagcaaggcattcacataatggagaatcatggtctcctgtagatgtctaggagtgataaaattaactaccttttaggtggtgtagtttcctggctgagctgataattattaagttaatgattagtaggttatttctcaacacagaagagattattagtgtttcaaagttttcactgtaattcatctgtaaaaccatt

SEQ ID NO: 348473 - DNA, 590 bp, Homo sapiens
gattttgcatctcttccaccaaactttcagtgtaacaatggccasaaaataatctatatgttaatttgttaatttgatggttcatggttcaaggctgtgcaatttataagtttgaagtcaaacaacacatgatggataatcctgatgttacacattctcaggggagaatatatatttgttttttctaccaattgttctagtatttacagacaaacttcttaattatactgggttggttaaaaagtatttttctttactctttcaatataggtccagctatgcatcaccccttcgctgatgagccttaagaaaatccaaatttataaattgctgggtccatctctcttgccatccagaaaagtcagagcaagtggtcttgctggttttaagtgttgcctgtgtttctggcattggtaattttctttgttttcctgtagttttaggtatacatatataatgacatctccaaaattcatcaatattagcatttgttatgaagatttttcaggcaactggcttaccatatggcctaaatctgattctaaagtccaagttttactttctcaaatataaaaactgtttgctaataa

SEQ ID NO: 348474 - DNA, 590 bp, Homo sapiens
gattttgcatctcttccaccaaactttcagtgtaacaatggccacaaaataatctatatgttaatttgttaatttgatggttcatggttcaaggctgtgcaatttataagtttgaagtcaaacaacacatgatggataatcctgatgttacasattctcaggggagaatatatatttgttttttctaccaattgttctagtatttacagacaaacttcttaattatactgggttggttaaaaagtatttttctttactctttcaatataggtccagctatgcatcaccccttcgctgatgagccttaagaaaatccaaatttataaattgctgggtccatctctcttgccatccagaaaagtcagagcaagtggtcttgctggttttaagtgttgcctgtgtttctggcattggtaattttctttgttttcctgtagttttaggtatacatatataatgacatctccaaaattcatcaatattagcatttgttatgaagatttttcaggcaactggcttaccatatggcctaaatctgattctaaagtccaagttttactttctcaaatataaaaactgtttgctaataa

SEQ ID NO: 348475 - DNA, 590 bp, Homo sapiens
gattttgcatctcttccaccaaactttcagtgtaacaatggccacaaaataatctatatgttaatttgttaatttgatggttcatggttcaaggctgtgcaatttataagtttgaagtcaaacaacacatgatggataatcctgatgttacacattctcaggggagaatatatatttgttttttctaccaattgttctagtatttacagacaaacttcttaattatactgggttggttaaaaagtatttttctttactctttcaatmtaggtccagctatgcatcaccccttcgctgatgagccttaagaaaatccaaatttataaattgctgggtccatctctcttgccatccagaaaagtcagagcaagtggtcttgctggttttaagtgttgcctgtgtttctggcattggtaattttctttgttttcctgtagttttaggtatacatatataatgacatctccaaaattcatcaatattagcatttgttatgaagatttttcaggcaactggcttaccatatggcctaaatctgattctaaagtccaagttttactttctcaaatataaaaactgtttgctaataa

SEQ ID NO: 348476 - DNA, 601 bp, Homo sapiens
tacttcttttttaggttctgctttaaggtttaaaatataaatacttctgctttaaggtttaaaatataaatacttctgttttaaggtttaaaatataaatacttctactttaagttttaaaatataaatacttagctcatcacagcctactttcaaataatagtacatcacttgatatgcagtataatacattgccagtttttttctgcagacacacatatacatctcataaaattttacttctgccttaggaatctttcttataaatgacaatggaggatggctaacaatgaaattcttcagattttgttcagtgctgagacaacgttgagatgagcaaattacctctggtgaaaaacttaatgaggcactctctckggtcacacaaggcccaagtcttgcactctcaatctcaaatatataaccctgaaagtgagtagctctttaggttttgggacctagttgtgtcatttactttaccctagttccaaacctatttttaattttctaaaaataaacgagccctattttactttagtgcttaaaattttctacttgttataaaaatgtagattaagctgttttttcttatttagttatt

SEQ ID NO: 348477 - DNA, 589 bp, Homo sapiens
tgaaatctgggggccatatactatagtctgggagtacasgtctagggagtacatggacaaagggaaattgggtgaaaatcccattggctgactcctgctagcatacctgtaaaagctaaccttttaataggttagtttttaataggaggagatgatagtgggagtaaaagctgcgagattacattttattcgctggaaaaccttcttatccctccctggtttcttggagaaatttcatgtatccttagaaatgactcaaaatattgattattggacaaactatttatgcaattggagtccaaggtcaggtgatgaatgaaaactatattttattaaagaacagaatattcactaacagaagactggtgaattaacattggcatggattcttcaaattaatgatggaggacttgttgcaattctattattatttgatgcaaaggactattcatggtcatgactaatcattaaatggctgtaaacttttgagaaaacacttccaaatactgtgatagcatatcggctgcagttgttaaggtgagatttgtcagtcctatactgagaagggtaactgctactattcctctcc

SEQ ID NO: 348478 - DNA, 284 bp, Homo sapiens
cccagtcatggatctgaggccatatatataataatttgaacaaagttacctggrgtggtattcaaagtttcttatcattggtaggatgtagagcagaatttacagtaggccttatggaaggtaggaaagagcctcatacatgctctaagtgaaatctggagtgcatgaagagaacatcagggaggaaaccaaggtaaagatgaagttacaggttggaatgtgtggttggagagaatattacctgcttgtgctacctttacataaatacaaaattgcaattgtca

SEQ ID NO: 348479 - DNA, 406 bp, Homo sapiens
ggtaaagatgaagttacaggttggaatgtgtggttggagagaatattacctgcttgtgctacctttacataaatacaaaattgcaattgtcattcaatatgaatgggacattgttgtctttgtgtttccacagaggatgaagactaagctctctcttcaccaaattttaatcagccatgccaaatgggatcctttggaattgctcaagctctccacaatagtamacattaagcaatgcagaattccaagggcgcaataagagactactgttgtaattaagaaaatggttcagaaggaagttcccctccccacattaacttcctttttgtagttctaactggtcaataagtaggtagcccctgcacagttacagtagagtatcaaggtggttcatttgcatgcttca

SEQ ID NO: 348480 - DNA, 303 bp, Homo sapiens
ctgagtagctgggattataggcgcacaycaccacatctgattaatatttaaaatttttgtagagacagggttttgtcatgttgcccaggctggtctcaaaccctgggctccagtgatttgcccacctcagcctcccaaagttctgggattacaggtgtgagccagtgtgcctggccctaaataatatttatatgggcattttgtaattattttttttaataatataaatgtttcttttttaatatgaatttttcaggagttttaaaattgactgattattcattaaaatttaatgaaggacag

SEQ ID NO: 348481 - DNA, 303 bp, Homo sapiens
ctgagtagctgggattataggcgcacaccaccacatctgattaatatttaaaatttttgtagagacagggttttgtcatgttgcccaggctggtctcaaaccctgggctccagtgatttgcccacctcagcctcccaaagttctgggattacaggtgtgagccagtgtgcctggccctaaataatatttayatgggcattttgtaattattttttttaataatataaatgtttcttttttaatatgaatttttcaggagttttaaaattgactgattattcattaaaatttaatgaaggacag

SEQ ID NO: 348482 - DNA, 423 bp, Homo sapiens
gaaaaaggtcagagtttagttcttacacagtccttacacagagtttagtccttacacgtacaaagacagagggaggggggctccaaagctgaaagaggagaccccacatttggaggataccagccagttttatgccatggctggaggaggcggtgtttgatttgcacagggctcagggaattggtttgaccaggtatgttattcacttagccrgcaagaaaactggcctttccaccccagccctttaatatgcaaatgcagggcaccatgatgttctacacacatggggatatatgggggtggccatgttgtcaggcacctgttggggcaagggcaagaggacaacagtgggaattgccatgttgggtggaaccagtttctaaaggctggcatttgcatattaaaggttgccgtcccaggttt

SEQ ID NO: 348483 - DNA, 573 bp, Homo sapiens
atatttttaaatgtcaacatcatgacagtcacagaaagaataaagtgctggttcagactgaaaaagacaatgagaaatgacaaataaaatatgatgtgattctaaactgaatacttttataataaattatcagagagtggatgaaatttgaataaagatcagcaaattagaaggtagcaatctattcaactacttttcttgttataatggttagattgtgattatcaaggagaatgtttttatttgtagtaaatactcaagtattggggcatcaggtcaacaacttacattgaagtggttcagaaaaaaagcttttgcacttgtaacacttctgttagtttgagattattgtaaaatacaaaaaagagaaataattactacagaaataattaattaaaaacaaaaagcaaatacaaacaaaaaatacagggtttagaatctaaccccatcaacatttcaaatgaacatgtayagttttagaagagcttattattcaagagatacttcttgttaaagtgacctcgtactaagtaaaaatgcaaacagaaatgtaccattttcaaaaataattgt

SEQ ID NO: 348484 - DNA, 570 bp, Homo sapiens
gtggtgagatacagtagttgcaataactgtggatggagcgtctagttcctgacatagtctctcataagaaactgaagcctcagtctttcagccataaagaaataaattctgccaacaacccgagggacccttgggagcatattttccccctgtcaaacctctgatgagaccacaaccctggtaacacctggattgtagcctggtgaaacccttagcagaggacccagttaagccatgcacagattcctgacctatagtaacaacaaaataataaatgatagttcttttaggatgctaagtttttaataatttgttacacaacatggaaacctaatgcaggaatgatgaagggagaacagcctcatcacctgagaaaggaatacctcaaaacccaggatgtaggaagaaggaaggatagtgatttttttttttgtctttcagattactcaaggagccgtctcatgtagaaagaygccctcataggctctcacaaactgttgcaagcatctcaaattttattgactgctgggtcttacaattcctcaccagatggctttgaacacagttcga

SEQ ID NO: 348485 - DNA, 619 bp, Homo sapiens
cagtagttgagcaacaggctaagaaacagtaaacacttcaggacagaaggttggataacttattatgtggcaaatatttcataaaattgctgtgtgccataatgtgaaaagcagaccaagattttactgtacctgtatttcttgggaaattttgttctaaaaattaaaaacatttgtgtatgttggctttactccctctccctgtaaaatgggactttaagaaataacagttcatgcaataactatctgctttgatagctgaaatgggaaagaatagagaaatttaccgcttagcaagattgagaaaatctacagacaagaagggtaaaacaagacagagaacaagttaagggcaacaaatacccagtaaagtttcccagttaatctaagtgactcagtccagaagcaaagatcagataaggttttactttgcctttcaagtgaagtgttttaggtggtctcaaaatagccaccattaggttgagagtgaaaggtgtggaagggagaaaacgaggtaagacagacttgagaattatttctaacaaargactttcatatagttcctggtacttagcattgattagaagcaaaagcctccccaagtcacaggaaatttttc

SEQ ID NO: 348486 - DNA, 605 bp, Homo sapiens
attttaaacaatgccatttttcatttcatgaacaaaaataatttctcagtgtttgtgaatatgtgtgtatgagacagttaaacagacttttaaaaaggaatattctgaaatatacccctcaaaaagatttttaaatgttttcaatttaaaagaaaatagataatttttgaggactaagctctgatttttttattttacacaaattcctmcctaaggggtctaaggagtcatgccctacaaacaattttcatcagatgggtttttttgaccctatatattatgacttacttctcaatctgactctggcataacattatgagacaaagaaaaaatatttaaccccaaaatatatttccttaccctaccttcattgtccttcaaggtctcttgcaggaaaatccacattctatagagaatcccctttccccttcgttttccttcctttcctcctatccaggagataatcaactaagagccaggcacccttttaagtcccattaagaaacaatttacaacctgctctctctgaagtccgctatctgggagcttcctctgcacaataaaacttggtctccaaaatcctttatctttaacctgaacattcc

SEQ ID NO: 348487 - DNA, 537 bp, Homo sapiens
tgaaccaagcatattagctgttggttagatattgcctcgaatgtttttgtttgttttgttttggtctttactatttgggtatataagtatgatttctccaataatattttaaactctagaaacaatatttttaaagtttggaatctcgagtcaacagataatataggggttattatacagtaaagtattcaatacagctacttatcaatcaattgacacaaacaatgacactttctttatgtggaattctctgttttctacagtgtatttcattgtgtagttatgattcactcatgttgaaataagtagctgaattatatccattttmatggttgtataatattcttctacatcgacatacttcactcatttacttacttattgtttctttgtttattggtagacatttcatttatttcaagccaactttccattaaaaactatgaacattcttgtacattcttcctgttgtaccaatgccagattattttctaggatatataattaagattagcattcttgattatagttaatgta

SEQ ID NO: 348488 - DNA, 537 bp, Homo sapiens
tgaaccaagcatattagctgttggttagatattgcctcgaatgtttttgtttgttttgttttggtctttactatttgggtatataagtatgatttctccaataatattttaaactctagaaacaatatttttaaagtttggaatctcgagtcaacagataatataggggttattatacagtaaagtattcaatacagctacttatcaatcaattgacacaaacaatgacactttctttatgtggaattctctgttttctacagtgtatttcattgtgtagttatgattcactcatgttgaaataagtagctgaattatatccattttaatggttgtataatattcttctacatsgacatacttcactcatttacttacttattgtttctttgtttattggtagacatttcatttatttcaagccaactttccattaaaaactatgaacattcttgtacattcttcctgttgtaccaatgccagattattttctaggatatataattaagattagcattcttgattatagttaatgta

SEQ ID NO: 348489 - DNA, 484 bp, Homo sapiens
tggtggtgcatgcctttagttccagctatttgcaggctaaggggggctaattccttgtgcccaggactttgatgctgcagtgagcctacgctagcacaacctcaccccagtctgggtgacaaagtgagaccctatctttccccccaccycccaaaaaggtgtgtagactataatgttaaaagttaaggcactaaaccatttcaatcaaaccaattattattctatgacgccctggagattcagtgaatgtagtgaagtaatgacatataaaacaaaactcacatagccaatgaatataagataaaatttttaggtgtagatagatagagggaatggaaaaccgtgtacaaatggacaaaaatgcatagaatccctcaatatcatgtctaatatacttttgcatttttagaaaatgatatatggtgtgtatacatacaaagaaaagaaattggcaaatttttcaataactactaagattagcaaa

SEQ ID NO: 348490 - DNA, 494 bp, Homo sapiens
ttcatagcccaaaccaacaagaattctgaaggattaaagattcatgccacttaccaactaacataccagaacctcatgagtgcttgcagaaggcaccagactcccaggtcagagacaaaaaaataatgaattactacagcaattcgagtagctggastatcagcttttttgtttgtaccagttttccaagtcacatttcctacagtgcaatgtgaaggaggccagatgatacctgaacacacagtgaattgcattacattagaggatctttgagcttacagaacaagagtctttggtataaggcaataatcatccatgccttctgcttcagagacagcaatgggagtcaagatcaagaggttcaggaaggaagtctattaagtaggaagggcacctattatatagtttaggtacaacgactaaagcccattgcttatatgaaaatattttggtgctaaatttatctccaatacagattgtagcagcagtggtag

SEQ ID NO: 348491 - DNA, 590 bp, Homo sapiens
tgaacacacagtgaattgcattacattagaggatctttgagcttacagaacaagagtctttggtataaggcaataatcatccatgccttctgcttcagagacagcaatgggagtcaagatcaagaggttcaggaaggaagtctattaagtaggaagggcacctattatatagtttaggtwcaacgactaaagcccattgcttatatgaaaatattttggtgctaaatttatctccaatacagattgtagcagcagtggtagacttttattaccaagggctcattaaagggaaggagactcttgttgccaccatgcagtgttctaattggtttgagggtttggtatgttaaaaactccacttcatctaggtactctcaagcagacagtactcttattatggaaatataatctgtccaaacttctaatgccagggcaggcaatacagatcacgtttgccaatttgtttcctttatctgttcagactcatcactcagttaattgagggggaaacatatagcagtctttcagtttgttaaagaagtagctgttactgtagatggcaatatatggcagtcctcaagctaaaacaa

SEQ ID NO: 348492 - DNA, 590 bp, Homo sapiens
tgaacacacagtgaattgcattacattagaggatctttgagcttacagaacaagagtctttggtataaggcaataatcatccatgccttctgcttcagagacagcaatgggagtcaagatcaagaggttcaggaaggaagtctattaagtaggaagggcacctattatatagtttaggtacaacgactaaagcccattgcttatatgaaaatattttggtgctaaatttatctccaatacagattgtagcagcagtggtagacttttattaccaagggctcattaaagggaaggagactcttgttgccaccatgcagtgttctaattggtttgagggtttggtatgttaaaaactccacttcatctaggtactctcaagcagacagtactcttattatggaaatataatctgtccaaacttctaatgccagggcaggcaatacagatcacgtttgccaatttgtttcytttatctgttcagactcatcactcagttaattgagggggaaacatatagcagtctttcagtttgttaaagaagtagctgttactgtagatggcaatatatggcagtcctcaagctaaaacaa

SEQ ID NO: 348493 - DNA, 485 bp, Homo sapiens
gaagaggacatacaggtggaaaataagcacatgaaaagatgatcagtgttttgacattgtttgccattagagaaatgcaaatgaaaaccacaagtgagatattgcaacacacctatccgattatctatttatcactgaatgaattaaaaaatagtgataacacaagttggtaaggctgagaaactgtattactcacacactgctggaagaaatgtaaaatgatataaccactctggaagacagttgggcagggctataaaataaaattaaacaagcaattaccatatgatccagcaattgttctcttgggctttttctccagaaatgaaaaatgtctatttacrtgaaaacctgtccatacatttaatagctgctttatctgtaatagccaaacactgaaatcaactcagatgtccttcaacaagagaatggttaaaaaactctggtacatacattctagggaatactactcagtcacaaaaagt

SEQ ID NO: 348494 - DNA, 505 bp, Homo sapiens
gatccctctagtcatcctgtcacatctaagtggagaaaactgagaagcacttgagaagttcacagtccagaacacaagctcactaaaagactgagacctaatcataggactatagaacatttcccctcccccaacactgtaccagctcattactaaaagcctgtttacatcagttcattttatccagtacataatgtccacctggcagggaaaaaaatgacaagacatacaaataggtaaaacacagtgtgaagagacagaaaatgcattaaaatcagactcagcgatggcagggtgttggaagtaacagacggggaatttaaaataactatgattaatatgctaagggctctagtggataargtagacaacatgtaagaacaggtggtcaatgtgaacaaagaggtggaaattataagaaagacttccctccaaatgctagagatcaaaaaactataacaaaagtgaagagtacctttgatgggcctctcagtagactggacac

SEQ ID NO: 348495 - DNA, 587 bp, Homo sapiens
ttggagagcaatttagtaatttgaatggggagcaatttagtaatttccaagtaattaccaagttatctcactcctaggaatataccctgtagaatagcttgcatatatatactatattagaaggtaatacacaatgattttttttttttgagagggagtctggctctgtagcctaggctggagtgcagtggcaccatttcagctsgctgcaaactccgcctcctgggttcaagcaattctcctgcctcagcctcccgagtagccggaattaccggctcctgccaccctgccggctaattcttgtttttttagtagagatggggtttcaccatgttggccaggctggtcttgaactcctgacctcaggtgatccgccctatgcaatgattttcaatgcagagatgatctgtagtattgaaaacattagaaacaacctacatgtctagcaaagtagaatggataaatatattatgaaatactgaaatgaaaatgaaaaaaaccttgtctacatatacaagcatggagtatctcaaaaaaaacataaatttatacctgaaaaatgaagccaaactaagctacatgtgtat

SEQ ID NO: 348496 - DNA, 592 bp, Homo sapiens
agatctatggtaagaatgaatcttctatccatgaaatcttgaaaaaggggaaaagaaattcatgttagttttgctgtcacacttcaaactgcaacagytatagtcacaatgcatgacaagagcttggttaaaatggaaaaggtattaaatttgtgggtggaagacataaaaacagaaaatgtgttcctattcctatccattacagcaacatgttctatcagaaagctttgagcctttgtgaagactagcaaggaatcccctgaaatggagtgacactatgccatctactgcaagtaatggaattgttccacaaattcagaaataggtttagactgaaaaatataaaatttactggagaggctatgtctgccaatgaagaagctgtgccacatttctggatgaggcgaagattaaggggaaacaatatcaaccaaagcaagtattcaattgtgataaaattacgctcttctggaagaagatgcccacagaacctaaattcatcaaggtgcaaagtaggcaccaggtcataaaacatggaaggacagatgaactatgtggcaacagtgcagggcatatgataatgacaagcata

SEQ ID NO: 348497 - DNA, 592 bp, Homo sapiens
agatctatggtaagaatgaatcttctatccatgaaatcttgaaaaaggggaaaagaaattcatgttagttttgctgtcacacttcaaactgcaacagttatagtcacaatgcatgacaagagcttggttaaaatggaaaaggtattaaatttgtgggtggaagacataaaaacagaaaatgtgttcctattcctatccattacagcaacatgttctatcagaaagctttgagcctttgtgaagactagcaaggaatcccctgaaatggagtgacactatgccatctactgcaagtaatggaattgttccacaaattcagaaataggtttagactgaaaaatataaaatttactggagaggctatgtctgccaatgaagaagctgtgccacatttctggmtgaggcgaagattaaggggaaacaatatcaaccaaagcaagtattcaattgtgataaaattacgctcttctggaagaagatgcccacagaacctaaattcatcaaggtgcaaagtaggcaccaggtcataaaacatggaaggacagatgaactatgtggcaacagtgcagggcatatgataatgacaagcata

SEQ ID NO: 348498 - DNA, 499 bp, Homo sapiens
atagtattttgattactgaaaccttgcatataattttaaatcgggaattgtgatgcctccagctttctttttctttctcagtattgctattgctattcaggatttttagtggttccgtacaaatttctgcattgtttttcctacttctgtgaagaataccattggaattttgatagggattgcawtaaatctacatattactttgcttagtatggacattttaacaatatttattttaccggtctacgaacaaggaatatcattcaatttttgtgtcttcttcaattcctttcatcattgctttatagtttccagtgtacaaatctttcacctccttggttaaattcattcctactttactttttgatactatcactaatgggatcattcccttaattgctttttcagacttgttgttatttttgtataaaaatactatagatttgcgtatgttgattttgtattctgcaactttactgaagccatttattagtgctaa

SEQ ID NO: 348499 - DNA, 569 bp, Homo sapiens
tcatactggcttcagatttgtatattatgtgatttgtagcatctagtagtcaagtatattttaaataaatttatgagccatcttaatttcttacaactttttatttggaattgctaatctaacagcgaaaaccttgtggatttaaatgtgatcttcagctgtttattttagcaacaatttttaatgcaaagttggatgccctaagaagagatgaggtcttttactgatagaaaacattttctttttaagaaattcacacacttgaatcttcctactaatttatagttctgtgacttggaaaattttggctatatttgttaattatacatatggaagagagcaatgagtatacgtacagtagttgcaaacaatagaggaaaatgagataattatagtttgttatgcagctttygaaatctttttgtactaatcaagccataaaattattgcatcttctacaaaagtctgctcaggaaagaagctacattatataaaatagattccattagatgtgcacataggaggaaaaagctaaaattaagactttgagcttttaaaaatcctagtgt

SEQ ID NO: 348500 - DNA, 511 bp, Homo sapiens
caggccacgtacagtgactcacatctataatgtcagcactttaggaggccaaggcgggaggagtgcttcagcccaggggttcaagactggcctgggcaacatagcagccacgtatacagaaagtaaaaaaaaaaaaaaaatagccaagcttggtggcatacacctgtagtcatagctactcggargctggaggcaggaggatggcttgagggggaattgaggtggcagtgaaccatgatagtgccactgcactccagcctcagtgacagagccagaccctgtctcaaaaaaaaagtccttcagtttaaccattgaaaagttatagccagctactgaggcttgaggggaaaacagaccatgtatttagagaattattaattgcaaagacagtgaggaaataaagttaaaaacattctcattttctcattaaatattgtttttccatatatataaaaatataaaatgatctaaaaattctctgttgcgacaactttttattgctttgtcactc

SEQ ID NO: 348501 - DNA, 511 bp, Homo sapiens
caggccacgtacagtgactcacatctataatgtcagcactttaggaggccaaggcgggaggagtgcttcagcccaggggttcaagactggcctgggcaacatagcagccacgtatacagaaagtaaaaaaaaaaaaaaaatagccaagcttggtggcatacacctgtagtcatagctactcggaggctggaggcaggaggatggcttgagggggaattgaggtggcagtgaaccatgatagtgccactgcactccagcctcagtgacagagccagaccctgtctcaaaaaaaaagtccttcagtttaaccattgaaaagttatagccagctactgaggcttgaggggaaaacagaccaygtatttagagaattattaattgcaaagacagtgaggaaataaagttaaaaacattctcattttctcattaaatattgtttttccatatatataaaaatataaaatgatctaaaaattctctgttgcgacaactttttattgctttgtcactc

SEQ ID NO: 348502 - DNA, 470 bp, Homo sapiens
tgctatatctcataggttttggtatttttgaattttcattatcatttgcttcaagatatttttcaatttccttcttaatttcttccttgacctacttgtcagtgaagagcatattgcttaatttccatgtgtttttagagtttcccaaaytccttttgttactcaattctaattttattccattgtggtcagagaagatgcttgatattttttcaacctttttgattgttttaagacttgttttgtaacagaatatatgatttatccttgagaatgattcatgtgctgaggaaaataatgtgtatgctacaactgttggatgaaatcttctctaaatatctatcagatccatttggtctatagtgcagattaagtccaatgtttctttgtttattttctgtctcaaagatttgttgaatgctgaaagtggggtgttaaagtgtccagctattattgtactgaagtgtatc

SEQ ID NO: 348503 - DNA, 529 bp, Homo sapiens
tttttgtattttgtgtatgtgtaattgacatattccatctttataaacttaagacttgctctaattgcatacaataagagcctgcaagagccagtggttacaaatttgtagtcagcccaaatcatgtttagtttccatacaaatgctcttaacttttgcatattytgtgatagtaaacattatcttcataaggcattttattaaacaaataccagtatttgtttaaaatattacacaaaacaggacaataaatattaattgcagaaagaaccatctgcgaaaacaataaaagtttatgctaatattgatctagaggaaaataatgattttttaaataatttcaacttctattttagattcagggggcacatgtgcaggcttgttacaagggcatatcgtatggcactgaggtttggggtacaaattataccttcacccagatagtgaccacagcacccaataggtagtttttcagttcttgcctcccctccttctctccctcttctagtagtacccagtgtctattgtt

SEQ ID NO: 348504 - DNA, 484 bp, Homo sapiens
ggggcacatgtgcaggcttgttacaagggyatatcgtatggcactgaggtttggggtacaaattataccttcacccagatagtgaccacagcacccaataggtagtttttcagttcttgcctcccctccttctctccctcttctagtagtacccagtgtctattgtttccatctttatgtctgtttttatacctgatgttcagctcccacttataagtgagaccatacagtatttattttctgttcctcaattaatttgctttagatagtggcctccagttttatatatgttgctgcaaaggacaatattttgtttgtttttgtgactgcatagtatttcatggtgtatatgtaccacattttcttgatccagttcattgctgatgggcacctaggttgatttcacgtaactgttattgtgaatagtgctgaaatgaacatatgagggcatgtgtccttttggtagaatgattcattttccttt

SEQ ID NO: 348505 - DNA, 623 bp, Homo sapiens
tatgttgctgcaaaggacaatattttgtttgtttttgtgactgcatagtatttcatggtgtatatgtaccacattttcttgatccagttcattgctgatgggcacctaggttgatttcacgtaactgttattgtgaatagtgctgaaatgaacatatgagggcatgtgtccttttggtagaatgattcattttcctttgggtatgtatccagtgatgggattgctgggcgaattgtagttctaagttctttgagaaatttccaaactgctctccatagyggctgaactaatttacatttctgtcaagagtgtataagtgttcctttttcagtgtataaggttccataaccttgtcaacatctgttattttcttcactttttaataataaccattctggctgttgtgagatggtatctccttatggttttgatttccatttatctgatgattagtgatattaagcatgttttcatatgcttattggttgcttgtatttcttgttttgaaacatgtctgtttatgttctttgccaagtttttcatgaggttatttggtttttgcttgttgatttgtttaagtcacgtacagattctgataataagacctttgtcttatgtatagt

SEQ ID NO: 348506 - DNA, 598 bp, Homo sapiens
gtaactgttattgtgaatagtgctgaaatgaacatatgagggcatgtgtccttttggtagaatgattcattttcctttgggtatgtatccagtgatgggattgctgggcgaattgtagttctaagttctttgagaaatttccaaactgctctccatagtggctgaactaatttacatttctgtcaagagtgtataagtgttcctttttcagtgtataaggttccataaccttgtcaacatctgttattttcttcactttttaataataaccattctggctgttgtgagatggtatctccttatggttttgatttccatttatctgatgattagtgatattaagcatgttttcatatgcttattggttgcttgtatttcttgttttgaaacatgtctgtttatgttctttgccargtttttcatgaggttatttggtttttgcttgttgatttgtttaagtcacgtacagattctgataataagacctttgtcttatgtatagtttgtgaatatttgctcccattctgtaggttgcctgtttactctgttgattgtttattttgctgtgcagaagctccttagtttaattagattccac

SEQ ID NO: 348507 - DNA, 568 bp, Homo sapiens
atttcaccaaggaagatatttaaacggctagtaagaatatgaacaatgtccaacattactaatcattaaggaaatacaaatcaaaataattagatactttttttacacatactagaatatcaataacaataaaaggaactcaataactaaggtcagtgaggaagtgaagaaatgggaatccttatacattgctattggagatgtaaaatggtacagcctcttcggaaaatagtttggcagtttcttcaatagttaaacataaattcacaatatgacccagtggtattagaccgtttttcacgctgttaataaagacatacccaaaactgggcaattcataaaagaaagaggtttattggacttatagttccacatgattagggaggcctcacaaacatggcggatgggaaaaagatcaagtcacatcttacgtggagggcagcaggcaaagagagrgcttgtgaagagaaacttccatttttaaaaccatcagatcttgtgagactcgttcactatcaggagaacagcacgggctaagcacgggaaagaaccgcccccaggattcaat

SEQ ID NO: 348508 - DNA, 552 bp, Homo sapiens
atatgagttttggaggggaaattcaacccttaacattgcctattttttaaaattggaggccgggcgtgatggctcatgcctgtaatcccagcactttgggaggtctagatggggggatcacgagatcaggggttcaagatcagcctggccaagatggtgaaaccccatctctactaaaaatacaaagattagctgggtgtggtggtgtgtgcctgtaatcccagctacttgggaggctgaggcagacaattgctttaacccgggaggcggaggttgcagtgagctgagatcatgccactgcactccagcctgggcaacagaatgagatgccgtctcaaaaaaaaaaaaaaaattggattgtttgccttattattgaggtataagagatcttttgtaatgttggacacatattttgcaaaactttgttaccagtctgttgcatgatttttttaaaatttgtttaaatgtsttatcttgaagggcaaaaattctgcattttgatgagatccaatctatctcgtgtgtgtgtgtgtgtttgtgtgtgtgtgtgtc

SEQ ID NO: 348509 - DNA, 593 bp, Homo sapiens
tataataaaagagattacacattttataaactttggataaaggcaaaagttgtatgtaagaagaagacaatgatgaattagaaaagcaaaaaatagattggatagggagaataaggcaaaaaggagtcaccatatgaacactggaggaataacaagcatttttgtgcatgtgagtttatttttaagaaaacatgcagatgtgagttgtataatcagtttctcacacattctgttaggatgctttaggatatccaattgtgatatagagtaagcaattgaacattgaagcatggacctcaaaaaatgccagtgttgagataaacatttatgattctgcacttataaatgattactaaaatcatggaagaggcaaagatcactgaagaaaataaatcagaaggtaaaaaaaagccttagtaatcaagcccttttatttccaycaggtgtatctttctagcatatcctttccacactgcccagtccttctcatctgtgccccaacctctcacacaagtttgactgtgatttaagatggcatgcatattttagaatttatctttgtgaattgaaatgcctaaaatgtttaaaggcat

SEQ ID NO: 348510 - DNA, 536 bp, Homo sapiens
aaagcatatagcacaaggcttcattcaaggtaagaactcaactgttattggccagtcagccaagagaattataaatacttttaaaaatagtaatttgtctaaggtcttaatatgtttttcagatatacttaaaatatttaattattaatttatagatattttattctaaattgatgcatttgataaataagcatttgtatagaagtccttaatagaaaaacacgagtgaagcaccagggtctgaagtaagatatgtcagagaaactaaatgtttcagattttaggatatcagaaactttattataagtttcagttgaagtgctattaattggtccagcacagtggctcacttctgtaatcacagcactttgcaagactgaggcaggcagatcacttgagaacagkagttcaaggcaagcctggcaaacatggcaaaaccccatctctactaaaaatataaaaattagccaggtgtggtggcatgcacctgcagtcccagctactcaggaagcagaggcatgagaatcgcttgatcc

SEQ ID NO: 348511 - DNA, 563 bp, Homo sapiens
tcttatgtaccaaatactttggcccctatactttgtttagtcaatttctacttctgtgctttcacaatcctgagtaataattctctaaaattatttagctatgtttaatgttgatagcagtacgttattctgttaaactaaatttggcctgaggatgccttcatattgtgagttcttatgtaaaaactgcaacctaacttagtacataaactaactgaaagcgtactttaggactacacttttgtaacaaatagctgagcctcagccaatcacagtagttaagcttaggtcaagcacaggtggccaactgatcagaccatgttcaaattaggcaaacgtggagctgtaactaaccaaattgtttcyctacctcatgttttgttttctgttcatgaatgctgccagcccatgttgtggagcagaattctctgaacctcttccggttctgaggactgcctgattgacaaattgttctttgctcaattaaactcttaaatttaattcatctaaagtttttcttttaatgatttcctatgtattaacacaataaagatcaactggtt

SEQ ID NO: 348512 - DNA, 611 bp, Homo sapiens
cctcttccggttctgaggactgcctgattgacaaattgttctttgctcaattaaactcttaaatttaattcatctaaagtttttcttttaatgatttcctatgtattaacacaataaagatcaactggtttgggattcaatatttgttatttggttaaatagggttttaaatgataaagtaaaataagcatatgtaagaacaataaggtatgaaaaggaaagtaaatcattcttttcttccagatttctaactgctttctcacggaggtagccattaatgtctacgtatcttttcaaaataattataattacttaaggtctataaatattctcttctccacataattcaaatagtgttatttatgtcatgatgcagtcttatgcatatattagacatttaattaaaaatgaagattgatttttgtctcataatcttgcctgattttttccaaaaacacatggaatatatattttttaacttactctccttagataacatacacrgtctgtctttgagattttagagcaaaagtaaatacacttttttaaagctaagaaaataatgacaaattacttcactactttgattgatttccagagtttttatgtaa

SEQ ID NO: 348513 - DNA, 595 bp, Homo sapiens
caaggaaaagcagtttattatagcatagtcaatttagtatgggattacaaccaattaaggaagattcttcctgatgctgatggtagttctatactataattttataaaatgtycctagttatataactcttccggatatagtttctcatttcatctccaatacattggtgtcctaacatcccaagatgaaagattgataagaaactgggacacacttcactcaattttctaaattttcaaaataaataatgtaatattttacttactttttaatcaagctaacttagatattctaacttatctacaatctgaattaagtctgcaaaaaaattgaaaacaaaattaaattttcatggcatggacattctaaatatatttgcaaattctttggcccttcacttgtacataattgaagttttagtcctctttcctagaataagaactgatcttattgactcactactgatgaatagaatgttattaaacaatagagcttctaggaatcataaggtggttgtctcccagcagtctcaccatgaacccaagagaatagtcagtatggcttttgtttaatgaaacagattaaaaataggta

SEQ ID NO: 348514 - DNA, 593 bp, Homo sapiens
gatatcaccacctgataattttatggtagtccaccatttcctactatgatccacattttttttttgcagaagctggggagctgaactgaatagaaatgtggatagcactattatccctgaattttcaaacactttgactgagggtgttaatcccagaatttwttttcacgatgtcggtatttttccttatttgctcgcttgattatataggggcagaggcacagtttagggagcctgcacttgaatcctcttgctataatggctctattcaggtcaagaataaatgtggttttatatcaactgctaatgatatttatcctaattgtacatttggaaacagaaaaaaaaaacatagggtaaagtctccagatgcaccggatgcactataaaatgaactcaaataaaaactatatttaccacctggcttctgtaaattctgaataagacagagaactacagtagcattttgtgttctggaaaatgtgtcagttctatgtaattctccttgtaagtccatatttatccatctgaaggactatgtgtctccttgggaacagtttaaaatacttactgcatatatgtgtggtgacatt

SEQ ID NO: 348515 - DNA, 593 bp, Homo sapiens
gatatcaccacctgataattttatggtagtccaccatttcctactatgatccacattttttttttgcagaagctggggagctgaactgaatagaaatgtggatagcactattatccctgaattttcaaacactttgactgagggtgttaatcccagaattttttttcacgatgtcggtatttttccttatttgctcgcttgattatataggggcagaggcacagtttarggagcctgcacttgaatcctcttgctataatggctctattcaggtcaagaataaatgtggttttatatcaactgctaatgatatttatcctaattgtacatttggaaacagaaaaaaaaaacatagggtaaagtctccagatgcaccggatgcactataaaatgaactcaaataaaaactatatttaccacctggcttctgtaaattctgaataagacagagaactacagtagcattttgtgttctggaaaatgtgtcagttctatgtaattctccttgtaagtccatatttatccatctgaaggactatgtgtctccttgggaacagtttaaaatacttactgcatatatgtgtggtgacatt

SEQ ID NO: 348516 - DNA, 593 bp, Homo sapiens
gatatcaccacctgataattttatggtagtccaccatttcctactatgatccacattttttttttgcagaagctggggagctgaactgaatagaaatgtggatagcactattatccctgaattttcaaacactttgactgagggtgttaatcccagaattttttttcacgatgtcggtatttttccttatttgctcgcttgattatataggggcagaggcacagtttagggagcctgcacttgaatcctcttgctataatggctctattcaggtcaagaataaatgtggttttatatcaactgctaatgatatttatcctaattgtacatttggaaacagaaaaaaaaaacatagggtaaagtctccagatgcacyggatgcactataaaatgaactcaaataaaaactatatttaccacctggcttctgtaaattctgaataagacagagaactacagtagcattttgtgttctggaaaatgtgtcagttctatgtaattctccttgtaagtccatatttatccatctgaaggactatgtgtctccttgggaacagtttaaaatacttactgcatatatgtgtggtgacatt

SEQ ID NO: 348517 - DNA, 289 bp, Homo sapiens
caggatacttgcttcattatgtacatcatctctgaatctagatgtcaaggaactattgtggtattaaaaaataaacttagtcacattaacatttttaaagtttattttagcrgacagtgactcatgaattaggcaataccagttcagtgctccatttgggtgaagggttcatgtgagacagaaacttttataaggtgtttgcggaacaccttataaaaagaaaatatattcaattggttacaggagaaaggccctagttaaagtagtgtttttggtttctaattggtaa

SEQ ID NO: 348518 - DNA, 587 bp, Homo sapiens
ggaggttttacagcaaaatagcgacatagtttgacacgtctcacaagaatcacttgaatttatcagttgagtgtaaactatagagaaaaaggacaaaaacagaaataacaaataatagacaataagccactcagagataaaaggggttyggaccaggctagtagaaatgtaagtggtaaaaaatgcttgaattattattattattattttttgtttttgagatggagtctcgctctgttgcccaggctgcagtgcagtggcatgatctcagctcactgcagcctccaccttttgggttcaagcaattctcctgcttcagccccaagtaactgggattacaggcgcccaccaccaagcccagctaatttttgtatttttagtagagacggggtttcaccatgttggccaggatggtcttgaactcctgacctcaggtgatccgtccacttcggcctcccaaattgctgggattacaggcatgagccactgtgccctgcctgaattctaaatataatttgaaggtactaccaacagaatttactgagtgattggctcagaagagtgaaagaaacaagaatcaataacaa

SEQ ID NO: 348519 - DNA, 587 bp, Homo sapiens
ggaggttttacagcaaaatagcgacatagtttgacacgtctcacaagaatcacttgaatttatcagttgagtgtaaactatagagaaaaaggacaaaaacagaaataacaaataatagacaataagccactcagagataaaaggggttcggaccaggctagtagaaatgtaagtggtaaaaaatgcttgaattattattattattattttttgtttttgagatggagtctcgctctgttgcccaggctgsagtgcagtggcatgatctcagctcactgcagcctccaccttttgggttcaagcaattctcctgcttcagccccaagtaactgggattacaggcgcccaccaccaagcccagctaatttttgtatttttagtagagacggggtttcaccatgttggccaggatggtcttgaactcctgacctcaggtgatccgtccacttcggcctcccaaattgctgggattacaggcatgagccactgtgccctgcctgaattctaaatataatttgaaggtactaccaacagaatttactgagtgattggctcagaagagtgaaagaaacaagaatcaataacaa

SEQ ID NO: 348520 - DNA, 505 bp, Homo sapiens
ctttctctatgaaagcaaatctataaaattcaaagaagacactgttaaatcagatgcacagattatcaaggtaaggacacaagaaacatgaaaaaacaagaaaacatgacaccaccaaacgaaaacaataattctccagtaacagattttaaagaaaaakaaatctataaaaatgactggaaatcattcaaaacaatcttataaaggaagttcagtgagatacaagagaacacacacaaaaaatcaagaaaatcagaaaagcaatacacaatatgaatgagaagttcaacgaagagactgatatcatacaaaaaggcaaacagaagtcctgaagctgaaaatttcaatgaatgaaataaaaaatataattgagagctttaacaatagactagataaagcagaagaaagaatttataaaggtgaagacagaccttttaaaacaacccagtcaggcaaaaacaaagaataagaggcaataaagaaagcctacatgacaaataggata

SEQ ID NO: 348521 - DNA, 505 bp, Homo sapiens
ctttctctatgaaagcaaatctataaaattcaaagaagacactgttaaatcagatgcacagattatcaaggtaaggacacaagaaacatgaaaaaacaagaaaacatgacaccaccaaacgaaaacaataattctccagtaacagattttaaagaaaaagaaatctataaaaatgactggaaatcattcaaaacaatcttataaaggaagttcagtgagatacaagagaacacacacaaaaaatcaagaaaatcagaaaagcaatacacaatatgaatgagaarttcaacgaagagactgatatcatacaaaaaggcaaacagaagtcctgaagctgaaaatttcaatgaatgaaataaaaaatataattgagagctttaacaatagactagataaagcagaagaaagaatttataaaggtgaagacagaccttttaaaacaacccagtcaggcaaaaacaaagaataagaggcaataaagaaagcctacatgacaaataggata

SEQ ID NO: 348522 - DNA, 558 bp, Homo sapiens
tcagacagaatcaaagaaatgaaactttctgtatcactgcatctggacaatgagatgccagatctctcacctgtcaagactacctaaccacccatatgcttactgttgactaaatcctcttccttacccctctctaattcttgttttcccacacacagtcacatttcttccctgctgtgtaaaaccctaattttactcatttggggagacagatttgagattgatcaccctcggctgcatcacctgattaaagtcttcgtctttgacaatacttatctcagtaattggttttgtgtgtgatgagcagcaggacctagacctaacccctggcatttcagtttccagaagtattaayagaagaacagaccaagctgaggaaagaatctcaaagtctgaagaccagattttgaatcaactcagtaatacaaaaagagaaaaataatgaacaaaacctccaagaaatatgggattttttaagcaatcaaacttatgacttattggcatctctgagaaagacagtgtaagcaatgtggtaaacacatttaaggatatagccca

SEQ ID NO: 348523 - DNA, 616 bp, Homo sapiens
gcacccacaggttcaaagtaaatgaatgaataaagatctattaggcaaatggcaaacaaaaaaagagtagaaggctctatttttctattagataaaacagactttcaaaaatgtaaaaggacaaataaggtcattacattgataaactcttcaattcaacacaaagactcagctaaatatatgcacatctgacactggagcacccacattcactaaacaaatccaccttgacctacaaaagaattagatggccacacaataatgtgggaaacttgagtatcccattaacagcattagacagatcaytgagggagaaaactaacaaagaaactctgcacttaaactccacacttgactaactcgacctaataggcatctacagaataccccaccaaactgaatacacattcttctcatttgcaaatagatagattctacgatgcatagaatatgcatcatattcatgcatattcattcattgtatattcacagaatatacaaacatattctatgatggaccacatgctcagtaatgaagcaagtatcaataaaataaaaaaatcaaaatcataccaagcacgatcttggaccatactgtgtaaaaacagaaattgat

SEQ ID NO: 348524 - DNA, 616 bp, Homo sapiens
gcacccacaggttcaaagtaaatgaatgaataaagatctattaggcaaatggcaaacaaaaaaagagtagaaggctctatttttctattagataaaacagactttcaaaaatgtaaaaggacaaataaggtcattacattgataaactcttcaattcaacacaaagactcagctaaatatatgcacatctgacactggagcacccacattcactaaacaaatccaccttgacctacaaaagaattagatggccacacaataatgtgggaaacttgagtatcccattaacagcattagacagatcattgagggagaaaactaacaaagaaactctgcacttaaactccacacttgactaactcgacctaataggcatctacagaataccccaccaaactgaatacacattcttctcatttgcaaatagatagattctacgatgcatagaatatgcatcatattcatgcatattcattcattgtatattcacagaatatacaaacatattctatgatggaccacrtgctcagtaatgaagcaagtatcaataaaataaaaaaatcaaaatcataccaagcacgatcttggaccatactgtgtaaaaacagaaattgat

SEQ ID NO: 348525 - DNA, 594 bp, Homo sapiens
gaaatatttgtacgtgaatgttcacagcagttgtaaacataatagactgaaatttaaaacaatgcaaatattaatttaatttctttatcttgggaaataagcatatcataagtcatgcttccacaaataacttaagagtctctcttgacactaatatgcaggtgagtgatttaggatgtattagagctttagaaatagaagaatttgatccagaaaaaaaaactgacatgtaatctgttttttcaggcataagtggtaggaatgtcatttggttttagggagtcagtggtggttgggaagaccactaaagcatttttggtgaaccatcattatcattagtaccatcgcagctaagttaggttctgacacttaatatttggtaattctaagagcaaccctttcttcataaggtcagttctattccatttgtttaggacaacatcatgggaattagacatgygcagtcccacaagacactgtgcttagaaggaccccactcctggtttaacgtcctgctcttaccattttgaattcttaatgatttttatctttgaacctgtatttcataactgaagtataatgagataatggaac

SEQ ID NO: 348526 - DNA, 591 bp, Homo sapiens
ataatgtaaattttatataaattaattggcaagtccccattttcttctccactgtcccctacaatcaccattctactccttgcttctatgagtttgactattttagataggtcacataactggaatctttcagtatttgtccttttgtgactgacatttcacttagcataaagtcctaatttttatccatgttgttgcatattgtaggattttattcttctttaaggctaaataatattccattttatatatttaccatacctttatcaatttatctgtcaatgaacatttagattgtttctacatcttagctgttgtgaatagcaccrcaatgaacatgggattgtttctacatcttagctgttgtgaatagcaccacaatgaacatgggagtgttaatatttatttgagatacatatttcaattactttgaatcaacacccagaagtgaaattgctaggccatttggtagttccatttttaaattatttttaggaacctccataccattttccatagcaggtgcaccattttgcattcccaccaacagtgtacaagagttcccttttctccatataatcgctagcattt

SEQ ID NO: 348527 - DNA, 595 bp, Homo sapiens
cagtagttgggactacaggcatgcactgccatacccagctaatggtttttaaagttttttgtggagacagggtctgcctatgttgcccaggctggtctcaaactcttagcctcaagtgattctcctgccttggcctcccaaagtgctggaactacacgacaatctccctggtagacatgcaaaattccttaacmaaatagtaataaatcaaattcaatagcacattaaaaggatcacactacggctaaatgggatttatccttaggacacaagggtggtttaccatacaaaaatctattaatttgctacaccattttaacagagtgaaaggtgacaattacctactcaaaccacttctattcagcataggaatcaggaaaggaaaagaaataaaaggcacccaaataaataagcaagaagtaaaattgtccctgttggcagattatatgatcttatatatagaaacccctaaggaatccacagaaaaactgccaaaactatatactttcaaataacaggtaaaaatgtataaaataatagatactttattggtttaaacatgtatagtttttgatgtatagtcacactttctata

SEQ ID NO: 348528 - DNA, 510 bp, Homo sapiens
gtcccaccagaataaaatttgtatttctcagcccctcttttccccataggaaagaatttaggtctcccctgccttgttaacggtttgcatattatttagaaaaaggcatatcttcttctggctytatatagctggctcatctgtatatgagcctttatttttcttttgcccaattgtattattcagagtttttcagagggggaaaaaatggttttatttatttatttatttgtattaattgtgaggaatttgctcatgcagttatggagatgaagtctcacaatctactgtcttcaagctggaggctcagggaaactggtgtattattccagttggagtcccaaggtttgaggaccgtgggagctcgtagtataaatcccagaccaagggcatagccaatattccaggtgatgcagacaggcaggaagaaaaagacacaaatttctccttcctcagtagttttgctatgctcaagccttcaacagattggatatgctcacccacactgtg

SEQ ID NO: 348529 - DNA, 510 bp, Homo sapiens
gtcccaccagaataaaatttgtatttctcagcccctcttttccccataggaaagaatttaggtctcccctgccttgttaacggtttgcatattatttagaaaaaggcatatcttcttctggctctatatagctggctcayctgtatatgagcctttatttttcttttgcccaattgtattattcagagtttttcagagggggaaaaaatggttttatttatttatttatttgtattaattgtgaggaatttgctcatgcagttatggagatgaagtctcacaatctactgtcttcaagctggaggctcagggaaactggtgtattattccagttggagtcccaaggtttgaggaccgtgggagctcgtagtataaatcccagaccaagggcatagccaatattccaggtgatgcagacaggcaggaagaaaaagacacaaatttctccttcctcagtagttttgctatgctcaagccttcaacagattggatatgctcacccacactgtg

SEQ ID NO: 348530 - DNA, 539 bp, Homo sapiens
agctggctcatctgtatatgagcctttatttttcttttgcccaattgtattattcagagtttttcagagggggaaaaaatggttttatttatttatttatttgtattaattgtgaggaatttgctcatgcagttatggagatgaagtctcacaatctactgtcttcaagctggaggctcagggaaactggtgtattattccagttggagtcccaaggtttgaggaccgtgggagctcgtagtataaatcccagaccaagggcatagccaatattccaggtgatgcagacaggcaggaagaaaaagacacaaatttctccttcctcagtagttttgctatgctcaagccttcaacagattggatatgctcacccacactgtgcagggccatctacttcactgagtccagcgattcaaaggctaatctcattcagaaatrtcgtcacagacatgaccagaaataatgcttaatctgcacacctcatggtgttgtcaggttgatgtataaaattaatcatctaccaaccctgtttttgccat

SEQ ID NO: 348531 - DNA, 676 bp, Homo sapiens
catatgtgttcattttagaaaagttagggaaaaataaatatcaaaacaaaacaaaaagttcactgtagtcccatcaagacattaactgttagcatgtgatatttcaatatttcgttctctctcttatacacacatctatacatatatacatacatacacttatatttattatgtatacttatatacacatacatacacttatatttttgtatatatatttatttatacacatgcacacacagacacacagttaacctttgaacaacatggagctgagaggtaccaaactcctgtgtagtcaaaaatctaggtataacaacatataactgggaactcccccaaaacgtaactactaataggatactgttgagtggaarccttactgataatctaaactgataacctcaacaaaaacttttttgtgttatatgtattatatgttgtattcttaaaataaagcaagctagagaaaagaaaatattattaagaaaatcacaagaaaggaaaaatgtatttactattccttcagtggaactggatcatcataaaggtcttcttcctcatcatctttatgttgagtacactgagaataagaggaagagtaatggtgggtcttgtgtgttaggagtggcagaggcagaagaggcagaggaacaaggagaagcagacaaggcgg

SEQ ID NO: 348532 - DNA, 676 bp, Homo sapiens
catatgtgttcattttagaaaagttagggaaaaataaatatcaaaacaaaacaaaaagttcactgtagtcccatcaagacattaactgttagcatgtgatatttcaatatttcgttctctctcttatacacacatctatacatatatacatacatacacttatatttattatgtatacttatatacacatacatacacttatatttttgtatatatatttatttatacacatgcacacacagacacacagttaacctttgaacaacatggagctgagaggtaccaaactcctgtgtagtcaaaaatctaggtataacaacatataactgggaactcccccaaaacgtaactactaataggatactgttgagtggaagccttactgataatctaaactgataacctcaacaaaaacttttttgtgttatatgtattatatgttgtattcttamaataaagcaagctagagaaaagaaaatattattaagaaaatcacaagaaaggaaaaatgtatttactattccttcagtggaactggatcatcataaaggtcttcttcctcatcatctttatgttgagtacactgagaataagaggaagagtaatggtgggtcttgtgtgttaggagtggcagaggcagaagaggcagaggaacaaggagaagcagacaaggcgg

SEQ ID NO: 348533 - DNA, 676 bp, Homo sapiens
catatgtgttcattttagaaaagttagggaaaaataaatatcaaaacaaaacaaaaagttcactgtagtcccatcaagacattaactgttagcatgtgatatttcaatatttcgttctctctcttatacacacatctatacatatatacatacatacacttatatttattatgtatacttatatacacatacatacacttatatttttgtatatatatttatttatacacatgcacacacagacacacagttaacctttgaacaacatggagctgagaggtaccaaactcctgtgtagtcaaaaatctaggtataacaacatataactgggaactcccccaaaacgtaactactaataggatactgttgagtggaagccttactgataatctaaactgataacctcaacaaaaacttttttgtgttatatgtattatatgttgtattcttaaaataaagcaagctagagaaaagaaaatattattaagaaaatcacaagaaaggaaaaatgtatttactattccttcagtggaactggatcatcataaaggtcttcttcctcatcatctttatgttgagtacactgagaataagaggaagagtaatggtgggtcttgtgtgttaggagtggcagaggcagaagaggcagaggaasaaggagaagcagacaaggcgg

SEQ ID NO: 348534 - DNA, 531 bp, Homo sapiens
acattagattcatttattttgaaatgacaagaaagcacagctacagatacctggatttacggtacatatcaagcaatttaacctatattctggtatgtcatgacttttctctgcatccagggagcacctccagtatcactagtggcacttcatatgtgtcctatggtgttcttcaaggtttamaatattgaataaacaaaatgaaaaatataccagaactgcaagagatcactttttaatgcaaaacacaagttactggagaagcaagctatattttaagagatacttgcaatacttaagctcaccacaatagcaacaggaggtggctacaaaattattacagtattacagtatatagtaaatgataaaatagactagtacctacatatattttatccattcatgacatatctaactttaaaattgttttcctgatatttctatgctatatgtttcattcatctgtgaggtttttttcaaattgtcacaaatctctaacttttttttcaatataattttaaaaatacatat

SEQ ID NO: 348535 - DNA, 609 bp, Homo sapiens
actgactgaagcaccttgtatcagaggtcctgcgaagtcacatatttctcatttggtctgtcatcttatatctaaccaacatatggacttcaagcgcagctagattattrcacgtatttactctaacatttgatttgctcctggattcctttgtcacagcacatatgctaagcctccaaagtcctcacttttcttatctcagtccctgcagaccagaagataacccccatgtcactccatagctttaggcaagaattcagaacacaacaatgttctccatgagtttgtcagcaattactttccttcatttatacattgagtgacactcgatggcctgacaaggccctctttagatactgcacatgcagcaaggtctaagagagatgaaagttggccttcaggcagtttacactgtagttgggagatagaaacaacaagtgaaaaaataatacatagtatctcaagtaatcataagtgtgctaaagatgaagaaggcaggactaaggcaaagaggcaatttaaaataggatggtcaagaaaagcttctctggcacagtggcattttagaaaacatatgaagtgcttatgttcataagttagcatgaaaaa

SEQ ID NO: 348536 - DNA, 572 bp, Homo sapiens
gagagtaatcataatttccagtaaggctgttccaatacagcataaaaatttacctaataaatacttccttaaaaaatctgatacaaaattaaaccacaaattatctttactggttaaagcctaaggataactaatgcattcaagagacaaatatgtggttgtttttttttttatgtttttgtggagatacgggtctcactatgttgcctaggctattcttgaacttctatgctcaagcaatcctcctgcctcggcctcccaaagtgctgggattacagacatgagccactgagaccagccttgtttcaaacttcacagtacccaaagaatcacctggagataatgttaaaatgcaaacgccttaggacaaccccaagattctgactcagcaagtttgcgaaggtggactaagaatttacatttccacaggctccagctgatgctgtctgtgatgttcccatatggcacactctgaggaacaatgcactaggctgtataacttacctcaactttatatataagtttttgataytcgtttcttagtacattgagttatccaaccagcagtgagt

SEQ ID NO: 348537 - DNA, 576 bp, Homo sapiens
gtagcacatcatctcttgaagcttcacttcaacttcactacttctgtagtctcatcttgagtaaaaggtaatatgttcatgtataatcgaatatgttgtcttaatctagagtgttgcttcctaaaatcttttgaaaactaawtataaaaatgtgtatttatgtaatgataatttctcataaagaaacaattgagagaaatgatgaccttcttaggatctgaaggtaagttgagaatctgaataactatacattgaaatcagcaatcatcatgcaaagtaaataatgtggaatatggaggcatattccaacttctctcctgatggaacttctgaaaagctttttatttccttgtctacgtactggcatctactctgctacttactacttttacctttattcgaagttcatattttaagaaaatagcatacgttctcttttttgcaaatgtatatattgtttcacaagtttaacttttaaaaatttacttttttcccataagtaaacatttctcactaccttttcattgacctttccatcattttaaacagttatgtcattctgcataataaaaaatg

SEQ ID NO: 348538 - DNA, 549 bp, Homo sapiens
catttttacctgcttttaaaatgtgtttataaccaaaaagaaaaatctaattgaaagtttggaaaaaaatcttataagtaatatgtaagttcctaaaactttaacaatctaagcttctaataaaaacgcttgcactgtcattatctcaattttctgcaattttctttctccttgtgtgtatacagtatgggtatggcccttatcagccagttccagaacaaccactatacccacaaccataccaaccacaataccaacaatataccttttaatatcatcagtaactgcaggacatgattattgaggtaagatgggtttagtgacattttttttactttctgtatcagtgctgacagttaaaagaagaaaaacaaaaacaagacattaaaccaacagcagttccagtataagaaagcagccagctgtatagctccttgaaatgtattaatttatataaatgctyctgagataaagtctctgtcctgctatggttagaaggcagtgttatagagtgggggacaccagggtttgtatgctggccctgacaac

SEQ ID NO: 348539 - DNA, 463 bp, Homo sapiens
tttattctatgtgttccttttaaaatttattttattttcctctaagccagtacttcatatttttcattcactatatacttgcaataactcaaacaattccagtgaacttctgggtttgggtaactctacttgctaatatctcaatcctataaatccctaaattttatatcatgtttctttatcaaaacctagatatatagaaaaaatgtgatttttttgttttctaaatttggagtacaacattgctcaccaagttttttccaygtatttgatgcaatacctctctcattaacctacaataaattgccccaatatttgttttctgaaggaaccaactcatctcactcagtagtcaatttcaaaataataatattgataataataataacaacaacatacgtatttgaaaggaaaattgaattcattaggcataagtgtcttaaacttcttactctcactttta

SEQ ID NO: 348540 - DNA, 633 bp, Homo sapiens
acaaataatgcatttgtgagttaattatgtgttttttcaaactttacagtacagaaagtatcacctagagatactgttaaaatgcaagtttctggtgtacccccaagattctgattcagcaagtttggaaagtgagactaagaattttcattataataggctccagctgatgctgattctcatggttccatgtggcacacacagaaacaatggattagrctttataatttatcttcaatttacaaatgagtttttaatattgagttctaagtgtttgaattatccaaccactcacaagttggttagtttttgaagaaatttatctaggaacttagtgaaagttcttttcttttttcctcctttctgtctagtgcaatcatggcaatacatggcttccatggagaaatatgagcctttaaaaactccagggaagtaaattgaatttccaaacataagtatccagttattatgtatgatgtatattattatactaaacacctagaactatttgactttaactataagaattattttattacatactagtaatcaagagattacagaattttggcaaatatttacatctactttatgacttaaaatattttaaaatcaatggaagaaattaaaagt

SEQ ID NO: 348541 - DNA, 575 bp, Homo sapiens
caattatgtcagttatcactatttcttagaaaatagattaaattttggaaggattttaatatcatttttgtcagagttgtttcatcttggacatatatttgttgaaataaaatagaatgttgtccacgcaaacatattacatatgtaatcatttctatgcttggttactgtagcatgattttttccctcattttattctcacatgtctaaactaattaacatgtgatggatccatttgtttcctgrttactttgtcatcacaatctttattgtaaaatcatccagtcgagttcattctcactattttgtaggaatttctttttggcatttgttgctcagcaaccacagggcatgtttatagaggtaagatgagtctagtgatgtttgtttacttttcaaaaatatcaatgctgacacttaaaaagaaaaaacacagaaacaagccataaaacagttctagctttagaaatgtagcctgggatagctccttgaaatgtattcatttatataaatgcttctgagggaaatcttctgtcctgttatgattaaaaggctgggctctggggaggggaacc

SEQ ID NO: 348542 - DNA, 503 bp, Homo sapiens
ttaaacaacagaaatttgtttctgatagttctggaggttggaaagtccaagatcagggcactggtagattcagtatctggtgagggtccttttcctggtatgcagacagtcgccttcttgctgaattccatctctgtkgtgtctcttataaaggcactaattccattcagaggggctccaccctcatgacctaattaattacctccctaaagctttgcctctagataccatcacattagggattaggtcttaaacatacgaatgtagagggcacaaacattcagtaataacgattaaaataacacaggaattcaaaattaggaaagtagaaccccaatttctgagtataatatattgaaatagatggaaaaattagtgaacccatcactccaaaatgttcatgaaattcttcccactgcacctgtttttcatgatgaactaatacattttttgtttatcttcattaatggttaccttaatttcccattctttattgttgcttc

SEQ ID NO: 348543 - DNA, 622 bp, Homo sapiens
tactgaaccctttttatgcaccaggaactgtgctatgtgctttgctcaaaactcatcagtattcactgtgattcacagatggggactcccactttccagggaggaagctgagacttagtggatatttttaaaattgtctattgttacacagatactaaatgaaatttaagctcaattccgcatcactctgactttgggaagaaaattatgcgttctctatgcattttgattctagccattccacattcaacaagacaattccataagtgtgaagtttactacaatatcaactgctagagtgcaatgactgtgcagcttatatttgttcatcacaatacttatcagttccttgcatttagcaagtattgaaatatttatcaaattaatttttasataaatcgttgttgaggtttttttgataaaatttcattttggtgttttttgctagtatactttcattattctccccaaacttctaaacccttcttttaacaattacaatcaaagaatgattcagaattttgtttgatgggaacagaatagaaaaaaatagaggccacagtcagtaacatctttattatcctatctactgacaagcctataaacctccttgcacttgcat

SEQ ID NO: 348544 - DNA, 580 bp, Homo sapiens
aaactgtatagtcaggttgctcaaactctagtgtgcccacaactgccacactgttgttcctctctgcagctctgacaatgtcctcatggaaaatgttctacaaaccactgactataaattaaagatattggacaagtttataaatgccttttatgatctggctgctagtgccatccagaagtgaacagttctacaattcttcactaaaatgtgattgaaattgtcataaaaaattaatgaaaacaaaatgttacatacatgacactattaataggattatgtaaatactggtgatggaataatgacagaaaatatggattttaatttaatgaaaacaaatgttacatgcaaagactcttaagatgattatgtaaatactgttgaatggaatgatgacrgaaaatacggcttttgccttaaagtgtaatttattgaaaagaaaaaagaaaatctctgtcactgcacaaaactattttaattgatggcacttacagaactggcaattcaaagactttttaaacaaaatgtccactagaaaacttagtaaacactttaataccctctgattaggtgccctcca

SEQ ID NO: 348545 - DNA, 301 bp, Homo sapiens
aatatttttgaagaaaagaaaagctcttatggtagaacacgttttactattttctcttcgtattagacargctcacaatgttatttatgctttcctgttactgacatacctatccattgctcttggtttttaagctacaaagacatttttattactaaattgtattttgttttgtggtattactgaagatatggcaatgcaattagaataaaaggctttcacataggttaaaatttggtcattttccttggtttaatgtattagaagggaagtttccaccactggaaaaggaaacacacac

SEQ ID NO: 348546 - DNA, 630 bp, Homo sapiens
gatgcttgccggtaatcccacctactttgggatgctaaggtatgagcatcactagaacccgggaggcagaggttgcagggacctgagattgtgccactgcactccagctcagcaacagtgtgagaatctgtctaataataataataataataataataataataataataatattcacatggaaaattaagaccaagtaattctttggggcccaaatgaagagaatacttgcctttattttctttttactttagccagtgacagtgattacagaatttcagaaaaaaaaaactgagggtaaaatttgatgtactgtgaggaactaaaagtttctttctctagttgyggaggatgttccatggctttctttacatggtttttttttttttaattagcatgttgtacataaattgaatcattaatggacaagagacactgaattaaacatacagttattatctttaaatgtgaagacacaatatgtcactgtaaacatcaagacatgggagttttggaggaggaaataaattgatagacacatattgtttttctccacaaatgagaaaccaaaggtccaagagaatacacaatgtgctcaaggtcatatgcttagaagttgtcagaactgag

SEQ ID NO: 348547 - DNA, 595 bp, Homo sapiens
ctgccacttaaatactatgttatgtagattcaaaaggagactataaattacaaatattcaactaaaactgtgaattagataactgggataaaaaaagtcgctagctttatttttagagggggaataagaaaacatctagatcccatcagactagttacaataaagtctagcagatattgaaaaggataaataatttattaatacaacattctcactcattccttggtatatttatttgcctttgataaaactttaatgccacctttccagatggcattggtatagcatgttttcccgtgtgtgtgtgtgtgtgtgtgtgtgtgtgtgtgtgtgwgaaagtaagtgcattttaattatcctggaaaatattaatatattttaaatttagcaaatatgtcttaccgcacacttactgagagacatttcctttaaaaaaattaaaacatgcatagttttaatttcacgacattaatttacatttaaagttaaaatatgaatcaacaaaactattactaaataattgcagtgaattgattttagtgataaattcccaaaaaactgagacaagattaataatttgaaccacatattataa

SEQ ID NO: 348548 - DNA, 623 bp, Homo sapiens
ttggttgtgatagtatttatttaacaaattataacattgactaattagaagtaatatttattcattaattttaattttaaaagattttggaaaattatgccatacctctgatttcctgttttttaaaagtaaataaaggaaagaaatgaaaatgcctctctcctatcccagactctgttcctttatgttaactatcattatacaatgtagaaaaatactatatcctgaggaaaatatctgtaatagagagggtttttaaaaattgttgttgactgcgactttgcttttttacaggaaaagaatcatactatatattttaggaaataaaaaaatagtaatgatatttacagccttttcacagtcatatgaaaagggcattattctgggttaacacacatttcagactggttaatttcagattggggatcagaagagatgtacttttccatattaaagttctctttagttagtgtyttccttactgactacatcacataaatttcaacaacttactagtgtttcctattcactgtgattcatttaagaggctgagacaagcatcagctgtattacagtaccttggttttgtcttttcccagaagtgtacccaggaaaactgattt

SEQ ID NO: 348549 - DNA, 623 bp, Homo sapiens
ttggttgtgatagtatttatttaacaaattataacattgactaattagaagtaatatttattcattaattttaattttaaaagattttggaaaattatgccatacctctgatttcctgttttttaaaagtaaataaaggaaagaaatgaaaatgcctctctcctatcccagactctgttcctttatgttaactatcattatacaatgtagaaaaatactatatcctgaggaaaatatctgtaatagagagggtttttaaaaattgttgttgactgcgactttgcttttttacaggaaaagaatcatactatatattttaggaaataaaaaaatagtaatgatatttacagccttttcacagtcatatgaaaagggcattattctgggttaacacacatttcagactggttaatttcagattggggatcagaagagatgtacttttccatattaaagttctctttagttagtgttttccttactgactacatcacatmaatttcaacaacttactagtgtttcctattcactgtgattcatttaagaggctgagacaagcatcagctgtattacagtaccttggttttgtcttttcccagaagtgtacccaggaaaactgattt

SEQ ID NO: 348550 - DNA, 604 bp, Homo sapiens
actgtatggccttccatgttcactttcagcctttctttccaagtatatcacccatcacttcccttattagcaccatggtacatccacttcaaatcactgccatcagcacaccttcctacctccatatgtaatcctcttcctccatcctcacttcctcagctcaccctcctattcatctctcaagacttctctctcaaccttttcacgtatagaatgacaattcctcttttgtactcctcccaagttctgatattcctcaacaactatagtgtatttcaaaatataaaatgtattattttatgtttgtttctctgaccaaattattttaaattttaatttcatgtctctacacactggttattaacacttatctgtaaacctctcctctcactctcaatgtttctaatattgcacaaatactgatagtcacttcaaattcctggccaccgcgtcccatcacatgytgtctgttttgtgaaatgaggacttcttccatactttctttcttttatgagccatttacaaactaaatcctgtgataaattttacttgttaactttttttaagagacagggtttttctctgttgcccaggctggagtgca

SEQ ID NO: 348551 - DNA, 531 bp, Homo sapiens
tatttatttcatctcaatctatggggacacatttatctctgtattctatatgtatgtttccaagcatggtactaggtataaatgtcaagacaaaagattctcacattttaatagagaagtccaaaaataaagaagtaaacaagtatatactatgtttacaatataataaataacatgtagttgttgtctacaatatctactctcttataaakgtgatctaattacaaaatttactattctctaaagtaaaactctcttatgtgttacttaccccctttatcaataaatgcaattttaaccacagcttatgcatactggtaacgctaaatttgtgttactttatgtatcacaagaatttgctataattcatcaaacataagtgatttgaagattatttaaattacttactgttttacttatcagcagaagtaattggaagatttccatgtttgactaggatttatactatgcaaatcctcaaacttctagttttaaatagctctcagaatgtcttttggagatgttgatttg

SEQ ID NO: 348552 - DNA, 544 bp, Homo sapiens
cagcacacaagggacatacctcaatgtaataaaagccatctatgacaaacccacaaccaacataacactgaacagggataagttgaaagcatttcctctgagaagtggaacaagacaaggacgcctactctcaccacttctattcaacatggtactggaagtcctagctagggcaatcagacaaaagaaagaaataaaggacatccaaatcattaaagaggaagtcaaactgtcactgcttgcaaatagtataattgtatacctagaaaaccccaagactcctccaaaaagctcctagaactgataaatgaaytcagcgaagttaccagatacaaaattaacatacacaaatcagtagctctgctatacaccaacagtgatcaagctgaaaatcacatccagaatacaacccctttaacaatagctgcaagaaaaattaaatacttaggaatatacctaaccaaggaggtgaaagatctctacaatgaaaaactacaaaacactggtgaaggaaatcacagacgagacaaacaaatagaaacac

SEQ ID NO: 348553 - DNA, 620 bp, Homo sapiens
gcttgaacctgggaggtgtaggttgcagtgagccaagatcctgacattgcactccagccggggtgacagtgtgagactctgtctcaaagaaaaaaaaaaaaaaaaaaagctgaagcatgtttttatgaacttgtttacctgcatcacaatgtgtaaaataaagcatttytttactcaacactatgctgtctttgtaggtaggaagtcctcataatatcctcctacataatacctataccaccaccgttctgttactaccaatcaaaaattcattcctcttgccactcatgaggcctactcaagacatccccaaaaactggatgaaaattcaactgtgataaccacaacctacccactttactatagtaagtactttctgaaaacatgtataatttgatgaataatttttttttttttttaccaatcagaaatatctctttctctgacttgctggaacatagtttttgtaattgatatattttcctgagtctaagcattgaacatttttgtataataatgttattatggggatataatgcatttaatagacgctattggttaacagaaacatggtttaccagattggttactaagccatccatcagcagaatgtaatgtgt

SEQ ID NO: 348554 - DNA, 607 bp, Homo sapiens
tcatgttctttgaaaaggccatgcctttcaattacaagggaaatatcaatagctactgccttatcacagttgtggcaatacactggtatgtgaattatatattatatataaattacatgtgcctaataatattaggtacaataayatatattgttgtatattacctagagaataaccataatttccaatgggactgttcaaattagcataaaacatttacctaataaatatttcctttaaaaaccacacaaattcattttattttattttattattttactttaagttctaggatacatgtgcagaatatgcaggttttttgcacaggtaaacgtgtgctatggtggtttgctgtatctattaagccgtcgtctggattttaagccccgcatgcattagctatttgccctgaggctctccctccctccccagccaccagccctgatgtgtgttgttccctttcctgtatcagactcaaattaaaaacataatctctattagtgggatcaatctaaagacaatgcgtttacaaatctgttatatagtttttcaaactctaaagtacacaaataatgttctggacatgttcttaaaattcaggttccag

SEQ ID NO: 348555 - DNA, 629 bp, Homo sapiens
tggaaatgcttttatttacatgtttgtaatttagaaataagtaatccgctttacttttttatatcagccgaagaactggattcacttgcatatgcataattataaaaacatatcagagtcccagatgaggctttgttgaataatattatttgaaatattgaataatcttcaccagttcaacttctcaaagtagatacaatcattttccctgtgacttctcttcattttatttttctctaaccaataccattaatgttctaatcycaaggttgcaccatctgtgctattctttaatagaaatctggctcatattcactgactttattataaagaaagtccccattacttgccattctactttctaaatatgtctttacactgtactttaattagcattcttaatgtcattatctaaatcccttgtaatgtcacaacaacctaagtggtcatcttttctccagttttgtcctccctacatgctaaactgtttgaactttcaacatgctttcctctctgttgtatttcattgcagtctcccaacacctccctttactcattccatataatccaactcaagcttgcctttctttgttatcttcttactcccattatcttggtctatttaagat

SEQ ID NO: 348556 - DNA, 597 bp, Homo sapiens
tatgatgtactcattagcggggaatgtggccttttcatctgtgttttatagtgtaatcttttgcatcatctaacacaatctggggcttttcatgcctcttcakagcacattggaatcttctcaacatttttggttctatatgctggttggttggtgctaatagcatctgatgggtgggaggtcagagatgcactaaacatcctacaatgaacagcacagcccccgcaataaagaatcatcctaagccacctctgtaaccctaaccactactgtcatctggctgaggagggagcccaggaagtactgcaggcctccatcacagtgcagttgacttacagaaaagtgggcaggacatttttctatgtgggtccctgcccctgctattcctattggtcagggcctcctgagctgggccttcagcaagactgccctacccctacaagagcacttcagttggtggcagctctgtgtttctctggggaggaattcccagagacaaccctcagcctctctgccaatgccgctgcagttgtagcacccttgctgccttctggctggggaaacaatagagaccataagccctttgatgaaacctcc

SEQ ID NO: 348557 - DNA, 548 bp, Homo sapiens
tactttcttgaagacccagaaattgtatattaatacaaaataatagggcatgttaagtgaacgggaatttaaggaagaaaataatacattatattaatctgttggattagcaaaatgttatcctctatgatactcttttaacaaaaaagatcagcagtaactaggggtctagaccaatatttcatctttgatttgtctgttttcaataacccttcattcaattaaatgccagctctatcaaagcttcctttttagtctcctgcaaatttactatatctccattctcctcaatataatcttcccactgtctccatctctctccattttctgtagtactcaacttttccacactayagcttctgtgatgttttcaaagcttgaatctaaaaatgtcactctcttgtctagaacactaaaccttccatgacaactaaagttgagttagttgtttctcctctatattctcagtctctcatgactatccttattttaacatttatttcacttatattagtaatttactattttttttccagattaagctgtaa

SEQ ID NO: 348558 - DNA, 560 bp, Homo sapiens
tgaatatgctgagatgagaaatcaaatgttaatcatctgttctcctggaagttcaaggtgccttccatagactactgaaaaatacagggtagtaatgaggacagacatgatggcgagtctgccttgtctgcttgtcatgaattaagcaaggcagggtaattatttcaactacatttttaatatraaagataacaacacttatcttctttcattaaatggaacaggcaaaatatgaaaatattagtaagcatgctttgtaaactgcaaaccatcacacgtgttattttagtatgtgcaaaatgaacacttgctaaacaaatgagtgagcacagaggtgtgaggggacaagaagagctccatgtcctctctttgctccttggttaggacatactgcttcctctaccccatgcttgcctctgtatcttgctcaagtaggaaagaacaagtcaagcataacttgccagagataataactttgaattatcttctgtccaggacttattaaaagcctggttgtaataagcaatatttatggagagtggtttgaagggagtaaattt

SEQ ID NO: 348559 - DNA, 575 bp, Homo sapiens
attccatgtctttgctgttgctgcaatgaacatataagtgcatgtgtctttataatattacaatatatattcttttaggtatatacccagtaatgggatttcagggacaaatagtatctgtgtctttaggtctttgaggaattgctacactgtctaaaaagctcaatatcactgatcactagagaaatgcaaatcaaaactacaatgcaataccatctcacaccagtcagaatggctattattaaaaagtcaaaaaataacaggtgctggtaaggttgcagggaaaarggaatgcttatacactgttggtggggtgtacgttagttcagacattgtgaaatgttttgatcttatgtagtcaatcttatctaaggttcttatgtggtgtctgattttgagctctgaatagaaaagccttccctactccaagttcacaaaaacaaaacaaataaataaacaaaaaaccttactgtggccaagcaggaatataatttcactcaacaggatctggttgaagatagtttaatgaaggaactattcatgaaagtacagacaagataaagaaagtggtgaga

SEQ ID NO: 348560 - DNA, 642 bp, Homo sapiens
ctttgcaactttaggagctcaggtgacattgttcactagtgagttctctttctgcccttcttctcttcatttctttgctatcagatttggccagtctcaaccagtgcaagcaaagtgacaccaaaatgtcttaattatttccctgatatttacattttaattacaaaatacatatgttgtcattgtagaaaaataaaaaagaacatagaagctaaaaatattactgtaatatgtgaaataaaaagawcccttccacttcttaatcacttaattattattttttcctttcatggtctatgtattttttttcaaacagctgaacaaaactgatgctatgtcagtaaaaaaataaaaataaaccacttaccaattacaaattatgtaaaaatggactccttaggcaaaaattatatattttaattctataaataattgttcatctatataaagcagtagaataattttctgttgaagactgtgtcatctgatcaaccccagaacagactgaggcttcagactatgctggcagcacagtatcctgctgctctctagtggcacatttcaatatctgcaggcagattgactaggcaatgttatttcatttttggatttctggcttggagcaaaggaaaaatcaaaaat

SEQ ID NO: 348561 - DNA, 573 bp, Homo sapiens
cactagcagttccatttcaatgtgagctttgcaactttaggagctcaggtgacattgttcactagtgagttctctttctgcccttcttctcttcatttctttgctatcagatttggccagtctcaaccagtgcaagcaaagtgacaccaaaatgtcttaattatttccctgatatttacattttaattacaaaatacatatgttgtcattgtagaaaaataaaaaagaacatagaagctaaaaatattactgtaatatgtgaaataaaaagaacccttccacttcttaatcacttarttattattttttcctttcatggtctatgtattttttttcaaacagctgaacaaaactgatgctatgtcagtaaaaaaataaaaataaaccacttaccaattacaaattatgtaaaaatggactccttaggcaaaaattatatattttaattctataaataattgttcatctatataaagcagtagaataattttctgttgaagactgtgtcatctgatcaaccccagaacagactgaggcttcagactatgctggcagcacagtatcctgctgctc

SEQ ID NO: 348562 - DNA, 642 bp, Homo sapiens
ctttgcaactttaggagctcaggtgacattgttcactagtgagttctctttctgcccttcttctcttcatttctttgctatcagatttggccagtctcaaccagtgcaagcaaagtgacaccaaaatgtcttaattatttccctgatatttacattttaattacaaaatacatatgttgtcattgtagaaaaataaaaaagaacatagaagctaaaaatattactgtaatatgtgaaataaaaagaacccttccacttcttaatcacttaattattattttttcctttcatggtctatgtattttttttcaaacagctgaacaaaactgatgctatgtcagtaaaaaaataaaaataaaccacttaccaattacaaattatgtaaaaatggactccttaggcaaaaattatatattttaattctataaataattgttcatctatataaagcartagaataattttctgttgaagactgtgtcatctgatcaaccccagaacagactgaggcttcagactatgctggcagcacagtatcctgctgctctctagtggcacatttcaatatctgcaggcagattgactaggcaatgttatttcatttttggatttctggcttggagcaaaggaaaaatcaaaaat

SEQ ID NO: 348563 - DNA, 617 bp, Homo sapiens
ggatcatctatcatttactatacagtacactcatcatgttactaatatgtaatcaaatcttcagtaaaattctttgcactattttatccatgtggcaattaaagctcttacaacatcacatagctacctgtggcaagttgtgtttcaggtttcacatttaaagtttttttcccagggtcaccacaaaatttaacatccaatgctggatcattttgaaagtgaaaggcatagctataataatgacactgggaaaataggcataacccaaaactttctatagcaaatggrgtataaaagcatcctttcttttcctccactttttgatatcttttaatattcaattcaaaacattctattcaatttcaaagcattcttccaggattattttgaacatcaataataaatcaaagttaacattaaagaggccgattaggtttgaaaaaaagacagaagaactgaaatatgcttaagaataatttattgaaatgactggaaaggaaatagattcttaaagaaataaaaataagcacaattccagaaacaatttgtatacatatgtttgatatgtttgtagcatttccaaatgagtattgaacttctgtggtactagttgaatt

SEQ ID NO: 348564 - DNA, 617 bp, Homo sapiens
ggatcatctatcatttactatacagtacactcatcatgttactaatatgtaatcaaatcttcagtaaaattctttgcactattttatccatgtggcaattaaagctcttacaacatcacatagctacctgtggcaagttgtgtttcaggtttcacatttaaagtttttttcccagggtcaccacaaaatttaacatccaatgctggatcattttgaaagtgaaaggcatagctataataatgacactgggaaaataggcataacccaaaactttctatagcaaatggagtataaaagcatcytttcttttcctccactttttgatatcttttaatattcaattcaaaacattctattcaatttcaaagcattcttccaggattattttgaacatcaataataaatcaaagttaacattaaagaggccgattaggtttgaaaaaaagacagaagaactgaaatatgcttaagaataatttattgaaatgactggaaaggaaatagattcttaaagaaataaaaataagcacaattccagaaacaatttgtatacatatgtttgatatgtttgtagcatttccaaatgagtattgaacttctgtggtactagttgaatt

SEQ ID NO: 348565 - DNA, 539 bp, Homo sapiens
ctggtttactacttgcttttaatttgccaaatcccaaaattcataacaatttatgaaagctcagctcaagcgggcccaaatggcacattaaaatgtcttgaggaaaattcacagctcattcagtagcctttcggtgcccacagctagtgtccagattctacaccctttaccacatgcctgtctaatgagggccattttgttccaacctcctccatgttcctcggsctgtgtagaaaatgagaggccttgggtgcaccctcacctcacttcgagctctttgctaggcaaatatggtggctccccacaacagcagtctgctggacccatttgtaccagcttgtgagagccagtcattaagtattcaggaagtctgcaagcccatggtggcttaaaattggccaaaatggtagtatttacaccatagaaattggcaaatgctatcaaccaaggaagttttttcccagagagccagtttaccagcacaccactcttgaccctcaagtgcttggtgctttcccatgctcacccacccaggagct

SEQ ID NO: 348566 - DNA, 548 bp, Homo sapiens
tctgcaagcccatggtggcttaaaattggccaaaatggtagtatttacaccatagaaattggcaaatgctatcaaccaaggaagttttttcccagagagccagtttaccagcacaccactcttgaccctcaagtgcttggtgctttcccatgctcacccacccaggagctttccgagggtcattaccaccaaaaccagatggcatacaaggggaatgaacagtcactgtctttgtgctcctgggaaccagttttgcctatttcatgccaagggcaataaactctggcttccaaaatgattctctggccagccacgcctmgtctacgaagacatgcttataacctctacaaatgtgtaaaatgcatctttcttgaatgatgtgaacttctatgtcacagagtttgggaacgagttcatttaagtgtttagtgattgcagctccattttcacatatgaaggtcatgatgcctagtgccacgatattgggactaaaaatggacccattctttcaacacagataacaacttttctttccctaatggcaggta

SEQ ID NO: 348567 - DNA, 548 bp, Homo sapiens
tctgcaagcccatggtggcttaaaattggccaaaatggtagtatttacaccatagaaattggcaaatgctatcaaccaaggaagttttttcccagagagccagtttaccagcacaccactcttgaccctcaagtgcttggtgctttcccatgctcacccacccaggagctttccgagggtcattaccaccaaaaccagatggcatacaaggggaatgaacagtcactgtctttgtgctcctgggaaccagttttgcctatttcatgccaagggcaataaactctggcttccaaaatgattctctggccagccacgcctcgtctacgaagacatgcttataacctctacaaatgtgtaaaatgcatctttcttgaatgatgtgaacttctatgtcacagagtttgggaacgagttcatttaagtgtttagtgattgcagctccattttcacatatgaaggtcaygatgcctagtgccacgatattgggactaaaaatggacccattctttcaacacagataacaacttttctttccctaatggcaggta

SEQ ID NO: 348568 - DNA, 489 bp, Homo sapiens
cgtgtcactagcctgtgcgtcctcgtcactcgcgggtcggggcacttggcgccctgtgtgggtggcgggagcggggacgcctcggtgcccggggaccgcagcgcgctggcgtttaactttgccgtcgcccgccytggagtcgggaggctccagccgtctaagtgtcccgggagattcaggcacagcggggaaaaaaggaaaagaaaggcgactttcagcgtgcggactggggtaatgcctttctttgcccagaatttctcgggagcgtaggtggtcatcctactttctccgcgttcacctctcgcgaggcaggatgacgggcgcactcgggagaccggagggaggcagagcagggctgttctagaaggtcgtgggggaaaggctgcgagctgccgcagggcgtcgggtgcctctgcgctccagaggagacgcgctccagtgccagctcggctccaggcggcaggaggcccgcgcgcccggggggaacgt

SEQ ID NO: 348569 - DNA, 489 bp, Homo sapiens
cgtgtcactagcctgtgcgtcctcgtcactcgcgggtcggggcacttggcgccctgtgtgggtggcgggagcggggacgcctcggtgcccggggaccgcagcgcgctggcgtttaactttgccgtcgcccgccttggagtcgggaggctccagccgtctaagtgtcccgggagattcaggcacagcggggaaaaaaggaaaagaaaggcgrctttcagcgtgcggactggggtaatgcctttctttgcccagaatttctcgggagcgtaggtggtcatcctactttctccgcgttcacctctcgcgaggcaggatgacgggcgcactcgggagaccggagggaggcagagcagggctgttctagaaggtcgtgggggaaaggctgcgagctgccgcagggcgtcgggtgcctctgcgctccagaggagacgcgctccagtgccagctcggctccaggcggcaggaggcccgcgcgcccggggggaacgt

SEQ ID NO: 348570 - DNA, 489 bp, Homo sapiens
cgtgtcactagcctgtgcgtcctcgtcactcgcgggtcggggcacttggcgccctgtgtgggtggcgggagcggggacgcctcggtgcccggggaccgcagcgcgctggcgtttaactttgccgtcgcccgccttggagtcgggaggctccagccgtctaagtgtcccgggagattcaggcacagcggggaaaaaaggaaaagaaaggcgactttcagcgtgcggrctggggtaatgcctttctttgcccagaatttctcgggagcgtaggtggtcatcctactttctccgcgttcacctctcgcgaggcaggatgacgggcgcactcgggagaccggagggaggcagagcagggctgttctagaaggtcgtgggggaaaggctgcgagctgccgcagggcgtcgggtgcctctgcgctccagaggagacgcgctccagtgccagctcggctccaggcggcaggaggcccgcgcgcccggggggaacgt

SEQ ID NO: 348571 - DNA, 489 bp, Homo sapiens
cgtgtcactagcctgtgcgtcctcgtcactcgcgggtcggggcacttggcgccctgtgtgggtggcgggagcggggacgcctcggtgcccggggaccgcagcgcgctggcgtttaactttgccgtcgcccgccttggagtcgggaggctccagccgtctaagtgtcccgggagattcaggcacagcggggaaaaaaggaaaagaaaggcgactttcagcgtgcggactggggtaatgcctttctttgcccagaatttctcgggagcgtaggtggtcatcctactttctccgcgttcacctctcscgaggcaggatgacgggcgcactcgggagaccggagggaggcagagcagggctgttctagaaggtcgtgggggaaaggctgcgagctgccgcagggcgtcgggtgcctctgcgctccagaggagacgcgctccagtgccagctcggctccaggcggcaggaggcccgcgcgcccggggggaacgt

SEQ ID NO: 348572 - DNA, 570 bp, Homo sapiens
taccaatttcttgaagagacgaaagtctgtgggtatttcaggggacgagagctggagaggtgagggttagttctgtcaaaggtcataatgacaatgacatttctcaaagtagggagcattattataacaaaacttcactcagtcctcaagccagaggcccatgaacagaagcctggctgatgccccctgggatgcctgctgtgatcaagactggtgtgacttctgtctcactgtggcagggcctggtggcattcagggtttggcacgacctgccaggctaatggggaaatgcccgggggtcagacagaatgcaaaatcatgcttygccagacactttctctctttactctgagcttgtttgtatttcaaagaaatttaatccacatgtgtttgatacccatacagttaactcatcagaaagttgtctgggagatactatttgttttttagtgagctctacgactctcttttcacatgtttttcttctctgcagccatcataacaacccaaggtttgagcaaggagatatgatctgctcacgcctttgatctgatagaatctccatttaac

SEQ ID NO: 348573 - DNA, 665 bp, Homo sapiens
agctctacgactctcttttcacatgtttttcttctctgcagccatcataacaacccaaggtttgagcaaggagatatgatctgctcacgcctttgatctgatagaatctccatttaacttcacagctggacttggggagccaaggtgaygtggaagagattaagggaaatggacatttagctgaagccatgaggaagggagtctgtcttccttcatctcccttttataaactttctgctctgttacccaggaagcgtgatgtcaaatgcaggaggtggagaaggagtaagtgtggtcagctgtggtcaggggaccaaagctgaggagcccatgatccactaaaggatcaaagtgctaaggtggcacaagaggagacctgtttcctaaatgctgacttctcttccttccttatgatccatcttaatgttgggccatgacatggttcaagaatcaatggggctttaggttactggaatcaaaaatagaagacagaggattcagaggcagctcgaagcctaagcccaaaaccaactacatctgcacttaataagacaaaatatattgaggcaaaatctcaaatattccaaacctccagaatcaagttaaagtcaaatttaaatggggcaaagtgttacatctttaaccaaacgtggctaggcataacg

SEQ ID NO: 348574 - DNA, 494 bp, Homo sapiens
tataaggtgtctgttggcccctgctgggaggtgtctccccgtcaggatacacaggggtcagggacccatttgargaggcagtctgacccttatcacaactcacactgtgctgggagattcactgctcttttcagagccatcaggcagggttgcttaagtctgctgaagctgcacccacagccaccgtttcccccaggtgctttgtcccagggagatgggggttttatctataagtccctgactggggctgctgcctttttttcatagatgccctgccttgagaagaggaatctagagaggcagtctggcctcagcgaccttgctgagctgtggtgggctctacccagttcaaacttcctggcgactttgtttacactgtgagagtaaaatcacctactcaagcctcaccaatggcagacaccactcccccagccaagctcgagcatcccaggttggcctcagactgctgtgctggcagggagaatttcaagcca

SEQ ID NO: 348575 - DNA, 494 bp, Homo sapiens
tataaggtgtctgttggcccctgctgggaggtgtctccccgtcaggatacacaggggtcagggacccatttgaagaggcagtctgacccttatcasaactcacactgtgctgggagattcactgctcttttcagagccatcaggcagggttgcttaagtctgctgaagctgcacccacagccaccgtttcccccaggtgctttgtcccagggagatgggggttttatctataagtccctgactggggctgctgcctttttttcatagatgccctgccttgagaagaggaatctagagaggcagtctggcctcagcgaccttgctgagctgtggtgggctctacccagttcaaacttcctggcgactttgtttacactgtgagagtaaaatcacctactcaagcctcaccaatggcagacaccactcccccagccaagctcgagcatcccaggttggcctcagactgctgtgctggcagggagaatttcaagcca

SEQ ID NO: 348576 - DNA, 519 bp, Homo sapiens
cactggcattccagctgtcactggggtatgaaaaaaaacctcctgcagttagctcagtgtctgcctagatggctgcccagtattgtgcttgaaacccggggccctgctggcataggcactggagggaatctcttggtctgcgggttgcaaagactgtgggaaaagcacagtatctgggccagagtgcactgttcctcacagcatggtccctcacggcttcccttggctagggaagggaaatcccccaactccttgtgcttcccaggtgaggcggtgccccaccctgctttggcttgccctctgtgggctgcacccactgtccaacaaatcccaatgagatgaamggggtacctcagttggaaatgcagaaatcacccaccttctgcatcgatctcactgggagctgcagcttggagctgttcctattcagccatcttgccagctgatctaccaggaacacttctaagtgcggatttatttctttttagttccttttgaaaatttatgtagagtagaatt

SEQ ID NO: 348577 - DNA, 519 bp, Homo sapiens
cactggcattccagctgtcactggggtatgaaaaaaaacctcctgcagttagctcagtgtctgcctagatggctgcccagtattgtgcttgaaacccggggccctgctggcataggcactggagggaatctcttggtctgcgggttgcaaagactgtgggaaaagcacagtatctgggccagagtgcactgttcctcacagcatggtccctcacggcttcccttggctagggaagggaaatcccccaactccttgtgcttcccaggtgaggcggtgccccaccctgctttggcttgccctctgtgggctgcacccactgtccaacaaatcccaatgagatgaacggggtacctcagttggaaatgcagaaatcacccaccttctgcatcgatctcactgggagctgcagcttggagctgttcctattcagccatcttgccagctgatctaccaggaacacttctaagtgcggatttatttctttttagttccttttgaraatttatgtagagtagaatt

SEQ ID NO: 348578 - DNA, 552 bp, Homo sapiens
ggaaacaccatggccataagtgtcaaatgcttgctttgctcccctgctctgaactgaagttcagcagtctgccaaaaaagtcccaaataccccagggcaggtggagtgaaacaaacaaaatgacaccagcacagacgacaaaaccctgaactcatggcacagcctgtgtcacacactacrttgactttctatattaattttccaattgttatgtttggcaaatgccataattcactgactttatcatttgcctgttgctcgcctagccattttcagcaggttatcacaaaatgaaggagaaacttgaataaactgatggaataaaggaagatgaccagagcaagttaattgtccaattttcatgtgtgtgaggctcctctgggagctcattgaaagtgtttcctggagagattcttattcagagggtagggtggggccttgaattttcctcacccatcccttggaggccataaagaatgagttaggagtttttcttggaggagaaggtagaagacagctgttttatcaaaactttagattgcagctccagaa

SEQ ID NO: 348579 - DNA, 482 bp, Homo sapiens
ttatttatttcattttctcgaaaagtaaaacaaatcagaatgtgaagtcattcatacctgattcggtgacaaatgagaccgaagggctgataggtccgtagccatgaggattttgtgcttgcactttaaaataatacctgaagttggaagaaratatattttgaaagagacatgtatttgatttctgtgtaacaaaacagactcccaaactactgaacacctgaaccgtgacaggctttgagttctactttttacaaatgcatacagcactagtgattcttcatgtctttttctgaactttctcagttttgaataaattctctaaataatacaattaacatagcagggacacatggctaatggcagtagaagggacatattagaacacaggttgcttgctgagcacgcgttcctttgcatcaggactgtccctgctctgcgcagactcgcctgagctcaaccctggtgagacgttcctctag

SEQ ID NO: 348580 - DNA, 482 bp, Homo sapiens
ttatttatttcattttctcgaaaagtaaaacaaatcagaatgtgaagtcattcatacctgattcggtgacaaatgagaccgaagggctgataggtccgtagccatgaggattttgtgcttgcactttaaaataatacctgaagttggaagaagatatattttgaaagagacatgtatttgatttctgtgtaacaaaacagactcccaaactactgaacacctgaaccgtgacaggctttgagttctactttttacaaatgcatacagcactagtgattcttcatgtctttttctgaactttctcagttttgaataaattctctaaataatacaattaacatagcagggacacatggctaatggcagtagaagggacatattagaacacaggttgcttgctgagcacgcgttcctttgcatcaggactgtccctgctctgcgcagactcgcctgagctcawccctggtgagacgttcctctag

SEQ ID NO: 348581 - DNA, 568 bp, Homo sapiens
gctcttagatagatggattccaagattccaatggctcttcaatgtctgtccttgaagagtcttcagtttgcacagacaggcctccagagattccccggggttgctgacatgctgagcccagaactaagcctgagtccagcggtaggtctctgggccaacctgaccaatatctgcagggtctgttcatcatagtagatggggcaccatacctcatcttctcactcagggctgcccacacacttggtgctcacttaaatggtttatggttgaaggaaaggaggtaagaccaacaagatcaaatccaggagtctccaaggaccatgcctacaagtaatgaagaccatgaaatgctcacaagggccatgaacctccagcaagtgacatctatggagaatatatgctccatctaaaggyacaattcagtttaggttccggtgacgaaaagaaattcagacaaaaggtgtccaggctccacattgtcagacattctgggatttttttctaagaagctaaaaccctgatttttgtgtgaaaactcccaattgtgtattaattggtgattaactcc

SEQ ID NO: 348582 - DNA, 594 bp, Homo sapiens
actggtctctgcgaagtcagtaatgactatatccacgtcagtcttgatgggtggaaattcatgttgctgagcccatgcataacctctgcctggtcaccatggccattttgctcatgatcctattgggcaatgacaggggttgctggagaaagagactgtctggtattcagagaacaaatcattctctctgcttgattattaaaatcttcctctgctacagtcactctttggtaaacattcacataggacacaaatatctttatggctttttgagtattcagagaggtctatctacatgcctcttccccaaatttctttgtcactaatttgccaatcatgatttgtttcttccaaaacactgatcatccagccacaccattgactgcagtctctgcaaactaggcctgtgtcttttcttcctgtgtcaactgattataaggaactccccatgaagccataggtacagtctgggagagagaagacactkcaacagcaataggactaattccttttcttaaagaagtgggcatttgggtctacttgtttgtgtaacttacttgggtgttcaagaccagctcaggcatgatcttgtat

SEQ ID NO: 348583 - DNA, 547 bp, Homo sapiens
tgatatacccctgaggtatgacagtgaatgtatattactagccttgccagcttaaaacaaactacttctggtaggtcttaggtgcggagatggagaacaaagcatttgccagattaatagctgtaaaccaggcaccaggggatgttttaatttgcccaagcaatgaaatcccatctggtacagcagttggaattggagtcaccacctggttaagsctatgataatccactgtcattttccaggatccataaattttctgcagtatgccttttttaaaaggaaaatatattggggatgtagtaggaataactacctgtgcatctttcaagtctttgctgatggccctatctctgcagtctctccaggaatgtggtattgcttttgatttactattttcctaagtcatggaagttctgacggcttccacttggcctttcccaccacaacggccttcactccagagatcagggctccaatgtggagactctgccagctgctatgtttattctatttttgcatctggtactggggaaataaccacaggatc

SEQ ID NO: 348584 - DNA, 533 bp, Homo sapiens
atcagagtggtacatttgttataatctgtgaacccacattgacacatcatcatcacccaaataccatagtttacattagggttcactcctgtaaactcttgtaaattagagtattgcacattctgtggttttggcaactacataatgacatacatctaccattgtagtatcacacagaagagtttcacttttctaaagattttctatgttctgcctgttcatctctccctcccctttggcccctggcaaccactgatccttttactgtctccatagttttgctttccagaaagtcatatactgtagctgaattatacagcgtgtagcctttcagattggtttctttcaccttgtaacatgtctgtacatttcttttacgtcgtttcrtagcttgatacctcatttccttttagcgctgaaaaatattctattttctttatgtactacacttatttatccagtcacccactaaaggacactttggctgcttcccagttttggcaattatgaataaagtttctataaacatttat

SEQ ID NO: 348585 - DNA, 431 bp, Homo sapiens
aaagtgggttttgtcttgcgtcttagataccagctcaaccatagcagggcagggtacctgttggagtcataagccccctttataggccctagctccaagatgacacagtgtgggcaagaaaggaactcactaccttgatgggaaggatcgagccccagcagaacccatcacttgctgattaaagagcttttgggccctgaatamccagcagctataagcagttagtattccatgggccttacataaaattctgaaactagccggcttcaggtgagactcagtactttcccagatggggtgtctatgaggacactccttctgcttgagaaaagtgagtaaaagggactttgtcttgcaccatagctaccagctaaaccacatatttgtagagcaccaagtgggctcttcgggttcccaattccaggtcattg

SEQ ID NO: 348586 - DNA, 578 bp, Homo sapiens
tggcagtacttcccatgggtttatggtgatgggggctatagggtgaggctcctttgcttgtggaaagggaagggaagagtgataagggctctgttgtgtagttggagtgccagctcagctgcaatataatagarcagcaagtaaacttctaaggtttttgactctagtccctggctcttggacagcacctctggacccaccccaggcaaccatggggaacttgctgccctgaagggaaggacaaaagcctgctggcttcattacttgctgattttagagccccagggccttgagcagacaccggtggtagtcaggtaatggttacaatgggccttggatgagactcagtgctgtgctggcttcaggtctgaccaagtgtattttcagtggtgatggccacaggggagcatgtatcacttcatccccagcttcaggtggctcacagcagaaagtgagactccatttgtttgggagaaagtaaagaaagagaacaaaaataactctctgtctggtaatccaggtaattctcccagactgtatccatgaccatgaaggcagtatccctacaagtctgcaag

SEQ ID NO: 348587 - DNA, 489 bp, Homo sapiens
ccaatatcactaatgaagagtgaggcaaaaaatcctcaatataatattagtacactgaatttatcaacacatgaaaaggattcttcattatgaccaagtgggatttattccagggatgcaaggatggttcaacatgtgcaaatcaattactatgatacatcatatcaacagaatgaaggacaaaaactttaagatcattttaatggattctgtaaaagcatttgttaaaattcaacatccctttatgataaaaactctcagaaaactgagtatagaaggaacayatcccaacataatgaaagcaacataagacagactcacggctggtatcatactgaatagggaaaaactgaaagctttttctttaagatctggaacatgacaaagatggtcactgtcaccgcagttattcaacagagttctgaaagtccaagctagagcaatcatacaagagaaaaatataaaaggcatcaaaattggaaaagaata

SEQ ID NO: 348588 - DNA, 489 bp, Homo sapiens
ccaatatcactaatgaagagtgaggcaaaaaatcctcaatataatattagtacactgaatttatcaacacatgaaaaggattcttcattatgaccaagtgggatttattccagggatgcaaggatggttcaacatgtgcaaatcaattactatgatacatcatatcaacagaatgaaggacaaaaactttaagatcattttaatggattctgtaaaagcatttgttaaaattcaacatccctttatgataaaaactctcagaaaactgagtatagaaggaacatatcccaacataatgaaagcaacataagacagactcacggctggtatcatactgaatagggaaaaactgaaagctttttctttaagatctggaacatgacaaagatggtcactgtcaccgcagttattcaacagagttctgaaagtccaagctagagcaatcatacargagaaaaatataaaaggcatcaaaattggaaaagaata

SEQ ID NO: 348589 - DNA, 587 bp, Homo sapiens
ggtcactgtcaccgcagttattcaacagagttctgaaagtccaagctagagcaatcatacaagagaaaaatataaaaggcatcaaaattggaaaagaataagtgaaattatccttktttgccatgatatgatcttatatttggaaaaacctaaagattccatcaaaaaattattaggactggtaaacaaaattctgtaatgttgcaggatataaaatcaacatacaaaaatcagtagcatttagagtaatcccatttacaatagctacaaataaaattaagtacttatgaattaacttaaccaaagaagtgaaacatttgtacagtgaaaactataaaacttcaagaaattgaaggacacataaaaaattttaaaaatactttatgtttatggattggaagagtccatattgtcaaaatgtccatactacccaaagcaatttatggatttaatgcaatccctatcaaaataccaatgacattcttcacagaaatagagaaaacaattctaaaatttatatgaaaccacaaaaaaaacaaagagccaaaactattctacacaaaaagaaaaaaaatggaggaatcaca

SEQ ID NO: 348590 - DNA, 587 bp, Homo sapiens
ggtcactgtcaccgcagttattcaacagagttctgaaagtccaagctagagcaatcatacaagagaaaaatataaaaggcatcaaaattggaaaagaataagtgaaattatccttgtttgccatgatatgatcttatatttggaaaaacctaaagattccatcaaaaaattattaggactggtaaacaaaattctgtaatgttgcaggatataaaatcaacatacaaaaatcagtagcatttagagtaatcccatttacaatagctacaaataaaattaagtacttatgaattaacttaaccaaagaagtgaaacatttgtacagtgaaaactataaaacttcaagaaattgaaggacacayaaaaaattttaaaaatactttatgtttatggattggaagagtccatattgtcaaaatgtccatactacccaaagcaatttatggatttaatgcaatccctatcaaaataccaatgacattcttcacagaaatagagaaaacaattctaaaatttatatgaaaccacaaaaaaaacaaagagccaaaactattctacacaaaaagaaaaaaaatggaggaatcaca

SEQ ID NO: 348591 - DNA, 580 bp, Homo sapiens
tattggttgtaatgtaaattagcacaaccccactgttctttatggagaatagtttggaggttccttaaaactaaaagtagggctgccatatgatccagcaatcccactactaggcatatacccaaaagaatggaagtcagtatatcaaagagrtatctgtactcctatgtttattgcagcaccattcaccatagccaagacttgtaagtaacctaattgtcaatcaacatatgaatggataaagaaaatatggcacatctacacaatggagtatttctcagccataaaaaagaatgagatctgatcatttgcaacaacatggatagaacttgaggtcattgtgttaagtgaaataggtcaggcacagaaagacaaactttgcttgttctcacttatttgtgggagccaaaaattaaaacaattaaactcatggagatagagagtagaagaatggttaccagaggctgagaagggtactggcaggggtgggaggtggggtggtgaggggaaagtgtggatagttaatgagtacaaaaaaataattagaaagaatgagtaagacctagtatttgctagcacg

SEQ ID NO: 348592 - DNA, 564 bp, Homo sapiens
aactttgcttgttctcacttatttgtgggagccaaaaattaaaacaattaaactcatggagatagagagtagaagaatggttaccagaggctgagaagggtactggcaggggtgggaggtggggtggtgaggggaaagtgtggatagttaatgagtacaaaaaaataattagaaagaatgagtaagacctagtatttgctagcacgacagtgtgaccacaattaaaaaaaatgtaattgtacaatttgaaataactaaaagagtataatttgattatttataagacaaaggacacatgcttgagatgatacrtactctgcttaccctgatgtcattattatgcattgcatgcctgtataaaaatatatcacataatccagaaatatatacaactattttgcacccataaaaattaaagtaaaaataaaaataaaataagacacagacctcttcatctctttcctctaaactttccattgataggtagtcttagttttgttcctcttgtatgcaattttcctttcattgataatatcagataaaccaattgatcaacatctgcca

SEQ ID NO: 348593 - DNA, 605 bp, Homo sapiens
gaaaaatgaaacttgtttttaagtaaactataacaatcatcatattaataagataaagtattgagagatctcagatttagtaataatrtagttttgatttatatatggctttcagaaacttccatgaacaaagtcttcttcctgttttattattactaaattaattacaatcattatctagtatgttcatttgtagtcattctttccttttcaaaatataatcaatttctcaatagagtattcagtagagaaaaatatcttctttactgaaatcatgccttatcctttgactccagtcccaatgtacaatagccccaaaatggtgtacacctggagctctcagattctcacatttatacagggccattttctattgttgtgacctctaaaactgtggttgtgcttgtggttggaagaggatagtgaagagaaaagaaataaaacaagggtggactatacttggtggttgcttggtacaaaaaggaaaaggtggaatttctggcattttcaaggactaagatatgtgggtagtgcatatagacaccagctctgtgcttccctcttctctgagtatggacagttagccctctctatctgtgggttca

SEQ ID NO: 348594 - DNA, 589 bp, Homo sapiens
gtataggttatatgtggatatgacactattttatatcaaaggcttgaatagtcacagattttggtatttgtgagaggtcctgcaatgatcccctatggagactgaagtattactgtattttctgtatagttctggacatttttcttaggttttcttaagagcaggtatgccaggctgtgagagattttgtgagttcagggtgaattgtggaggaaaaaaggccaaatattgagttttccatgaagcaaaaatatatttaatttaaaggaatgtaacttttctgagaaatcatacttattacttttatagcagcaaattatcaatttccaaatatcttttcttaaggaagtatagyttgctgtctgatgtcagtcactggagttttaaattttatagatgactgttaaaacaaaaagattataaaaccatgattctagatgattttaaaattgtatgactttaaaattgtatttctgaatagtaataataatgccaatgggatttgcagggctgtgggtattttgtgtggaaccttgcatatatatatatacatacacaatttgtgtaacccaaatcaatgtgcatgctg

SEQ ID NO: 348595 - DNA, 589 bp, Homo sapiens
gtataggttatatgtggatatgacactattttatatcaaaggcttgaatagtcacagattttggtatttgtgagaggtcctgcaatgatcccctatggagactgaagtattactgtattttctgtatagttctggacatttttcttaggttttcttaagagcaggtatgccaggctgtgagagattttgtgagttcagggtgaattgtggaggaaaaaaggccaaatattgagttttccatgaagcaaaaatatatttaatttaaaggaatgtaacttttctgagaaatcatacttattacttttatagcagcaaattatcaatttccaaatatcttttcttaaggaagtatagcttgctgtctgatgtcagtcactggagttttaaattttatagatgactgttaaaacaaaaagattataaaaccatgattctagatgatttkaaaattgtatgactttaaaattgtatttctgaatagtaataataatgccaatgggatttgcagggctgtgggtattttgtgtggaaccttgcatatatatatatacatacacaatttgtgtaacccaaatcaatgtgcatgctg

SEQ ID NO: 348596 - DNA, 504 bp, Homo sapiens
gaacacacatgtctgatgggatttcatataggaaagataataagcagagcagaggcaagtgaaatcctattcttgagatggagctttgcagtgatgcatgctgatgctagtctgcaggtgaccatcccaggagatagatggaaggctccagcatgcttcatttatagtatctctgggccaattatttttctggktcaagaattggtaagtacagttgactcttgaacaacaaggttttgaactgccaacaccactcatactaggatttttttaaaaataagatattatagttagccctccctgagggcaggttctgcatctacaaccaaatacggatagaaaatactgtattggcaggatgtgaaaccccgcaaataccagggctgacttttcatatccacagttctgcactgcagaccttgggacttggatacacccagattttggttaccacagggattctggaaccagtctcccccagtagctatggacattattattata

SEQ ID NO: 348597 - DNA, 548 bp, Homo sapiens
agagctgaacactcgacctccctacagagaggagctacccactctgggtctactctgagttgttctaacactcaataaatctcctcttcatttgctcactctccacttgtctgtgtacctcattcttcttggacacaggacaagaactcaggcaaaggcaccaccagccacagaggtttccagccagaaaagcaacaccccaaagattccttaacattatgagttcaaatatatcatgtgagtcatgggttgtaggcatatcttcttagatgaattttgtgtttgctctgacagaacctaagtgaattacaaccttgaaactaagtttcatgttaattttttgttttggtattgcctgaatcatacaagtagtgtaagtttggacctcacatcaagagaaataacagaattggggacttaaatttttaattttaaatttttttctacctcacatcagatagagacaagcctcattgycatctccctgtaccagaatgtggaatttttcttgttcaaccagtatttgtgagtatggctttttaaaattt

SEQ ID NO: 348598 - DNA, 475 bp, Homo sapiens
tgtgaatcctacataactaaaagatggggaaaaaatcaccaaaaagttacttgaaaagtcatgtgcagtatttctaaaattacacatctccagacatgttcatttttatttgtttcttcacttttatttcattttgtagattcttctccaaaaaaagttcactggtatacacacttctttttctgctacatatctctacctctaatagcctttattatkactttatgtttcatttgagtggatattgttaatttatctgacatatatttcatttaatttattatttacagatagacaatgttaataagtgactaaagtcaacttatggattactgcttttaggtttttgcatctctacttcagtcaaatgtggtaactattttctttttatctagtaacaggctatgtgaccttctaaagtttaatttccttgtcactacttgagtcagaatgaatatgcagtcattttattctc

SEQ ID NO: 348599 - DNA, 598 bp, Homo sapiens
ttgggtaatttgttaatagtagaaatagattttcaacttagaagtattttgctgttattttctcactatcaatgagtcattatcaataaaaatttgtgggtgggtacrtatagatgtgcaaatgtgtacattcattgaatttgaatgaattataatttgcttttatattaactcaatgaatgttctgaagaagtattataaaaaaggacaaagaaagatgatatattagctatattaagacataatttattacactttagtttaaataatttcaacttttttctttatctttttaggaacatactttcttttattattgggattttttattttacacaaactttctttccccaaaaaagttttgaagttatttattgctttagcagatgaatttataattaaaagcaatgttgagtttaaagtaaaaactatcattgatttaataatacacattaaatgttaataggctttagtatattagaatacaatgcaacatttttaaataatatattgtatacatttcacagttgcaaaaaagttgaagaaaatttcaagctacatcattcaaatcctgcattatttttctagacttgaatca

SEQ ID NO: 348600 - DNA, 580 bp, Homo sapiens
tattttctcactatcaatgagtcattatcaataaaaatttgtgggtgggtacgtatagatgtgcaaatgtgtacattcattgaatttgaatgaattataatttgcttttatattaactcaatgaatgttctgaagaagtattataaaaaaggacaaagaaagatgatatattagctatattaagacataatttattacactttagtttaaataatttcaacttttttctttatctttttaggaacatactttcttttattattgggattttttattttacacaaactttctttccccaaaaaagttttgaagttatttattgctttagcagatgaatttataattaaaagcaatgttgagtttaaagtaaaaactatcattgatttaataatacacrttaaatgttaataggctttagtatattagaatacaatgcaacatttttaaataatatattgtatacatttcacagttgcaaaaaagttgaagaaaatttcaagctacatcattcaaatcctgcattatttttctagacttgaatcaacatttttgtctaaactgtaagtgcatactgaaatag

SEQ ID NO: 348601 - DNA, 580 bp, Homo sapiens
tattttctcactatcaatgagtcattatcaataaaaatttgtgggtgggtacgtatagatgtgcaaatgtgtacattcattgaatttgaatgaattataatttgcttttatattaactcaatgaatgttctgaagaagtattataaaaaaggacaaagaaagatgatatattagctatattaagacataatttattacactttagtttaaataatttcaacttttttctttatctttttaggaacatactttcttttattattgggattttttattttacacaaactttctttccccaaaaaagttttgaagttatttattgctttagcagatgaatttataattaaaagcaatgttgagtttaaagtaaaaactatcattgatttaataatacacattaaatgttaataggctttagtatattagaatacaatgcaacrtttttaaataatatattgtatacatttcacagttgcaaaaaagttgaagaaaatttcaagctacatcattcaaatcctgcattatttttctagacttgaatcaacatttttgtctaaactgtaagtgcatactgaaatag

SEQ ID NO: 348602 - DNA, 505 bp, Homo sapiens
ggacactgtgtgttagcaatatgttcaagcttgtatgtgcaagcagaaatgtccacagccaggtatgggaggccacttgtactatagaatggagacagtggagaggtggggagagagaaagaggcaaacccaagtttcagttcattttcatttttaaggtgtgtatttttcaaatgtagaaatcattatttttaaaaacttttactttagtttgaggggtacatgtgcagatttgttatataggtaaattgcatgttgtaggggtctggtgtacasattatttcatcaccaaggtaataagcatagtactcaataggtaggtttttaatccttcccatcctcccaccctcctctctcaagtgggtcctggtgtctgttgttcccatctttgtgtccataagcactcaatgtttggctcttacttataagtgagaagatgtggaacttggttttctgttcctgtgttagttcactttagataatggcctccagctccatccatgtt

SEQ ID NO: 348603 - DNA, 600 bp, Homo sapiens
aatgccctgctgtcttttttgatcattgttggtttaatgtcttttttgtctgaaattaaaatagcattccatttgcttggtagatttttctccatccctttactttgagcttattggtgtcattgcatgtgagatgggtctcttgaagacagcatacagttgggtcttgcaccrtcatccaacttgccactctgtgccttatcattgggacatttagtctgtttatattcaaggtatatattgatatgtgcagatttgaacctgtagttatgttgttagctggttattatgtagatttgattgtgtagttgctttatagtgtcaatggtttatgtagttaagtgtgtttgtggtatggctggctataacctttcatttatatatttagcactcccttaatgacttcttataaggcaggtctggtgctaatcaatctctttagcatttgcttgtctgaaaaagatcttatttctcctttgtttacaaagcttggtttaggtggatatgaaatttttggttggagtttctttcttttaagaatgctgaatataggccctatctcttttggcttgtagggtttctactaaaaggtccactgtt

SEQ ID NO: 348604 - DNA, 600 bp, Homo sapiens
aatgccctgctgtcttttttgatcattgttggtttaatgtcttttttgtctgaaattaaaatagcattccatttgcttggtagatttttctccatccctttactttgagcttattggtgtcattgcatgtgagatgggtctcttgaagacagcatacagttgggtcttgcaccgtcatccaacytgccactctgtgccttatcattgggacatttagtctgtttatattcaaggtatatattgatatgtgcagatttgaacctgtagttatgttgttagctggttattatgtagatttgattgtgtagttgctttatagtgtcaatggtttatgtagttaagtgtgtttgtggtatggctggctataacctttcatttatatatttagcactcccttaatgacttcttataaggcaggtctggtgctaatcaatctctttagcatttgcttgtctgaaaaagatcttatttctcctttgtttacaaagcttggtttaggtggatatgaaatttttggttggagtttctttcttttaagaatgctgaatataggccctatctcttttggcttgtagggtttctactaaaaggtccactgtt

SEQ ID NO: 348605 - DNA, 600 bp, Homo sapiens
aatgccctgctgtcttttttgatcattgttggtttaatgtcttttttgtctgaaattaaaatagcattccatttgcttggtagatttttctccatccctttactttgagcttattggtgtcattgcatgtgagatgggtctcttgaagacagcatacagttgggtcttgcaccgtcatccaacttgccactctgtgccttatcattgggacatttagtctgtttatattcaaggtatatattgatatgtgcagatttgaacctgtagttatgttgttagctggttattatgtagatttgattgtgtagttgctttatagtgtcaatggtttatgtagttaagtgtgtttgtggtatggctggctataacctttcatttatatatttagcactcccttaatgacttcttataaggcaggtctggtgctaatcaatctctttagcatttgyttgtctgaaaaagatcttatttctcctttgtttacaaagcttggtttaggtggatatgaaatttttggttggagtttctttcttttaagaatgctgaatataggccctatctcttttggcttgtagggtttctactaaaaggtccactgtt

SEQ ID NO: 348606 - DNA, 591 bp, Homo sapiens
ggattttgcatttgtaatattatccccaggagcaatttggagatgtttagaatcttgtggcctccagctgcatgactcctaatttctgatcttgtggctaatttgttagtcctgcaaaggcagtctagcccccaggcagaaaaggggtttgtttgaggaaagggctgttatcatctttgtttcaaagctaaactataaactaagttcctcccaaagttagttcatcctatgcctaggaatgaacaaggacaacttggagattagaagcaaggtggagttgggttaggttagaactctttcactrtctcaattataattttgcaatggcagtttcaccaacagctgcagcagtgtggcgggttgcctgcacataggtggggcagcgatgggggtgccagcatcagtgcacacactcatcccagtggtggtggtggcacagcaggcccactcatctgtcattgaacatttaggctgttttcatttgttggttattgtgaataatactgaaataaacaaggaactgcagacatctcttcaagatcctaatttcagttcttttcgatatatgcccagaattgtcattgctggatc

SEQ ID NO: 348607 - DNA, 508 bp, Homo sapiens
ctaaactataaactaagttcctcccaaagttagttcatcctatgcctaggaatgaacaaggacaacttggagattagaagcaaggtggagttgggttaggttagaactctttcactatctcaattataattytgcaatggcagtttcaccaacagctgcagcagtgtggcgggttgcctgcacataggtggggcagcgatgggggtgccagcatcagtgcacacactcatcccagtggtggtggtggcacagcaggcccactcatctgtcattgaacatttaggctgttttcatttgttggttattgtgaataatactgaaataaacaaggaactgcagacatctcttcaagatcctaatttcagttcttttcgatatatgcccagaattgtcattgctggatcatatggtcattttacttttaatttttagaggaacatcttcatactgtttgccataaaggctgcaccattttgcatttccagcagtgtacaaggattctaatttc

SEQ ID NO: 348608 - DNA, 591 bp, Homo sapiens
ggattttgcatttgtaatattatccccaggagcaatttggagatgtttagaatcttgtggcctccagctgcatgactcctaatttctgatcttgtggctaatttgttagtcctgcaaaggcagtctagcccccaggcagaaaaggggtttgtttgaggaaagggctgttatcatctttgtttcaaagctaaactataaactaagttcctcccaaagttagttcatcctatgcctaggaatgaacaaggacaacttggagattagaagcaaggtggagttgggttaggttagaactctttcactatctcaattataattttgcaatggcagtttcaccaacagctgcagcagtgtggcrggttgcctgcacataggtggggcagcgatgggggtgccagcatcagtgcacacactcatcccagtggtggtggtggcacagcaggcccactcatctgtcattgaacatttaggctgttttcatttgttggttattgtgaataatactgaaataaacaaggaactgcagacatctcttcaagatcctaatttcagttcttttcgatatatgcccagaattgtcattgctggatc

SEQ ID NO: 348609 - DNA, 552 bp, Homo sapiens
agtcactgagttagtcattcatttattcaacaatagaattcaagactaatcattaggcaatgctatttctactttacttttttctttccttcatacatgatcaatattttgaaaacttcatatgccatgaaaagaatgcacagtttctcttttaactttataaatttttattttattttttgtgcattgctacatttccattgactggaaaggtatctgcatattgttcatgctcaagaaatatttttgaatgtgttaattcccgatctttattgtatcaatcaaatgcttcacctccctccttatgcatcatctttggcctgacaaacttgaaaacatggatagtaaaattattcaacataatttttaatcatcagttwttccatgtaacttcaaaactttccttttcttcatgaatttgtctgctctctacatacattgggtgcataaatgtatctcttcacatttttaagtttttaattaaatataacatcattttttattttccttacctatgctgttattgagtcacatttcaattttaatattgcc

SEQ ID NO: 348610 - DNA, 552 bp, Homo sapiens
agtcactgagttagtcattcatttattcaacaatagaattcaagactaatcattaggcaatgctatttctactttacttttttctttccttcatacatgatcaatattttgaaaacttcatatgccatgaaaagaatgcacagtttctcttttaactttataaatttttattttattttttgtgcattgctacatttccattgactggaaaggtatctgcatattgttcatgctcaagaaatatttttgaatgtgttaattcccgatctttattgtatcaatcaaatgcttcacctccctccttatgcatcatctttggcctgacaaacttgaaaacatggatagtaaaattattcaacataatttttaatcatcagttaytccatgtaacttcaaaactttccttttcttcatgaatttgtctgctctctacatacattgggtgcataaatgtatctcttcacatttttaagtttttaattaaatataacatcattttttattttccttacctatgctgttattgagtcacatttcaattttaatattgcc

SEQ ID NO: 348611 - DNA, 591 bp, Homo sapiens
ctataggaagagaagctcttcagatacagctgatggctctcatgcacgattgtaggtcctgtgttgaatatcagattattcaacagaagtcagtaatctggattttcagttaaattttctgacttttaaatgtctcccatctatcaaaaagcttttatgacattgtgtaacccccctaaaaaatctgtatgcaacgtcaatgtcttgtataatgaggcagagatgacaattaaggaaagggagatacaatttttgcaatgactgtcttacagaaaacaagtgttagagaagtaccattgtcccttgatcagcatgagtctgactttgatcaacatgagtccctttatatgtggacttttcttcaaccaaatgtagatggaaaacatggtatccttggtatatgaaactcacatatacagagggtcaacttttcatatccacaggctcttcagggctaactgtgggacttgwctatgtgcagattttggtatgtgcagggagtcctggacacctgtattatacaaatgcttctatgcacagaaataagctctcctcactaaaaatgtgtcagcaaaaatttgataatgaaaa

SEQ ID NO: 348612 - DNA, 591 bp, Homo sapiens
ctataggaagagaagctcttcagatacagctgatggctctcatgcacgattgtaggtcctgtgttgaatatcagattattcaacagaagtcagtaatctggattttcagttaaattttctgacttttaaatgtctcccatctatcaaaaagcttttatgacattgtgtaacccccctaaaaaatctgtatgcaacgtcaatgtcttgtataatgaggcagagatgacaattaaggaaagggagatacaatttttgcaatgactgtcttacagaaaacaagtgttagagaagtaccattgtcccttgatcagcatgagtctgactttgatcaacatgagtccctttatatgtggacttttcttcaaccaaatgtagatggaaaacatggtatccttggtatatgaaactcacatatacagagggtcaacttttcatatccacaggctcttcagggctaactgtgggacttgactatgtgcagattttggtatgtgcagggagtcctggacacctgtattatacaaatgcttctatgcacagaaataagctctccycactaaaaatgtgtcagcaaaaatttgataatgaaaa

SEQ ID NO: 348613 - DNA, 583 bp, Homo sapiens
aaaagaaagggaaaggaaagccaaacaggagaactcactaaagttggctaaagttttatcaaggagagagagacaagaaatactagagttagctgcctgtgatgtgggacttgcaaagagaagtagaacaaatactgaagatatttgttgtttgttgcgtagggtaaattctttctttgtcctcccttaagaatgcattcagaaatagtatatatgattcagcaaagcctttgaaatccaaactgagtttcttcaggaaataacaaaaatacctaataaaaacatagctatatttggtttacatttttgtctgttttttttttctattatttagctattttaagtaaagctttaacaaaagtaatggaaacatttttaagactcttattcgtgccttaggtaataaaatagaaaacactatcttaaagttgagtctgmggaagtggggcagagttgttgttttatctgaaacagatatattaacgatgtcatcaagaagagcatagagataaatttagttaagataaattcagtacattcagaagccaaaacaaccaaaagaatcagtatgcaattagcaaaa

SEQ ID NO: 348614 - DNA, 557 bp, Homo sapiens
ccttcccatcatggcctgaactagtttttcaggtttctttgggatccatttggtcaagaagtgagtccattcagttggttgggaggcttataattttatttttggtttacatagttatgcctctttttaactggtgaggaatgtttttagaggtcactaaatacaggggcagatgttgacaaaacatatacaaatattaacaagagaaactggagttaagaatgtcaggcctctaagcccaagcaaagccatcatataaggatgcctttttggttatagatatgatcaggatgggcatcaacctgaaaggaagatcgtgggctctttcatgcgcgtccgtgtgaagagaccaccaaacaggctttgtgtgagcaacatggctgtttatttcacctgggtgcaggcgggctgagtccgaaaagagagtcatgggctgagwccgaaaagagagtcagcgaagggagataagggtggggctgttttataggatttgggtaggtaaaggaaaattacagtcaaagggggtttgttctctggcgggcaggagtgggggtcgc

SEQ ID NO: 348615 - DNA, 496 bp, Homo sapiens
agaatgcaaattttgaataaaaagatttatgagcaaatgagtgctcaaaattgtgcaatcccttacattactcatttatttatgataatagcatttatgtttattaattgagatgagaaatataattctctattttttgaaatatacgtcagttattgttatgttctaattaagtctctgtgtgggagyatcagcaggatataaaccactcctgtgaaaactcaactctaatctctgaaaaaatacaactaaagtctacaattttgaaagtaaaatatgcaaaaaaaaaaactgtgatgaaaattttgaaaaacaaagaaaaacattttttctattttcagaggaaaaattagcttgggtaaacacacatagagattcaagtgttaagaatgctatgaacacataattgcataaacaagagtacaaaaacatactttgaaatgacctgatgttacaatgttcattttgaaacttaagagtaagaaaataaatacct

SEQ ID NO: 348616 - DNA, 345 bp, Homo sapiens
acattttaaatatttgttcttttctgtggtttccattttttcagcatggattctaattatacatttggaaatctcctttggcatcttccatacctactcatgttctttcatttctaaactctattttcatttcatttytaaaatccaatttttaaattgttttctgggtcattcattgggttattagcactattttttgctttccctaatttaacctacaaatatgaaatttcaatattaaaaatcgtttcccaagatctccatctcctaaagtttaaatcattacacagtcttcagtctctttcctaagttattttgactgttacatatgttctgctttctgct

SEQ ID NO: 348617 - DNA, 603 bp, Homo sapiens
aaaaaacaaaaaatttcaacgatctataaataaaaggaaactttttcagactgattaaragtttagacatttttacagatattatcatatttaatgggggaagactaaatgtcttccctttaagatttgaagcaaggtggtatagattgagttgtgttcctccatcctccccaacccaaattcatatgctgaaagcgctgatcctcaatgtgatgagatactcagatgagatcttacaagacgattaagtttagataaggtcaacctggtagagcactcatggtgggactcttatgtcagaagaggaggagacaccagagctctctctctgacatgtgaagacatagtgagaaggtggccatcggtaagccaggaatagagctgtcactgaggagctgaatttgctggcacctggatttgagacttcccagtctccagaactataagaaataaatttatgtgtaaatccctcagtttaaggtattggttgtggcagcctgagaagactaatacacaaggcaaggatgtccactctcacagcttcaattcagtattaacttggaggttctaacgagtacaatgagacaaggaaaagaaacaaaa

SEQ ID NO: 348618 - DNA, 509 bp, Homo sapiens
gttttttactactcaaattagattcttgttcacttgtactaaaacttttctgcctatacgtgtcaggtagtaacctaatagacttactatctatttcacttctcagaataccatgattaaccggctgatgccacaggtctatatgagtcagactctgattgctgctttgactctgttgtccattagagaaacgacacccaccttgtctttggcaattsggtgctatcacttagctgctaccaccccaggatcagattgctcccattgcatttggcttttccaatcaaatggctgggattcccatggaaagacctggccttcaaagaagaatgattgctgtgttcttaaaggatactgaggctctctatacaaatttattttgcaaagtattaattaggggtattcagtgcagagaattttgcatttctataaacagtttactccatgaactatcagtgttcttttaactaatggaaatagccatttggtatgtcttatggcctctcctg

SEQ ID NO: 348619 - DNA, 509 bp, Homo sapiens
gttttttactactcaaattagattcttgttcacttgtactaaaacttttctgcctatacgtgtcaggtagtaacctaatagacttactatctatttcacttctcagaataccatgattaaccggctgatgccacaggtctatatgagtcagactctgattgctgctttgactctgttgtccattagagaaacgacacccaccttgtctttggcaattcggtgctatcacttagctgctaccaccccaggatcagattgctcccattgcatttggcttttccaatcaaatrgctgggattcccatggaaagacctggccttcaaagaagaatgattgctgtgttcttaaaggatactgaggctctctatacaaatttattttgcaaagtattaattaggggtattcagtgcagagaattttgcatttctataaacagtttactccatgaactatcagtgttcttttaactaatggaaatagccatttggtatgtcttatggcctctcctg

SEQ ID NO: 348620 - DNA, 487 bp, Homo sapiens
actcattatctagatttgaataggaactttcaatgatgatatccaaggatcttgcatttgtcttaaaccactcttattagctttgcttaaagccaacttgaaatctgaaaagctagagtgaccttgggcaagttatttaatcgctccaagactccagatctgagaaatagaaatgatagcacctttgttggggtttgttaggattaaattacctaatacacaggagggatagcacartgcctagtataaaataaacactcaatatagtggctctgctactgattttcacataattggacttttgttctttcccaaatattgcccaatagttttcaaatttccaaataactttgaattttccaaataactttgctcatcttattcctctttcacagtgaagtccattacttatatctgccaaacttgtacttaccctttaaagaccacaatgggctctcagatatggtaaacaaaatttaatgtacct

SEQ ID NO: 348621 - DNA, 616 bp, Homo sapiens
aactttgctcatcttattcctctttcacagtgaagtccattacttatatctgccaaacttgtacttaccctttaaagaccacaatgggctctcagatatggtaaacaaaatttaatgtacctctgccaataagaaatgaatatttattcttaaagcagctctaagataactttgaagaagctatcttgcttatttgttattaagatgtgacatcgacatctactcaggagaaaagrgagaatttaccaaatgtttgaggtgtcccaataatgtaggggcactcaagaagacacaaccaaaatacctgatgctctaagaagtttcaattatacatactctatcaagatatcagctagttatgttatgaaatagaaattagggattaagtaaaatgatatttttgctagtattctctctcaaagaccaaacttttcttttgcaaaaagaaggccttctgtagaagtgagatgatgcttaggaatagtggctttggttgaatattaggattacaagaaactggagaaatggagagattaatgggtgaactaacatttattgattgactatgaagtgtcatgcataatttcactaaattctcagccttaaaacatggaaa

SEQ ID NO: 348622 - DNA, 616 bp, Homo sapiens
aactttgctcatcttattcctctttcacagtgaagtccattacttatatctgccaaacttgtacttaccctttaaagaccacaatgggctctcagatatggtaaacaaaatttaatgtacctctgccaataagaaatgaatatttattcttaaagcagctctaagataactttgaagaagctatcttgcttatttgttattaagatgtgacatcgacatctactcaggagaaaagggagaatttaccaaatgtttgaggtgtcccaataatgtaggggcactcaagaagacacaaccaaaatacctgatgctctaagaagtttcaattatacatactctatcaagatatcagctagttatgttatgaaatagaaattagggattaagtaaaatgatatttttgctagtattctctctcaaakaccaaacttttcttttgcaaaaagaaggccttctgtagaagtgagatgatgcttaggaatagtggctttggttgaatattaggattacaagaaactggagaaatggagagattaatgggtgaactaacatttattgattgactatgaagtgtcatgcataatttcactaaattctcagccttaaaacatggaaa

SEQ ID NO: 348623 - DNA, 617 bp, Homo sapiens
ctcacaggagggaaagaggaggtttaagtggcactgtgtgggtcagaagcactctcaaggtgtccttatcctttttgcatttcccccaatcttttcattggaatgtgatttgaaaggaattagagtagtcctcctgtactaatttttattgctcactgcagggctacagggatgwttactctacacagtatgcctcttccctgatgcccttcatatctttttttttttttttgagatggagttttgctcttgttgcccaggctggagtgcaatggcaccgtcttggctcaccacaaactctgcctcctgggttcaagcaattctcctgcctcagcctcctgactagcttggactacaggcatgtgccaccacacccagctaatttttgtatttttagtagagatggtgattcaccatgttggccagtgtggtcttgatgtcttgacctcgtgatccacacacctcgacctcccaaagtgctgggatcacaggtgtgagccactgttcctggcctcttcatctcttttttttttcttttttttttttttgagacagggtctcactctgtcactcaggctggagtgcagtggcatgatcatggcttactacagcctcga

SEQ ID NO: 348624 - DNA, 617 bp, Homo sapiens
ctcacaggagggaaagaggaggtttaagtggcactgtgtgggtcagaagcactctcaaggtgtccttatcctttttgcatttcccccaatcttttcattggaatgtgatttgaaaggaattagagtagtcctcctgtactaatttttattgctcactgcagggctacagggatgtttactctacacagtatgcctcttccctgatgcccttcatatctttttttttttttttgagatggagttttgctcttgttgcccaggctggagtgcaatggcaccgtcttggctcaccacaaactctgcctcctgggttcaagcaattctcctgcctcagcctcctgactagcttggactacaggcatgtgccaccacacccagctaatttttgtatttttagtagagatggtgattcaccatgttggccagtgtggtcttgatgtcttgacctcgtgatccacacacctygacctcccaaagtgctgggatcacaggtgtgagccactgttcctggcctcttcatctcttttttttttcttttttttttttttgagacagggtctcactctgtcactcaggctggagtgcagtggcatgatcatggcttactacagcctcga

SEQ ID NO: 348625 - DNA, 622 bp, Homo sapiens
agatgggggtctcactctgttgcccaggcttgtcttgaactcctgggctcagcgatttgctcacctcatgacatggtttttctgtgtcctcacccaaatttcatcttgaattgtaactcccacarttcccatgtgtcatgggaggaacctggtgggaggtgattgaatcgtgggggcgggtctttcctgtgctgttctcgtgttggtgggtgagtgccacgagatctgatggtttcaaaaaggggagtttccctgcacaagctctccctttgcctgctgccctccttgtaagatgtgacttactcctccttgctttctgccataattgtgaggcttcctcagccaagtggaactgtaagtccatttaacctctttcttgtgtaaattgcccagtctcaggtatgtctttatcagcagtgtgaaaatggactaatagagtaaattggtaccaggagcagggcactgctgaaaagatacctgaaaatgtgaaagcagctttggaacagggtaacaggcagaggttggaacagtttggagggttcagaagaagacaggaaaatgtgggaaagtttggaactttctagagacttattgaatagctttgcccaaaaagctgatagtg

SEQ ID NO: 348626 - DNA, 589 bp, Homo sapiens
ttgtcaattcttcttgagtaagtacccctaaataaacttgggcactagatgttggatggttgatgggataatacccaagaattcmagacacccctcaatctctgctctctgagattccacttttgggaaacccattgtctggactgatatgacactgagcaaaaacatcactgggagaaaaacaccagggccttgaagggagctcagtaggggggtaagaaaattggtctggtaactgattctccttccagggttctcaaaatgtccttagtttgtgggaaagggctggttctggcataccaagccaacctagaaaatgatttctgagcatatgactatgaatagacagattcaaacttgaagtttgggaattggcaggtatttaaacaagtagagacatacagtagtggtgaacaagtgtccagcagaatgggtaagacaagtgttcaaaagagattcatgtggccacaataaaataatagtgctgatggggtaggagggctttataatgctttcttttccatctggagtttgagaagaagggctacacttatttgggttgagtgaacccttgacttctttggataat

SEQ ID NO: 348627 - DNA, 584 bp, Homo sapiens
tttttcccattcagtatgatgtggttgtgggtttgtcatagatggctcttattatcttaagatatattcctttgatatttagtttcctgtgggttttcatcatgaaatgatgttgggttttattgaaagctttctttgtgtccattgggatgatcatatgatttttggttttaattctgtttatgtagtgagtcacatttattgatatgtgttttgttgaaccaaacttataatcaaggatgaagccaacttgatcgtggtgaattaactttttgatgtactaytggattcagtttgctagtattttgttggagatttttatgtctttgttcgtaagggatattgacttttaattttctttttttgttgtgtctttctaggttttggtactagggtgatgctggctacacagaatgagctaggaatgagtcccatccccttgattttttgaaatagtttcagtataactggtgctggttcttttttgtacatccggtagaatacggctgtgaaaccatctggtttagaacttttttggttggtaggttttttattactgattcaatttcagaacttgatattga

SEQ ID NO: 348628 - DNA, 473 bp, Homo sapiens
atgttaggtcattaatttgagatctttccaactttttgagataggcatttagtactacaaacttgactcttgcttttgtgctacaaacttgttcttttgctttagcacttcttttgttcagtgctataaacttgatgattttttatttatcccagagrttttgaaatgttatatctctgttttaattttatttcaaagaattatttgatttttgccttaattttattgtttacttaaaagtcttgtgggagaaagttgtttttttccatataattatgtggttttgagagctgttcttggtattaatttctattttttactctgctgtattctgagagtatggctggtatgattcagttttttttaaatttattgagacttgctttatggctgcatatgtggtcaatcttggactatattatgtgtacacattcgaagaatgcatagtctgtagttcatgggtgtagtagtct

SEQ ID NO: 348629 - DNA, 570 bp, Homo sapiens
tcatagatgtagaggtacttgttttataaatctgggtattccaatattgagtgcatatatatttaggatagttaagccttctggttgaatttaatactttatcattacataatgtcagtgtttgtccctttttactgtagttggtttatagtctgttttatctgatataagaatagtaacctctgctcttttttgttttccatttctgtggcasagtttttattccaaccctttactttgagcctatgggtatcattacatgtgagatgagtctcttgaagacggtacacaggtgtatctgtatttttttttttatctgacttgccactctgtgacttttaagttggacatttagaccatttacattccaggtaaatattgatatgtcagtctttgatcctatcataaagttgttagctggttgctttgtacctttcattgtgtggttgctttatagagtctgtgggctatgtacctacgtgcatttttgtggcaacagttactgttctttcatttccatgtttaaaactcccttaaggatctcttgcaaggctgctctagtggtaacaa

SEQ ID NO: 348630 - DNA, 594 bp, Homo sapiens
acaaagcaggtctgcctacaagtcccccagtggctggcacaagtgccaagggagaattcattgtgtggccaccaatcacccagaagtgtctctaggcatggagctggaaaactttctcagccccaagttttctatttgggtaaggggttcacctaaaccaatccaggacagtgggtgacttagatttctggatatctgcctgagcatggagtagggaggcacccccacccctgcaccaagatctcttcacaagaggattgggcaattcaggctgctgagccagtcaagcaggtattctgaatgcctggagatctacctgggaatatagcagagaggcccctgtgccccccaccccagaatctttgcacaggaagggtggagtggctcakgctgctgatccgggcaagctggtactctgaatgcctggagatctgcctgggcatggagaagagaagggctcgctgcaccataatctatgtccagaaagggcagaatggctcatgctactgaaccagatgagggagtactctgaattcttggaaatctccctgagtatgaaagaaaaagggcctccttgcattaggatcaatacac

SEQ ID NO: 348631 - DNA, 446 bp, Homo sapiens
ctaacatgctctgttacagctgagaaaatacatcaaatttgctagtgaaccacgttattgacagagctctgggaattcaaccccatgagcctcagaagttagaaagcagagcaaagcttatgctagaaaaataaagtcctttgactatggccttgattttttaattataataccctaaaagttacaattttattcggcctwctcaccaggcatttaaaaaacaggattgctgcatcttgcttttaaagagcatgtctgcatgaaaacatagtatgcctccacctcctgtggaactatctagtaattcaaagggcatatttcatctgagttgtctagactgtcattgccattggaaaattaaaaataaaaatgttcagttcttactgtgctgcggaatgcaggaatgaggatactcagagagcccataactttaaaagtacaggcca

SEQ ID NO: 348632 - DNA, 453 bp, Homo sapiens
actagagtagccaacccataaaaaaattacaaaaatattgaacagaacaagatttcctaagaactatttggagaagataggtaccaattaccaatagattcaagacccaaattgtaggaagaaacagagggagggcaaggtattgtgttgtccccaagagtttaagaacccccaaatccccaagaggtactcataggactggaaaaaactatcatctatctatctatctatctatctctctatctatctatctatctatctatctatctatccatccacgtgtattaggctgttcctgcattgctataaataaatacctgagcctgggtaatttataaaaaaaggtttaattggtttacagttctgcaggatttmtaagaagcatggtgctggcatctgctcagtttctggtgaagtcttatggaactttcaatcatggcagaaggcaaaggg

SEQ ID NO: 348633 - DNA, 474 bp, Homo sapiens
tagatacgatttgagttgtgccaaaccatggcattttcatgggacacagatttgaaactggatgaggggtggataaggttgatatgttaggcatccatttttatggcttctattatggctgaggcaatgtggtccatcagtagacaattcytgagtcagtgattttctgtggtgggggtggaagctttcctgatcacggtagatgcagcccaggtctgtggtcagtagattcttaatttagtacttttcccacattggtaatggaagttctcacaattacagcagagataatgtgattctgaatgctaggaagttttctgggaagtccagcctatatctagctcttcacctacctcacatttggtaggcttcgatggaactctccttctgcttaaactagttatagtagtttatattgtctgcaactgacccttatctgatctgactttattcttaccttctgtgtaggaagag

SEQ ID NO: 348634 - DNA, 581 bp, Homo sapiens
cttgggggtcctaagaaagtggtagaaaagaatttgagggtgttgaaarcattttcactaggtcataaagaaaacataaattttgacacgctgtgacagcaggaagaatattccaggctctggaagaaaaccatacaataaaacaagatgaagaaaagtgcatgaaatattatgtgaatgaggagtctggcttgattgaggcatagtttgcctagatatgttgagcgagaaatgtagctagaacatattgggatgtgaaaggaaaatatcttgagcccccaaaatcactaagctaaaaggaaaattcaagctgggaactgcttaggggaaatctgccttgcattctattcaaagtcatccctctactaacagataaatgcatatctgatgcctcctttggaaaggctaatcagaaactcaaaataatgtaaccatttgtctgtcacttacctgtgacctggaagccccttccctgcttccagttgtcctgccttttggataaaaccagtgttcattttacatatgttaattgatgtctcatgtctccctagaatgtataaaaccaagctgtgttctgacca

SEQ ID NO: 348635 - DNA, 581 bp, Homo sapiens
cttgggggtcctaagaaagtggtagaaaagaatttgagggtgttgaaaacattttcactaggtcataaagaaaacataaattttgacacgctgtgacagcaggaagaatattccaggctctggaagaaaaccatacaataaaacaagatgaagaaaagtgcatgaaatattatgtgaatgaggagtctggcttgattgaggcatagtttgcctagatatgttgagcgagaaatgtagcyagaacatattgggatgtgaaaggaaaatatcttgagcccccaaaatcactaagctaaaaggaaaattcaagctgggaactgcttaggggaaatctgccttgcattctattcaaagtcatccctctactaacagataaatgcatatctgatgcctcctttggaaaggctaatcagaaactcaaaataatgtaaccatttgtctgtcacttacctgtgacctggaagccccttccctgcttccagttgtcctgccttttggataaaaccagtgttcattttacatatgttaattgatgtctcatgtctccctagaatgtataaaaccaagctgtgttctgacca

SEQ ID NO: 348636 - DNA, 594 bp, Homo sapiens
catattattgataattttcaaaagtgaataatctgaatagagttcattataagaataatgcaattgacaaacacatctggctgtttctgttgtacaaaacaaaataaattcaatccaaaaaacattttagagaaaatatctatcaacacaatgtattagcaatattttcaaagaggctatattacatccaatttataaaaatgcttatatataaccttacaaagaaaacattttcatatataacataaaaatcctgagacattagatgccacaaatacctagcacttcattagaatttactaaaaatatatcaaagttatcaagtaaatagagtcagtacatctgaagtagattctaaacattagagtattaataaaaatgcgtagataagggaagtgaatcctcaacrtaaaactaccagcctagcatatactgggttccagataaaagaagtaaagttgcaaccaagttaaagtttgaaaatataattaattatgactgataacactatactgcttttatctaacaacaagcaaagcgaccccaggactctgataaatagaaatacatcatggacagcgaaaacattaacaa

SEQ ID NO: 348637 - DNA, 576 bp, Homo sapiens
atctttctgttatgctgttgccccactcctattgcaatactccccttcttaagaaagtttttctagactaatgtctagattaaacttcttttctttgacaataatgatgccatgacttggacaaaatgcccattgcctctgggtcctgctttcttcacccagtgctgccttattggactccttgtgcctctccttggctggggaaatcagaatacacagtggtaagtcatgatttctaatccagtgctccagacgtctgtctgttgtagcacagtgagaagttgacttatatttctctcatttttgtcattttcttctgtttttccatctttcccttctgccttttttgagtgtggtgaaagcccctcattctctcctgagaatcatacctgagttgaaatcccaaagcctctagcaccagcaggtgtcccttccattatcatgagaaaccgtcaatttggctgttkttctccagaaccctcaactctggggtatgctctgtgttactatggtaataattccacccactttcttccaaaaaaaaaaatggcaatattttacaacttaaatttcaat

SEQ ID NO: 348638 - DNA, 533 bp, Homo sapiens
tccaaattgcctcattctgcgaagggcaattgaatcctgtgccaccaagatctcatccaagcaatagatgctttgttagtggtggtgggcatttggtacaaagaggcagaaaaaaaaaatgctctctctcaaaaacttttcagtgaccattgcttctttcaaagacagtcatccttccccaatctgtgacctgtgtcttctcatcacctatcccccaatctctcttttctaccatcttccatgttcccttcagctccctttaatccttggatcttcctctttcaaccctctatctcctccacctttccatccactcctgccagacctttcctctcccactctggcccctcaattccttataatcccttgagctttaagtcctgtcccttcatgggaggctctagagaagcccaggggcactaagagcaacagcctgaggctaaaaaggctcaccggaaacaggctgaatgttttatcccctcaggtgggctctggagacaccagatgaccrcttggtctctcctccatgcctc

SEQ ID NO: 348639 - DNA, 556 bp, Homo sapiens
tattttcatggcaatatggttatttgcatagattcagtaagagtctgtcctctttgttaacagggcacaaaaacattggtaatacaaccaaggctttgcctggatgtcatatttgagagtgacgcttatttaatcagatatgaccagacacttttaaggaactaaggttgaccttatagggccaatgcttacaaagctcctcttgcgaaaactggcttgaaacctggctttgcagggtttgcagctttgcaggtgagcaaggaatgtcacttcccaacaggctctggaatcttaggatatttgtgggatctcaagaagaaaggaatgcctgccaaatcgataggtactgcatgtgaaatctgatgtgagttgttggcttggcttcttatcctcaagaggctttgaaaagtccaatttgacattctttatgaaaacttccagcaaagcaaatataatatgatctatatgtaaattgctgctcttgcagcacctatgcaaataaccaggcygaatctcatgagaccaaccttaatttgtgatcaagaataatctttct

SEQ ID NO: 348640 - DNA, 550 bp, Homo sapiens
gcaaactctctcttctctagtagagatttaattgactttctctcacactatgggacaatcagtttttgtaactactaataaattgtacttgaatctgttatcttgcacaaattgtccacttttactaaattttcaaatcttccaatttccctcaatatctagccataaacccctcaactaacgttccaatttttctccttttttgttactcatagtcactgagaaaactctactatccacatgacagttaagaccctatgttgccttgtggctggcccccagtctctgaagtattactacamtctcaagtctgatgactcgttataaacatataaagacccatcattgctagcagactactgcatgggtctctttttctctggacaagccctgactggaccacaaaaaaaggatgggaaatgctcacgtgacgcatgtgctgatagaagaggtaatccacgctctgggcaacattaccaagagcatcaaaacgctcaaagagcactgctacatgatcaaaaggctcatccactaaccccctgaaatcccc

SEQ ID NO: 348641 - DNA, 523 bp, Homo sapiens
tgcaatttggttgacttgtgagtgtatgtgttgtctttttatgggaacctgagcacctgaacagggttctaccccacacttcacgggctgcctccagtgccggatacaggttgctgtgcatccccaggcctcagggaactcaccatgaattagcaactgaacagcttacagaatatcatctctgcactgtagaactaattgtgattttttcttatcataagtcttgcttccaagagttctctaacttatttagttgtcagtgacactcattatcattcaggccacaatcgtctttcaaaaaaaacccracagctttcagaggcttaaccatattatattttaaaaccagcccttaaaagcacatatttctagatgctttattattaatccaaattgtgtgcaaatgaatgccataactttcccctacgaaggacaggtgtttcgtttttttttcttttttggcattactcagaccttgaggttgacaaacctactttggggacattgggtatttgtggagaag

SEQ ID NO: 348642 - DNA, 604 bp, Homo sapiens
attttttcttatcataagtcttgcttccaagagttctctaacttatttagttgtcagtgacactcattatcattcaggccacaatcgtctttcaaaaaaaacccaacagctttcagaggcttaaccatattatattttaaaaccagcccttaaaagcacatatttctagatgctttattattaatccaaattgtgtgcaaatgaatgccataactttcccctacgaaggacaggtgtttcgtttttttttcttttttggcattactcagaccttgaggttgacaaacctactttggggacattgggtatttgtggagaaggcatagaaacatttacataaagaggcaattcaarctatgttgaacaccttttgggtgccaggaattgcccaagagactttacatagactgcattgtccagaggttttttcttctctttttttctgaaacacatatgttggagtattttgaggcattttatagcctcttgtgggagcttaaagagacaggaggaaaactcatgtcacttcgttttgcaattaattacttcttctgggaagactttgccttgtaattgtagtatttatctctatgtatttattatt

SEQ ID NO: 348643 - DNA, 537 bp, Homo sapiens
catgagaaaggtattctttttatccccacttacttcagacttaaggaggttatttgacaccagtcacaattacattaatggtgtcagatagatttgaacatagatatctggctccagagtccacgctcttaattaccatgctatacaagaaagcaacttaattttcttctcaaatccaggtgctgtttcagaatagattttcatatgtgtttttatctcgtttttctctttactctttagctcttgtttttattccatgatctgtatttatttttgtgtaattagagatgtgatttttcactgcayattacttttaaaatcccagatatgaaatctcatgtggacattaattttaatttgccattgatttttttcttagaagtaacactgaaagagaaaaattttcctctaatttttaagttttatgaccttaaatgtcacaggtagcaaaaatgccactttggcataataacaattttgagtaaaaaaattgtgaagaaatagataacccccccccaaaaaaaaaaaaaaagctct

SEQ ID NO: 348644 - DNA, 537 bp, Homo sapiens
catgagaaaggtattctttttatccccacttacttcagacttaaggaggttatttgacaccagtcacaattacattaatggtgtcagatagatttgaacatagatatctggctccagagtccacgctcttaattaccatgctatacaagaaagcaacttaattttcttctcaaatccaggtgctgtttcagaatagattttcatatgtgtttttatctcgtttttctctttactctttagctcttgtttttattccatgatctgtatttatttttgtgtaattagagatgtgatttttcactgcatattacttttaaaatcccagatatgaaatctcatgtggacattaattttaatttgccattgatttttttcttagaagtaacactgraagagaaaaattttcctctaatttttaagttttatgaccttaaatgtcacaggtagcaaaaatgccactttggcataataacaattttgagtaaaaaaattgtgaagaaatagataacccccccccaaaaaaaaaaaaaaagctct

SEQ ID NO: 348645 - DNA, 568 bp, Homo sapiens
cacgttgcacacattcttcccagcattcttgcaattggtttgggatccattagtgagagatgtttttgtagccacacgtttaacaaatttagaaaagaaaatagaataaaatagcatttaagcatatgacctcaaactagggaagcaataatatacatagtaaagatggatgatgatggatagataggtaaatcatagatagatgataaacaggtggatggatggataataaatagatgatagatagatagatagatagatagatagatagatasatacatacatacatacatacatacatacatacatagatttcaattaatgtgcattcaaaaaaagattaatcacaatattcactcagaatatttaactgtagaaaggtgatattccaaggccatcaacaggctaatgcaagtctgcaaatgtttatctctgacaagatgagtactgaaattgagagtaagtctttagaaacttttatagacatttggcaaagaaatttcatgtctgttgaatctgatgataaaaaagagctgcattttatgcccttttaataatttttgtagta

SEQ ID NO: 348646 - DNA, 581 bp, Homo sapiens
ttatcctaaacccgtttttcacattacacaataccttttacatactaaatgtcatctctatttaacttcaactatttattatgtttattgtctctagccctccattaggatataaactgcctgacagcaggatgcctttctgtttcatctgttgaattcccatcacctackacaaacatgataagtgctcaaaaagcctttgtgaatttaatggataaatttactcttacctgtgatgtgatatgagcaggttttgtctaatacatagatacagaataaagaaatattcgctactggttctgccaggatctcattctccactccagttaactgaatctctgacatgttccttgagcttgtttcaaattcttgtttcaagcatctaactcctataaaactgtcctgtttttctttgcccttcctaacttcttttcctctctgcccttcaactcagctcagatactggggcttcatgatttgtggacagttgtccctgatgcagttaacccacaggcttttcaatcatttcctctgagtagatccctgtgcacttctgttaaactcagatcccagctgtacca

SEQ ID NO: 348647 - DNA, 301 bp, Homo sapiens
gacggtaacttagacagcatggccagttgtatttcaaagaacaaagagccttttaaacctttgcgtagaaacacaatcatagggtttaagcagcaagggtttttttctttgtataataagtatacaaaggttatacaattgacaacacagtctctataaaaagcttttttagccactcyaatctcagtttcttctatgaactgtccacattatttgcccaaccatttattttttacaaaatttccttaattttttccagttaaaaaatttgagttgtcatttaattttcatgtaattttgc

SEQ ID NO: 348648 - DNA, 577 bp, Homo sapiens
gtgaatgcaaactggaatttgcacagcaaattaacaaagagaagggtactattcagacaagagtcctcagaatgctgtatggggaaatctgagtggatccttggtccgaagctgggctgtacatatatagagccaatctcttccagagctcacaggaaataccacagtgcttaccaactgtatttctgagtacaaaggaaatacattagaattcaacaactaaaaacataaaatacacaaatatttagaaattaaacaacacactyccaaatagcacataggttgaaaaagaaatcacaaaggacattaaagtatttgaaacaatcatagtaaaaacacagcaaataaaaaaattattcataactaaggcagtgctagaggaaattttacaactttataaaaataaaagactaagagtggttcatgtttccaccttcaaaggttgaaaaaagaaatgcaaagtaaacccaaagtaaatagaaggaagaaaataatcaatatgaaaaactacatcaataaaatagtatacaaacattttagaaagtaagaaagccaaaagcagaatttttaaaagaac

SEQ ID NO: 348649 - DNA, 517 bp, Homo sapiens
aaattgtacataagaatttagataaaatataaatgacaaactatgttgcagcaatttcaattacatgttcgaagacaagagagatgtgtatgggctgaagaaatcagggaaagctgcttaagaggaaattagcaatggtcctagcaggaggttcacatgtggtcagcattctgaattaatttcctattattacaraagtggaaaattttgaaatgtgaaggaaatattgggtgaagctggaatacaggcctatatttaggttgtgtttatggttttagatattgtaaatctagatattctgaaaaacacttataataactcctatgttctgaatctttgtgtctccccaaaatccatatgttgaaatttattaactaaggtgatgatattactagatgggaccttttggaaatgattgagtgagacctatgggcccatataaaagaaaccacagagagctagctactttcttccaacatgtgaggacacagcaaaaaagtgctctctataagccaga

SEQ ID NO: 348650 - DNA, 586 bp, Homo sapiens
aagagaagaggtttatttggctcacagtcctgcagactatacaagaaacatggcaccagcatctgcttggcttctggtgagacttcaggaagcttacaatcatggcagaaggcagaggggaagcaracatgtcacatagcgacagagggaacgagagagagggagaaggtgccagactcctttaaacaaacaaatcacacttaaactcacaaactgagaactcactcattacctcaccagcagcaccaacccattcatgagggatccacacccacgacccaaacatctcccccaggcccacctccaacattggaagtcacaggtcctcatgagaattggaggggacaagacgtccaaatcatatcaaaacttgacagagttttcattccctttgtaattttaatgtttaaggtgcaatttaagacagaaaatgcaggaccattgctgaaatttcacattaggcacttgtcccctctccctctgccccatacactcaacaaagtcttcatctctctgatagtagccatagataatcagagaacaatctgaagggcttatgattctggacaaatccaaggactgaagt

SEQ ID NO: 348651 - DNA, 586 bp, Homo sapiens
aagagaagaggtttatttggctcacagtcctgcagactatacaagaaacatggcaccagcatctgcttggcttctggtgagacttcaggaagcttacaatcatggcagaaggcagaggggaagcaaacatgtcacatagcgacagagggaacgagagagagggagaaggtgccagactcctttaaacaaacaaatcacacttaaactcacaractgagaactcactcattacctcaccagcagcaccaacccattcatgagggatccacacccacgacccaaacatctcccccaggcccacctccaacattggaagtcacaggtcctcatgagaattggaggggacaagacgtccaaatcatatcaaaacttgacagagttttcattccctttgtaattttaatgtttaaggtgcaatttaagacagaaaatgcaggaccattgctgaaatttcacattaggcacttgtcccctctccctctgccccatacactcaacaaagtcttcatctctctgatagtagccatagataatcagagaacaatctgaagggcttatgattctggacaaatccaaggactgaagt

SEQ ID NO: 348652 - DNA, 586 bp, Homo sapiens
aagagaagaggtttatttggctcacagtcctgcagactatacaagaaacatggcaccagcatctgcttggcttctggtgagacttcaggaagcttacaatcatggcagaaggcagaggggaagcaaacatgtcacatagcgacagagggaacgagagagagggagaaggtgccagactcctttaaacaaacaaatcacacttaaactcacaaactgagaactcactcattacctcaccagcagcaccaacccattcatgagrgatccacacccacgacccaaacatctcccccaggcccacctccaacattggaagtcacaggtcctcatgagaattggaggggacaagacgtccaaatcatatcaaaacttgacagagttttcattccctttgtaattttaatgtttaaggtgcaatttaagacagaaaatgcaggaccattgctgaaatttcacattaggcacttgtcccctctccctctgccccatacactcaacaaagtcttcatctctctgatagtagccatagataatcagagaacaatctgaagggcttatgattctggacaaatccaaggactgaagt

SEQ ID NO: 348653 - DNA, 633 bp, Homo sapiens
ggggttgaaatgctgagccacagcatgaaaaacagccaccctggagaggggcccaaacctgaagcagacattgcacaagtaagaattaagacactgacattaccataataaactcccaaatatattacagttagcttcgtttggtattcggttttcagaagcagttaacaagatttatctaatattattaataaagggcttcatgatcaagytaaattaagggaaaacatctgggtgatgtctggaaacactaatacattattctcccaagcatgagaataaatgcataagaaactcacacagtgaacactggtcatctgaattctgtaatgaaatgcaaactccctctctgattgcaaaatttagattgtagtaccccattcttgccaaggatgccatctggcttggtgaattaattcttgggtgagaaactcatggaatttccaagataaacttcttggaaacgtttggcaatcaggaagtatccttggccaaaactcagggctctgagaaactgctctaacaagcaatgtaactttcaatgtcagtgcaatggattagctctgtggcttggtcaaaccacttttcacttctctgggctttaatgtcccagatgaaagtgttggattaatg

SEQ ID NO: 348654 - DNA, 556 bp, Homo sapiens
acaggtgcagaatgccttaggagacaataggctgactgggaactataagggaagatattgcaaagtggaggtagaaggggtaaagaagggtacaggaaatacaaatgagatgaggttaaaatctgtcatggagaaaatgaaagccaattttaaagtacaatatatcagatcagaaatgtgagggataaaattatttgctttccagaaatgtgcggaaaaagacaaatagatgaaaacaaagtacattagactttggagrttgagcttgatagatgttctgaatcattaataattgaaggaaataatgtatacattggtccatttccaaggcaaagtgccttgagttggtttaggtcagcaagctacagaaaaaataggatatactaggtccctgcttggatagccgacgcctgcttggatagccgacgcctgcttgtcagctctcctcccctcctgcttagttgcccttacccgaaccaaagaaatttagtctaagataaaagtttactagcctgcaaaatagcttgctttgtctgtgcttatcagcctacccagc

SEQ ID NO: 348655 - DNA, 618 bp, Homo sapiens
tatgttcttctcctttgttactggatcaccctcactcrtgatgctgaagcccctggtttcaagtaaagcaataatcctgtgaaacagtgattttatggaataaaaaaatgtagtctagttggagacaattactatgcatttgctcattgtcaagttcttgagggaatttcagtttcaagttaaaaccaaggtaggaaactttgatctgtggatatgggcccccctgagacagggctgtagtggccatgtaaggagtgccagagatcagggtatagttatggcaaaggtggcaacttcctacttttcccaaaatgtctcacctatttagtcatagctatctttcactcaggaaacccattcaggtttatgctcagatttcactttcaccaaaaattgctgggacttaggcaaagcaaaaatagtagctcccatttgactgatgagaaaaatgatgtcaaaagaattttaaaggcttcctaaaggaataaaaatttgcaactgtgacccaaatccagaagttttggccagaaatgtattgtggtttttatgttatgcaaaagggaataatgataaaagaaggctttaaattgaatttaattaaaaattatataaatttga

SEQ ID NO: 348656 - DNA, 540 bp, Homo sapiens
gagaaagaaaatgagatgacagagagagagatagaagaagaaaataagcgagagagggactggggcagacggagatcaaagagagacacagaaggtgagwttgaaaagaaagataacgtaagaggaagaaaaagtaaagtacaagaagaagcgagggagagagagagagaccataaaagacgggagacaaagagacaaaagcgcaagtaagcagtagctgccacggccctgctggtagaggagagtcggaagctgaccttcggcagggccctggtagtaagcaccccacaatgggtcaggaatatattaaatcaaagagctgggagatggctgactgattcccggagtttaaaacatgaagccatattactagaaaaagataatttggttttaacaacagatacttgcttgaatccagccagtttcttatggacaggagaggagaatgaggaggcatcagaccataactatttagatatcatagaatgtcaaaccaaaggtagaccagaccttagaggaactccactatattatgggata

SEQ ID NO: 348657 - DNA, 618 bp, Homo sapiens
tatgttcttctcctttgttactggatcaccctcactcgtgatgctgaagcccctggtttcaagtaaagcaataatcctgtgaaacagtgattttatggaataaaaaaatgtagtctagttggagacaattactatgcatttgctcattgtcaagttcttgagggaatttcagtttcaagttaaaaccaaggtaggaaactttgatctgtggatatgggcccccctgagacagggctgtagtggccatgtaaggagtgccagagakcagggtatagttatggcaaaggtggcaacttcctacttttcccaaaatgtctcacctatttagtcatagctatctttcactcaggaaacccattcaggtttatgctcagatttcactttcaccaaaaattgctgggacttaggcaaagcaaaaatagtagctcccatttgactgatgagaaaaatgatgtcaaaagaattttaaaggcttcctaaaggaataaaaatttgcaactgtgacccaaatccagaagttttggccagaaatgtattgtggtttttatgttatgcaaaagggaataatgataaaagaaggctttaaattgaatttaattaaaaattatataaatttga

SEQ ID NO: 348658 - DNA, 602 bp, Homo sapiens
tcttggtgatcattctggtgggccaaacttccctatcccccctcatgcacatcttaaagactatttgaaaataaaatgtttattgtgttactgaatttttatgggaatgagtgctcattcagcttccagacactcctaaggcaaaagyactacctgttaagtgtggttaagggggcaactgaaacctgggatgcatatatttcggaatagcacaaggacaaccaaaagagggatagatcttaggagaagcaatggaagaaagtatctcaagaagatgcttcatttgccacaaagaactggatgtaagaacactggcaaaagtagaggaaaacaggatatttttggcagtgtcactcatgtgggcaaagaaatcaagcgtagggagggtataaggctaaccaattatctctagacatgagatatttgtagaatattagacgtaagacagaaagaaaattattgaaaagcacgaaggcaaatttacgaagtttctatttaaaaatacaattggaaagcaattgttaattgtgggcatttattgtaaagcagtggtggtattgataggaataataaaacattaagggaaaatgatgacatataac

SEQ ID NO: 348659 - DNA, 602 bp, Homo sapiens
tcttggtgatcattctggtgggccaaacttccctatcccccctcatgcacatcttaaagactatttgaaaataaaatgtttattgtgttactgaatttttatgggaatgagtgctcattcagcttccagacactcctaaggcaaaagtactacctgttaagtgtggttaagggggcaactgaaacctgggatgcatatatttcggaatagcacaaggacaaccaaaagagggatagatcttaggagaagcaayggaagaaagtatctcaagaagatgcttcatttgccacaaagaactggatgtaagaacactggcaaaagtagaggaaaacaggatatttttggcagtgtcactcatgtgggcaaagaaatcaagcgtagggagggtataaggctaaccaattatctctagacatgagatatttgtagaatattagacgtaagacagaaagaaaattattgaaaagcacgaaggcaaatttacgaagtttctatttaaaaatacaattggaaagcaattgttaattgtgggcatttattgtaaagcagtggtggtattgataggaataataaaacattaagggaaaatgatgacatataac

SEQ ID NO: 348660 - DNA, 562 bp, Homo sapiens
atctcaaaaacaatgataagagaaagaagttgccatggtttaaatgtgtcccccaaagttcatgtgttggaaacttaatcctcaatgcagcagcgttgagaggagagacctataagagatgattaggtcatgagagccatgccctcatgagtggattaatgccgttatttgaagagtggttagtttycttgggagtaggtttctgataaaaggatgagtttggcccccttcccctcttccacattctcggtttgcttgcccttctgtcttccttcaaaggatgatgccacaatgaggcacttgcaagcctcatgaccttggacttcctagcctctagaataccaagaaataaatctctattctttatagattacttagtttaatgtattctgttatagcaacacacaatgaactaagacaaaagccatacatgaaagagtgcatactatatggtttgatttatatgaatttcaagaaaagacaaaactaatggaaattagaagagatgttgactaaagtggagattgactgataagggccatgaaggaccacttttgtgtga

SEQ ID NO: 348661 - DNA, 577 bp, Homo sapiens
ttcattaattattaatcatctaaatattagaaagactataacagaaattgggatactcagtagaaattgaatacttcttgccctattgtaaatatcacacacttgtaccagaggacaaagaaacaatgacagttttattgcatgtgtaagatgtgatcatcaccctaaagagaaagccatcaaagttttgatgcagtggatatccatcaagattgcgatcctccttttgttctttaaatgttaccggatacctttccaaggtagcaacwcttcagtaatagtgtttcccagtggtattggatagtcttagaaatgctttaaaacacagctaagtaatcacctcctccatggtatcttctcacaaaattctgggcaactttaattgatcccactcctgtatgtttattgtgcaggacatgtagtattattttagccttcttcatactatacagagaatttgtatttgtatgaacaatacttgtgtcagtacacaagtaaatttttctatttcatgaaaatttttgatttggcaatccattcctccttttcagttattctagaaatgttcagaaaatta

SEQ ID NO: 348662 - DNA, 599 bp, Homo sapiens
aggaattagtgaggaaacccattgtcctttcatgaatttctgtggaggagaggactgcttcttttctcccgataagctaaggagtkgtttagaataaacaccttggctcactttctgtatctttcttacttttcccctaggataaggagtcatgaatttgaatagtgagaactcctcttccagtgggccacagttttctagggagagcactactaacaatagaaatgcctttctgtcttgacctcttggactgaatgtgctcagatgcagcaggcatgcctgccctctagtcctctcctttgcttctgatcctcaagcattaaatccacttcggtggaggtggtggctgccaatctctggcttcttaaatgtgcctagatagataagtcaaacagagccagctatctttaatacagggcatagtggcttgagtagcgatcctcaaaatgtatgttcaggtgctaacctccagaacctgtgaaagtgatcttatttggaaaaggagttgtgttaggctattcttgcattgttataaaggaacacctgaagctggataacataaagaaaaggagtttaattggctcatggtcctggcagac

SEQ ID NO: 348663 - DNA, 619 bp, Homo sapiens
tatttattcccaagatacaatggtggcacaggcattgggtataaattaccattccaaaagggagaattggccaaaagaaaaaggctacaggccccatatcagtctgaaacccagcagagcagtcattacagcttaaacccccaaagaatctcctttaattccatattctgcatctatggcacactggtgcaaagggtgggctcccaaggccacacacagctctacccatgtggctttgcagggtgcagcccccatggcygctctcatgagttagagttggttgcctgcagcttttccaggctcaagacgcaggctgccatgaaacaactattctcaggtttggagggcggtagccctcttcccacagctccactaggcagtgccctgatggagactctgtgtgtgggctccaactccacatttgtcttcagcactgccctagcagaggttttctgtggaggctccactcttgtagcagatttctgcctgggcgcctgggctcctgggcttttccacgaatcttctgaaatctagggggaagctgccaagtctcctttatgattgcattctgtatgcccacaggcttaacaccatgtggaaactgctagggttcatggtg

SEQ ID NO: 348664 - DNA, 619 bp, Homo sapiens
tatttattcccaagatacaatggtggcacaggcattgggtataaattaccattccaaaagggagaattggccaaaagaaaaaggctacaggccccatatcagtctgaaacccagcagagcagtcattacagcttaaacccccaaagaatctcctttaattccatattctgcatctatggcacactggtgcaaagggtgggctcccaaggccacacacagctctacccatgtggctttgcagggtgcagcccccatggctgctctcatgagttagagttggttgcctgcagcttttccaggctcaagacgcaggctgccatgaaacaactattctcaggtttggagggcggtagccctcttcccacagctccactaggcagtgccctgatggagactctgtgtgtgggctccaactccacatttgtcttcagcactgccctagcagaggttttctgtggaggctccactcttgtagcagatttctgcctgggcgcctgggctcctgggcttttccacgaatcttctgaaatctagggggaagctgccaagtctcctttatgattgcattmtgtatgcccacaggcttaacaccatgtggaaactgctagggttcatggtg

SEQ ID NO: 348665 - DNA, 642 bp, Homo sapiens
gggccccagtgaaatgcagtctgccctgacctctgttgtcctgttgcatggcttaaaatccagttgccaagtcacaatggcagctcagattccggcctcctggcttctccttgtcagaatctgctcatgtaatgaagtgcagcctctgctttccgggcagtttccagtatcttctccatctcacttacrtttacttcactgacttttgacagattactttctacaggaaaccacagttggaaactggaatctgatgagactctgaagaactctctttggtaatgaaagagaggccaacaacaaacaaacaagctcttgaagtagagcaattaggggcaatgttcttggttatggattctccctgccatgtcatctcttttgttctgctcatcttgtcttcgtcccaagaagttgctgagcagcaaagagcagcacaaggaaggtcacactagagaacttgaagaataggcaacccagcttactgggctcttagtacatggaaggtggcttcagagctatgtttaaaaattggtattgtctcagatgacccaaattctccttgaggtgttctggaaagactatgggctttcagctttaccaattagtaggtggaaagttacattatgtctctgcttacaagca

SEQ ID NO: 348666 - DNA, 642 bp, Homo sapiens
gggccccagtgaaatgcagtctgccctgacctctgttgtcctgttgcatggcttaaaatccagttgccaagtcacaatggcagctcagattccggcctcctggcttctccttgtcagaatctgctcatgtaatgaagtgcagcctctgctttccgggcagtttccagtatcttctccatctcacttacatttacttcactgacttttgacagattactttctacaggaaaccacagttggaaactggaatctgatgagrctctgaagaactctctttggtaatgaaagagaggccaacaacaaacaaacaagctcttgaagtagagcaattaggggcaatgttcttggttatggattctccctgccatgtcatctcttttgttctgctcatcttgtcttcgtcccaagaagttgctgagcagcaaagagcagcacaaggaaggtcacactagagaacttgaagaataggcaacccagcttactgggctcttagtacatggaaggtggcttcagagctatgtttaaaaattggtattgtctcagatgacccaaattctccttgaggtgttctggaaagactatgggctttcagctttaccaattagtaggtggaaagttacattatgtctctgcttacaagca

SEQ ID NO: 348667 - DNA, 579 bp, Homo sapiens
gtccttattgggttctggaaataggagttggactgaacaatttcaaaggctcttccaattttccaacttctagaattcatattagaaattcatagaggttaaatcttaytacatcaaagccacagagatggaataggaccatctttatggctgaggaattaaagactagagaaattaaatgactttctcaagttagttgtcagctttatcaggatgagaacccagatgcctcagtatgtagttcgctgtatttccaatgggacctctgcttttccttaattttctcactgccataattagcatggatgggtaaccaaggagaccactgcaatgcaaccaggctcctccttgagaaatggttctctttttgacttattcttcctgttctcacttaggtgcctatcaccattctaatcctttctcttctgtgtccaccacaactctaattcattctagataattttggtttctatcccatcaccctggaagccttttcctacatttttctcagctctgtacatattacttctgatgaagcttgattttcttgccatgcacataagaaaaggctcatctgcc

SEQ ID NO: 348668 - DNA, 579 bp, Homo sapiens
gtccttattgggttctggaaataggagttggactgaacaatttcaaaggctcttccaattttccaacttctagaattcatattagaaattcatagaggttaaatcttattacatcaaagccacagagatggaataggaccatctttatggctgaggaattaaagactagagaaattaaatgactttctcaagttagttgtcagctttatcaggatgagaacccagatgcctcagtatgtagttcgctgtatttccaatgggacctctgcttttccttaatttyctcactgccataattagcatggatgggtaaccaaggagaccactgcaatgcaaccaggctcctccttgagaaatggttctctttttgacttattcttcctgttctcacttaggtgcctatcaccattctaatcctttctcttctgtgtccaccacaactctaattcattctagataattttggtttctatcccatcaccctggaagccttttcctacatttttctcagctctgtacatattacttctgatgaagcttgattttcttgccatgcacataagaaaaggctcatctgcc

SEQ ID NO: 348669 - DNA, 649 bp, Homo sapiens
taatttacatttattgaaatgttctaggcacaggattaagtaataaaaatcttacgatctcaaaattccatgttccttttattgtccttattgggttctggaaataggagttggactgaacaatttcaaaggctcttccaattttccaacttctagaattcatattagaaattcatagaggttaaatcttattacatcaaagccacagagatggaataggaccatctttatggctgaggaattaaagactagagaaattaaatgactttctcaagttagttgtcagctttatcaggatgagaacccagatgcctcagtatgtagttcgctgtatttccaatgggacctctgcttttccttaattttctcactgccataattagcatggatgggtaaccaaggagaccactgcaatgcaaccaggctcctccttgagaaatggttctctttttgacttrttcttcctgttctcacttaggtgcctatcaccattctaatcctttctcttctgtgtccaccacaactctaattcattctagataattttggtttctatcccatcaccctggaagccttttcctacatttttctcagctctgtacatattacttctgatgaagcttgattttcttgccatgcacataagaaa

SEQ ID NO: 348670 - DNA, 539 bp, Homo sapiens
ttcttacacagtgtttacgaggaattacttcttatggctcagtaacaactctaaaagacatattttggtacctaatactttcatttctagaatttgctctcatatcattgcagagccatactcaacacacatatgttatacaaacaaaaattgtcaacctgcagttacccttcgtgttgccctaagtttgaggcctataaaaatcagagacatccagctgccaaagaacacaaaaactgaaaggcacttcctatctcaattgtgtgttgaggcaaatgctgtccaaattgtgtgtaactaagctttattccyggaaaggacatttgtccacaatttagagcggaatttggactattgtgcaacaatgggaatatttcatttgagaaaattatggatgggttaatatgtggaaaattattttattataaaaatctggtgtttctatcaggcaaaatttgtatttttgacgtttcttgcttgcatgtttgcctttctgatttgagtttaaaacgcaataaaaacaaaagacaaaacaagga

SEQ ID NO: 348671 - DNA, 539 bp, Homo sapiens
ttcttacacagtgtttacgaggaattacttcttatggctcagtaacaactctaaaagacatattttggtacctaatactttcatttctagaatttgctctcatatcattgcagagccatactcaacacacatatgttatacaaacaaaaattgtcaacctgcagttacccttcgtgttgccctaagtttgaggcctataaaaatcagagacatccagctgccaaagaacacaaaaactgaaaggcacttcctatctcaattgtgtgttgaggcaaatgctgtccaaattgtgtgtaactaagctttattcccggaaaggacatttgtccacaatttagagcggaatttggactattgtgcaacaatgggaatatttcatttgagaaaattatggatgggttaatatgtggaaaattattttattataaaaatctggtgtttctatcagscaaaatttgtatttttgacgtttcttgcttgcatgtttgcctttctgatttgagtttaaaacgcaataaaaacaaaagacaaaacaagga

SEQ ID NO: 348672 - DNA, 588 bp, Homo sapiens
cttgtctgagcatcaaaatcatgatccattggttagttaggttcacctaaattcaagagttgcagtttttacaattcttaaatattaggtctttggaaataaataacttagacamgttaagaaaattttatatatactggatttaaaaaatatggcatttgatgaaaaattctatgtacctaattgcaattagaatagcagaagcatggtgttaatcaccaatgcttctttatactaaggaactattgaacttcttagaaacagactttcagtactaatctggctacctttgtttcatgctgactatctccatatagtttcagtcttctattagggccatatctctagatattggtatagaatacattagagaagactaatttgtgttcagttttatatacacaactttctatcttgctcatgatcacgtctctggtgcctcatattggtttctgtctcagtgtacatacacatgccaggcatcacattaatttgccaaaaggctaccacttctctttttctagtaggaaaaacctatgatatttctgtatatttcttgctatcctttatttcagggtgttgagctca

SEQ ID NO: 348673 - DNA, 541 bp, Homo sapiens
attcaaaggtggattacaaggtgtcctcagcatgccctatggcctatgtgcgaagcaagaagaattgactgatttacaggacttctctttatgtcaatcttaagaggatggatgaatctggacatttgttccacccgacctctgactgatggtttggaaaataactttaattaggatcatatgaccattgaaaaaggaaaaatgtagactctgacttccgtcccactgaaggattaatgaaaacctttactagcatttagagcttttcagaacatccccactgtcatgtgtctcagcagtggagactgcaagtaaggcttttaattttaggaggtttttttttttttttttttcccctaaatggtatggccaaaagtcagagttaaaatatatatagttagattccaacttcctccttcactctaaaaataraatccaaacccactcttcatatatgcttccaaaatggggcttaagtaccaatctctgctttgcaatgggcacaatcttggtcatgtcctgaggctctctaaaaaaagag

SEQ ID NO: 348674 - DNA, 541 bp, Homo sapiens
attcaaaggtggattacaaggtgtcctcagcatgccctatggcctatgtgcgaagcaagaagaattgactgatttacaggacttctctttatgtcaatcttaagaggatggatgaatctggacatttgttccacccgacctctgactgatggtttggaaaataactttaattaggatcatatgaccattgaaaaaggaaaaatgtagactctgacttccgtcccactgaaggattaatgaaaacctttactagcatttagagcttttcagaacatccccactgtcatgtgtctcagcagtggagactgcaagtaaggcttttaattttaggaggtttttttttttttttttttcccctaaatggtatggccaaaagtcagagttaaaatatatatagttagattccaacttcctccttcactctaaaaataaaatccaaacccactcttcatatatgcttccaraatggggcttaagtaccaatctctgctttgcaatgggcacaatcttggtcatgtcctgaggctctctaaaaaaagag

SEQ ID NO: 348675 - DNA, 644 bp, Homo sapiens
ctccctggcaaggagaatatgcgggacatgatgctaagagtcctgggtaaatgtggtgagaatgcacgcgtgcatatgctacacatatgtgcttctcagttgcagaaaatgaactgctttgggagattatcagtagaaagrgtgttatcatattggtgctgagtgctatgtgtgcttatacaatttgttcttgtattttaataaactttgaataaaagaataaagctactctttggttctatttgtttattttaacatttctccctagaacttgccccaggctgggacatattcatggctgacaagggaaagagaatccatcattctaatatttattccttggtatttgtgggcaaagtagccagcaatgccagattattttaatctcatgctgtgtgccagggtcttcaaggaaatcaagacaagtaaaaagaaaatcttcagatactttccatatttatgaacaagttacacacagaattcatagaaaggggcctgtttaagagactgtggagccaacttttacttcgttagatttacatctcaggctttctaagtgcaattaatatactttccaagaaattggttaaaatgacacacacacacacacacacacatatacacacatgtactatatacacaca

SEQ ID NO: 348676 - DNA, 644 bp, Homo sapiens
ctccctggcaaggagaatatgcgggacatgatgctaagagtcctgggtaaatgtggtgagaatgcacgcgtgcatatgctacacatatgtgcttctcagttgcagaaaatgaactgctttgggagattatcagtagaaagggtgttatcatattggtgctgagtgctatgtgtgcttatacaatttgttcttgtattttaataaactttgaataaaagaataaagctactctttggttctatttgtttattttaacatttctccctagaacttgccccaggctgggacatattcatggctgacaagggaaagagaatccatcattctaatatttattccttggtatttgtgggcaaagtagccagcaatgccagattattttaatctcatgctgtgtgccagggtcttcaaggaaatcaagacaagtaaaaagaaaatcttcagatactttccatatttatgaacaagttacacacagaattcatagaaaggggcctgtttaagagactgtggagccaacttttacttcgttagatttacatctcaggctttctaagtgcaattaatatactttccaagaaattggttaaaatgacacacacacacacacacacacayatacacacatgtactatatacacaca

SEQ ID NO: 348677 - DNA, 601 bp, Homo sapiens
tacttaagctatttcaggctggcatatagtccttatattaaataataataatagcagtaatgatgaatttatactaatacaatattagaaaacaaaatttaatgtaaatactacaaatattggcataygtaatatactagaatctaaaactatataacagatgcaataatataaatatgtcatacctatcaatattgatttatatgagataattaaaatcattgctatgataaatagtatcatagtcttacagtattaatattataaaataatattattatgcttttatttacttatatgattaattccaggaacaatgccttttatgtcatttttagttccattgtgatacctggcaaaataagagatatatatctcctattggctttgtctttctggagaacattgactaatactggaccagcctgaaaacatcattaaatattaggaagttctctgttgccacacatctaagccatttcttccagttcagtgttgagtaataaagctaaatttttcatctctaggattatctttcaattctttgttttatctcttaagtggttcctaacccacctgataaagagagttgctcttcatt

SEQ ID NO: 348678 - DNA, 559 bp, Homo sapiens
ctgatactgatcttaaatgtttggtcttcagaactgtgagagagtacatttctgttgttcaagccaccaagtttgtggtcatttatcatggcagtcacaagaaacggatccagtcttcataattgatgattattttatctacttatttgtttacttatgttttccctttttggtttgtaaacaatgtaagagcagggactacatctgtgactagtgctcaccattatatggccagtactctgctgtttgtaagagatcaataaatattttgaargaatggattaatttctctttttcaataaggtgctgctgtttaaaagactagacaagataacctgtacattatgtataagcatgttcacaatatgtattaaatgtagcatgtgaagcagtgtgctaaacattacaaatgcattaaaggcctttaatttgctcttgtgtctaaaggctgagatctttagtaacgttcaataaagcaggcaacttttcttcctaccttatctccttccagcccaaatcaaatccatcatgacttcttcgtccccaatctgtgaattct

SEQ ID NO: 348679 - DNA, 559 bp, Homo sapiens
ctgatactgatcttaaatgtttggtcttcagaactgtgagagagtacatttctgttgttcaagccaccaagtttgtggtcatttatcatggcagtcacaagaaacggatccagtcttcataattgatgattattttatctacttatttgtttacttatgttttccctttttggtttgtaaacaatgtaagagcagggactacatctgtgactagtgctcaccattatatggccagtactctgctgtttgtaagagatcaataaatattttgaaggaatggattaatttctctttttcaataaggtgctgctgtttaaaagactagacaagataacctgtacattatgtataagcatgttcacaatatgtattaaatgtagcatgtgaagcagtgtgctaaacattacaaatgcattaaaggcctttaatttgctcttgtgtctaaagkctgagatctttagtaacgttcaataaagcaggcaacttttcttcctaccttatctccttccagcccaaatcaaatccatcatgacttcttcgtccccaatctgtgaattct

SEQ ID NO: 348680 - DNA, 606 bp, Homo sapiens
ccaaagctcaaagcagatacataagcccatctgttttggaagaggcaagagatctttgcacactttacttagcagcaataggtgatggtctccgactgttgatatcatctgatgtccttgattaggaaacattgttggactctggtgtggtatgggtagggcacattgagtgccatttaaggaattatcctgaagctctatcacaattatcatgaaagatgaagcatacattagcaccaaagccaaagagacactttccagcagaatggaacagcacatcaaggaagacacaggtatcactgcacatgkattcagatggaattctatatcttgatggaattctctatcttcatggaattctgtactcgatgcttgtttggagttctcagcaatcagatagattgtttctgtcctggccagtgttcccaacctttcaatttcagggatagcagctgcctaacattgtagaactaaaggatcctcttcagcaggacaatttgaaaaaacacttgagccattttgtttgtggccttagttgctggactgaaaaggtcctcagttgcaagaagagacaaatggccttgttgcctggtgtgattacgtttt

SEQ ID NO: 348681 - DNA, 606 bp, Homo sapiens
aagttgcacaaaggttctttyagttacaagtgatacaaacccaagttaaaaactagctcaagttcatacttgaatgaacttgaaatgaatttgtaccaatagccagggagtaaatcaagatacttcaaggaatgagagaaaatgcttcataaatgagtgcttcagaatctggaattggaacctgggattacaatgctgtcaggtctttcttactgtccatccatctcatccccacctgactctgcttctctttgtatatcagttaaattacttcctactacagagaagccttcttcatgtggcagtgaatatagctcctatcagcttcagcttagcacaggaaaagtctttcccttttcccaatgaccttgtatcaatctatggaaacagtctggcttctcctgcttcaattaaatgccaactattataattaaggtgcacaaagtccattagtaagaggggaaatctaattgggcagggaaaaaatgcaatttcagtctatttcaaaggctaagaatcaatttctttactgtcatcatttgctgagtatccccttcatcctaggcattcgactaaggactgtcaacgcagataaaatctgtaatt

SEQ ID NO: 348682 - DNA, 606 bp, Homo sapiens
aagttgcacaaaggttcttttagttacaagtgatacaaacccaagttaaaaactagctcaagttcatacttgaatgaacttgaaatgaatttgtaccaatagccagggagtaaatcaagatacttcaaggaatgagagaaaatgcttcataaatgagtgcttcagaatctggaattggaacctgggattacaatgctgtcaggtctttcttactgtccatccrtctcatccccacctgactctgcttctctttgtatatcagttaaattacttcctactacagagaagccttcttcatgtggcagtgaatatagctcctatcagcttcagcttagcacaggaaaagtctttcccttttcccaatgaccttgtatcaatctatggaaacagtctggcttctcctgcttcaattaaatgccaactattataattaaggtgcacaaagtccattagtaagaggggaaatctaattgggcagggaaaaaatgcaatttcagtctatttcaaaggctaagaatcaatttctttactgtcatcatttgctgagtatccccttcatcctaggcattcgactaaggactgtcaacgcagataaaatctgtaatt

SEQ ID NO: 348683 - DNA, 606 bp, Homo sapiens
aagttgcacaaaggttcttttagttacaagtgatacaaacccaagttaaaaactagctcaagttcatacttgaatgaacttgaaatgaatttgtaccaatagccagggagtaaatcaagatacttcaaggaatgagagaaaatgcttcataaatgagtgcttcagaatctggaattggaacctgggattacaatgctgtcaggtctttcttactgtccatccatctcatccccacctgactctgcttctctttgtatatcagttaaattacttcctactacagagaagccttcttcatgtggcagtgaatatagctcctatcagcttcagcttagcacaggaaaagtctttcccttttcccaatgaccttgtatcaatctatggaaacagtctggcttctcctgcttcaattaaatgccaactattataattaaggtgcacaaagtccattagtaagaggggaaatctaattgggcagggaaaaaatgcaatttcagtctatttcaaagrctaagaatcaatttctttactgtcatcatttgctgagtatccccttcatcctaggcattcgactaaggactgtcaacgcagataaaatctgtaatt

SEQ ID NO: 348684 - DNA, 543 bp, Homo sapiens
gattgggctctttgtttcttgttatttagttaagttctttccattttagatattagctccttattagatgtgtgatttgcaaatattttctctcaatttctacattgtttttccaatctgttaattgtttcctttgctgtagagaagatttttagtttaatgcaatcccatttgtctatttttgcttttgttgcctgtgcctttggggtcatattcaagaaatttctgcaaagaccactgtcatggagcctgcaattcagcacgcggccttctagtgccatattgcctagattttaaatatttccttcattctacaagtaagtaygctaaaataaataagctaacatctctgtctatttttcctcaaatgcaacatcagggtaatactagtgtctacctccttggattattctaaattggatttatgcattattatatattatgtattaatacatactgttataattaatataaatgaagtgcttagagtagtgtctaacacaaaagagctgttatttttcacttggatatagttggcttttc

SEQ ID NO: 348685 - DNA, 572 bp, Homo sapiens
ctcctttaatctctacctcttcaaggacagagtacctgttcttcataggaggcaaaatgttaggtcattcttctatcctttatttcatttgtccttttttgaactttatctgaaatttcttgatgtttttggaaggtagatctcacaatttatacttttaccacatttttgcatgaccttgacctattggaatctggtgatggggaagttgtatacctctgtgaatgccaccrttcttttaaaaccttgctttccaatcttttatctcttccataattttccatcaatatctttactatatgccctatgatttctgggaaatatgcattttctcaagctgtgttttgctccaggaaatcattcctagtatttcttctcaacctggctcttcctatggaaataaccaaaactcaagcaattttcaactagagggttaacaaaagtgttcatgaatgaagtaatacagaactctctccatgtgtgctctcatgctgttggttcgtgtatattaaagtctaccatgactgatagccctatatggttatattttatttccccaattacagaattta

SEQ ID NO: 348686 - DNA, 572 bp, Homo sapiens
ctcctttaatctctacctcttcaaggacagagtacctgttcttcataggaggcaaaatgttaggtcattcttctatcctttatttcatttgtccttttttgaactttatctgaaatttcttgatgtttttggaaggtagatctcacaatttatacttttaccacatttttgcatgaccttgacctattggaatctggtgatggggaagttgtatacctctgtgaatgccaccattcttttaaaaccttgctttccaatcttttatctcttccataattttccatcaatatctttactatatgccctatgatttctgggaaatatgcattttctcaagctgtgttttgctccaggaaatcattcctrgtatttcttctcaacctggctcttcctatggaaataaccaaaactcaagcaattttcaactagagggttaacaaaagtgttcatgaatgaagtaatacagaactctctccatgtgtgctctcatgctgttggttcgtgtatattaaagtctaccatgactgatagccctatatggttatattttatttccccaattacagaattta

SEQ ID NO: 348687 - DNA, 600 bp, Homo sapiens
taacataattaatgttagccataatttttctcagagtgtcctggaaattcaaccaaaaacagaaactcaatgagttacacaattctcagtatctctaagaagaaatatactaatttttcatgggaagaaaaatttatctgcacctagcggtaaaaaaaatgtatcaactgcgtttaaatattgaaccctgtcgtcaccaatggatttttttatgttttctttattgcaaccacagaagataarcaaatcacagaagctgcccaatcggtagacccatcgcagtctctttggtgtacttcatgacacatgaatcgctcacccacagagagccaaagcaaacttgattttcaatattttccctgctgctagtcctaaaaccctggaggaaccaggatcatcagaaaggaatgtttctgatgtgtctatacagagatggttcagctgctttgatttaattaacaaccagtcgattcaatcaattaacaatttcattccatgaaaaacattccaccaaaatttagtaatatgaaaatgaagtaactcactaatatcccagatttttatctattcatatggctatgtagaccatgcagagaaaca

SEQ ID NO: 348688 - DNA, 569 bp, Homo sapiens
atgcactgtttaaatgttttaatagctttttcaaattactgggttgagtataatggaaattttattaccttaccttcccatgaagctattcaagtgatgtgtcatcagaagagtgaaaaggatgcatatagaatcttgttcaccatcctctgaattcatcatagcatctacaatgagctagaagaaggactgactgtaaaagaaaggagagaaaaaatttagttaactgggaaaatttgaatttgaaccttgtactgaggggcttgtgaatatgtttgataagttattrttgatcttatttatcagtatttaggaggtaggcactgagttgtcaaacagagcatagtatgaggatagctgctgaaagaaaaccaagccaaggttcctcatcccaatctgccatatgttgtctgagtggccttggcaatctgtataaactctcgggagagatgaaaggtcaacatgatgcaaatctagtaaagtcaaacattgaatcttaaagataaacgattaagttctccgaagtgtaatctgacctgagtgtctttgcagttgttacaaggaataga

SEQ ID NO: 348689 - DNA, 541 bp, Homo sapiens
ggccttggcaatctgtataaactctcgggagagatgaaaggtcaacatgatgcaaatctagtaaagtcaaacattgaatcttaaagataaacgattaagttctccgaagtgtaatctgacctgagtgtctttgcagttgttacaaggaatagagacctaactagcttatgcaaaatatttacactataagaaagcaaagaagatttcactgacagctgagagaagacaaagaagagaagagccacacaaggacaagaatgtgaactggaattccaggagtagggcaacctttttgtttctcttgggcaccatgggcatgtgcatctttgcctctcctatctcttttgtatcttgattggcctcctttggtcacatatggycccatatggcattttagacaatgcaccatcactactctctagtgcaatctgatctaatccatggcctgcgagccgcatgcagcccaggatggctttgaatgaagcccaacacaaattcgtaaactttcttgaaagatttttttttttggcaattttttttt

SEQ ID NO: 348690 - DNA, 566 bp, Homo sapiens
gccccatatggcattttagacaatgcaccatcactactctctagtgcaatctgatctaatccatggcctgcgagccgcatgcagcccaggatggctttgaatgaagcccaacacaaattcgtaaactttcttgaaakatttttttttttggcaatttttttttggctcattgctatcgttagtgttagtatattttatgtgtggcccaagacaattctttttattccaacatggcccacggaagccaaaagattggacacccctgctctaatgcctggaaacattggttcatgtacctcccctttgatccaatcagctatagtcattatatacagggtcacacaataaaagaaggaagaagggctctgtgcagaggcagaggtacaaaagtcacctaagtggttaaatctaccctttgagagccattctggtcctatgagtggtgccgaggatgtggaaaaaagcatggttaaagaggagcatgaagacggtggtcttcttcatttaagaaccacaccaataaagcagaaaaccagggaatgccaaagtgtgatgcatctcctccc

SEQ ID NO: 348691 - DNA, 566 bp, Homo sapiens
gccccatatggcattttagacaatgcaccatcactactctctagtgcaatctgatctaatccatggcctgcgagccgcatgcagcccaggatggctttgaatgaagcccaacacaaattcgtaaactttcttgaaagatttttttttttggcaatttttttttggctcattgctatcgttagtgttagtatattttatgtgtggcccaagacaattctttttattccaacatggcccacggaagccaaaagattggacacccctgctctaatgcctggaaacattggttcatgtacctcccctttgatccaatcagctatagtcattatatacagggtcacacaataaaagaaggaagaagggctctgtgcagaggcagaggtacaaaagtcacctaagtggttaaatctaccctttgagagccattctggtcctatgagtggtgccgaggatgtggaaaaaagcatggttaaagaggagcatgaagacggtggtcttcttmatttaagaaccacaccaataaagcagaaaaccagggaatgccaaagtgtgatgcatctcctccc

SEQ ID NO: 348692 - DNA, 601 bp, Homo sapiens
atgacaaatgatataaatctcatccctattttctccattcagagatattttgttctatttacatgtgtccttatttacaaaagtggaaacgtcctgctttctttcatttgatagtatatcacagtagcatttttctgtatttaaaaataagttttgcttgttctatatcatttgctacactgactcaaaaataaattatctgtttttattatataattaatctgtatttattataaaatgtaagatacaaacaagactacataagtaaacaagtcaatgtgtttcacacttggataacatagaattcaccattgttgacattttagtatataaagttactcctaattttgtttaatactatatcataggatttatctgaggttatcttttcttttttttctctagtgatttggaaggtttacataatgttttctttctagcaatgatgaactaattaacttctatcttaaaaaasatactagaaactagtttctctattagaattgagaatgaaaagtatccatttattcccccactgcattacatgacatgattttatgttattactctttcatttcttcatcaatttcccagtttttat

SEQ ID NO: 348693 - DNA, 623 bp, Homo sapiens
ggtgatgagaattttaaagccaatctgtgatttacatagattaccatgatgcccaggacagggaggcattcacagaagttctattcatatatgtatctagagcacacagaggcaatgtttctgtattagacacaagcaatttcattaatttaagtggccaacaggcagagttttaattccctggatgatctaggagtggaggtaaggagaaaaggacttaaaagaggccaactgagatgyctttcccctgttttcaccccaaaagagaaatctctgttctttctacagcgatgaaactcagtgatattggtcatggggctccccattgcaataagatatcataacctttaagagaaatggaaagttaggaagcagatttccaggcctttgttttcaaaataatttttaaaactatataagcacccaaattttaaaaaaattattcatcagtagcataaatttctgtgaatctttgtagaaatgacaaccattctagttgctgggactctatgaagtgtccacttgcactgtgatttttcttcaaatgatgtaaatgcttgatatttttaataatatcaggggttacatgatactctctagatgtctattccatttattttatg

SEQ ID NO: 348694 - DNA, 623 bp, Homo sapiens
ggtgatgagaattttaaagccaatctgtgatttacatagattaccatgatgcccaggacagggaggcattcacagaagttctattcatatatgtatctagagcacacagaggcaatgtttctgtattagacacaagcaatttcattaatttaagtggccaacaggcagagttttaattccctggatgatctaggagtggaggtaaggagaaaaggacttaaaagaggccaactgagatgcctttcccctgttttcaccccaaaagagaaatctctgttctttctrcagcgatgaaactcagtgatattggtcatggggctccccattgcaataagatatcataacctttaagagaaatggaaagttaggaagcagatttccaggcctttgttttcaaaataatttttaaaactatataagcacccaaattttaaaaaaattattcatcagtagcataaatttctgtgaatctttgtagaaatgacaaccattctagttgctgggactctatgaagtgtccacttgcactgtgatttttcttcaaatgatgtaaatgcttgatatttttaataatatcaggggttacatgatactctctagatgtctattccatttattttatg

SEQ ID NO: 348695 - DNA, 621 bp, Homo sapiens
ttggtagcacaattgggtgattatagctaacaagaatttattgcttattttaaaataatgaaaagagagaaattggactgtttctaacacaaagaaatgataaatgcttgaggtgatggatactccatttaccaagagtgaaattggaatgtttccaacacaaagaaatgataaatgcttgaggtgatgcatacttcaattaccctgatttgatcattacacattgtatgcttgtatgaaaacatcacatgtacccaataacatatacaactattatgtacscataataattaaaaataaaaataaaaagtcaatcacaattactgatcgttttataatgtccctattgctcattttataattgtcctattgcgaagataaaagagaattttatcttaacaaatacatgctgcatgtcttactagggcataaactttccctctgtactaattctccagattaagctagatctgggtggaagtggaggctcacttttcctgtttgttaatatttccacatggaaaggattccacttaataccatgctctgaataccttgaatctgagtgtggaggcaccttgaggacttagaaactgtattagacagaaaactttcagttgc

SEQ ID NO: 348696 - DNA, 551 bp, Homo sapiens
caatcatttatctactctttaggcagagtagataaatgagtatttttggagactgagaggtaaagtacaagttttgtgtaaccctggttgagatgttcctaaagtcagaattaagtctgtactgacactttggcctattagagagtttcatgtttcaagtttttgttcattcttaggttcatagattacaggtaggagaaccacaaataaagtttttaactgaaaagaagttcttcaaaagaaatgttttcatgaacttgaagtgggaattagtcattgtgttcttaaatattgactcttacgtggacgaagtaatctttatttctaagtactgcttcaggcyattgccttctttaataactaaggcattgttgctttagtttgagcatgttctatggaattttggcaatgcatgtatcctctttctgcatcttagtaaaagcatgagtaaatattttttcttagctttggtatttttgtagcttacattttatatgggccagactaatataatgtaataccaggattacataatttaagacgtcaggatt

SEQ ID NO: 348697 - DNA, 525 bp, Homo sapiens
aagctatttttagcaaaatctttgagtttgcttcaaatcacctttcaatgacagaataataactcagtttggacgtttcaatcagttatctgcagtaaatcatacaatgaaacctaagaaaacaatttcttccaagagttttgtagtcaaccaggtcttattcttttaaacttcaaaagacacaactaaattctactccaagcatatgctttgtatatttagtctttttaaaaygtacacaaaaggatatttgttttacctgtttagtacttcagtgagtttcacaaaaccagtataagccaattcaaatgctcctctgtgcctggactgcaaaaggtgttgtttaaagtaatctcctatttcttttacctttaaaaaaaaagcaaaaacaaatgtccgatttatgtttacattcgcaagtgtatttatatcagtaacactgtttagaacccaggtctaggggtccattcatttagcgcttaccatatgacagaacatgttttaagctttttttttttttttttt

SEQ ID NO: 348698 - DNA, 557 bp, Homo sapiens
aatcttcatgaatccaatgatcacctgggtggtataatttaatttttttcgtgtcggggtagctgagtctcacttcatcacccaggctggagtacagtggtgccatctcagctcactgtaacctctgcctcccaggttcaagtgatacttatgcttcagccttccatgtagctgggattacaggcatgcacctccacacccatgtctccgtttgggtggaagagttacaatgaggatgtgattggtttaaaattaaggtcaaagatcctctttggttaagattttttttctktaatagggcctcgcaatgttgcccaggctggagtacagcagtggtatgagcatggctcactgcagcctcaatcttctgggctcaattgtttctcccatgtcagcaacccatacagttgggaagacagatgcatgctaccatgcccggctaattaaaaaatatgtatattttgtagaggccaagcaccagtggctcatggctgtaatcccagcactttgggaggccaaggcaggtggatcacttgaggtcaggagtttgagaccaa

SEQ ID NO: 348699 - DNA, 532 bp, Homo sapiens
tgaaaccccacctctactaaaaatacaaaaagtagccaggcaagttggcagttggatgtaataccagatactcaggaggctgaggcatgagaattgcttgagcctgggaggcagaggttgcaatgatttgagatcgtgccactgcactccagccttggaaacagagcgagactccatccccccttcaataaagaatattttatagagatgggtttttgccgtgttgtccaggttggtctcagacccctgggctgaaatgatcctcccgccttggtctcccaaagtgttggggttaaaggcatgagtcactgctcccttcaagaattttgaaatgacataaaccaaagcacaatccaattttttgaaataaagacaaaactgcatttaraggaaaaaatgcaaagcttcaaattgttcatatgagaaaaaaaacaaaacaggatataactctatgccatcttaggctgcactgtcaccatcccagaccagctgactgtaggtcagttgggagtgtccttacagagagattagt

SEQ ID NO: 348700 - DNA, 412 bp, Homo sapiens
gctgggacctctctgagaatcaagcagtagctccaggagccagggctttgggtctcttctgtgcatcttcaggagttttattgacttttctcaccacaacccccttctcaattaccaacttccaatccaaaaatgacatccaactggatcctgaacttccacccagttaacggtgattgagtyttcaactttcttcttattaagtgattaaattagatatggatttatgaaagtgaaagaattaataatagggtgaaggactaaaactcatttattcacttattccataaatattggtaaagttttaccaatatgtgaccttcatagtgatacagggaaggttttaatctgtttcagacattagaaatacatatatttatatatggtatctttattggagaacctttggcca

SEQ ID NO: 348701 - DNA, 586 bp, Homo sapiens
gagtttaaaaattaaaaaaacctaattacaaaagagataatgcagactcgtaaaacatcacagtgtctttgagggcagagagggcagacacaatcttgactcctactggaaggtgaagcatcattactcrcaaacaggatgggcttccctcagaataccagcttgggaagagtgaatctgagtgtgtgagctggggcagagcccagagaggagcagtgtggtcagacataaggagggagacttttcaatctggaagcatgaatggtgcaagctgtgtatctgaagaatttgggagaaaaatgaacctcttgggggaatcctgcaccatcctcaggaccccagtgagaatcctgcagtttcgggggtctttctaccatgttctggttgcctgtgcttctgaaggtgctcctctgctgtccaggtcagagtagctttcagagcccatctgaagggacggcctgacttcaattccactcacagaatttctactgggattccaaagcttctccaggcttttgatgggggtctctaaaatatttctgaatttctgttttcctcccccagcctgagctgtgagagaagctga

SEQ ID NO: 348702 - DNA, 586 bp, Homo sapiens
gagtttaaaaattaaaaaaacctaattacaaaagagataatgcagactcgtaaaacatcacagtgtctttgagggcagagagggcagacacaatcttgactcctactggaaggtgaagcatcattactcacaaacaggatgggcttccctcagaataccagcttgggaagagtgaatctgagtgtgtgagctggggcagagcccagagaggagcagtgtggtcagacataaggagggagacttttcaatctggaagcatgaatggtgcaagctgtgtatctgaagaatttgggagaaaaatgaacctcttgggggaatcctgcaccatcctcaggaccccagtgagaatcctgcagtttsgggggtctttctaccatgttctggttgcctgtgcttctgaaggtgctcctctgctgtccaggtcagagtagctttcagagcccatctgaagggacggcctgacttcaattccactcacagaatttctactgggattccaaagcttctccaggcttttgatgggggtctctaaaatatttctgaatttctgttttcctcccccagcctgagctgtgagagaagctga

SEQ ID NO: 348703 - DNA, 586 bp, Homo sapiens
gagtttaaaaattaaaaaaacctaattacaaaagagataatgcagactcgtaaaacatcacagtgtctttgagggcagagagggcagacacaatcttgactcctactggaaggtgaagcatcattactcacaaacaggatgggcttccctcagaataccagcttgggaagagtgaatctgagtgtgtgagctggggcagagcccagagaggagcagtgtggtcagacataaggagggagacttttcaatctggaagcatgaatggtgcaagctgtgtatctgaagaatttgggagaaaaatgaacctcttgggggaatcctgcaccatcctcaggaccccagtgagaatcctgcagtttcgggggtctttctaccatgttctggttgcctgtgcttctgaaggtgctcctctgctgtccaggtcagagtagctttcagagcccatctgaagggacggcctgacttcaattccactcacagaatttctactgggattccaaagcttctccaggcttttgatkggggtctctaaaatatttctgaatttctgttttcctcccccagcctgagctgtgagagaagctga

SEQ ID NO: 348704 - DNA, 563 bp, Homo sapiens
tatttgtaatcttgcctgaccaattaatgtagccatttgatccaagtacaatgtaaaagtcttaatcgtactgtsaggaaggaaagatcactccacaagatctgtattttgaacaataatgcctgttgagaatgtgcagtagcaaaaatcaaaagttggagtggggcgaagtgatctattctatttacttgtgctgaccgaattttttcttcaattaattcaatttctttagttgcctctggagttaatgttcttttactattcaattctggatccccactcaagatagagaacaaatttgacatggcataagtaaggatgcctagagttggccaaatccaattaatatctcctagcaatttatgaaagtcgtttaatgtttttaatgtgtcttttcttatttctattttttgttgtttaaattttctttcctctacccgcattcccaagtaatggacaggagtagaggtttgaatcttatcagatgctattgtcagtcctgcgtttgcaacctctgtctgcagaaatgtgtaacagtcaattaatgtgtctctcgtttctgc

SEQ ID NO: 348705 - DNA, 563 bp, Homo sapiens
tatttgtaatcttgcctgaccaattaatgtagccatttgatccaagtacaatgtaaaagtcttaatcgtactgtcaggaaggaaagatcactccacaagatctgtattttgaacaataatgcctgttgagaatgtgcagtagcaaaaatcaaaagttggagtggggcgaagtgatctattctatttacttgtgctgaccgaattttttcttcaattaattcaatttctttagttgcytctggagttaatgttcttttactattcaattctggatccccactcaagatagagaacaaatttgacatggcataagtaaggatgcctagagttggccaaatccaattaatatctcctagcaatttatgaaagtcgtttaatgtttttaatgtgtcttttcttatttctattttttgttgtttaaattttctttcctctacccgcattcccaagtaatggacaggagtagaggtttgaatcttatcagatgctattgtcagtcctgcgtttgcaacctctgtctgcagaaatgtgtaacagtcaattaatgtgtctctcgtttctgc

SEQ ID NO: 348706 - DNA, 563 bp, Homo sapiens
tatttgtaatcttgcctgaccaattaatgtagccatttgatccaagtacaatgtaaaagtcttaatcgtactgtcaggaaggaaagatcactccacaagatctgtattttgaacaataatgcctgttgagaatgtgcagtagcaaaaatcaaaagttggagtggggcgaagtgatctattctatttacttgtgctgaccgaattttttcttcaattaattcaatttctttagttgcctctggagttaatgttcttttactattcaattctggatccccactcaagatagagaacaaatttgacatggcataagtaaggatgcctagagttggccaaatccaattaatatctcctagcaatttatgaaagtcgtttaatgtttttaatgtgtcttttcttatttctattttttgttgtttaaattttctttcctctaccygcattcccaagtaatggacaggagtagaggtttgaatcttatcagatgctattgtcagtcctgcgtttgcaacctctgtctgcagaaatgtgtaacagtcaattaatgtgtctctcgtttctgc

SEQ ID NO: 348707 - DNA, 553 bp, Homo sapiens
actaatcctataaactgctttccctgaatagtgactgtacacacagatctattctctgagacctgacgagcccaatgagtggcttttccggcagagttggtacttccaagccctcctgtcctttccgttttattttccccaattttaatataaggcaaaagcaataattgagcaattctattacctggattggcactccagggaacagtggagctgatcactaactgaatttcccctttataatctgaatcaattaccccagtatgaatttggactcccttcaaatttagacttcatctccctaaaatgaggcctactgtccctcctggcagtgggccatatacccctgtaggaatcttttgcggggtctctccagggagtaaagaaaccttttgagtggaacataaatctactgctgtgctgcctgctgtggcgggggacagctgttgtatygttgtaattggctgattccctgaagtggtggtatttgctgtggtggttgctgtccctgaaaaccctgaagaacaaacggctgaatcgggaatgccccagt

SEQ ID NO: 348708 - DNA, 553 bp, Homo sapiens
actaatcctataaactgctttccctgaatagtgactgtacacacagatctattctctgagacctgacgagcccaatgagtggcttttccggcagagttggtacttccaagccctcctgtcctttccgttttattttccccaattttaatataaggcaaaagcaataattgagcaattctattacctggattggcactccagggaacagtggagctgatcactaactgaatttcccctttataatctgaatcaattaccccagtatgaatttggactcccttcaaatttagacttcatctccctaaaatgaggcctactgtccctcctggcagtgggccatatacccctgtaggaatcttttgcggggtctctccagggagtaaagaaaccttttgagtggaacataaatctactgctgtgctgcctgctgtggcgggggacagctgttgtatcgttgtaattggctgattccctgaagtggtggtatttgctgtggkggttgctgtccctgaaaaccctgaagaacaaacggctgaatcgggaatgccccagt

SEQ ID NO: 348709 - DNA, 429 bp, Homo sapiens
tgtaggaactgagagggtgaaagggaagatttagccaacatttcccaatcatagggaataagtctatttccatgagcaatgggatctaataaagttctcatataaggggagttgggtccatattgtttaactccttccttcatatcttttaacattttcatggtgaaagattcatatctagcctcagtttggacagacgctccagcttgcccccctttcccagctggtattggttgtaaaattacaaggaactgccatgcctcaagatctccctgttttctggctttatcaataatttcatgcagtgtactaccttgtccactaggtggtgatgtaggaytaaacaccgctgggttgctggtgaggtgccgtgctgtgtggcacgggacacacagcttgaggtctgtattgaacctccggagacggccc

SEQ ID NO: 348710 - DNA, 471 bp, Homo sapiens
gagcctggccaacatggtaaaaccctgcctctactaagacagcaaaaattagccaggtgcagtggtctgcgcctgtagtccaagctactagggaggctgaggtaggaggatcacttgaacccaggaggcagaagttgcagtgagctgacattataccactccactccagcctgggraataggctagattgaactgagagacagagagagctacatttgactagacttcttaatctctacccagttaatccttattggatttttggctttcttaaagaataactgatcgaattagatattaatccatcaaaatgaaagatttagggatagggtgaaagtccaggactcattcactgattcccttcacaaacatggagttttactaatatgtgtccttcaaagtcctgagtgtgagacagggaagggttgaatctcttcctgatattagacagaaagaaagaaaacttgaaat

SEQ ID NO: 348711 - DNA, 471 bp, Homo sapiens
gagcctggccaacatggtaaaaccctgcctctactaagacagcaaaaattagccaggtgcagtggtctgcgcctgtagtccaagctactagggaggctgaggtaggaggatcacttgaacccaggaggcagaagttgcagtgagctgacattataccactccactccagcctggggaataggctagattgaacwgagagacagagagagctacatttgactagacttcttaatctctacccagttaatccttattggatttttggctttcttaaagaataactgatcgaattagatattaatccatcaaaatgaaagatttagggatagggtgaaagtccaggactcattcactgattcccttcacaaacatggagttttactaatatgtgtccttcaaagtcctgagtgtgagacagggaagggttgaatctcttcctgatattagacagaaagaaagaaaacttgaaat

SEQ ID NO: 348712 - DNA, 471 bp, Homo sapiens
gagcctggccaacatggtaaaaccctgcctctactaagacagcaaaaattagccaggtgcagtggtctgcgcctgtagtccaagctactagggaggctgaggtaggaggatcacttgaacccaggaggcagaagttgcagtgagctgacattataccactccactccagcctggggaataggctagattgaactgagagacagagagagctacatttgactagacttcttaatctctacccagttaatccttattggatttttggctttcttaaagawtaactgatcgaattagatattaatccatcaaaatgaaagatttagggatagggtgaaagtccaggactcattcactgattcccttcacaaacatggagttttactaatatgtgtccttcaaagtcctgagtgtgagacagggaagggttgaatctcttcctgatattagacagaaagaaagaaaacttgaaat

SEQ ID NO: 348713 - DNA, 471 bp, Homo sapiens
gagcctggccaacatggtaaaaccctgcctctactaagacagcaaaaattagccaggtgcagtggtctgcgcctgtagtccaagctactagggaggctgaggtaggaggatcacttgaacccaggaggcagaagttgcagtgagctgacattataccactccactccagcctggggaataggctagattgaactgagagacagagagagctacatttgactagacttcttaatctctacccagttaatccttattggatttttggctttcttaaagaataactgatcgaattagatattratccatcaaaatgaaagatttagggatagggtgaaagtccaggactcattcactgattcccttcacaaacatggagttttactaatatgtgtccttcaaagtcctgagtgtgagacagggaagggttgaatctcttcctgatattagacagaaagaaagaaaacttgaaat

SEQ ID NO: 348714 - DNA, 399 bp, Homo sapiens
actttggcctcccaaagtgttggggttaaaggcatgagtcactgctcccttcaagaattttaaaatggcatcaaccaaagcacaatcaacttttttgaaataaagacagaactgcatttagaggaaaamattcaaagcttccaattgttcatataaaaaaaaaaaaaaaggacaggatatagctctgtgccatcgtaggctgcactgtcaccatcccagaccgactgactgtaggtcagatgggagtgtccttacagaaattagtgacttaccagatctggatgtagtctagaaggtgctcagacctcaggaagaaccaagcaggaactccaggcttgaagactttgggtctctcctgtgggtctttagaagcttttattgacctttctaatcacaact

SEQ ID NO: 348715 - DNA, 399 bp, Homo sapiens
actttggcctcccaaagtgttggggttaaaggcatgagtcactgctcccttcaagaattttaaaatggcatcaaccaaagcacaatcaacttttttgaaataaagacagaactgcatttagaggaaaaaattcaaagcttcmaattgttcatataaaaaaaaaaaaaaaggacaggatatagctctgtgccatcgtaggctgcactgtcaccatcccagaccgactgactgtaggtcagatgggagtgtccttacagaaattagtgacttaccagatctggatgtagtctagaaggtgctcagacctcaggaagaaccaagcaggaactccaggcttgaagactttgggtctctcctgtgggtctttagaagcttttattgacctttctaatcacaact

SEQ ID NO: 348716 - DNA, 396 bp, Homo sapiens
tcattgagctgtaaacatgaaggaaatcctgtcatctgcgacaacatggatggaactggagggcattatgttgagtgaagtaagccagatacagaaagacaaacatggcatgtttgcactcatatttgggaattaaaaaacacgaaacttaaaaatagtaaaatgacggttatcaraagctaggaagggtactgggaaatagagaataagaaggggatggttaatgggaacaaaaacacagacaggaataagatctagggttcagtagcacaatagggcaactcgtgttgacaatagttcatagtaaatttctacataattaaaacaatggaattggaatgttgctaacacaaagaaatgataaattcttgagatggtggctattcctgttaccat

SEQ ID NO: 348717 - DNA, 515 bp, Homo sapiens
aactctgtcctcaccagcttagtgatcacaaatgatcctgtctctattccctgtctgtaaaaggttgttttgaaccccaggaaaggtaactgacatgggaaatgtgtgcttcttgaatggaggctgagggagtaggcgtgagagtggtaaaaagtgataggtggtttgcagatgcaggcacgtcagggagcccctgccagtaggtagccctagctgatgaccctagaccttgctcagttgagttcttcatgcacatctcccaccgggtacctgtggcccagagatgaagttttctgctaaaagatgaagaaaagaggctttagtgatgtgattttgtggccttgaaccaatcacacaagcaatggtgaaaggattgaggctaaactaggactgcccckgaatgatcagagtcctcatcacagagcaacttgcatgtggaccatcatcacatgatgggaataaacttgtgtttgggtgaagcagacatttccctttcagttattccccaccacctt

SEQ ID NO: 348718 - DNA, 430 bp, Homo sapiens
aaagtcaggcagcccaagaggatcttcactggtcccactccctgcccttcctgtggctcatcaccrtctgaggaactggagctccatctttgctgctagggaaggcgtgcctagtggggttgataaatccaaagttctcttccaggcacttggacactaaaatctagtatgtaagtgcaagttatgtttgttttttcttatttccttttttaataattctaaaattttattaaagaacatttgagacagggtttcgctgtgttgccccagctggtctgaaactgctgggcacatgggattctcctgccttggcctcctaaagtgccaggattactggcatgagtgattgtgaccaggccacatgcaacttacaggaagcacagaattctttgcttcaggcaggtgctcagtatgagggaaaaaagataac

SEQ ID NO: 348719 - DNA, 430 bp, Homo sapiens
aaagtcaggcagcccaagaggatcttcactggtcccactccctgcccttcctgtggctcatcaccgtctgaggaactggagctccatstttgctgctagggaaggcgtgcctagtggggttgataaatccaaagttctcttccaggcacttggacactaaaatctagtatgtaagtgcaagttatgtttgttttttcttatttccttttttaataattctaaaattttattaaagaacatttgagacagggtttcgctgtgttgccccagctggtctgaaactgctgggcacatgggattctcctgccttggcctcctaaagtgccaggattactggcatgagtgattgtgaccaggccacatgcaacttacaggaagcacagaattctttgcttcaggcaggtgctcagtatgagggaaaaaagataac

SEQ ID NO: 348720 - DNA, 430 bp, Homo sapiens
aaagtcaggcagcccaagaggatcttcactggtcccactccctgcccttcctgtggctcatcaccgtctgaggaactggagctccatctttgctgctagggaaggcgtgcctaktggggttgataaatccaaagttctcttccaggcacttggacactaaaatctagtatgtaagtgcaagttatgtttgttttttcttatttccttttttaataattctaaaattttattaaagaacatttgagacagggtttcgctgtgttgccccagctggtctgaaactgctgggcacatgggattctcctgccttggcctcctaaagtgccaggattactggcatgagtgattgtgaccaggccacatgcaacttacaggaagcacagaattctttgcttcaggcaggtgctcagtatgagggaaaaaagataac

SEQ ID NO: 348721 - DNA, 612 bp, Homo sapiens
tcaatgacctggccagctatggggccactgtgcccaccctgctaacagtgccaagttcctgggtgtcgaagggaggttctgtgctaatcctcctggggctgcatttccaagatctgccccccacaggggtgaccacagagactgacgttcctaattgctgggtctggggaccacggtccacycctggaggcaccccaccttggcagggttgtgagccaggcctgtgccccgtgttcctgaggcagacagctgtgccacccacaccctctcatggcttaatgagacccgctcccgggtctggagcctctacaaagcctcaaactcactcctcacggcctgctgttagcctgcaatattcttaactagagtgcagttggggctcattcaaccagacccagaagcattgggtttgtttttgcagggttggccagagctgctgtgaacctgcatctcacctgtcacctctgtggagaaacacagagagagggcataactgaggctacatacactttgaacctgatgggatcctgggacaagagggagtcctggccctcccgagttggcaggacagtagctccaaaggcacaactgaagctgcccaggtcgcagttc

SEQ ID NO: 348722 - DNA, 612 bp, Homo sapiens
tcaatgacctggccagctatggggccactgtgcccaccctgctaacagtgccaagttcctgggtgtcgaagggaggttctgtgctaatcctcctggggctgcatttccaagatctgccccccacaggggtgaccacagagactgacgttcctaattgctgggtctggggaccacggtccactcctggaggcaccccaccttggcagggttgtgagccaggcctstgccccgtgttcctgaggcagacagctgtgccacccacaccctctcatggcttaatgagacccgctcccgggtctggagcctctacaaagcctcaaactcactcctcacggcctgctgttagcctgcaatattcttaactagagtgcagttggggctcattcaaccagacccagaagcattgggtttgtttttgcagggttggccagagctgctgtgaacctgcatctcacctgtcacctctgtggagaaacacagagagagggcataactgaggctacatacactttgaacctgatgggatcctgggacaagagggagtcctggccctcccgagttggcaggacagtagctccaaaggcacaactgaagctgcccaggtcgcagttc

SEQ ID NO: 348723 - DNA, 610 bp, Homo sapiens
caatccactctggggccttttctctactgagagctgtggagatgatgagatgactttcctggaaagagcagcagacaccactgtgtactccagggacaaacatggaagctgcttttgctgtgcctggttcatttgcagccttgcaaaaatctggcacctgtgctggcacctgragctgcctgccccactgctgtgggagccagtgactgtccaaagtgaccagaccccctgctcactcacacacccctcactgctccagtcctgaccctcccttaataggcatgtgatccaggcctgaagcatgagccaagcatagtctaccagtctgagtgggcagaacaaacccagtgaaccccatcaaaactccggcaaaggtgcccccagccatagaggcttctggccagaaaagtcacatcccaaggatttcataagggaaaattacttaaacacaaagaaagacaataagaaaggaaggatggaagagagaagtctctaaccaaccagaaaacaagaaattaaatgggagtactaagcctttatcaataacaacaatgaagacaatatatctcagttctgcaagtgaaagtcttagggtcgttgaatgagtaaa

SEQ ID NO: 348724 - DNA, 610 bp, Homo sapiens
caatccactctggggccttttctctactgagagctgtggagatgatgagatgactttcctggaaagagcagcagacaccactgtgtactccagggacaaacatggaagctgcttttgctgtgcctggttcatttgcagccttgcaaaaatctggcacctgtgctggcacctggagctgcctgccccactgctgtgggagccagtgactgtccaaagtgaccagaccccctgctcactcasacacccctcactgctccagtcctgaccctcccttaataggcatgtgatccaggcctgaagcatgagccaagcatagtctaccagtctgagtgggcagaacaaacccagtgaaccccatcaaaactccggcaaaggtgcccccagccatagaggcttctggccagaaaagtcacatcccaaggatttcataagggaaaattacttaaacacaaagaaagacaataagaaaggaaggatggaagagagaagtctctaaccaaccagaaaacaagaaattaaatgggagtactaagcctttatcaataacaacaatgaagacaatatatctcagttctgcaagtgaaagtcttagggtcgttgaatgagtaaa

SEQ ID NO: 348725 - DNA, 610 bp, Homo sapiens
caatccactctggggccttttctctactgagagctgtggagatgatgagatgactttcctggaaagagcagcagacaccactgtgtactccagggacaaacatggaagctgcttttgctgtgcctggttcatttgcagccttgcaaaaatctggcacctgtgctggcacctggagctgcctgccccactgctgtgggagccagtgactgtccaaagtgaccagaccccctgctcactcacacacccctcactgctccagtcctgaccctcccttaataggcatgtgatccaggcctgaagcatgagccaagcatagtctaccagtctgagtgggcagaacaaacccagtgaaccccatcaaaactccggcaaaggtgcccccagccatagaggcttctggccagaaaagtcacatcccaaggatttcataagrgaaaattacttaaacacaaagaaagacaataagaaaggaaggatggaagagagaagtctctaaccaaccagaaaacaagaaattaaatgggagtactaagcctttatcaataacaacaatgaagacaatatatctcagttctgcaagtgaaagtcttagggtcgttgaatgagtaaa

SEQ ID NO: 348726 - DNA, 426 bp, Homo sapiens
tgtgaaatgatgggttctgtgctccctttaggatgtacctaagacctaggttttagtttccaagtgtccagaagaaagcgtttgacatacccatccaaataggcaggcattcaacagcagtattgatctgcctccaggtcataaaatgacctgttgccacagtcagggcagtagtcagtacagaacaagatcctcttggggggtgccttaagtccctcactctgttcatcagctcagccctaatttgagcaaatctgytccagcagagagtaccatcagcaccataactctctcggggggcaggatacagctccacacataagtttttgagtatgattgtgtggctcagcaggttctccagggtggccatgcagatgggatttccacagaagctgaaggtgttgagctcaaagcagcggctcaggg

SEQ ID NO: 348727 - DNA, 544 bp, Homo sapiens
gaaggataatctcaatcttcaggtaaaaatgctgagcccaaagcatggggcataataaaccctccataaatgttggctacttttgttgacattcaaagacaacaggcataatcaggaaaacagttgaggccacaggggataactcagccctaaggcagagtcctctcctgtgccaaccactccctctgccaggacacaagcttcacatccaccccaggaagaattaagagcaagtcctgctgactctgcctccaggacgtccctatgctgtccatggccactcaagtggacaccaggacctcctgtctggacagtgcaagaatcttctgaagcgtgtccctgccctctggttgtccccycagggaacacggtcctctcagccacctcggggatgtggaagataggcttcaagtggcctcacaaccctaatcccaaactgccaatgacccctgagtcacccttgcccctggctgcacctctccagtctcatctccctgagccaattcacaacctgccagttcagacactggtcttctcattctct

SEQ ID NO: 348728 - DNA, 577 bp, Homo sapiens
cagcagtcctgtcccaggggcctctttagggccagagcagcagctgaggaactccctgctttatggcttctcatgttcaccaaaatagctcaatagaattttgggagaattcctcaatgactgctctggggtgaaggtctcccagcattgtggccatgttctgttgttcaggagatttgggctgaggtatccaggatgcataaagagatacctgccttgacagctcagtctgcaggagggaaacagaagctcagaaatattctagagaccctgagcaagtgcctgggggagctttggtattctggtggagattctgtgagtggagaaggggtcaggtcatcttctcagaggggctctgaaggatgctctgagtttgacagcagatgagcaccttgagaagaacaggtgacaggacatggtagaaatgcccccaagtgcgggattctcactggggtcctgggggtggtgctggaccttctgaattgggcaggaagggaaagtctgtcaaacagttcttttcaacatttagaytattgaactccttaggggatcctctgagctcctcaccagaggggtc

SEQ ID NO: 348729 - DNA, 362 bp, Homo sapiens
tggtgggactggaatgacggaatgtctgtttgtcaacatctttggcggtgacatgatactgtcccagtccctgcaatstgctgctcattttcatcctttcaaataaaactccacagtcagaggcttgtgcaagagttggggtccagagcatcaggtctaatgtttgctatgtttatattcactgccaaatctgttattccaaagaaattttactagtgaaatagaaatacgttgtctgacagcattaccccctgtgatatggtttggatcgaaccattgctctccagcctggcaacagagtgagactccatctccaaaaaaaaaagcaattaattataacaacacgtccattcactctccaa

SEQ ID NO: 348730 - DNA, 669 bp, Homo sapiens
ttcaccatattggtcaggctgatctggagctcctgaccttgtgatccgcccaccttggcctcctaaagtgctgggattacaggtataagccactgtgcccagcccagttaactgttaataaatttttttttcccaaaatggagtcttgctctgtcacccaggctggagtgcagaggtgcaatctcggctcactgcaacctctgcctcacaggatcaagtgattcttctgcctcagcctcctaagtagctgggattacagacatgggtcatcacacccagctaatttgtgtatttttcatakagacagggtttcaccatattggccaggctggattcgaacccctgaccttgtgatccgcctaccttggcctcctaaagtgctgcaaatatatgtgtgagccaccatgcccagccttttttgcttttctatgcacttaggagagtgagcccatcgttcagtaacaatatgactcagtactgcaagacctttcaaagcctatttccagttggtgaaggagggtttcgatgatcactggaccttcatgccctaccatttggagactgcatcttttaaaatgacaccaagggaaatctgcccatgagcagcattggatgggaccataccaggtgacttaaaattaaggataaccaaggaacaaagtctttctt

SEQ ID NO: 348731 - DNA, 669 bp, Homo sapiens
ttcaccatattggtcaggctgatctggagctcctgaccttgtgatccgcccaccttggcctcctaaagtgctgggattacaggtataagccactgtgcccagcccagttaactgttaataaatttttttttcccaaaatggagtcttgctctgtcacccaggctggagtgcagaggtgcaatctcggctcactgcaacctctgcctcacaggatcaagtgattcttctgcctcagcctcctaagtagctgggattacagacatgggtcatcacacccagctaatttgtgtatttttcatatagacagggtttcaccatattggccaggctggattcgaacccctgaccttgtgatccgcctaccttggcctcctaaagtgctgcaaatatakgtgtgagccaccatgcccagccttttttgcttttctatgcacttaggagagtgagcccatcgttcagtaacaatatgactcagtactgcaagacctttcaaagcctatttccagttggtgaaggagggtttcgatgatcactggaccttcatgccctaccatttggagactgcatcttttaaaatgacaccaagggaaatctgcccatgagcagcattggatgggaccataccaggtgacttaaaattaaggataaccaaggaacaaagtctttctt

SEQ ID NO: 348732 - DNA, 669 bp, Homo sapiens
ttcaccatattggtcaggctgatctggagctcctgaccttgtgatccgcccaccttggcctcctaaagtgctgggattacaggtataagccactgtgcccagcccagttaactgttaataaatttttttttcccaaaatggagtcttgctctgtcacccaggctggagtgcagaggtgcaatctcggctcactgcaacctctgcctcacaggatcaagtgattcttctgcctcagcctcctaagtagctgggattacagacatgggtcatcacacccagctaatttgtgtatttttcatatagacagggtttcaccatattggccaggctggattcgaacccctgaccttgtgatccgcctaccttggcctcctaaagtgctgcaaatatatgtgtsagccaccatgcccagccttttttgcttttctatgcacttaggagagtgagcccatcgttcagtaacaatatgactcagtactgcaagacctttcaaagcctatttccagttggtgaaggagggtttcgatgatcactggaccttcatgccctaccatttggagactgcatcttttaaaatgacaccaagggaaatctgcccatgagcagcattggatgggaccataccaggtgacttaaaattaaggataaccaaggaacaaagtctttctt

SEQ ID NO: 348733 - DNA, 465 bp, Homo sapiens
aaaaattagtagggcttgttggagtgcacccgtaattcccagctacttgggaggcagaartgagagaatcacttgaaccagaaggttgaggctgcagtgagctgaaatcgtgccactgcactccagcctgagtgacagatgtaggcccagtctgaaaatcaaacaaacaatcaataaataaactcaatcttgacaaaagactttgagtcctgacatctagatgcccacaagataaccgccatgttttacattgtcttgtttcctttgcaggttcccattagaacacctagtctcattccgctcagtccccacctcacttggtcactttgtcctgatttccttcggtgaagccttgacttagtcttgagatagatcacactctcagtggttcctttcttctacctgaatgtgcatatgatctgctatgttagatagcataaaacacaggtgaccattcgatataca

SEQ ID NO: 348734 - DNA, 545 bp, Homo sapiens
cctccaataaggacaccttaaggtttttttttttttggcctaatatcaggaacagattaatcccttccctacatcactacgaaagtcgtgtattagccaaacttcatcagtatttcgggaataaatgaacgaatgagttttggactttcaccctattatttattcttttacttccataaatgtgtatctaattcgatcaattagtcagaagaaagctgaaaactcaatcaggattaactgggkgtgactgcaagatctaatcaggtatcagtttctgattggaagctggtgattgagaagggaagggtggggttagaaaggtccataaaagctcctgagggtacccagaagagacccacagcactcattcctggagctactgcttggttccctgagaggtcccagaactctgcaaagtgagtccagcgctggtaagtcaccaccttcttagggtcatgcccatctgatcagcagccagccagtcagggacggtgacacacatcccaaagtggcacacaatatttttctgtctgtttcgtgagatg

SEQ ID NO: 348735 - DNA, 545 bp, Homo sapiens
cctccaataaggacaccttaaggtttttttttttttggcctaatatcaggaacagattaatcccttccctacatcactacgaaagtcgtgtattagccaaacttcatcagtatttcgggaataaatgaacgaatgagttttggactttcaccctattatttattcttttacttccataaatgtgtatctaattcgatcaattagtcagaagaaagctgaaaactcaatcaggattaactgggtgkgactgcaagatctaatcaggtatcagtttctgattggaagctggtgattgagaagggaagggtggggttagaaaggtccataaaagctcctgagggtacccagaagagacccacagcactcattcctggagctactgcttggttccctgagaggtcccagaactctgcaaagtgagtccagcgctggtaagtcaccaccttcttagggtcatgcccatctgatcagcagccagccagtcagggacggtgacacacatcccaaagtggcacacaatatttttctgtctgtttcgtgagatg

SEQ ID NO: 348736 - DNA, 590 bp, Homo sapiens
tcttttcaggcagtgaacatatgatttaaatggagtttaacaccttagcctttatatttcataggtttctcaaaatgtacatatccaaaacaamatgcttgatttcccctttaaaaccatctcatccctctcttctcctgtcccatacacaggtcctccatacagctgtctgcttgaaatcagacacagaggcttcctcagacattctcttctttccctcaacactcacataaccctggaggaacaagtctcctgatcacttccttgttgctgtaactgcagatcattcgaatctgccctcttctctctgcaccaagacagtccaagccacaactggcttcttagctggactctgccacagtctttgcaagtggtcttgctgcttccatcctgctttctttcaatgcagtctctgctcacaaatgatttttaaaagcataaaatgtatgattttcttattttctcttgatatcccccacatcctaactattacactaggaataaagtctagacaccatctccaaacttatcttgagacatttctctcgaactcattgcattctggccacactggttacttccagttcttt

SEQ ID NO: 348737 - DNA, 590 bp, Homo sapiens
tcttttcaggcagtgaacatatgatttaaatggagtttaacaccttagcctttatatttcataggtttctcaaaatgtacatatccaaaacaaaatgcttgatttcccctttaaaaccatctcatccctctcttctcctgtcccatacacaggtcctccatacagctgtctgcttgaaatcagacacagaggcttcctcagacattctcttctttccctcaacactcacataaccctggaggaacaagtctcctgatcacttccttgttgctgtaactgcagatcattckaatctgccctcttctctctgcaccaagacagtccaagccacaactggcttcttagctggactctgccacagtctttgcaagtggtcttgctgcttccatcctgctttctttcaatgcagtctctgctcacaaatgatttttaaaagcataaaatgtatgattttcttattttctcttgatatcccccacatcctaactattacactaggaataaagtctagacaccatctccaaacttatcttgagacatttctctcgaactcattgcattctggccacactggttacttccagttcttt

SEQ ID NO: 348738 - DNA, 469 bp, Homo sapiens
atgtgtttgcttccccttctgccatgattttaagttttctgcagcctccccaaccatgctgaactgtgagtccattaaccatctttcctttatgcatcacccagtctcaggtatgtctttattagcagcatgagaatggactaatacagagcccatggcacctttcctggccaccctattaaaaatgggattgttgtatttccccctgaaaagttatagctgtcttttttctccaggaaccagagccctgatgcctacatttrtctctgaaatgttaacatcacattctcaccctagttccaaccaagcatcactgtttctgcccaaaaatgtttaacaccacttgtttccaactctgggtgcttgtaagattccttgggaagctttaaaaataattattgtcaaggctatagtccagatcgatttaaaataagaacttctggggctggggctcaaacatgagtttgta

SEQ ID NO: 348739 - DNA, 594 bp, Homo sapiens
atccatattcatttcatgaatcaagaaagtgacagtattagggatagagtggaagtcaagaattcattcattcaaggctcsgtggctcatgcctgtattaccagcactttgggaggccaaggcaggtggatcacttgaggtcaggagttcaagaccagcctggccgacagggtgaaaccctgtctctacaaatatagaaaaattaaggccaggcatggtggatcacgcctgtaatcccagcacgttgggagactaaggtgggtggatcacctgaggtcaggagttcaagaccagcctggccaacatggtgaaaccctgtctctgtctcaaaataaaataaaataaaatacaaaaattggctgggcatgatggtgggggcctgtaatccagctacttgggaggctgaggtgggagaattgcttgaacccaggaggcagaggttacagtgagtggagattgtgccattgcactccagcctgggcaactgaaggagactctgtcaaaaaaaaaaaaaattcattcattcatgaactccacaaacactgatggaattttactaatatgtgacctgcatagtcctgagtgtgaggcagg

SEQ ID NO: 348740 - DNA, 574 bp, Homo sapiens
tagttaaaacatgattttcttaagaatttccaatcttgataataaatgaccatagaactgttgaagcatggtgtgctagtttttattgtgctctatatgcagtatcagaactgtttgaataattatgagattatctgacagattgtgaagaggactagaagacagaaacagaaaaaaawgtaggctacatttactttacagatcagcatctgtaagtaaattcactgtcacatctcttctttctggcttaaatttttagacactggaataatggaaagtaaaaccaaaatcttcatttcgttaatttgaacagtatccatgctgagaaaagtactaacaatgaactctttataaacaaatgcaaacacacacatacataattaggtacacagaaaccttgagctgctttcaagcatactccaagattttaatattcagtctaatgaagtattctgattacttgagactaactgcatatgccagagctaggttgtctgtttttcaaatcagaatatgttttcttaagaatttgaattactttgcatggtttttgtccattagaacctactgtaag

SEQ ID NO: 348741 - DNA, 593 bp, Homo sapiens
ggctcctttccctctctgtcagatttttaaaggtggttggagacctgaactaggtatcaaagctctgcctatatggaacctccacaagggtatctatggaaaaatttgggtgattttggaatgcattttaagtccatgaatatgcatacctctgttaggtgtaggacactctttgatattagtgccctggagggttagtaattgaacatgcattatctttatttattttttgtttttctgctccgtagctttttccttttagaatttcttccmccttttgttttctgttttcctttttggggagcatctaaacccttgttccaaagggtgacctgaaataacacttcagtacatttgagcaagcacaaagattgtcctcaggcattccccatgagaaatttcgatgctatctcatcttttcaaagatatgatcagatgagaccctgaacagattctgaatccaactaaagatctaattaagtaaccccaagaaaatttcccattcagagattctgtgcctttatgaacttcctcctaatcatctcttggaaggtaaacaaaatcacctttttctgcatttgccagctagcaac

SEQ ID NO: 348742 - DNA, 593 bp, Homo sapiens
ggctcctttccctctctgtcagatttttaaaggtggttggagacctgaactaggtatcaaagctctgcctatatggaacctccacaagggtatctatggaaaaatttgggtgattttggaatgcattttaagtccatgaatatgcatacctctgttaggtgtaggacactctttgatattagtgccctggagggttagtaattgaacatgcattatctttatttattttttgtttttctgctccgtagctttttccttttagaatttcttcccccttttgttttctrttttcctttttggggagcatctaaacccttgttccaaagggtgacctgaaataacacttcagtacatttgagcaagcacaaagattgtcctcaggcattccccatgagaaatttcgatgctatctcatcttttcaaagatatgatcagatgagaccctgaacagattctgaatccaactaaagatctaattaagtaaccccaagaaaatttcccattcagagattctgtgcctttatgaacttcctcctaatcatctcttggaaggtaaacaaaatcacctttttctgcatttgccagctagcaac

SEQ ID NO: 348743 - DNA, 593 bp, Homo sapiens
ggctcctttccctctctgtcagatttttaaaggtggttggagacctgaactaggtatcaaagctctgcctatatggaacctccacaagggtatctatggaaaaatttgggtgattttggaatgcattttaagtccatgaatatgcatacctctgttaggtgtaggacactctttgatattagtgccctggagggttagtaattgaacatgcattatctttatttattttttgtttttctgctccgtagctttttccttttagaatttcttcccccttttgttttctgttttcctttttggggagcatctaaacccttgttccaaagggtgacctgaaataacacttcagtacatttgagcaagcacaaagattgtcctcaggcattccccatgagaaatttcratgctatctcatcttttcaaagatatgatcagatgagaccctgaacagattctgaatccaactaaagatctaattaagtaaccccaagaaaatttcccattcagagattctgtgcctttatgaacttcctcctaatcatctcttggaaggtaaacaaaatcacctttttctgcatttgccagctagcaac

SEQ ID NO: 348744 - DNA, 488 bp, Homo sapiens
ggagtggctgaagatagacaaattatgaaaccaggtgtacaaacagctaaaaataagcagagctgcacaaagtgaacacaatttgggaactgacacatttgtccatgactaatcactaaaggcgtttttatgggttactgcatttcacaaaatgagagatctttttattattattttagacacattcgtggcaaaggactacatgaataccgttgtcattttttgaatccraaccctaggtccttgagctagaactaaaaattctataaatagttcctggacaattttctagacttgatctagccttgaacagattgagtactgtggtaggtaggctgtcttccctaaatatgcccatttcttcaccaacaaaatctatgaatttatttccttacatggcaaaatggactttgcagacacaattaaattaaggatcttgtgatgaggaggttgtcttgggattatccaggtaggcccaacataatcac

SEQ ID NO: 348745 - DNA, 488 bp, Homo sapiens
ggagtggctgaagatagacaaattatgaaaccaggtgtacaaacagctaaaaataagcagagctgcacaaagtgaacacaatttgggaactgacacatttgtccatgactaatcactaaaggcgtttttatgggttactgcatttcacaaaatgagagatctttttattattattttagacacattcgtggcaaaggactacatgaataccgttgtcattttttgaatccgaaccctaggtccttgagctagaactaaaaattctataaatagttcctggacaattttctagacttgatctagccttgaacagattgagtactgtggtaggtaggctgtcttccctaaatatrcccatttcttcaccaacaaaatctatgaatttatttccttacatggcaaaatggactttgcagacacaattaaattaaggatcttgtgatgaggaggttgtcttgggattatccaggtaggcccaacataatcac

SEQ ID NO: 348746 - DNA, 609 bp, Homo sapiens
tccaggaaaatatgacctcaccaaacaaagtaagtaaggtaccagtgatctatccaggagagacagagacctataaacctttcagatggagaattcaaaatagcagttttgaagaatcaaaaaaatcaagataacacagagaaagaactcagaatcctattaaacaaatttaacagagattcaattaattttaaagaatcaggcagaaattctggagctgaaaaatgcagttgacctactgaacaatgcatcagagtctcctagcagcagaattgatcaagcagaagaaggaattactgagcttaaagacaggctgtttgaaaatacacagaagagacaaaagaagaaagaaagaaaaaaactaaagcatgcctacaacatctggaaaatagcctcaaaagggcaaatctgagaattattggccttgaagaggaagtagagagagtgattgggttagaaagttkgttcagttaataacagagaatttcaccagcctagagaactatgttaacattcaagtagaagagggttatagaacaccagggagatttaacccaaataagactacaagacattgaataaccaaactctcaaaagtcaaggataaat

SEQ ID NO: 348747 - DNA, 609 bp, Homo sapiens
tccaggaaaatatgacctcaccaaacaaagtaagtaaggtaccagtgatctatccaggagagacagagacctataaacctttcagatggagaattcaaaatagcagttttgaagaatcaaaaaaatcaagataacacagagaaagaactcagaatcctattaaacaaatttaacagagattcaattaattttaaagaatcaggcagaaattctggagctgaaaaatgcagttgacctactgaacaatgcatcagagtctcctagcagcagaattgatcaagcagaagaaggaattactgagcttaaagacaggctgtttgaaaatacacagaagagacaaaagaagaaagaaagaaaaaaactaaagcatgcctacaacatctggaaaatagcctcaaaagggcaaatctgagaattattggccttgaagaggaagtagagagagtgattgggttagaaagtttgttcagttaataacagagaatttcaccagcctagagaactatgttaacattcaagtagaagagggttatagaacaccagggagatttaacccaaataagactacaagamattgaataaccaaactctcaaaagtcaaggataaat

SEQ ID NO: 348748 - DNA, 588 bp, Homo sapiens
tctgtagtttatttttagaaacaatactattgcacacttaacagactacagtatagagtaaacatatattttatacacaccaagaaattaaaaaaacttgtgtgacttgctttattacagtattcactttatttctttatttctttatttctttatttctatgggctggaagaaaatctgcaatgtctttgagctatttctgtcattaagccctctggaggagatggaaaaaacttagtgttggccaagcatggtggctcacgcctgtaatcccagcacttcatgaggctgaggcgaatggatcccttgaggccagtagttgaagaccagcctggccaacatggtgaagctgtatctctactaaaatgcaagaaaaagagccaggcactgtgatgcatgcctgtaatcccagctagttgggagactgrggcacaagaatctcttgaacctggaaggcagaggttgcagtgagccaagatcacgccactgcactccagcctgggcgagactatgtctcaaaaaaaaaaagaagaagaagagagaagaaaagaaaacagaaaaaaaatcagtgtttctcctttcctactt

SEQ ID NO: 348749 - DNA, 607 bp, Homo sapiens
ttgacaggttactggagatggagtatagactaatatgagaatgagaacctcctagggacagtcttrgtggagagtatattcaagggctttatacccaggtacttcagaagatttttaagctgaatttatctggaaatgggaaaaaatgaataatcattgtgatataggtccagagcatttttacttaacaaagacctaccctccaggaatgaagattttaccagactctacccaactgaagtaagaatactctcacccttccattcccttctagccttcttgtttatctaagggcaaaaatctataccactaggttgacacttatgatggtcacagcctcaaaagtccccaaaattttaggattaaaagtccactaagatttaatcctaaggttatagaatgtttttcctccctcaaaccttaccaccaccaaagagaattccagtatgtcaatggtaagttacgactgaatttgaagatgctggctctgaggagtacatagtgaagtctgagtcaagagtgagacaaaagtaaggacaataaagtcatttaaaacctctgacaattgcagcttcagcaaacattaaacacagcccaacttctagcc

SEQ ID NO: 348750 - DNA, 607 bp, Homo sapiens
ttgacaggttactggagatggagtatagactaatatgagaatgagaacctcctagggacagtcttagtggagagtatattcaagggctttatacccaggtacttcagaagatttttaagctgaatttatctggaaatgggaaaaaatgaataatcattgtgatataggtccagagcatttttacttaacaaagacctaccctccaggaatgaagattttaccagactctacccaactgaagtaagaatactctcacccttccattcccttctagccttcttgtttatctaagggcaaaaatctataccactaggttgacacttatgatggtcacagcctcaaaagtccccaaaattttaggattaaaagtccactaagatttaatcctaaggttatagaatgtttttcctccctcaaaccttaccaccaccaaagagaattccagtatgtcaatggtaagttaygactgaatttgaagatgctggctctgaggagtacatagtgaagtctgagtcaagagtgagacaaaagtaaggacaataaagtcatttaaaacctctgacaattgcagcttcagcaaacattaaacacagcccaacttctagcc

SEQ ID NO: 348751 - DNA, 587 bp, Homo sapiens
cagggtggaaaggttaagaccacagtttaataccaatctgttgttccttccctcctccaccacacwactccaattcctgtgtcactactgtgacagagttgtcacagagctgtcacagtaggcaatcttttacacaaatcaaaatgaaagtttgaatcataaataaagataaagggctctgctggttaatagctggagttgcttcaaactctaaaatgctatgaatttatgaagtctgttctcaatactcaaacttaaccatgcattgtaattcaactaaaaaactgtttcacagatgaagatcatattaaagctactttaattagtattcagagaatgcacacactggagctgctaaggaaacgaatgaggtaatactgatactggaatattttgtaaggtactaataaagcaaaaattttcaaagaattttaaaatatgtgatccctgttaatactcttaacagggttgactccttgctagaagtttccacggcatttgaaatgactggaatatcaaacaaatgtcttcataactgcccctttctctgtctcctatgaaataaatttaatggcgaaaattcttac

SEQ ID NO: 348752 - DNA, 530 bp, Homo sapiens
tgtatttatatcattacttttgtggctacccactatctactaattaaaattaattgaaaataaaggtgacatcagaaacattttatgttgattccacctaataatgttttatttgatggtagtcagtgacagtatttggtaaagagacactctatctctgcacrccaatatctggttttcccaatgccatactgaaaaaaccatctttttgtccattctgtgctcttggcaactttgtggaagataagttgattgtagatgtgtggatttatttcttggttctcttttctgttccattggtctacacatcttttttaatgccagtgccatactgttttgattacaatagctctttactatatcttaaaattaataaatgtgaggcctcaagctttgttctttctgttcaagattgttttggttacttagaatttgtggttctatgagattgtttttttaatatatatttctataaagaatgccattgggattttgatagaaatttcattgattctgtaaatcaattaggg

SEQ ID NO: 348753 - DNA, 530 bp, Homo sapiens
tgtatttatatcattacttttgtggctacccactatctactaattaaaattaattgaaaataaaggtgacatcagaaacattttatgttgattccacctaataatgttttatttgatggtagtcagtgacagtatttggtaaagagacactctatctctgcacaccaatatctggttttcccaatgccatactgaaaaaaccatctttttgtccattctgtgctcttggcaactttgtggaagataagttgattgtagatgtgtggatttatttcttggttctcttttctgttccattggtctacacatcttttttaatgccagtgccatactgttttgattacaatagctctttastatatcttaaaattaataaatgtgaggcctcaagctttgttctttctgttcaagattgttttggttacttagaatttgtggttctatgagattgtttttttaatatatatttctataaagaatgccattgggattttgatagaaatttcattgattctgtaaatcaattaggg

SEQ ID NO: 348754 - DNA, 537 bp, Homo sapiens
tctagtactatgttgaatagctgtggtgaaagtggatatmcttgtcctgttccagatcttagaggaaaggctttctgtttttcccccttcagtatgatactagctgtgagtctgtcatatgtgtgttttattttgttgaagtgtgtcccttctatactcaatttttttaaagctttgtatcactaaggaatgttgaattgtatcaaattttttttagcatcagttgaaatgattgtgtggtttttcattctgttgacatgatgtatcacatcaattgatttgcatatgttgaaccattctttcatccctgggataaatcccacttggtcatgatgaattatctttttaatgtgttgttgaattcagcttgctagtattttgttgaggattttgcatcagtttttattatggattttgacccacaattttctttttcttttgtgtctgtcttgtttcagtatctgtgtaattctggcttaaaagaatgagtttagaagtattccttcctcctctatttttcagaatagtttcagtagg

SEQ ID NO: 348755 - DNA, 537 bp, Homo sapiens
tctagtactatgttgaatagctgtggtgaaagtggatatccttgtcctgttccagatcttagaggaaaggctttctgtttttcccccttcagtatgatactagctgtgagtctgtcatatgtgtgttttattttgttgaagtgtgtcccttctatactcaatttttttaaagctttgtatcactaaggaatgttgaattgtatcaaattttttttagcwtcagttgaaatgattgtgtggtttttcattctgttgacatgatgtatcacatcaattgatttgcatatgttgaaccattctttcatccctgggataaatcccacttggtcatgatgaattatctttttaatgtgttgttgaattcagcttgctagtattttgttgaggattttgcatcagtttttattatggattttgacccacaattttctttttcttttgtgtctgtcttgtttcagtatctgtgtaattctggcttaaaagaatgagtttagaagtattccttcctcctctatttttcagaatagtttcagtagg

SEQ ID NO: 348756 - DNA, 596 bp, Homo sapiens
ttaaatattttcacttgcctctgttatagccacccgtatccactacaaagcaaactgtccacagaccaaaagaagatttttgaattgccagagagttttgcttctgttttttaatttgttttcattaggaaagcaagcaataaattaaaacttttacaccaggtccagtgaatagtaagtaagaaataaaagtgcattggtaaaatgagacctcatatactgaggataaaaggccagtggatgaatgttggttatcatggttttaaaggaatggcagaaagacaggggaacatacaggaaggtaagaaaaaaaagcggcctaaagagtagaaagaagtccagagaawaaaggccgtgtcacagacaaccaaaaagcatagcagcataactttgggttgcatatcacaaagccatcaagtaagataaggacttaaaagagtctactagatacagaaatttgaagatatatagtgacattctattggctgaaagaaaattttgttggaaatgcaaaagaaggaagccagattatgattagtagatacagacacttgaaagctttcagaagaatattcatctataccatgtgtatttat

SEQ ID NO: 348757 - DNA, 535 bp, Homo sapiens
ttctttctttctctttcttactacatctttctttctccctacctttatctatctatagtttaccacttagagcacctctagattagattcataatttctgcccattctaattattgctattgatataaatcatatataaataaaaatatatatgttgtataaatgttaatgatttatataacaaaacaatacaatatargtaatagtattctacttttaaaagagtagcaataatttcatcacaatgttatctaaaagagtctcaaattgaaaacaacctaaatgtctaacattaggaaagcattgaagtaatattgtatatatgtttaagtgaaatattatacatataataaaaatattacctacaaagaatttaagtgacgttgaaaattgattatgacttatgtgaacaaataaagatataatatataaccatgacatgatcttaactatgtaaaaatatataaaataaaaactacacaaaaaaggaaaaagttgttaaataaagaaggaatctgaggattagtgaaattgt

SEQ ID NO: 348758 - DNA, 593 bp, Homo sapiens
tattgctattgatataaatcatatataaataaaaatatatatgttgtataaatgttaatgatttatataacaaaacaatacaatataggtaatagtattctacttttaaaagagtagcaataatttcatcacaatgttatctaaaagagtctcaaattgaaaacaacctaaatgtctaacattaggaaagcattgaagtaatattgtatatatgtttaagtgaaatattatacatataataaaaatattacctacaaagaatttaagtgacgttgaaaattgattatgacttatgtgaacaaataaagatataatatataaccatgacatgatcttaactatgtaaaaatatataaaataaaaactacacaaaaaasgaaaaagttgttaaataaagaaggaatctgaggattagtgaaattgtgtctcttatgattttcctcataggtcattatatttttttcactttctcccactagcttccacagtcctcagaaagggaaatgttggtctataatacacaagatgtattcaaagtatctcacgtggtcctctggatgaggtcgtgccaaacacatgttttcagagtcatt

SEQ ID NO: 348759 - DNA, 589 bp, Homo sapiens
ttgaacaattttaagtaaaatgaatgtcactgtctttaaattgtacttggagcaaagacaaagaaacatcagctcattctttccaactaatagaacatttaatgatgcaatttttattacattattttaaggctattatcataatgttaaatattcttatttttttttgcttccgtctgttactaaagctcaatacatcattctgaacattattaattttcacttaacttagatttaagtattgaatttttaacttgggctccaggaaaaatcctgaaaaagaaagatcagcatctagcatccttttcctattctttcaccacaaattctcaatttgatatgacttawcatgaaatctgtattgggaagtatagatttctaagataactttttgtaactaaaaaataatttcctgtgcatcacaagggggattaaaaatcaccaaagtactgaaggaacacgtgctttgattattattcccacctgtttcttttttattataaagtggcaatttgtaccatcattagaaatgtacattaatgtataaagttttgcattcaaatctctttatttttgattacctatgact

SEQ ID NO: 348760 - DNA, 615 bp, Homo sapiens
caaagcaatgattttcagtgaagatgttacacaaacatcatgcttcaaaataattatgtaaacacagacmaaaaaatgaacaaatgttagtaaaaattctactacactgttataatcaagacaacagttttgttcccccatcccacaaaacactgaaaactattttatgtattaatgctaattcaagtatcaagtgactgaaagatccactattttttaaaaggacaaggttttataaaaatcatttaaacatgaatccaaattcttattatgttcttaacaaaggacagaaagcaatcagatgtaaaatgtagaaatagatcattttagaatcacttaaaatcagaagagaataagagaaaaatctttcagtctcacataacagaagtatatattaatagcaagtacaatttctcacatgaattatcctgaatcatatgttataaaagaataatatgccatttgaaatttttcttgtttcttagtagcgactatgatgaaaaatgtaggaagcacagtggatcataaataatgagctatcactcaattttcttactctctcctgtccctcattaataccaccctcattcacaagcaagttccagtaacttcaga

SEQ ID NO: 348761 - DNA, 615 bp, Homo sapiens
caaagcaatgattttcagtgaagatgttacacaaacatcatgcttcaaaataattatgtaaacacagaccaaaaaatgaacaaatgttagtaaaaattctactacastgttataatcaagacaacagttttgttcccccatcccacaaaacactgaaaactattttatgtattaatgctaattcaagtatcaagtgactgaaagatccactattttttaaaaggacaaggttttataaaaatcatttaaacatgaatccaaattcttattatgttcttaacaaaggacagaaagcaatcagatgtaaaatgtagaaatagatcattttagaatcacttaaaatcagaagagaataagagaaaaatctttcagtctcacataacagaagtatatattaatagcaagtacaatttctcacatgaattatcctgaatcatatgttataaaagaataatatgccatttgaaatttttcttgtttcttagtagcgactatgatgaaaaatgtaggaagcacagtggatcataaataatgagctatcactcaattttcttactctctcctgtccctcattaataccaccctcattcacaagcaagttccagtaacttcaga

SEQ ID NO: 348762 - DNA, 615 bp, Homo sapiens
caaagcaatgattttcagtgaagatgttacacaaacatcatgcttcaaaataattatgtaaacacagaccaaaaaatgaacaaatgttagtaaaaattctactacactgttataatcaagacaacagttttgttcccccatcccacaaaacactgaaaactrttttatgtattaatgctaattcaagtatcaagtgactgaaagatccactattttttaaaaggacaaggttttataaaaatcatttaaacatgaatccaaattcttattatgttcttaacaaaggacagaaagcaatcagatgtaaaatgtagaaatagatcattttagaatcacttaaaatcagaagagaataagagaaaaatctttcagtctcacataacagaagtatatattaatagcaagtacaatttctcacatgaattatcctgaatcatatgttataaaagaataatatgccatttgaaatttttcttgtttcttagtagcgactatgatgaaaaatgtaggaagcacagtggatcataaataatgagctatcactcaattttcttactctctcctgtccctcattaataccaccctcattcacaagcaagttccagtaacttcaga

SEQ ID NO: 348763 - DNA, 454 bp, Homo sapiens
actggttaagaaaaaaaaaattaaaggcaatactttcctccttttaataccagctagttaatttagtttattcattcccttctcttcactactagcaggaggtcagttataggtcacaagtgtatgacagtattttccaggtttctcttaatagatcagattttatctcatgttccctgtgattgtaataaaatttgacaatgtactgaatattttatatttggactaaaaattgcattgcctggattttctcttgctgttggaaatgtcaaaaaattcagaaacttgctcatgtacttttggatggaatgcattgtaggaagacactgaaaagtttgctggagtgtctgattagtccttatttccagtggtccatatagttctaattcaatgtgggccaatgtggtctttarttatgggccacacagtttctgtacaaagtagcactcagttt

SEQ ID NO: 348764 - DNA, 635 bp, Homo sapiens
tatgttgcctagaagaaacccactttaaatataaagacacatatggatcaaaagtaaatggatagagagtaataaactatgctaataataatcaaaagaaagctatagtagatattttaatttcactcaggacaaacttcaaagcaaggaaacgtgttcaggtacatttataattggtacagttaaatggtaattctcagacaatggtgagaatgtaaatgggtcatttttttgtggaagcatatttgaaaacatttatccatagcttacatttcatctctcttaaaatcttggtgagaaactattatttttcccctagtttcacagcatcctctagtgacagaatcagcactgtccttgagtctttcagctccatttaccatgcaaatacttttcctcctgcctgccttgttctcacaaataacttcagatttgcattagtggcagacttcacaactccttctatgaaagtaccttttaattcatgtgtttctcaacctcgccagcacctgtttgtgaggtctctgagcccaagcctgcacatrtacattcagatggcctgaggcaactgaagaaccacagaagaagtgaaaatgggcagttcttgccttaactgatgatattacctggtgaaa

SEQ ID NO: 348765 - DNA, 583 bp, Homo sapiens
ccactaaaactcataaataggaaagtatttaagcatatttctgacctagtctcatctgattgcttgacttgctacactagtacattggatattggttaattgcatagtttatcaatctgcaaactgttttgaagtccagatgctttttagaacgtaattattctagataaatactgttgcagttttcatttcaatttttgatcacatcacagtaatacaacattttctcattacatttcactatagatcatacaccgacattattttctaaacttgcttaccaaatgcttccttcatgaagttttcccagcaaaatgtacattcagttaaagtgggaattctgagacttctaaactagatggcatccctcctcatcagaagttctttttaagccatttaaatccatctaggtcaatgggattgaaaaaaataaacaaacaactttcagaatagtgttctatgaaattgacctttaaatgttttcttttcccaaataaaaattatttatcaagacattaaatatacacttataatktttctttccataagggtaatgtagatgacttttttcagcagtagaaaa

SEQ ID NO: 348766 - DNA, 534 bp, Homo sapiens
acataaaataataaggtttataatgtatatatctatatataaaaacataagccaaaataaaataccaaaatctcaaatatagtaaatttctttttgagaattaaaataatattctaacattctaagaagtttattacctatctagctgctagacattttcttctattatatgggaaatttatttggagtgtatactattgtttrgtttttgtcttgttttattttgctataaaatattgattcaatttgaacaataatgtgggaatattcattttttgacatggtttcatattaaaataataatcaatgtttattataaatgcatacttaaatataaacactcccccaaattgtaagtccaaactgatcgttaccaaaatatcatgccaacataccaagaaataaactaataaaataaacaaataaactccttttatttgttggtatgtaagaggaggataagaagaagataggaaaaaaaaagaaccattcctgcaactatcttagcggtaagaaaaaacagtttgagtaata

SEQ ID NO: 348767 - DNA, 462 bp, Homo sapiens
tacaagtgttctataaaaacaaaaccattttttcttctcttcagtgcttggttgattaagttaagacaaatttttccaccaggagcagtttsagcagttcaaaagaattgatgttatctctaggacacatttacctttttataataattatatatgtctagtttactccagtaaatgaattaactgactatatactgagctagatgtggctcagagttgagtaacatacactgcctatcttcaaagagacccttcagtcatcaaatttcattgcaattagcctccaaaatctagtgaaatggaattttggcagagaaagaaggcaggcaaagaaaggcattttgcaccagcagctaacagttaactccctcagcttttaccagttagtctatatacttctttcatggaggggaaatgctgggtgtgaaaataatcatattttctgaaaacaatcctccaata

SEQ ID NO: 348768 - DNA, 569 bp, Homo sapiens
gggtacaagtgttctataaaaacaaaaccattttttcttctcttcagtgcttggttgattaagttaagacaaatttttccaccaggagcagtttgagcagttcaaaagaattgatgttatctctaggacacatttacctttttataataattatatatgtctagtttactccagtaaatgaattaactgactatatactgagctagatgtggctcagagttgagtaacatacactrcctatcttcaaagagacccttcagtcatcaaatttcattgcaattagcctccaaaatctagtgaaatggaattttggcagagaaagaaggcaggcaaagaaaggcattttgcaccagcagctaacagttaactccctcagcttttaccagttagtctatatacttctttcatggaggggaaatgctgggtgtgaaaataatcatattttctgaaaacaatcctccaatacacacactcgccctccacccaatcatttgccccctaggtctccttagtgaggtagtgggagaaacaattggtgcatcatgtaaagttgtgagtgctcattgatg

SEQ ID NO: 348769 - DNA, 569 bp, Homo sapiens
gggtacaagtgttctataaaaacaaaaccattttttcttctcttcagtgcttggttgattaagttaagacaaatttttccaccaggagcagtttgagcagttcaaaagaattgatgttatctctaggacacatttacctttttataataattatatatgtctagtttactccagtaaatgaattaactgactatatactgagctagatgtggctcagagttgagtaacatacactgcctatcttcaaagagacccttcagtcatcaaatttcattgcaattagcctccaaaatctagtgaaatggaattttgkcagagaaagaaggcaggcaaagaaaggcattttgcaccagcagctaacagttaactccctcagcttttaccagttagtctatatacttctttcatggaggggaaatgctgggtgtgaaaataatcatattttctgaaaacaatcctccaatacacacactcgccctccacccaatcatttgccccctaggtctccttagtgaggtagtgggagaaacaattggtgcatcatgtaaagttgtgagtgctcattgatg

SEQ ID NO: 348770 - DNA, 513 bp, Homo sapiens
atggctcctattaacataatcacgacttctgcagaaatgggtcttctctctgcttgtttgcactgttagaatgtctttaatggaactgtgggaggggagggtagaaacctcgccattaagcaacaagatttggagatggaactgctcatgatttggtcccctggtttatcagcctgtattccatcatctatgaaataatagccttcttaatgtccatttcatagccagttagtatgtgagatctatgtattctcgggtatttcctacttaaccattgagtctagaaaacaggaagaatcgaattgctaagatataacagaacacctcatttctttgctgtttatgggcgtatctaggcttataatgtggcaaaagtcacaacaagaggatggtggaatgacctaagacaaaagtaatatttgcctctcacaattaataccagctcttaagattttgctggaaaaaatactatttatttaaytgattttttctcccaatagttcataatgaatg

SEQ ID NO: 348771 - DNA, 450 bp, Homo sapiens
catatttcttggagactttgttcatttctttttcttattttttcttattttcatctgattggcttaataaaaaagctttgtcttcaagttctaaaattcttttacttgttctagtctattgttaaaaatttccactgcatttcataaattccctaagtgtatctttcatttacagaagttctgattttttaatgatatctatctctctagaaaatttttcattcatatcctgaactccttttaagtttctttatgttggtcttcgcctttctctggtattttcttgagtagcttaataatcaacctcctgatttctgtatctggtatttcaaakatttcgtcttggtttgagtgcattgctggggagctagcgtaatcttttggggttgttatagaaccctgttttgtcatgttatcagttattttctggttccttcttctttgggtaga

SEQ ID NO: 348772 - DNA, 619 bp, Homo sapiens
aagcaaaatgaattgggtctttatagtttgggtcatgaatgccttgatttcttctttttcatggaagcacaattcattgttatggatttcccaacctctagattcttctgctaacttattttggtattggatatgtcaacctaaacctcatctgttctagaccattatgactctctgatgcagacagcttataatgtttcaaatatctgtatctgcacatttgagtacccaaagactccccaaagtgtggagtatcaagtatgcctcatctgactcattcatggagctaccaaacacccttgtttgtatttggcttcttgacagagatgtcccctttcattcttaaagtatgtcatatgaaaattctcattggatgatgatttgcaaagaacttcatttgaccccagttttgcagcatgggawggatattggataggcccagccttacctgagtgtgacaacagcataacaggtccgtgggtagattaaatggctttaataacagccacaactattgacaccatgacctgtgctcctgtgggatgtttttctgtctgcagtcaggaaacccatccttggacctataggtgctttaagggaggagatcatggacaatgtt

SEQ ID NO: 348773 - DNA, 610 bp, Homo sapiens
ttgtctggtgatgactcagtatatcccttatctgtgtacttcattaaatatttatataacgcattctgagatttcctgttctattttattgtcctctgatctagtttattctctttcatttcattttaaaatgctggtaatgtcctacaaaaataattttataatgtactcttcagttgtaacttgcaagtggaaaaaactgctacttatttgtcaacccagttggagtggcaaatgtaaaatgcagctactcagggttgatccagactgttgtctctaatctgcttaggtagaccatagccagctctgtgccatttttataggtaaagattctggcacagamttccaatacaatgtatttttttcatgtgatttaattagtaaaaataaaggtcattaaatgagaatttcacctatgaacatcataattgaaattcatccagctgacagatgaacacatagatctgtttgtttttttgttttttgttttttttttttttttgagatggagtctcgttctgttgcccaggctggagtgcggtggcgcgatctcagctcactgcaagctcctcctcccgggttcctgccattctcctgcctcagcctcctg

SEQ ID NO: 348774 - DNA, 547 bp, Homo sapiens
tcccacataaccaatggactcactctagagcaagaaggttgtatcatgttctggcactatctggaagctaatgacttcatatgatgttggaataacctaatgaaggtacagctgagacatcagctacaaaatgatgccctataaggatgagacactttcagccaggattcaatgtgcactctcaatcaatcatgattgtacattattgtatctacagtaaagtgtatgaggccaggaactaagtagaattcactgtgccttaattgawgaatttgtgatattctttttcacaactctaggttctacaagtttaagtcctgtcttcaagattgcaaaagtcaatctcacatacagatgaataaaaaaggttatttgctattgtgaagattttcaaagactgcccagccaaatgtagaacaaaatatgagtgtctaagaagctacactgactatgctttagaataataggtcattatacctgtggaggaagcttcagaataatcttatctgatcttctgtatttatcaatgaaaagattaaaggaccag

SEQ ID NO: 348775 - DNA, 544 bp, Homo sapiens
accttctactccctggagcctgtgaatatgttacattacatgtcaaaaacagggtaccagatagaaataaaatttctaatcagatgacttttaaagtagaaagattctaatgaactatccaagtggggccaatataatcataagtctttaaatgtggaagggggaggaacaaaagttgatggctagagtgaaggctagaatggttagaatgatgatgagaaaattatacaaactattcttgccttgaggaaggaagagtgccataaaggggaaattcaggcagcctgaagacgttgggaaatataaggaaactgatgctccctgatgtgttttggctgtgcccccacccaaacctcatcttgaattgtagttcccataatccacacayattgtgggagggacacagtgcgaggcaattgaatcatgggggcagttacctccatactgttctcatgatagtgaatgagttcttatgagatctgatggttttataagaggcttttcccgcacctttgctttgcacttctccttactgctgccatgt

SEQ ID NO: 348776 - DNA, 544 bp, Homo sapiens
accttctactccctggagcctgtgaatatgttacattacatgtcaaaaacagggtaccagatagaaataaaatttctaatcagatgacttttaaagtagaaagattctaatgaactatccaagtggggccaatataatcataagtctttaaatgtggaagggggaggaacaaaagttgatggctagagtgaaggctagaatggttagaatgatgatgagaaaattatacaaactattcttgccttgaggaaggaagagtgccataaaggggaaattcaggcagcctgaagacgttgggaaatataaggaaactgatgctccctgatgtgttttggctgtgcccccacccaaacctcatcttgaattgtagttcccataatccacacacattgtgggagggacacagtgcgaggcaattgaatcatgggggcasttacctccatactgttctcatgatagtgaatgagttcttatgagatctgatggttttataagaggcttttcccgcacctttgctttgcacttctccttactgctgccatgt

SEQ ID NO: 348777 - DNA, 544 bp, Homo sapiens
accttctactccctggagcctgtgaatatgttacattacatgtcaaaaacagggtaccagatagaaataaaatttctaatcagatgacttttaaagtagaaagattctaatgaactatccaagtggggccaatataatcataagtctttaaatgtggaagggggaggaacaaaagttgatggctagagtgaaggctagaatggttagaatgatgatgagaaaattatacaaactattcttgccttgaggaaggaagagtgccataaaggggaaattcaggcagcctgaagacgttgggaaatataaggaaactgatgctccctgatgtgttttggctgtgcccccacccaaacctcatcttgaattgtagttcccataatccacacacattgtgggagggacacagtgcgaggcaattgaatcatgggggcagttacctccatactgttcycatgatagtgaatgagttcttatgagatctgatggttttataagaggcttttcccgcacctttgctttgcacttctccttactgctgccatgt

SEQ ID NO: 348778 - DNA, 519 bp, Homo sapiens
tgttaccactcaacattttggcaaacattaaaaagtttaatgtacttacacatttgtaagagtgtagtataatacatagcaatatctgatgggaatttatatcctaaacatctacctataaagtgatgtataattacagaatacctatattgtcacaatttagcagtttaaaaaattaggcagatctatatgaatggatagaaacatttttaaataaatagaaacaagtttcaaagttatgtttgtgcatgtgtatgtccacatatataaagaactaccctgaaggagacacaaaaatgttcatagtactcctcaattaagaagggaatcaggtagaggaaacaagtaaaggagagctcwactacttgcattttctgcaaagtgattgattctttatatattttgatataatgataaattaatatctaaatgcaattaacactacattggtgttcatggtccaacttgggaaaatagcaagcattttaagcatattacagataacttagtacagaggtt

SEQ ID NO: 348779 - DNA, 570 bp, Homo sapiens
tttggttctttctcaaaatgacaacttcatctttcagctcttgtatcattttaatgtattctttagattccttggattgcgtttcaactttcttctgaatcttgacgatctttgtttctatccatattctgaattctatttttgtcatttcagccattttaggctggttgataaccacatagtcctttagaggtaagaagacartctttctttttgagctgccagagttcttgtgttattttttttcctcatctatgtgctgatgttccttcagcctttgaagttgctgtcctttggataggatttttgctttgatctcctttgatgcccttgtgggtttgattgtggtataaggtgggttcagtttactggccttgtttctgaaagatttcaggagtctgacgctcagctcagcactcctggtctatgtggtttaactctgcgggggctggtactctgcctttcagctttgttctgtggcaacttgaggttagaaacatgctgtgccagaggggctgaggtgttcccagtctcctggccacaacactccagtgggtggtgctggccaaa

SEQ ID NO: 348780 - DNA, 610 bp, Homo sapiens
tcgcaaaaacttgtcttaacgtgggtcttatttctattactgtatttgttctactttatttggaacattttttgtttcaagttcaggaattttgaccattaattctgtgaaaatatgattactttcactttgttcaatctattagtttgatgttgcaatcaaaattacttaatacccttttctctcttggtttatatcttcttgactctctcctccatttcttcacaaatatgatccatacatattcactttaaattgttctgttyaattttattgtctgctaccatattttcactttgaaaactcttgttttatggatgtccttttatagtgtcatgtttctattccatggtttcaacacattgtcttatttctgtgaagatactaatttttaaataatcttctgatccctgtactgtttctatttattccatgttgtcttgttttctgtttgttgctatttctgtagactggctaaaaatctaaccaccctggcaatactgacttccggtgaggatgcctagcagcaggaactcatctattgttggcaaaaaatgcaaaatggtatagccacttttgaagacagtttgggagtttcttatacatcaag

SEQ ID NO: 348781 - DNA, 605 bp, Homo sapiens
ctggtaaatgtataaacaaactgtcataaattcgtacaatgatatgctctccagcaatacaagaaaacagactattgatgcacgcaacagcatgaacraagctcaactgtattatgcaaagtgaaataaaacaaattcagcccaaactagggacaaaaaaatcaatgtttggtaaagactggggtcataaggagaacgtgactatttataggcataaagaatattttgtgagaagatgatggaactactctaatgttggtttactgatagtaacattactgtgtgattgtatcaacaaagaattgcattctgaaaagaatactttttactctacgtaaattataccaaaataaaaagacaatctcatgtttgtttaggcttttataatttacaactcacatttcatacatcatcagtttgatcttcacacaatttaattggtagatattattcttttctttatttcatagtaaaaaatgaactttgaatacaaaaaatcaggattgatgccaagtttcctgattcctgaccaagtattctctctgtcagacattaagatgcccatatttgttcgtgtgaatataagttgcctgatactttaaaat

SEQ ID NO: 348782 - DNA, 592 bp, Homo sapiens
gacttctaccacaaaccataccagattattactaatttctattataatgttatgtggtttcatttttccatgctttgactttaataagtgattttaaatatattaatgaatgaagaatatctacataaaatctaataatgactaatggaatgtattaraaatgtgtgggaatcaaaatgtgctataggaattcagaaaaagtggagattaatttctatgagaaatcagttttattttaaaaatggtatctgaactaaaccacagagatgggtaaaagctacagcagcagagactatatgagggctttataactagaggaataccctacgtatggaataactcaggcatatgcctgctttcaggagtctgttttattaaattttttcttgctaactatgccttttctaatctagcttgtaatctattcaattcaaaactatgaacatttgctagacataaatgaggtagtcttcagctcacaggaattcttctgttctgggaatttccccatagtagccaggtttctcttccctgatattattctcattatcctcctatgaccctggctgattgttgctattattaccagcaa

SEQ ID NO: 348783 - DNA, 592 bp, Homo sapiens
gacttctaccacaaaccataccagattattactaatttctattataatgttatgtggtttcatttttccatgctttgactttaataagtgattttaaatatattaatgaatgaagaatatctacataaaatctaataatgactaatggaatgtattagaaatgtgtgggaatcaaaatgtgctataggaattcaraaaaagtggagattaatttctatgagaaatcagttttattttaaaaatggtatctgaactaaaccacagagatgggtaaaagctacagcagcagagactatatgagggctttataactagaggaataccctacgtatggaataactcaggcatatgcctgctttcaggagtctgttttattaaattttttcttgctaactatgccttttctaatctagcttgtaatctattcaattcaaaactatgaacatttgctagacataaatgaggtagtcttcagctcacaggaattcttctgttctgggaatttccccatagtagccaggtttctcttccctgatattattctcattatcctcctatgaccctggctgattgttgctattattaccagcaa

SEQ ID NO: 348784 - DNA, 592 bp, Homo sapiens
gacttctaccacaaaccataccagattattactaatttctattataatgttatgtggtttcatttttccatgctttgactttaataagtgattttaaatatattaatgaatgaagaatatctacataaaatctaataatgactaatggaatgtattagaaatgtgtgggaatcaaaatgtgctataggaattcagaaaaagtggagattaatttctatgaraaatcagttttattttaaaaatggtatctgaactaaaccacagagatgggtaaaagctacagcagcagagactatatgagggctttataactagaggaataccctacgtatggaataactcaggcatatgcctgctttcaggagtctgttttattaaattttttcttgctaactatgccttttctaatctagcttgtaatctattcaattcaaaactatgaacatttgctagacataaatgaggtagtcttcagctcacaggaattcttctgttctgggaatttccccatagtagccaggtttctcttccctgatattattctcattatcctcctatgaccctggctgattgttgctattattaccagcaa

SEQ ID NO: 348785 - DNA, 602 bp, Homo sapiens
tactcttcatgttttcatttttttccttattcttagaaaaggctgaaaattttcctagataattgactatccatcgaagttttgtattttatatctttattctattgctattcttatcttgaaaaaaaattaacgcctaaaaaatgtatcaacaacccccccgcaaaacaactgcaagggagctgcttttggagaatttaagaataggttagttttgtttctagatataaactttctcaccagggacaataaattagacaagctagcaggtcagctttgaaggcactcaaagcagacattcggcaccatacagattacttttctctagcaagactgatatttatcctgtctcttttctcccrcagagaaagaaagccacacaaaggaattataacctcatgcaacaagaaaaataacaccttaccctcaatgtaagggtactccctgaagagcaatagcatatctcttttcccccaagagttaaccagcagctggaatggagaggttcaaactggtttgccaaacagtcctttccccaatccccaccaaaattatagaacattcacatcttctatatcgctaaagaaatttaggctgatttt

SEQ ID NO: 348786 - DNA, 531 bp, Homo sapiens
agtttccaacatgttgttacaggttttcattccgtttctatagctgttattctttttttttatagtgtcaaatttatttcacattcaagaggcacaggtgcaggtttgttactgggtatgttgcatgatggtgaagtttggggtataattgattctgtcgctgagcatagtacccaatagttagtttttcaaccttttccctcatcttttcctcctgcctagtagtccccagtttctatggttaccatctttatgtccatcagcacccaatccttagcacccacttataagtgagaaagaacatgtagcatttgattttctgttcctgtgttaatttacataggataatagcctccagctgcacccatgttactgcaaaatacatgattttcttctgtgtttttggctgcatagtattccatggtgtrtatgtaccacattttctttatccagtccacgttaatgagcacctaggttgattccagccattgcttttgtgaatagtgttgcaataaaaataagagtgcacat

SEQ ID NO: 348787 - DNA, 531 bp, Homo sapiens
agtttccaacatgttgttacaggttttcattccgtttctatagctgttattctttttttttatagtgtcaaatttatttcacattcaagaggcacaggtgcaggtttgttactgggtatgttgcatgatggtgaagtttggggtataattgattctgtcgctgagcatagtacccaatagttagtttttcaaccttttccctcatcttttcctcctgcctagtagtccccagtttctatggttaccatctttatgtccatcagcacccaatccttagcacccacttataagtgagaaagaacatgtagcatttgattttctgttcctgtgttaatttacataggataatagcctccagctgcacccatgttactgcaaaatacatgattttcttctgtgtttttggctgcatagtattccatggtgtatatgtaccayattttctttatccagtccacgttaatgagcacctaggttgattccagccattgcttttgtgaatagtgttgcaataaaaataagagtgcacat

SEQ ID NO: 348788 - DNA, 576 bp, Homo sapiens
agatatccatctcacagtcaatgacacacatagactcaaataaagtgatggagaaaaatctaccaagaaagtgaaaaacaaaaaagagcacatattgctattggaatttcaggagaaaaaaaaaacagactttaaaacaataaagatgaaaaaaaaagacaaagaagggcattacacaatagtaaagaggtcaattcaacaagaaaacctaaatatcctaagtatgtattcacacagaaaaagagcacctatattcataaaaccaagttcttagagatcattgaagaaatgcggctagccacacaataacgatgggaaacttcaacatcccactcatggtattagatcattaaggcacaaaactaacaaaaatatttgggactggaactttgacacttgaccaaatggatctaacagacatctacagaactcttcaccccaaamcaagagaatagtcattcttcttatctgcacatggcacatactctaaaatcaaccacacaattggccataaaataatcctcagcaaattcacaaaaactgaaattatatcaaccacactcatagaccacagtg

SEQ ID NO: 348789 - DNA, 565 bp, Homo sapiens
tttgaaaaactggtcttcaagatctgaaattatttctcttcttgatccagtatgttgataaagctttcaattatattttaaaattccttaaatgagtttttctattctagaagctatacttgatttttttttttaatgttaatctcatccttcatttcctggatagatttagaagtttcatagtgttgattctcaaccttgtactggatgtcattgagcttccctgaaatccctgctttgagttctttatctggacctgcatttccattttggytaggaactatttcctaaccaaaatcatttctgcatttccattttggttaggaattattgctggagagctagtgtgttatttcggtgatgtcactgcattcatatttttcatggtggcagactgtttacactggttccttcttatctggaaatgctggcacttctattttttgaaattattttcatgtcagtaggaatgtttctttttctttctctatagtattgttttctttcccttcctctttccccctttccataggatttgtgactatagagaatgttgggtagggcc

SEQ ID NO: 348790 - DNA, 565 bp, Homo sapiens
tttgaaaaactggtcttcaagatctgaaattatttctcttcttgatccagtatgttgataaagctttcaattatattttaaaattccttaaatgagtttttctattctagaagctatacttgatttttttttttaatgttaatctcatccttcatttcctggatagatttagaagtttcatagtgttgattctcaaccttgtactggatgtcattgagcttccctgaaatccctgctttgagttctttatctggacctgcatttccattttggttaggaactatttcctaaccaaaatcatttctgcatttccattttggttaggaattattgctggagagctagtgtgttatttcggtgatgtcactgcattcatatttttcatggtggcagactgtttacactggttccttcttatctggaaatgctggcacttctattytttgaaattattttcatgtcagtaggaatgtttctttttctttctctatagtattgttttctttcccttcctctttccccctttccataggatttgtgactatagagaatgttgggtagggcc

SEQ ID NO: 348791 - DNA, 610 bp, Homo sapiens
gatccaggcaagggggtgttccaaaaatctggtgaatctgcctggatgtggagtggagagggacatgctacaccacaatctatgtccataatgggtgggttggctcaggtgctgatccaggcaatggggtgctycaaaaacttggtgatctgcctgggtgtggagcataggaggatctgctgcatcacgatctacgtccatgcagggtagggtggcttagactgctggtccaggcaagtgggtgatccaaatgtctgaatttttacctgtgggtgaagcagagagggccctgctacaccatgacctcaggggagcaggctagggcactcagcaataacacaggcatactggctttagattgccaagctgacttggctgcaactcccatcacccaggtgaaactggttctgtagcagcatttcttccaccccaggcctgctgctgaggtgctttcctcagttctagctgtgaagacttctaccctgctccagagccaatagctccaatcactggcccaagacaaaaatgtctgaacatccacattgccaggtcgcctaggaatagctgactttgcatgctcccaggttaaaaacagcttcctgctgtcagt

SEQ ID NO: 348792 - DNA, 610 bp, Homo sapiens
gatccaggcaagggggtgttccaaaaatctggtgaatctgcctggatgtggagtggagagggacatgctacaccacaatctatgtccataatgggtgggttggctcaggtgctgatccaggcaatggggtgcttcaaaaacttggtgatctgcctgggtgtggagcatrggaggatctgctgcatcacgatctacgtccatgcagggtagggtggcttagactgctggtccaggcaagtgggtgatccaaatgtctgaatttttacctgtgggtgaagcagagagggccctgctacaccatgacctcaggggagcaggctagggcactcagcaataacacaggcatactggctttagattgccaagctgacttggctgcaactcccatcacccaggtgaaactggttctgtagcagcatttcttccaccccaggcctgctgctgaggtgctttcctcagttctagctgtgaagacttctaccctgctccagagccaatagctccaatcactggcccaagacaaaaatgtctgaacatccacattgccaggtcgcctaggaatagctgactttgcatgctcccaggttaaaaacagcttcctgctgtcagt

SEQ ID NO: 348793 - DNA, 585 bp, Homo sapiens
tcttacatctgctgcactatttctttttgtcaggacagcacctcatttccaggtcttagttgtctttgttgttaacccaattacctcaaaaactgcttcaaacaaaaatgatcatttattatctttcacattttgtggattacaaattcagacacatcacagtttctgtggatctgctgggagaatgaaaggtcaggagcttgaattatcagaggtttccttcacttatatctgaaggtggattcttgctgttagttgggacttgtgaagacggtgaagggtctgagattttgccagatatgtaaactatcatacatgctggcagaagacacaagattcctgagtcagagacaaaagactttattaattaaggcatagaagggagagtgattttcaagttcacgcaattacccttgttcttaagtcctacaaggggaacatggagtgactcaggtggatactgcacatatagtatatatgcttcatagatgagcaaccttgagcttggaaaatatcaatctttgcaatgggctggaartgaacttccttgaactttgcactgaagggcaacatgatcctctgact

SEQ ID NO: 348794 - DNA, 625 bp, Homo sapiens
gccatcaaatgtctatgaccctcagaaagcatgatggttaacaatacagactttggagtgagattggctatgtccagatcctagcttttgtatttactagttgcatgaacttgtgcagtctggccttcagtgcatatacctgtaacataagctgcatagacatgtctgttttatagggttagtgaaattatccaaatggcgattatccaaatcacgatggtgatttatggaaagacatcacaggcaaagtatacaagtttctttaaagaagttaacaagaactgaactgggtagaaatggttgtacaaagccagaagctttccacattattcctattagaggagcaaatatcccatgccattcaagtatgtcaaatgtgccctagcatttattggaccattaggtttttcttggtgtttctttatcattcttctgtgatgtcttaaacccttttggtttgttttaatatttatgtatttcttaagaggtacatgtaactggtaggcrcactgccaacacattactgaatttttctcaaggttaccataccaagtgtactatcctttagcaggccaaatattaggttttcttgaagtttattcctgcaagtttgtgcaacaattta

SEQ ID NO: 348795 - DNA, 625 bp, Homo sapiens
gccatcaaatgtctatgaccctcagaaagcatgatggttaacaatacagactttggagtgagattggctatgtccagatcctagcttttgtatttactagttgcatgaacttgtgcagtctggccttcagtgcatatacctgtaacataagctgcatagacatgtctgttttatagggttagtgaaattatccaaatggcgattatccaaatcacgatggtgatttatggaaagacatcacaggcaaagtatacaagtttctttaaagaagttaacaagaactgaactgggtagaaatggttgtacaaagccagaagctttccacattattcctattagaggagcaaatatcccatgccattcaagtatgtcaaatgtgccctagcatttattggaccattaggtttttcttggtgtttctttatcattcttctgtgatgtcttaaacccttttggtttgttttaatatttatgtatttcttaagaggtacatgtaactggtaggcgcactgccaacacattactgaatttttctcaaggttaccataccaagtgtaytatcctttagcaggccaaatattaggttttcttgaagtttattcctgcaagtttgtgcaacaattta

SEQ ID NO: 348796 - DNA, 666 bp, Homo sapiens
aattaaaatttgtaactttatcaaaacatttttgaaataagtgattcttttaactttatttttacaattctacaattttaaaagccaaaacacaattacttgagggaagtgataaaggtgaatgaggaatcctatagtcttgaaactgaaaaatagttgagtacatattttctctgcactttatggaagactaaactgaattctagaaaatcagaagakgcctctagattgttttcaagccaagaccacatgggcatcttgatgtcttagagagtatatattctactgcactatactacatgtagaagattctaagtccattgaaaaaaattaccagggagagaaaatataaaataaataatagtacctggagttaatgtattgttaattttgagttcaaaggtttttttttttcctatacgcacataaccaagctattaataataaaataacaagaagatataaaaaggtgatttttttttagtaagtaaagtattttgaaaaatgttccaaaatttataaaaatattggtatgggatttctaattttatttgtgtttcagattaatttattacaatatccagtgtcctgctttattaaacagctgagacaatacagaaaggaaaactagaaattaaattatctatttatgccttttaattttag

SEQ ID NO: 348797 - DNA, 666 bp, Homo sapiens
aattaaaatttgtaactttatcaaaacatttttgaaataagtgattcttttaactttatttttacaattctacaattttaaaagccaaaacacaattacttgagggaagtgataaaggtgaatgaggaatcctatagtcttgaaactgaaaaatagttgagtacatattttctctgcactttatggaagactaaactgaattctagaaaatcagaagatgcctctagattgttttcaagccaagaccacatgggcatcttgatgtcttagagagtayatattctactgcactatactacatgtagaagattctaagtccattgaaaaaaattaccagggagagaaaatataaaataaataatagtacctggagttaatgtattgttaattttgagttcaaaggtttttttttttcctatacgcacataaccaagctattaataataaaataacaagaagatataaaaaggtgatttttttttagtaagtaaagtattttgaaaaatgttccaaaatttataaaaatattggtatgggatttctaattttatttgtgtttcagattaatttattacaatatccagtgtcctgctttattaaacagctgagacaatacagaaaggaaaactagaaattaaattatctatttatgccttttaattttag

SEQ ID NO: 348798 - DNA, 666 bp, Homo sapiens
aattaaaatttgtaactttatcaaaacatttttgaaataagtgattcttttaactttatttttacaattctacaattttaaaagccaaaacacaattacttgagggaagtgataaaggtgaatgaggaatcctatagtcttgaaactgaaaaatagttgagtacatattttctctgcactttatggaagactaaactgaattctagaaaatcagaagatgcctctagattgttttcaagccaagaccacatgggcatcttgatgtcttagagagtatatattctactgcactatactacatgtagaagattctaagtccattgaaaaaaattaccaggragagaaaatataaaataaataatagtacctggagttaatgtattgttaattttgagttcaaaggtttttttttttcctatacgcacataaccaagctattaataataaaataacaagaagatataaaaaggtgatttttttttagtaagtaaagtattttgaaaaatgttccaaaatttataaaaatattggtatgggatttctaattttatttgtgtttcagattaatttattacaatatccagtgtcctgctttattaaacagctgagacaatacagaaaggaaaactagaaattaaattatctatttatgccttttaattttag

SEQ ID NO: 348799 - DNA, 666 bp, Homo sapiens
aattaaaatttgtaactttatcaaaacatttttgaaataagtgattcttttaactttatttttacaattctacaattttaaaagccaaaacacaattacttgagggaagtgataaaggtgaatgaggaatcctatagtcttgaaactgaaaaatagttgagtacatattttctctgcactttatggaagactaaactgaattctagaaaatcagaagatgcctctagattgttttcaagccaagaccacatgggcatcttgatgtcttagagagtatatattctactgcactatactacatgtagaagattctaagtccattgaaaaaaattaccagggagagaaaatataaaataaataatagtacctggagttaatgtattgttaattttgagttcaaaggtttttttttttcctatacgcacataaccaagctattaataataaaataacaagaagatataaaaaggtgatttttttttagtaagtaaagtattttgaaaaatgttccaaaatttataaaaatattggtatgggatttctaattttattygtgtttcagattaatttattacaatatccagtgtcctgctttattaaacagctgagacaatacagaaaggaaaactagaaattaaattatctatttatgccttttaattttag

SEQ ID NO: 348800 - DNA, 535 bp, Homo sapiens
gctagctataaaaagcatttccaatttcttgtgcctttaaatttaaaagagcttgttagaagggttaggatgaactaagtttctataaaaggctgaccttggaactttgaattatactttcctttgatctcagtatatgtcccttaacaaacaaaaaatcatttcatttcttggtctagagctgagctcttcagaataaacagtctagtttattctgtgcatttcaatgcacagtgttaaactggtaaaccagcacatcagtaggtaaaggcacttgaaatgttcttctagattaaatatcttcagataaccaaatgaagaaaattatggatatcctatatgaccacacatattaaattccagggtgttactatgaaagcaactttttcttggattctgatttccatccttcatgatcaaacaartattttgtcagttaaaaatttaaatatgccatcttacaatggatgagtgctacaatatgactcagtgcagaaattgttctttaatcacagggttgaaatactagcatgtg

SEQ ID NO: 348801 - DNA, 559 bp, Homo sapiens
catactttgggttttcttctaatgcctctagattttgcttatctttgaaggcctgttatcccctaactggcattgaaatttggcatttcacaaaattctacccgactcacttcctttgtccagctttctccttcaatcatactttttcaaactgtgggttttgatagaatcttgagacattaaatcaatacagtgggtaataatcaaaattttagaaatgtattaaaaagaaaatagcatgagcaagggtggtgtatttgaagaatttcatgaacttctagaaaactgcattatgttcatttgcacacattctargacttgagcctggcaggaaaagtaatggagagcattgtatgctgtgagaaatggatagcatttggtcttggaaatgatgaagaaacactgatattttaaggtgaattttattgaagaatgtaatgtactcaatctctttataagcaggaagaacagtgaatattctgcttattggaaatgtatataagacattctaacatatccttagcctaaggtgatatcccagctcatcaatcatctccac

SEQ ID NO: 348802 - DNA, 643 bp, Homo sapiens
ctaatagaccccaaatccttgtaatggcacaaaacaacagaagcttctttcttatttcatatagcagcatggggtggatgaataagtgtccatggacgctctctatgyagtcattcaagaacccaggtgggttggggctcttccatcttcaacagctgggttcctgaatgattgcatggaggagacaaccatggacgcttgttcatcagttcatcactagtagtcatcagtcaagaaatctaagaataagaatgccatggaggcagggttatcagataaaatgtagaacaacaatgctatatgtagaacatactagcactaaaatattattctgtatttacctgaaatttaaatttaactagattttccatattctgtttgctaaatatggcagcactacatgtaactatgtaagaaaaaaaaagaaactgtgcattaaccttttaaataaatatttttaatagtatcacccttaaatgcttagcacaatgctataattaactttagtcatcctgatatggaaaaagtagtgggataattatctcttaattatgtgacgaggaaagaaaatgtaattttgacctccccaagtgggtaaatgactaagattagaagccatgtccactcattactagatcctgca

SEQ ID NO: 348803 - DNA, 603 bp, Homo sapiens
tagccatatgtattactcatcttcccatgtcctgtctctcctctgtgcctttaattatgctctactgtttcttttgctcagaatatctcctgttctactgctatctgagacgcgttcttyaagtaacctagccaggttagacacttgtcctctaccgctctagctttgtcttcataatccttgcaaactagttttcacattgtcttgtaattatctctctctcccctcctcacctgtgttgactgtggtcttcttaagcaaatatatacaggtcactgctttcatcttctgtatctgccacactgcctggatagaggaggcattcaattcattattgctaaggcaatgaatctatcttcaaatctgtatgtctcagattccttacctgtaaaataaagattgccagagagactttttcaccaaacaaggtcttattgatccggctcgcttggcttgctcgctgtctctctctctctctctctctctctctctcacacacacacacacacacacacacacacacacacacgtggttcaatatattttaagtttatactgaaactatttaaaataaataactctatagaatatataaactattag

SEQ ID NO: 348804 - DNA, 603 bp, Homo sapiens
tagccatatgtattactcatcttcccatgtcctgtctctcctctgtgcctttaattatgctctactgtttcttttgctcagaatatctcctgttctactgctatctgagacgcgttctttaagtaacctagccaggttagacacttgtcctctaccgctctagctttgtcttcataatccttgcaaactagttttcacattgtcttgtaattatctctctctcccctcctcacctgtgttgactgtggtcttcttaagcaaatatatacaggtcactgctttcatcttctgtatctgccacactgcctggatagaggaggcattcaattcattattgctaaggcaatgaatctatcttcaaatctgtatgtctcagattccttacctgtaaaataaagattgccagagagactttttcaccaaacaaggtcttattgatccggctcgcttggcttgctcgctgtctctctctctctctctctctctctctcwcacacacacacacacacacacacacacacacacacacgtggttcaatatattttaagtttatactgaaactatttaaaataaataactctatagaatatataaactattag

SEQ ID NO: 348805 - DNA, 589 bp, Homo sapiens
agaatgtggagaaattagaatcctgtacactgttgggaatgtaaaattctgtagcagctatggaaaatagcatagaggttcttcaaaatgtaaatatgggactaccatatggtttaacaattctacttctggatatgtatccaaaagatttgaaaacagggtctcagagattgtttgcgctcccctgtttgtggtagcatgattcataatagctaaaacatgaggtataaatatagaatggaatattattcagcctttaaggaaaatcctgtcatatgcaacaacatggatgaayctggaagccattatgctaagtgaaataatccatgcaaagaaaaacaagtactgcagtatttcacttatatgaggagtctaaaatagtcagacttacagaggcagagaatagaatggtggttgccaggagttgaggggaggggagaaatagggagctgctattcaatacctgtacaaattatacgtggttctagaaatctactgtattaaatcatgcctaaggtcaataatactgtgttgtatacctaaaaatgtgttaagagggtagatctcatgttaaatgttctcaccacaa

SEQ ID NO: 348806 - DNA, 589 bp, Homo sapiens
agaatgtggagaaattagaatcctgtacactgttgggaatgtaaaattctgtagcagctatggaaaatagcatagaggttcttcaaaatgtaaatatgggactaccatatggtttaacaattctacttctggatatgtatccaaaagatttgaaaacagggtctcagagattgtttgcgctcccctgtttgtggtagcatgattcataatagctaaaacatgaggtataaatatagaatggaatattattcagcctttaaggaaaatcctgtcatatgcaacaacatggatgaatctggaagccattatgctaagtgaaataatccatgcaaagaaaaacaagtactgcagtatttcacttatatgaggagtctaaaatagtcagacttacagaggcagagaatagaatggtggttgccaggagttgaggggaggggagaaatagggagctgctattcaatrcctgtacaaattatacgtggttctagaaatctactgtattaaatcatgcctaaggtcaataatactgtgttgtatacctaaaaatgtgttaagagggtagatctcatgttaaatgttctcaccacaa

SEQ ID NO: 348807 - DNA, 445 bp, Homo sapiens
agtgtctggaggtgagggatagaagacttcacatagggtacagtgtatactgctcaggtgatgggtgcaccaaaatctcagaagtcacctctaaagaacatattcatgtaaccaaacatcacctgtttcccaaaacctattcacgtaaaaaaattagagattccaaatccatttccagtaagtctgaagtagttgatctaggcaatttgaagaagattaaawattattaaatactctagatgattctgatatggatgactaagagccctactccaagacaggctcagaactccagaatgctgacagctgaatgaaaagggaacatttgcttctcagtagaaaccaagcagtattgaagaggtagagggctagagaggaagccaagaataaaattccttaaaaatgaatgggtgcttctgatccaaaatgatttttcagaatttac

SEQ ID NO: 348808 - DNA, 514 bp, Homo sapiens
gttggggaaggtgtaggatgattgcattaacctgcttttagtttgacatagtaacacctacctcattatatttactttcttattctgggggtgtgtttgtttcgatttaatttaattttttgtaatttattgtgactaattgtggggtacagagttatgatatatgtatgcagtgtggaataattaaatcacactaacatatctatcatcttaaatattaattatttaatctctcaattgcaactttccaccctttgataacattatcccatccmaattcccatccccttaccaccaatctaccctctgctactatgagttcaacttttttagattcctcatatcagtgagatgagtggtatttgtctttatgtccttggcttatttcactcaacataatgtcttccaggttcattcatgttgttgcaaattatagaatttccttcttttttcaaggctgagtaatattacattgagcttacaaaccacattttctttatccattcatccactg

SEQ ID NO: 348809 - DNA, 483 bp, Homo sapiens
tttatgcaacaaaatgcatggaagggatgtttagcaagtaaaaaaaaattcaaaactatttatttgaagctgaaaataactatctctaaacttctatacctcattgaaggtaaacttttctaaatcatatattcctttctcttaaaatgtgttcaactaattttgtgatgtaacacattagcaacaattgaaaagcttaagctgaacaattatgaaaagatgttgaactgaaaaactagtgtagaatatactctcctaaacagtactgtttgtaaaattttaaaaaatgctatgtgatgatttrtaacttagtgttaatgaatcatgagtttttatcataatatacacaacttttacacacataattcagtattattttctctttcagtaattcaatcatagcagtagatgttttatattaaatcatggtcatacttttcatgttattaaactttatattttataattttaggtgaaagaata

SEQ ID NO: 348810 - DNA, 575 bp, Homo sapiens
attagctgcaaaaagtaatctctaaaaagttcaaaggatactcaagtaacactttgtgctccacagcaaggaatgaacgcawggccaggtatggtggctcatgcctgtaatcccagcactttggaaggccaatgtgggcggatgacttaaggccatgaattcaagaccagcctgggcaacatggcaaaaccccatctttactaaaaatacaaaaattagccaggcgtgctggtgcatgcctgtagttctagctacttgggaggctgaggcatgagatttgtagtgagccaagattacaccactgcactccagcctgggcaacagagtgagattctgtctcaaaagaaaaaaagttaaaagaaaaaaaaaaaaaaacatgatatttttaattgtatttcattttcattaatttaaatataaaaagccatgtgtggctagtggctattgaataacacagggcaggtctagtaggtatacatgcaaaattgtttagtagagattatatttgcaaattattaaatttagaattaaggacttttcattttcctctcagagcatgccttgttactgcagga

SEQ ID NO: 348811 - DNA, 541 bp, Homo sapiens
taaggatattaatggtttaaatattaaatctatatatacaaatatattataaacagaatattgtcttactttcttamaacaaatttatctttgaccctgcaagtatatcattaacccttcattctagtcacttcacaaggatagatggttaacttaacaaaagtggtttatgctaattcagtagaaacctaaaagataatagcattcaataatgaaaatttttgtttgttctttaaaaaaaaaaagctctcaaaataatttaaatacctatagttcaaagtccctccaaacccccaccctgattcccaaagaaaataaaattagggttacatactgtgaaataatggggagaaataatattttctttaattcaattttagtaaaatggattaatatggttaaatactttgtggtgcatgtgtgtatacttttcaatttgtcattaccaggttcataaatatatttctatatttatgtatacatatttatatctgggtatttgccatcaatttaatcatctagttcatcatcacctaatgcg

SEQ ID NO: 348812 - DNA, 634 bp, Homo sapiens
agaacattagaacttattccatccatctagctgtgactttgtatccattaaccaacctcttcctaccccggcccataatttttcttaaaaaatctgtggtttcaactgggcrcggtggctcacacctgtaaccccaacactttgggaggccgaggcgggcggatcacctgaggttgggcgttcgagaccagcttgaccaacatggagaaactccatccctactaaaaatataaaatcagccgggtgtgatggcacatgcctgtactcccagctactcaggaggctgaggcggaaggatcacttgaacctgggaggcagaggttgcggtaagccaagatcacgccactgcactccagcctgggcaataagagcaaaactctgactcaaaaaattaaaaaaaatatatatgatttcaaagtccacaacatcctttgaaaaatatgacatgttcattgtctgaaaagtatgacatgttcattgtttttaaagatctgcaaactgaaaaacaatactgaagaaatactagtattaatcttatattcctccaatatagttattattgtttacaaattgaaaggtaaatggttacttaacttttttaatgtcaattttcttaatattctgggatctaaac

SEQ ID NO: 348813 - DNA, 538 bp, Homo sapiens
tgctccagtgtcttaaaacaatcaagctatagaaactatcacctgggtaaaaaatgtccaaagttccctgactagagattaaaccgttgagaagcaaatggtgaatctggaataaaaaaaaaagcaaacacctactgtcccatataaaacaaacaaacaaacaaaagacttcagtctttcatagtgtgataagcttaaagacaattaccagttattgaagagttctttgaactaggggcttcaaaatcttaagtagggtctcataggaccaagcaatcttcataaagtattcatggtaaaactttcaatatttagaaaagtacgtaatgaaattctaccaaaaacaagttaagcagtatcaaaattgcatarggtagtcacctgcacatacacaaataattataaaacataagaagatgcatagcatgtaaagctaaaataacaagttttaccccctccatttttatgaaaaaaaaatagcaacctgacttgaattaaaacaacctctggaggtggactaatgtatattacaaaaaaa

SEQ ID NO: 348814 - DNA, 534 bp, Homo sapiens
cctctttttgatctttgtgaattttgtttcctagaaccatcttgttcatgttcatcccagggacatgaactgtaaagacccaatgtaatattcacagagttttgcatagccttttccaggtttatttctttttttttttttttttaatatggagacaaaattctacccctatgtattgtttaaaaatacagccaaattctccagattcagttttaggtcatgcattccttgaatttttttttctttggatgagttcttgcatagagacaacttttaaaacactttaagtaaacaatttgcacttgtgtcttcattcagtgacactaaatgtcaccagtccgtgttatggcaatctgccccatgagtcacamaaaccttggaaacgttgtcattctaaactttggttacaatactgacaagcataatttggaatcagaattgattctgtgaatcttattaagggagtttccgaatctattaggacaaatatttcttagcaatgtgctagagaagttgtacactttttttttttta

SEQ ID NO: 348815 - DNA, 588 bp, Homo sapiens
tgagaaaacattaggttgagaaatcattgaacatggttgaagaatgaaaatgagagaggagcttggagaatacagccagtgaaaatgraaacctggggtctggaaaaattgagtcccaattctatagtttggactcatcgggctatctcaggcctatataaatgagattcatctaaagcaaactgggttaattttacaaaaaaaattcaaatcactttctaccagttcaaatgagaagaatatctgaatgttagtaatgtgaatacataacacatgataacttggaggtaaggttaacaggatgggacatgaagagagagacaaaatttttggaaggaagtatatgtcaattcttacaatatgaatatctcattgggggctttaaaaatgcaaattctagtaaagcagagtcactcatacaactttatacaagaaagttaatgaattctttaaaagggcacttttaaagaattaaaatgtgtatatacacacatacatatatgtatacatatatatatataaattaaaaggggcacttttttctcaattggattatttttataagagccagctataattaggaaacaa

SEQ ID NO: 348816 - DNA, 565 bp, Homo sapiens
attaccaaaattctttcctaatgattaaaataatttgtgtttgtattcgacagcaatagatatgaacattttacttgcttcaatagaaatcctattaaaagggtataaatgagttccagggacactaaatctgcatgmgctcattgattacctacatcatatatttttagcatagtcttttctaacactttagctgcatccttaacaaacaaaaaacaaaagaaggaaatgtataaagctacaattcaacacgtcatctttgaagaattttcctgtgccagaaatcataagaaaattatcttttcctattgtctttccaaggaatggtaactcagaccccataaatcctgagacaatgtgacagaactaaagaggcaagaatttccgccagaattttcactcatcaacttgaggcagttttctctgcagtagtttaaatttatattcaacttagaaatacttttggttttcaatattttttcatactttttcctcccaatttttatagctttacggcctcgatgattttatggttaatagttcatattattgaagaagaaagtag

SEQ ID NO: 348817 - DNA, 565 bp, Homo sapiens
attaccaaaattctttcctaatgattaaaataatttgtgtttgtattcgacagcaatagatatgaacattttacttgcttcaatagaaatcctattaaaagggtataaatgagttccagggacactaaatctgcatgcgctcattgattacctacatcatatatttttagcatagtcttttctaacactttagctgcatccttaacaaacaaaaaacaaaagaaggaaatgtataaagctacaattcaacacgtcrtctttgaagaattttcctgtgccagaaatcataagaaaattatcttttcctattgtctttccaaggaatggtaactcagaccccataaatcctgagacaatgtgacagaactaaagaggcaagaatttccgccagaattttcactcatcaacttgaggcagttttctctgcagtagtttaaatttatattcaacttagaaatacttttggttttcaatattttttcatactttttcctcccaatttttatagctttacggcctcgatgattttatggttaatagttcatattattgaagaagaaagtag

SEQ ID NO: 348818 - DNA, 643 bp, Homo sapiens
agcagcaatgtataattgtagggagaaaaatttttatctctatagatattagtgttttctaagaagttcatactattccaaataaaatgccttgtcaacagattgctcaaaaaatcactgagaaaatagagacataaaaaagaagtgctaaaagwtaatatggataaaacctttacattagctaatttgaaagctaggaatatacttaaaactctcaaaagaaaaacagaaaacactgacgagatcaaatacacagctgcataaggtctatgtctccaagaggcagtcacagatacatggcttatatttcattatccttccataatctctccagtgcttactatgtgccatgtactgaaacaaacactggaaatgtggtaaagaaaaaggaattattttgttacctttcaagagattataatgactggtgaagacttatgataaagtcaagagtatggaatacataaggaaactcaacagaaccttggaagggctggctaagctgtaacatgagttatgagtaggggctaaccagtcagataagactgggttagccagtgcacttgtgtggtggagggtggaagggatggccaaaagaggtgttccagatgaaagcaacaaagagttcagggtcttaaaaatg

SEQ ID NO: 348819 - DNA, 643 bp, Homo sapiens
agcagcaatgtataattgtagggagaaaaatttttatctctatagatattagtgttttctaagaagttcatactattccaaataaaatgccttgtcaacagattgctcaaaaaatcactgagaaaatagagacataaaaaagaagtgctaaaagataatatggataaaacctttacattagctaatttgaaagctaggaatatacttaaaactctcaaaagaaaaacagaaaacactgacgagatcaaatacacagctgcataaggtctatgtctccaagaggcagtcacagatacatggcttatmtttcattatccttccataatctctccagtgcttactatgtgccatgtactgaaacaaacactggaaatgtggtaaagaaaaaggaattattttgttacctttcaagagattataatgactggtgaagacttatgataaagtcaagagtatggaatacataaggaaactcaacagaaccttggaagggctggctaagctgtaacatgagttatgagtaggggctaaccagtcagataagactgggttagccagtgcacttgtgtggtggagggtggaagggatggccaaaagaggtgttccagatgaaagcaacaaagagttcagggtcttaaaaatg

SEQ ID NO: 348820 - DNA, 622 bp, Homo sapiens
taattctactttctagggctttgcccaacagaatagttttgtcttgcctgtttcaaagcactgatgacacccaggaactgcttttgtgtaggagccactcacaacaaaaaaaagagcttggaagagtgctgttgcttaaaggaaccaggtatagcatagaggcaccacaaagagttaagagtttatcagctcctgaaaagrcaaaactggaaagccttctaatatagaattaacacacataacttcagagaggatatatacacagaaaaaggttggaaagcctcccagattctctagttgagctgattggtgaaggggtttctttgtatgaagccaatccataaagaatgggagagaaagctggatttttttttcaaatatataaataccaacacagaaggtgtaagtagcattaaaaaaaccaggaaactgaccaaaaataacaaaacatctccagaaaataaccttaaataaataaaggtatatgagttacccaacaaagaattcaaaataaccattgaaaagatgcttagtgagctcaggaaactaatgcctgagcaaaaatagaatttcaacaaagagacaagaaatatagaaaaaagacacaaacatacattttgaa

SEQ ID NO: 348821 - DNA, 622 bp, Homo sapiens
taattctactttctagggctttgcccaacagaatagttttgtcttgcctgtttcaaagcactgatgacacccaggaactgcttttgtgtaggagccactcacaacaaaaaaaagagcttggaagagtgctgttgcttaaaggaaccaggtatagcatagaggcaccacaaagagttaagagtttatcagctcctgaaaagacaaaactggaaagccttctaatatagaattaacacacataacttcagagaggatatatacacagaaaaaggttggaaagcctcccagattctctagttgagctgattggtgaaggggtttctttgtatgaagccaatccataaagaatgggagagaaagctggmtttttttttcaaatatataaataccaacacagaaggtgtaagtagcattaaaaaaaccaggaaactgaccaaaaataacaaaacatctccagaaaataaccttaaataaataaaggtatatgagttacccaacaaagaattcaaaataaccattgaaaagatgcttagtgagctcaggaaactaatgcctgagcaaaaatagaatttcaacaaagagacaagaaatatagaaaaaagacacaaacatacattttgaa

SEQ ID NO: 348822 - DNA, 513 bp, Homo sapiens
aaaaacagacaagtgagaccatatcaaactaaaaagcttctgcccaacaaataaaagagtaaagagacaacctatgtaatgggagaaaatatttgcaaaccaaatatctgataaggggttactattcaaaatgtataaggaactcctacaactcatagaaaaatatttaatcacttaatttaaaaatgggcaaagaagctgaattgctgtctcttcaaaaaagacatacaaatgaccaaatgtttgtgaaaagatactcatgatcactaatcctcagggaaatgaaaatcaataccaaaactaaattaaatattaccccacacctgccaattgatgaccattattaaaaacaaaacaaaacagagaacaatgtgcaaatgttggcaagaatgcatagaaattaaaaccctagggtatacttttggtgsagcttctgaaatggtacagccactatataaaacagtaggaggttactcaaaaattaaaaatagaattatatgatccaaaaattct

SEQ ID NO: 348823 - DNA, 570 bp, Homo sapiens
tccagaggtctctggaagcttatttatttcactggcaacatgctcctctgtcagttatttggtggtgcagttcattctttattccagtaggtgtcacttaagagtaagagccagctttcccttaggtaacccagtaaggagtggaggcttccaccctracggggagtgatggggaaagagatggccttgggatgggctgaggtcttgagggaaggggcaccagctcctcatcctgcatgccttatttattaagaacccaattagcatctgagaattgttgccacgagtcaggtgaccagatgccttaagaatatctgttctcttaccttgctgcttcttccatttgggctttacctcttctttcccactcctccatccacggtggaaaaaaagaaaaagaaagaaagaaagaaggaaggaaggaagaaataaagaaagaaagaaagaaagaaagaaagaaagaaagaaagaaagaaagagaaagaaaggaaagaaagaaaaagaaaagaaaagaggcgccatgagcttgtcaccttctctaatggaggaagaggtgagttcatagttttt

SEQ ID NO: 348824 - DNA, 582 bp, Homo sapiens
gagtcctcccctttgtgaacagaacaacatatgcctacaggaatgggacaagtttttggtagccatctttgcacaagatctatcacaactggttaaaaaataagttcatattcttgttctgtcaattgttagttgagtgatcttgggtaaatttttttaacctctctaagcttcagagttccgaaccacaaaagtagtatactggtaatctttatttcaaaacgttgttgtaagaattaagtgacatatatacatacaacattaaatacattgctagccacatgttacatttcaataaatgagaattatcataaaaacataatatgcaattttcattaacctcaaaaccattttagtataattcagatttatagaagtcactggtttcagagaatagcctgggcaagtaagatttaagtaaataaaaatgttttcatttttagccctgaaaaagtttgtttccataatagattccctctrcattttatatgatatccagaagagtaaggttgaaaattgcagcatgaaattggcagagacatatctgcttaaaaatatttgtgtacatattgcttgaccagc

SEQ ID NO: 348825 - DNA, 389 bp, Homo sapiens
attgcctagcatttttattattaaatacttccttacctcaaataatgttatgaatagcagtaagaaacataatatttttaagtataataaaaactatataaaaacaaggaattgtaattggtcacaaaattarcgtcgaaaatagaataaaaccaaatctctaactctgcaaatgtgtgcaacgatacaaacatttaaatatgcaaccttcttaaatcttcctaggaacagcaaagcttggcactttggaagcttgataacatcacagcatggaagaaaagtggaaggaaggtaaggagttcttcagaaaaaataaataaataaagacgattgccaattcttgtataagagaaaaccgaagaggcaagagctagggaaattaggattct

SEQ ID NO: 348826 - DNA, 491 bp, Homo sapiens
ccttctctaagagatggctttgaattccagattatgtagcatgttcaacaaagaaaagtaaatttttagagaaatgacaaaacaaaaagaaagaactttgagtctctargggtgcaatttgggggaagcaaataaatgccagattaagaatagtaaaacttgttaatacatattcctgtggtagaatcttccaggtccataaagttccaaagcagtgatggaggtaggggttgggggtaaggggatgtcccggtgtggcaggagggctggagggggtggggcataccatttgcttttgtaaatatatgtcctgcgtttcgacaaatagagagatgataggcaattattctgcatctgctttttcttaattgtcttcagatcaacaattcatattttggggtggcatatcctggtctcccacaaaaaatcccatcttttttcattaaaaaatattgttaatatttgtttatttaaacattttgtggaagcat

SEQ ID NO: 348827 - DNA, 596 bp, Homo sapiens
agtgtacagtgcttataaaatctacagtagtgtgcagtaatgtcctgggccttcacattcactcaccatttgtgcactgactcacccagagcaccttccagtcctgcaagctccattcatagcaagtgtcctttattttaggagtactaattgttaatatcttttatgccatacgttcactatacttttttytttatttatatatgttaagataaacaaatactatctttgtgttatacttggccataggcaattttgaaatctaggtaattttatttgggggcatattttgttctggtttagtgggatatatgtatatggtttgtattcacttctactagttaattactaacaattgtcccagtatagaaatacttttctactcacttgtgtcatggaccaaatatgcaatgaaagaagccgtatgtcaacatgaatatgtcatatgggatctgctatgataagtgtgttggcagtggtgaagaaacaatatttgaaatgtgcatagtcaaaagttagtctacagaaatttattctacataacagacatattaaatcttaagtacaagatttcattctcatacaagttcagttta

SEQ ID NO: 348828 - DNA, 596 bp, Homo sapiens
agtgtacagtgcttataaaatctacagtagtgtgcagtaatgtcctgggccttcacattcactcaccatttgtgcactgactcacccagagcaccttccagtcctgcaagctccattcatagcaagtgtcctttattttaggagtactaattgttaatatcttttatgccatacgttcactatacttttttctttatttatatatgttaagataaacaaatactatctttgtgttatacttggycataggcaattttgaaatctaggtaattttatttgggggcatattttgttctggtttagtgggatatatgtatatggtttgtattcacttctactagttaattactaacaattgtcccagtatagaaatacttttctactcacttgtgtcatggaccaaatatgcaatgaaagaagccgtatgtcaacatgaatatgtcatatgggatctgctatgataagtgtgttggcagtggtgaagaaacaatatttgaaatgtgcatagtcaaaagttagtctacagaaatttattctacataacagacatattaaatcttaagtacaagatttcattctcatacaagttcagttta

SEQ ID NO: 348829 - DNA, 493 bp, Homo sapiens
gatagtttgaattcttcttttcctattcatatgttgtttattttgttttctctcgtgattgctttggctagctatttcagtactatgttgaataggagtggtgagaatcagcaaccttgtcttgtttcagttctcaagaagattgctcccagtttttgccctttcagtataatgttggctgttagtttgtcatagttgtctcttattattttgagatgtgtttctttgatgcttcatttcttgagggcttttatcaygaagctatgttgtattttatcaaaagctatttctttgtctattaagttgatcatatggtttttaattgtttaagtactaattacatttatttagttgcgtatgttgaaacaaccttgcatcccaagagaaaagtctacttgatcatggtgaattacttttttgatgtgctgttgaattaggtttgctagtatttttttgaggatttttgtgtccatgttcattaggaatattatcc

SEQ ID NO: 348830 - DNA, 486 bp, Homo sapiens
ttggaactgatttttatttttattccactgtggtgtgagattatagttggtatgatttctaattgtattttaattaattgagattttttttatggctgagtatatggttgatcttggaatattttccttgtgcaattgaaaagaatwtatattctgtggttgatgggtattctgtagatgtctactagttccagttgataaagtgttgaatttaagtccagaattcttttgttagttttctgcctctatgatctgtctaacaccatcagtggggtgttgaatttccctgccattattatgtggcagtctgagtcctttactaggtctacaagtatttgttttatgcacccgggcactctaatgtagagcatgtatatatttaggatatttaagtgttcttgttttagttgaaccctttatcattatgtaatgcctttctttgtcctttttttactgtagttggcttaaagtctattttatctgata

SEQ ID NO: 348831 - DNA, 486 bp, Homo sapiens
ttggaactgatttttatttttattccactgtggtgtgagattatagttggtatgatttctaattgtattttaattaattgagattttttttatggctgagtatatggttgatcttggaatattttccttgtgcaattgaaaagaatatatattctgtggttgatgrgtattctgtagatgtctactagttccagttgataaagtgttgaatttaagtccagaattcttttgttagttttctgcctctatgatctgtctaacaccatcagtggggtgttgaatttccctgccattattatgtggcagtctgagtcctttactaggtctacaagtatttgttttatgcacccgggcactctaatgtagagcatgtatatatttaggatatttaagtgttcttgttttagttgaaccctttatcattatgtaatgcctttctttgtcctttttttactgtagttggcttaaagtctattttatctgata

SEQ ID NO: 348832 - DNA, 486 bp, Homo sapiens
ttggaactgatttttatttttattccactgtggtgtgagattatagttggtatgatttctaattgtattttaattaattgagattttttttatggctgagtatatggttgatcttggaatattttccttgtgcaattgaaaagaatatatattctgtggttgatgggtattctgtagatgtctactagttccagttgataaagtgttgaatttaagtccagaattcttttgttagttttctgcctctatgatctgtctaacaccatcagtggggtgttgaatttccctgccattattatgtggcagtctgagtcctttactaggtctacaagtatttgttttatgcaccygggcactctaatgtagagcatgtatatatttaggatatttaagtgttcttgttttagttgaaccctttatcattatgtaatgcctttctttgtcctttttttactgtagttggcttaaagtctattttatctgata

SEQ ID NO: 348833 - DNA, 478 bp, Homo sapiens
actttgtagtttctattgtgtggttcctttatagagtctatgagctatagacttaagtgtgggctgttttggtagcaggtattgttatttagtttttctgttcacaactcctttaaggatctcttgtaaaactggtctagtggtaacaaattcccttagtgtttacttgtctggaaaagattttatttctccttcagttacraaacttagcttggcaggaagaaactaaacttggtttagatttttgtttggaatttctttgttaaaatttattgtctttaagaatgctaaaaatagccccccaatctcttatggcttataaaatttctgctgacaagtccactgttagcctgatgagggttccctttgtatgtgatctggccttttttcctacctggctttaagatttctactttagcattgaccttgaatagtctggtaaatacatatcttgttaatgtatttttttatagcatct

SEQ ID NO: 348834 - DNA, 478 bp, Homo sapiens
actttgtagtttctattgtgtggttcctttatagagtctatgagctatagacttaagtgtgggctgttttggtagcaggtattgttatttagtttttctgttcacaactcctttaaggatctcttgtaaaactggtctagtggtaacaaattcccttagtgtttacttgtctggaaaagattttatttctccttcagttacgaaacttagcttggcaggaagaaactaaacttggtttagatttttgtttggaatttctttgttaaaatttattgtctttaagaatgctaaaaatagccccccaatctcttatggcttataaaatttctgctgacaagtccactgttagcctgatgagggttccctttgtatgtgatctggccttttttcctacctggctttaagatttctamtttagcattgaccttgaatagtctggtaaatacatatcttgttaatgtatttttttatagcatct

SEQ ID NO: 348835 - DNA, 558 bp, Homo sapiens
gtttctttatgttgattgtaaacctcrtcttgaattttgttgatcttccttgcaatccatgctttgaattctttatctgccatttctgaatttctattttgtttaggagcattactggatggctagtgtgatcctttgttgttgtcattgcattcagattttttatgctgccagaattattgttcctttttatctggagatgctggcacttctaatttctttttattttttaacctacaatattgttgtgttatttcctttctctttcccttttccccatccccaaggggtgtgactatagagaatgctgggtggagtcttttgacttaacttctacagccctatgcatttcggtcagcatgttttatactgggctgtgcagttacatctagaagacagtagctagcacttatatataatatatgactatggccaacatggcctggtgtatacctgaactttgtttactggaagaagctctattttgcctcaggcaatgggctgattcatagagggcacagtggtgagagctccctgctcagccctgggcaggaatga

SEQ ID NO: 348836 - DNA, 558 bp, Homo sapiens
gtttctttatgttgattgtaaacctcatcttgaattttgttgatcttccttgcaatccatgctttgaattctttatctgccatttctgaatttctattttgtttaggascattactggatggctagtgtgatcctttgttgttgtcattgcattcagattttttatgctgccagaattattgttcctttttatctggagatgctggcacttctaatttctttttattttttaacctacaatattgttgtgttatttcctttctctttcccttttccccatccccaaggggtgtgactatagagaatgctgggtggagtcttttgacttaacttctacagccctatgcatttcggtcagcatgttttatactgggctgtgcagttacatctagaagacagtagctagcacttatatataatatatgactatggccaacatggcctggtgtatacctgaactttgtttactggaagaagctctattttgcctcaggcaatgggctgattcatagagggcacagtggtgagagctccctgctcagccctgggcaggaatga

SEQ ID NO: 348837 - DNA, 558 bp, Homo sapiens
gtttctttatgttgattgtaaacctcatcttgaattttgttgatcttccttgcaatccatgctttgaattctttatctgccatttctgaatttctattttgtttaggagcattactggatggctagtgtgatcctttgttgttgtcattgcattcagattttttatgctgccagaattattgttcctttttatctggagatgctggcacttctaatttctttttattttttaacctacaataytgttgtgttatttcctttctctttcccttttccccatccccaaggggtgtgactatagagaatgctgggtggagtcttttgacttaacttctacagccctatgcatttcggtcagcatgttttatactgggctgtgcagttacatctagaagacagtagctagcacttatatataatatatgactatggccaacatggcctggtgtatacctgaactttgtttactggaagaagctctattttgcctcaggcaatgggctgattcatagagggcacagtggtgagagctccctgctcagccctgggcaggaatga

SEQ ID NO: 348838 - DNA, 520 bp, Homo sapiens
cacaaccccagacagcacagtgcagaaagagaatctatgtgtgtaggggaaaaagagacgtgtgtataagactttgtattggaacttagtaccagctacaccacattataacacagcacttggaagaaactcagcccttgatgccaggtcattgtacatgaagtgagaatttgggcccattctatgccagaagggaatccacagacccattggaagaaactcttttctcaacctgcttcaccaaatggtgaaaaaagtggcttcagkcctataataaatttcattggcaggaaggttgtagtaactgcaattctcaagcaagtcctggtgctgtgctggtccggaaggctgtgggtttggaatataactaagcatcacatcaactgtggtgacaatggaagggtctgcatcacccttcccccaactccatatagtgcagcaacaagagagattccttctacctgggagaaggagaaggaacagatcagcagattttgccttagaaccaagtaccagcctc

SEQ ID NO: 348839 - DNA, 520 bp, Homo sapiens
cacaaccccagacagcacagtgcagaaagagaatctatgtgtgtaggggaaaaagagacgtgtgtataagactttgtattggaacttagtaccagctacaccacattataacacagcacttggaagaaactcagcccttgatgccaggtcattgtacatgaagtgagaatttgggcccattctatgccagaagggaatccacagacccattggaagaaactcttttctcaacctgcttcaccaaatggtgaaaaaagtggcttcagtcctwtaataaatttcattggcaggaaggttgtagtaactgcaattctcaagcaagtcctggtgctgtgctggtccggaaggctgtgggtttggaatataactaagcatcacatcaactgtggtgacaatggaagggtctgcatcacccttcccccaactccatatagtgcagcaacaagagagattccttctacctgggagaaggagaaggaacagatcagcagattttgccttagaaccaagtaccagcctc

SEQ ID NO: 348840 - DNA, 520 bp, Homo sapiens
cacaaccccagacagcacagtgcagaaagagaatctatgtgtgtaggggaaaaagagacgtgtgtataagactttgtattggaacttagtaccagctacaccacattataacacagcacttggaagaaactcagcccttgatgccaggtcattgtacatgaagtgagaatttgggcccattctatgccagaagggaatccacagacccattggaagaaactcttttctcaacctgcttcaccaaatggtgaaaaaagtggcttcagtcctataataaatttcattggcaggaaggttgtagtaactgcaattctcaagcaagtcctggtgctgtgctggtcyggaaggctgtgggtttggaatataactaagcatcacatcaactgtggtgacaatggaagggtctgcatcacccttcccccaactccatatagtgcagcaacaagagagattccttctacctgggagaaggagaaggaacagatcagcagattttgccttagaaccaagtaccagcctc

SEQ ID NO: 348841 - DNA, 520 bp, Homo sapiens
cacaaccccagacagcacagtgcagaaagagaatctatgtgtgtaggggaaaaagagacgtgtgtataagactttgtattggaacttagtaccagctacaccacattataacacagcacttggaagaaactcagcccttgatgccaggtcattgtacatgaagtgagaatttgggcccattctatgccagaagggaatccacagacccattggaagaaactcttttctcaacctgcttcaccaaatggtgaaaaaagtggcttcagtcctataataaatttcattggcaggaaggttgtagtaactgcaattctcaagcaagtcctggtgctgtgctggtccggaaggctgtgggtttggaatataactaagcatcacatcaactgtggtgacaatggaagggtctgcatcacccttcccccaactccatatagtgcagcaacaagagagattccttctacctgggagaaggagaaggaamagatcagcagattttgccttagaaccaagtaccagcctc

SEQ ID NO: 348842 - DNA, 399 bp, Homo sapiens
aaataatttaaaaaaatcaaacagaaatcctgaagtggaaaagtacaatagagaaagcgaaaattgcattagagggtctccacagcagaattaataaaacaaagtaaagaatcrgtgcactcaaagataggctatttgaaacaaacaggagagaaaaagtaaaaataaataaataattaattaaaaaggaacaatatatgctgataccaatgagatatatggggtggtataaaaagagaaaatgtaagggtcattggccttaaagaaagaatagaataacaaaaatggctaaaaagctaaatcaaagtaataataacagaaaatgtgtccaacctagagaaagacataaacctccaggcagaggaaggtaaaaaatcaccaagcaaatgccatgcgaat

SEQ ID NO: 348843 - DNA, 536 bp, Homo sapiens
agagtaaatgctttgtgaaactaaactgagtaaagattttaaaataagaccttagaagcacaggcaacacaagcaaatatagacaaatgggattttattaaactagaaagcttatgctcagaaataaataaataaagtgtagtgacaacctacaggatgagagaaactatttgaaaattatgcatctgacaacaggttaatattcacatacataaaaaattcaaaaaactcaatagcaaaaatcagataatccagctaaaaatgcataaatggtctgaayagacatatttccaagggagagactcacagagccaacagatatatgaaaaaatgttcaatgtcattagttatttaaaaaaaatcacaatgagatatcatttcatcacatttagaatggccattatcagaaagcccaaaaataacacatgctaacgaggatacaatgtaaagagaactcttatacactgttggcagaaatgcaaactagtacatccattagaaaacatgatagaggtttctcaaaaactaaaaataga

SEQ ID NO: 348844 - DNA, 563 bp, Homo sapiens
gtatatatccaaataaatataaattattctattttaaagacacatgcacacatatgtttattgtagcactattcacaacagcaaatacaatggaatcaacatraatgcccatcaatgataaactggataaagaaaatgtggtacatacccaccataaaatactatgcagccataaaaaatgagattatgtcctttgcagggacatgactgaagctggaggccattatcctcagcaaactaacaaaggaacagaaaaccaaatactgcatgttctcatttataaatgggagctaaatgatgagaacatatgaacagacagaggggaataaaacacactgaggccttccagaaggtggaaggagggagaaggtcagaaaaaataactaaaaataactaatgggtactttatacctgggtgaggaaataatctgagcaacaaactcctgtgacgcaagttaacttatgtaatgaacctgcagtttattcttgatcttaaaatgaaagttaaaaaaggaatatatatctgtcttaaattaatgctaattgaagttatcagggattct

SEQ ID NO: 348845 - DNA, 563 bp, Homo sapiens
gtatatatccaaataaatataaattattctattttaaagacacatgcacacatatgtttattgtagcactattcacaacagcaaatacaatggaatcaacatgaatgcccatcaatgataaactggataaagaaaatgtggtacatacccaccataaaatactwtgcagccataaaaaatgagattatgtcctttgcagggacatgactgaagctggaggccattatcctcagcaaactaacaaaggaacagaaaaccaaatactgcatgttctcatttataaatgggagctaaatgatgagaacatatgaacagacagaggggaataaaacacactgaggccttccagaaggtggaaggagggagaaggtcagaaaaaataactaaaaataactaatgggtactttatacctgggtgaggaaataatctgagcaacaaactcctgtgacgcaagttaacttatgtaatgaacctgcagtttattcttgatcttaaaatgaaagttaaaaaaggaatatatatctgtcttaaattaatgctaattgaagttatcagggattct

SEQ ID NO: 348846 - DNA, 563 bp, Homo sapiens
gtatatatccaaataaatataaattattctattttaaagacacatgcacacatatgtttattgtagcactattcacaacagcaaatacaatggaatcaacatgaatgcccatcaatgataaactggataaagaaaatgtggtacatacccaccataaaatactatgcagccataaaaaatgagattatgtcctttgcagggacatgaytgaagctggaggccattatcctcagcaaactaacaaaggaacagaaaaccaaatactgcatgttctcatttataaatgggagctaaatgatgagaacatatgaacagacagaggggaataaaacacactgaggccttccagaaggtggaaggagggagaaggtcagaaaaaataactaaaaataactaatgggtactttatacctgggtgaggaaataatctgagcaacaaactcctgtgacgcaagttaacttatgtaatgaacctgcagtttattcttgatcttaaaatgaaagttaaaaaaggaatatatatctgtcttaaattaatgctaattgaagttatcagggattct

SEQ ID NO: 348847 - DNA, 531 bp, Homo sapiens
tcaattttctaatatttaacttaatatttatggtttggaaatttagacatctcagataatttagttgagaattttccagactatctcagcacctgaactgattgctccttatagccgaagcaacatcttgaagttatattgatttgcttaacaacatttctgtgaattaaaaacaaamacaaaaaccataagtcatacaaatgcccatagactcagtgaaagcaagagagattctgatggatcttaacctaaaatacctatgatggactggtccaggtaattcttctttaattttgagaaaatcctattattatttctgtctagaaacgtattttgattaacattggcttaggaaactgacataataaatatgtataattatattggttagagtattattattctcaatttggaaagtaggcatcatatgagttcctaaaatatctgtaatcaattgacttaatctatgatcatccaaggaaatttgcaagtatgcaaaatttaaaataaaattaaagtacaatcaatcaa

SEQ ID NO: 348848 - DNA, 622 bp, Homo sapiens
tgcgataattaattttgtttgtcaacttgactgggctcaggaattccaaggtggctggtaaaacattatttctaggtatgtctgtgaacatttctccagaagcaattagcatttgaatcaataggctttggaaacaagattctccctcatcattgtragtggacatcgtctaacacaatgaagcctgaatagaaaaaaaataggcaggaaaaaaaagtgaatttgctctttctttttgttagcctggatattcatcttctcttgccctcacacatgggtgctcctaattcttgggccttcagactcagattgaattataccaccagcctttctggttctccagcttgcaggttgtagatcatggacttcttggcctccacaattgcataagccaattctcttaataaatctcttcttgtataatatatatatatatacacacacactatatatatgtgatatttagagttcatatatatgtgtgtgtacatatatattcacacacacacatacacacatcctattggttcaatttcagtttaatacacacacacatgcacacatactatatgtatatatataaaatatataaaatatatatattagggttctaatatagata

SEQ ID NO: 348849 - DNA, 540 bp, Homo sapiens
aaatgtgttaaaatgttaacattgggaagctggatgaggggtataaggraatagtttaaactagtttattcaagttttattaagcccgcaataaattaaatataaaattttaaataaagattggtaagagcaagctaaattttatacctcttttcttagttatcacaaaggaataacaaacaacgtgctctccttaagccatcctgactactctaacatcctgcttccactaaaaatactgacggccaaattcacaaataagagacaagatggaaactgattgatttcacaccggtaaggctgaaatttaaatgggtagttttttggaagagatcccattaagggagggtatttggccatttatcataggttcataatgagttaattagtcagaacattttttcttccattcattcagatactcattgagtatgtattgtggtctgtgtgtgcatttgtgtttgtaaatatggcaggattccatctctgccctcaagttgcttaactgagggtcattgcacaaagcacaatatttactgc

SEQ ID NO: 348850 - DNA, 656 bp, Homo sapiens
gtttaaactagtttattcaagttttattaagcccgcaataaattaaatataaaattttaaataaagattggtaagagcaagctaaattttatacctcttttcttagttatcacaaaggaataacaaacaacgtgctctccttaagccatcctgactactctaacatcctgyttccactaaaaatactgacggccaaattcacaaataagagacaagatggaaactgattgatttcacaccggtaaggctgaaatttaaatgggtagttttttggaagagatcccattaagggagggtatttggccatttatcataggttcataatgagttaattagtcagaacattttttcttccattcattcagatactcattgagtatgtattgtggtctgtgtgtgcatttgtgtttgtaaatatggcaggattccatctctgccctcaagttgcttaactgagggtcattgcacaaagcacaatatttactgcatagttattgctactgcttcaaggcacaagtcagatatcttccaggaacctatatttaagttgtctactaattattcaactaaatacctgaatgatatctgtctatattgtgctcttactctaagctcccacaaagctggctctatgaaatacaatttactttttcata

SEQ ID NO: 348851 - DNA, 540 bp, Homo sapiens
aaatgtgttaaaatgttaacattgggaagctggatgaggggtataagggaatagtttaaactagtttattcaagttttattaagcccgcaataaattaaatataaaattttaaataaagattggtaagagcaagctaaattttatacctcttttcttagttatcacaaaggaataacaaacaacgtgctctccttaagccatcctgactactctaacatcctgcttccactaaaaatactgacggccaaattcacaaataagagacaagatggaaactgattgatttcacaccggtaaggctgaaatttaaatgggtagttttttggaagagatcccattaagggagggtatttggccatttatcataggttcataatgagttaattagtcagaacattttttcttccattcattcagatactcattgwgtatgtattgtggtctgtgtgtgcatttgtgtttgtaaatatggcaggattccatctctgccctcaagttgcttaactgagggtcattgcacaaagcacaatatttactgc

SEQ ID NO: 348852 - DNA, 604 bp, Homo sapiens
aagccttaacttctgtatttcagattgtgwctgtatttcaatataggaccattaaagagataattaagttaaaatgaggccattagggtaggccctaagtcaacataacttttgtccttataggaagaggagattaggacatcaagagacaccaagagtaaccatgtacagagaaaaacatcatatgaagacacagcaagaaggtggccatctgtaagccaaagagaggcctcagaagaaaccaaatctgctaacacaatcatggactttcagcctccaggactgtgtgaaaataaatttctgctgtttaagccaccccagtgtctggaattctatggcagccctagcaaataaatacaactactatcagtattatttgtcttttatattactctacagtgtcaagccaaatttaatttttaaaataatgatatctcatatccacttaagctaaatagggcccaggatttcattcttgggtatatatctaagaaaaatgtatgctgatattcactataaatatattcataccagctttattcataatagccccaaactggaaacaactgaaatgcccatcatgaaataggataaataaattgtg

SEQ ID NO: 348853 - DNA, 561 bp, Homo sapiens
ttttttggtgtagtctttaggtttttctaaatataagattttgtcatctgtaaagagaaacagtttgacttcctcttttccaatttggatgtagctattggatgaaatgttctgtaaatgtctgttaggttcatttggtctaaagtgtagtttaaatccaatgtttctttgttaattttttgcctagataatctgtctaatgttgatagtgggataaagtcttccactattattgtattggagtctaactctccctttagatataataatatttgctttatatatctgggtgcttcggttttggtgcacatacatttagatttattatttcattttctttattgatccccttatcattatataatgatgttctttgtttccttttactgtttttgacttaaagtctgttttatctgacataaatatagcyattcctgctcacttttggtttctgtttgtgcagaatacctttttccatccctttacttttagtttatatgtgtctttacaggtgaaatgagtttcttatgggtggcatatagttggctaatgttttttaat

SEQ ID NO: 348854 - DNA, 648 bp, Homo sapiens
aaatcggttaataggaaagagcatatacagaggcttaggatctggaaatacagtcatttaaaactatccatgttcagtatccatgtgtttccagtttaaagactactgctttaaatcatataacagtttctgttcagtcattagcatttccagttctatgtgataatcacaagttgartgctgacttgatgttaattttctccccctccccagctagggttggcctcgggtagggcattgccacagggagggtgtgtgctccctttgagtctcttaccccagagtttcttgccctctgggtttggagtgtaggatgaaaggaggggaaagtggggcagggaagtttctgtttctttggtgattgcagtatggctttgatctctctggtccctggcaggtgttcagagctgacttattcgcaggtgtcccatttccttgctgagccaatttgtcttccctctggttagtatttacttgactcatgcaatgtacgtttttatttctggtggtactaactttttaaggatcctcttgggaagtatctccttaacttgggactcacttctggtcccagggtttaccaggctttgatctgccttgatgtttggggtgctgtgtttcaatatgttcccatagattgtgttggaa

SEQ ID NO: 348855 - DNA, 593 bp, Homo sapiens
ttgcaatatttccagagtattgaggaaggaatagaatgaccctcaaataccatacttagcttgatgcatagaaggcactaattttgttgttgttgttaaacaaataccagaatgcaaatgtcttttctctggggatggttgcagaaaagtatgtgtaactcattgtacttttgtaaaagaaaaacatgtgtttgtatatgtaaatttaggaaaaaggtggaaagaattgtctcagactgattaaacccaggaatggagggaactttacttcttaattcttataatgaagtcaaagttttaataaaatttggtaatattttacattttgtattttttagtttttgaaaaataccatctatgtaaaaaaaargcaaacactatcatagatcaaagcctaattatacagtttttttatttaaaacaagctgttcttgcatattcattaaaaaaaaaactcaggtatattatttgtgccagaacagtctttagacctatatttattggtgaactttaagaataaaacattgtcagcttcaaccttctatgtccttttaaaggtgattaaactttcctaggttggacaggatggcttg

SEQ ID NO: 348856 - DNA, 618 bp, Homo sapiens
agttcaagatatagaacattagtggcacccaagaggaccccttataaccttaatttacaagtaactaccacaccagcttcaatcaccatagattagcttttcctgtttttgaatattgtatgaatggaataatgcagtatgttctcttttttgaactttatgtaattagacataaatatattgagcttctttcattcaatgttatgtctgaaatttacccatgttgttacatattatgggagcagttaattctttttcattataatactatatagtgttgtattgtagaaatagccacaatgtaattattaattaatatgggcatttgtttctagtttttkgttattatgagtaatactatttttacatggattttggtgcacatatgtaggaatttctgctgggtagataccagcagaattgctgagtcatagggtatggttatttttatgttcagctttagtagattctgccaaactgttttataaaatagttgcaccaatgtatactcctacaaatactgtatgagtgttccagttgcaccattaatccttggaaacacttgtgttgttgttgttgttttaaagtaattttgaccattctgatagtaatgtagtg

SEQ ID NO: 348857 - DNA, 519 bp, Homo sapiens
tttaggatcctttctgtattctttacctttgggagtttgattattaaatgtcttgaagtagtcttatttaaattaaatctgcttggtgttctataccctttttgtacttgaatattgacatctttctccaggtttggaaagttttctattattatctctgtgaataacctttctatgctgatctcattctctacctcctctttaaggtcaataactcttagatttgcccttttgaagctattttctagatcttgttaggtttgctytattctttattattctttttccttttgtctcctctgtgtattttcaaataggcttgctaattcattcctctgcttgatcagttcttctgtttagagactgatgcattcttcagtttgtcagttgaatttttcagctccagaatttatgcttagttctttttaatgattttaatctctttgttaaatttatctgataggattctgaattccttcactgtattatcttggatttcattgaacttcttcaaaacag

SEQ ID NO: 348858 - DNA, 593 bp, Homo sapiens
cttgaccattcaaggatttgtgtatcccatgggagtcctggaaccattcccccatggataccgaggggtagctgtacatttattggtgcctgccttcttgcctggtgcctgtttgttctttttggattaagagaaataattcctggctgtgcacrgtggctcacacctgtaatcccagcactttgggaggccgaggcgggcggatcacctgaggttaggagttcgagaccaggctggccaacatggcgaaacttcctctctactgaaaatacaaaaattagcgggcgtggtggcagccacctatattcccagctagtcgggaggctgaagcaggagaatcgcttgaacccgggaggcggaggtttctgtgagccgagatcctgccactgcactccagcctgggggatagagagacattctgtctcaaaaaaaaaaaaaaaaaagagaaataattcctgtcacagggagcggaaacatgctgaaataattatttgctgaaattgttttccaacagatggctttaggaatcaggagatttgacactaggacgttaggtgggcaatggatttctagtaatttgtcagctttgtttt

SEQ ID NO: 348859 - DNA, 593 bp, Homo sapiens
cttgaccattcaaggatttgtgtatcccatgggagtcctggaaccattcccccatggataccgaggggtagctgtacatttattggtgcctgccttcttgcctggtgcctgtttgttctttttggattaagagaaataattcctggctgtgcacggtggctcacacctgtaatcccagcactttgggaggccgaggcgggcggatcacctgaggttaggagttcgagaccaggctggccaacatggcgaaacttcctctctactgaaaatacaaaaattagcgggcgtggtggcagccacctatattcccagctagtcgggaggctgaagcaggagaatcgcttgaacccgggaggcggaggtttctgtgagccgagatcctsccactgcactccagcctgggggatagagagacattctgtctcaaaaaaaaaaaaaaaaaagagaaataattcctgtcacagggagcggaaacatgctgaaataattatttgctgaaattgttttccaacagatggctttaggaatcaggagatttgacactaggacgttaggtgggcaatggatttctagtaatttgtcagctttgtttt

SEQ ID NO: 348860 - DNA, 593 bp, Homo sapiens
cttgaccattcaaggatttgtgtatcccatgggagtcctggaaccattcccccatggataccgaggggtagctgtacatttattggtgcctgccttcttgcctggtgcctgtttgttctttttggattaagagaaataattcctggctgtgcacggtggctcacacctgtaatcccagcactttgggaggccgaggcgggcggatcacctgaggttaggagttcgagaccaggctggccaacatggcgaaacttcctctctactgaaaatacaaaaattagcgggcgtggtggcagccacctatattcccagctagtcgggaggctgaagcaggagaatcgcttgaacccgggaggcggaggtttctgtgagccgagatcctgycactgcactccagcctgggggatagagagacattctgtctcaaaaaaaaaaaaaaaaaagagaaataattcctgtcacagggagcggaaacatgctgaaataattatttgctgaaattgttttccaacagatggctttaggaatcaggagatttgacactaggacgttaggtgggcaatggatttctagtaatttgtcagctttgtttt

SEQ ID NO: 348861 - DNA, 568 bp, Homo sapiens
acttctcggtaatttattgctcaatagtgggagaaaggaagaacttcgttttcaggttaagacttcatatgtcaaatccagttttattggtgtgataaatgctggtttctgttaaatttaccaggttggtcagtactggttcctgatacaagaactgtatttacccttttaagaagatgatttaaacttctggagaaaggaagagggcaaagatctttaaagagtatgctatttttatgacgcctccctaattattcagaaatatgaataattcaggaatttaactgtagaataagtataaattacccggttactgccttgaaagagtttacaatcaccttgaagagaatcctgccctcacccccaccagtttcacaaagcctattttaaattatacccttggaaaaattaaaycaaaacactgcgcaaatatgtttggtgtggagttcatttctttgatttagtcctttcactttgggcccacacacttttgccatcctttagggagcatgcccagtgctagattcgaagcgaatatattaatgtatgtgttcacccatcaatgcct

SEQ ID NO: 348862 - DNA, 568 bp, Homo sapiens
acttctcggtaatttattgctcaatagtgggagaaaggaagaacttcgttttcaggttaagacttcatatgtcaaatccagttttattggtgtgataaatgctggtttctgttaaatttaccaggttggtcagtactggttcctgatacaagaactgtatttacccttttaagaagatgatttaaacttctggagaaaggaagagggcaaagatctttaaagagtatgctatttttatgacgcctccctaattattcagaaatatgaataattcaggaatttaactgtagaataagtataaattacccggttactgccttgaaagagtttacaatcaccttgaagagaatcctgccctcacccccaccagtttcacaaagcctattttaaattatacccttggaaaaattaaaccaaaacactgcgcaaatatgtttggtgtggagttcattyctttgatttagtcctttcactttgggcccacacacttttgccatcctttagggagcatgcccagtgctagattcgaagcgaatatattaatgtatgtgttcacccatcaatgcct

SEQ ID NO: 348863 - DNA, 516 bp, Homo sapiens
gctgaagaccacgaatgtggagcaggactaaccagtggaaatgaatttccccagcagctctcagaaccagagaagagaggcaggaaaagggagggctgaattggtccaggactggggtttcatagggtagaaatctcagaattaaaaacagggcagagacaggatattggcaagaagcagaatctggtacacgtaagaatttagtgtatgataaaggtgacatttcaaataagaaagtaaaagattattcaataaataatagtgaagccattgggtaactcttttaagaaaaggtaaaagtagatttttgcctaatatagcataccaaaataaattatgtagaaattagagttgaaaatggaaggaaagaaggaagaaaacaaaacaaactgtmgatgacaatttatatgaccttggaatagggaaggccttcccaagcaccacagccaattcagaaaccataaattaatacattaatatgactaaagaaaatcaaaagcctctgtatgccaaaaa

SEQ ID NO: 348864 - DNA, 474 bp, Homo sapiens
attgcttcaactggtggttgtacagttgttaacttcataatcatttgataagctgtacatttatattctatgcactgttccaaggtatgtcagattccacaataaaaacgtaaaaagaaaaacctatttaaatttcaaatgactaacaggaaaattatttgcagcaattcgacaatcatatgtaaaatgtataaagagttcttagaaaccagtaaaagacaaacaccacaatggaaataaacagtgattcataaaagaattaaaaggtggataagaatgtaacatttcatctcacaattaaagaaatgacaattaaaatagtgattttaaaatactatattcagcctagtgttaataaasacatggggaaatgcgccttttcttacactatttgagggagaaattatctggaacataacttggcgatgcataacaaaagtccttaaaatatccagtgctgactcagcaacttta

SEQ ID NO: 348865 - DNA, 567 bp, Homo sapiens
aagttgcatttctgcagaaatttgacagacatcaggtacatatttttaaaaggaaaatacaaagtaaaaacaacaggagtatgacaaatctagtttatgcaatagttctgccaagcctaagggcaatcaactaaacaaatcaaaagaccatggagaaactgggtaagacttggcatagccattgggtagtattccatgactgggttaaattaaagcagacagtgctaactctgtaaaagggcccactagtacaatatgaacaaaaagttgttagggatattgccaaagctactcaataagtggactaagggatttcttagatcagcttttgttaagttactcataattgttactgattgtgaaattttaattatggcattatcctgtcaagtgaagaaggraggcattacaaggggtaagaatctcattatgatgtcttgttccaacggccttgggaaacactgtccacagtgtgaagtcagcagttttgcagtctgaatgcctctgactatggcatcaggcggtttggtgaactttctgtgtggcccacatatcaggcacaaggct

SEQ ID NO: 348866 - DNA, 567 bp, Homo sapiens
aagttgcatttctgcagaaatttgacagacatcaggtacatatttttaaaaggaaaatacaaagtaaaaacaacaggagtatgacaaatctagtttatgcaatagttctgccaagcctaagggcaatcaactaaacaaatcaaaagaccatggagaaactgggtaagacttggcatagccattgggtagtattccatgactgggttaaattaaagcagacagtgctaactctgtaaaagggcccactagtacaatatgaacaaaaagttgttagggatattgccaaagctactcaataagtggactaagggatttcttagatcagcttttgttaagttactcataattgttactgattgtgaaattttaattatggcattatcctgtcaagtgaagaagggaggcattacaaggggtaagaatctcattatratgtcttgttccaacggccttgggaaacactgtccacagtgtgaagtcagcagttttgcagtctgaatgcctctgactatggcatcaggcggtttggtgaactttctgtgtggcccacatatcaggcacaaggct

SEQ ID NO: 348867 - DNA, 557 bp, Homo sapiens
taatatggctctatatatgtcatataaaataattcaaataaaatacttttaaaacatcctattacctatatgttcagactacatgttgcccaacatatggttcttttcaagtaagaagtgtctggcattactagcataaaggtattcaagtataaagcataagagttagttctacacatcccttgccccttctacctccwaggatctctagctggagtggtatttaagaattgtgtattcattaaggcattgttaagaggcaaaagagacttcccagatctaatgaaaacttccaacatgagtctacttaattctcctcttcctcctttgcccaacttcaaaaaactgcctcaaacacgatggatctttacattttaaaatctaaattgaagagtctagagtatagacacttattgctctttgaaaagtttatccagattacctgtatgggaaggaagtaggtcataaaatactaaaatcattatttcataggtatgtccagctgcaattatctctgggtcttcatagtccaactctttagtaaccttataaaatga

SEQ ID NO: 348868 - DNA, 340 bp, Homo sapiens
agccctctccatgtcttccctttccctgctgtactcagccaccccagccctccttctcttyctcaaacttaccgactcatatttgctattgtttttgtcaggaaggtccctcccctcctacccttagctttctctttacctggctcactctctcatctttgaggaacccctgggaggaggtcccatgcttctcctgactacctccactgcaccctgtacttcacagcacttagcaccattggaaccaagcacttggatgcctatgttgtattccttgtgtctcccctttagaccagcactgcccgatagaactgtcatgtgagccataaatgtaatttta

SEQ ID NO: 348869 - DNA, 644 bp, Homo sapiens
cagcccattagcaatgcctgccatggtccatgtgcagaacagcagcatctgtgctaggtatttggcaaccctacattagaaacaggggccaatgagtaagacctataattgcaatatcatggtggtacctgaaaatcaactgggtctggaagaaaaccaaaaagcaggtatgccaatgagaaatggaacctgcctgccatctagttaactgtctatctattgggctggattgaaaatggaagtgttcctttggtttctcatgataaattgcttacccttcctttgtttattccatgtcacttattacacacccactatgtgaagaatttggcttttasccaattcattaaatttgtgccctcagccccatgggcttcttcagtctctgcagccctaactagaaaagcctagtattataataagtggcctttaagagtcgacctaaccttctctgctaagcatccacaccactagctttgacttcggaaggtaagtaagaagagggttttgccatacttacgttatttttgtggattagattaacatggtccaaaactgttgagaaagagagaattatttccttttctagtaggcaatcatttgaagatgcagtgttttgtgtgaggagctagacagctcacaca

SEQ ID NO: 348870 - DNA, 560 bp, Homo sapiens
ttggaatggatctatatgacaccaagtacccaggtgttcaggaagaaccacattttaaaaattttagaaactgactcatttgtccatccattcaagtatattgagtacccactatgcaccaagcaggtgttgacacacaaaaataaaccacttagaaatgtgtaaagcttacagtctaataagagcaacaatgaggtaggcatttacaacagagtctaacaagtgatttgatagggaatatacaactaataatacaagcccttatcagggagaactaagccagttatggcattaaaggaagctcttaggaataagtaacatttaatatctgtggaacaattatgcaaatataaaaataaattagaggtgagaaatggtggagatagttacccaaatataaagtgaacatacgaagacccaaatcttagcatcatgtttataaaacctccatcttcatccaaatttcattttaaaaggtgayagtttggcattgcatttcaaaatgaacatcaacccaggaaatctcttggctcagtgcctaagcttccaaaattcacaat

SEQ ID NO: 348871 - DNA, 527 bp, Homo sapiens
acacagatgagctcccaaggtctaacccctaaaagagtgatatctgagtttgtgcttytcaaaccataattccccaagaccccagatcagtgcttcatagccctggtagcacattacagtcaccaggggaagcctgatttttaaatagcaatactgtttatgccccagggcagaccaattaaatccgaactttagggaaataggcgcaagttttggcatataactccccagcccatccgcccccagcaagtgactctaattctctgcagccagggttgagaaccactgacccaaagattcagaagagaccaggagcagcaaaggcctgcttctgagctgatgcagtcacagattccagtctgcaaagccacttccattaaaaatgcctctgtgccacagcttccagtcagctctgtgtacgtgtgcctgtccccctgctctgacccttaggtggatttaggaggagccctggttggacaaggtaaagggacctggactgttctttgaaccgtgaaaagccctggctc

SEQ ID NO: 348872 - DNA, 527 bp, Homo sapiens
acacagatgagctcccaaggtctaacccctaaaagagtgatatctgagtttgtgcttctcaaaccataattccccaagaccccagatcagtgcttcatagccctggtagcacattacagtcaccaggggaagcctgatttttaaatagcaatactgtttatgccccagggcagaccaattaaatccgaactttagggaaataggcgcaagttttggcatataactccccagcccatccgcccccagcaagtgactctaattctctgcagccagggttgagaaccactgacccaaagattcagaagagaccaggagcagcaaaggcctgcttctgagctgaygcagtcacagattccagtctgcaaagccacttccattaaaaatgcctctgtgccacagcttccagtcagctctgtgtacgtgtgcctgtccccctgctctgacccttaggtggatttaggaggagccctggttggacaaggtaaagggacctggactgttctttgaaccgtgaaaagccctggctc

SEQ ID NO: 348873 - DNA, 527 bp, Homo sapiens
acacagatgagctcccaaggtctaacccctaaaagagtgatatctgagtttgtgcttctcaaaccataattccccaagaccccagatcagtgcttcatagccctggtagcacattacagtcaccaggggaagcctgatttttaaatagcaatactgtttatgccccagggcagaccaattaaatccgaactttagggaaataggcgcaagttttggcatataactccccagcccatccgcccccagcaagtgactctaattctctgcagccagggttgagaaccactgacccaaagattcagaagagaccaggagcagcaaaggcctgcttctgagctgatgcagtcacagattccagtctgcaaagccacttccattaaaaatgcctctgtgccacagcttccagtcagctctgtgtacgtgtgcctgtccccctgctctgacccttaggtggatttaggaggagccctggttggacaaggyaaagggacctggactgttctttgaaccgtgaaaagccctggctc

SEQ ID NO: 348874 - DNA, 648 bp, Homo sapiens
taaaccagacaataaagcaagcagataaaatatttaaaktataagctgccagtttgcaacctccggttaggatttgtgtggggcaaagaaaaaaactctcaggatcattggtatgtagactctaattttaagtttctaatttaaaattggcccctgaggctgggcgtggtgctcacacctgtaatcccagcattttgggaggccaaggtgggtggatctcttgaggtcaagagttcaagcctgcctggccaacatggtgaaaccctgtctctattaaaaatacaaaaattagctgggcatggtggtgcatgtctgcaatcttcgctacttgggtagctaaggcaggagaattgctggaacccgggaggtagaggttgcagtgaatggagatcacacgcactgcactccagtctgggcaatagagagagacgctctctctaaaaaaaaatatgtaaagataaataaaatgaaataaaataggcctctaatgagcaggccattctcctttctgggtcttactttccttgcactcctttctgggtgttaagaggaggtctagaggaagctggacaactcttagcttgtagtaagcacagtggaagtgtcagctcttaatgggtcatggacacgttacaagctaggcgcctt

SEQ ID NO: 348875 - DNA, 619 bp, Homo sapiens
aatgctgtatatgttgggtgcaaagttccctacttcctgtgacttcagctctgttttacaataaaatcttgaaaatgcctatattgttgactatgtccttggccttgacaggctttgggtatagagtgctgaggaaactgaaagaccaatgtgtctttcttaccccagaggctggcgcctggcctcttctctgagagttcttttcttccttcagcctcactctccctggataacatgagagcaaatctctctgcaaaaaagatatggggcagcactgtccacaacagcctctrctggaaacaacccaagcacccatcacagaatgaattagtacatcatgtatctgcacacaacacagtgctccttggcaaagaaaatgaatgaattacagccagctgcacctcacaagacagataatcttacaaacatcatgtgggtacaagaatcacaaaagcatgcatagagtgtgattccatttctacaaagttcaaaacgggcaacatggggctgttgtgtggagggctgtggaaacaggtggtgcagagagaagcaaggccatgctctgtctgaaggcccagtgacacttggcccctgcgagagagagtggcaggcaggagca

SEQ ID NO: 348876 - DNA, 535 bp, Homo sapiens
aaatagaatcttctgctctgctataaggtgatcagaatctttcractagttatgttgctctaagagatttacattgcatactttctgctaagcaacaaacacttttgtttctttttgccacttattataaacctaggtatatagaaagcctctcccatcccaaagtaatcatgatgccaaatttgtgtgtgtatggttatgatatttttgacatttcacatacttaaacctattagttgtccataatgaaatttagccttctgaaaagtggcattttagagtctgagcatggcgggctaacatggtcattgatactgcctgttatagcaaacaatacatatatatatatatgcacacacacacacacacatatatatatacacacacgcacacacacatacacacacacacacacacacacacacacacatatatatatatatatatatataactcctaatagaggtagattgctttgttctttatacaaatgaaaacaggggaatggtttggattccaagggaagaacagagaa

SEQ ID NO: 348877 - DNA, 535 bp, Homo sapiens
aaatagaatcttctgctctgctataaggtgatcagaatctttcgactagttatgttgctctaagagatttacattgcatactttctgctaagcaacaaacacttttgtttctttttgccacttattataaacctaggtatatagaaagcctctcccatcccaaagtaatcatgatrccaaatttgtgtgtgtatggttatgatatttttgacatttcacatacttaaacctattagttgtccataatgaaatttagccttctgaaaagtggcattttagagtctgagcatggcgggctaacatggtcattgatactgcctgttatagcaaacaatacatatatatatatatgcacacacacacacacacatatatatatacacacacgcacacacacatacacacacacacacacacacacacacacacatatatatatatatatatatataactcctaatagaggtagattgctttgttctttatacaaatgaaaacaggggaatggtttggattccaagggaagaacagagaa

SEQ ID NO: 348878 - DNA, 601 bp, Homo sapiens
aatgtgagtgtaaaccatgtcaaatgttcaagtattcgcttttaaaggagctaataatctgcttcccagattgcatatcaagtttgacaatggaagagaatgaataaaacagaaagtaaactgcacattttaaatggacagaaactaaggaaaataatgtgtgatatcaagagaaataaacaaatgcaagcaataactatggtggatyggagtgtctcactgatactttctgccttgtttttctcctaggtcatcagttagatgaatatgtatttgaaagctgttcattcattgtggagatgtgggtagacagcagtaaatatgccccatggcactgattaactcaaagtggctccaggccaaagattttatgcttcagtggagatatttttgccaggtacatgtttttggtgatatcacaccctaaatgttactttgaaagtctatcatagcctgtggcattaattttttccaagatggaccactgtgttggttattattaatctgctacaaaaaaagagctttagacttgggatattttaaaattccttaaaatgtaaaacactagcatgctactaaacctgccagacctattttcttt

SEQ ID NO: 348879 - DNA, 601 bp, Homo sapiens
aatgtgagtgtaaaccatgtcaaatgttcaagtattcgcttttaaaggagctaataatctgcttcccagattgcatatcaagtttgacaatggaagagaatgaataaaacagaaagtaaactgcacattttaaatggacagaaactaaggaaaataatgtgtgatatcaagagaaataaacaaatgcaagcaataactatggtggattggagtgtctcactgatactttctgccttgtttttctcctaggtcatcagttagatgaatatgtatttgaaagctgttcattcattgtggagatgtgggwagacagcagtaaatatgccccatggcactgattaactcaaagtggctccaggccaaagattttatgcttcagtggagatatttttgccaggtacatgtttttggtgatatcacaccctaaatgttactttgaaagtctatcatagcctgtggcattaattttttccaagatggaccactgtgttggttattattaatctgctacaaaaaaagagctttagacttgggatattttaaaattccttaaaatgtaaaacactagcatgctactaaacctgccagacctattttcttt

SEQ ID NO: 348880 - DNA, 614 bp, Homo sapiens
tttaattttttaattttaaatataaaatctaataaagtaatgaaaaaatgactgcgataaaatcaggatagtaaagtagtatgtttagtaggacctcatatatgtacatatataggtgtcatttaaattagtgcatatctgtgtatgtgtttaaaatagraaagaaaaacaagaagaacacacaccaaatattggttactgctcacccctcagcagagatagtgggattgtgaataattttttatttacttcttctctccttatttgtattgtttataataagggtaatttaattctttaataaaaatagttattatattattgaaatcagtgaatgaaacatttgtttctcaccttctgcatttaatgctcattgttaggaaccaacgaaggtgcagagaagtttcagagtctctgtctgtcttcaaggtcattgcaatttaatggggaaatacaatatataaatatgaaaagttataatacaaagtatggggaatatagatggttttgcatagatgtttaaaataatcatcacatacctttttaaatatatacattgccatatttaccctaccatctttggtaaagtttaaagaataaattttttgatcaat

SEQ ID NO: 348881 - DNA, 614 bp, Homo sapiens
tttaattttttaattttaaatataaaatctaataaagtaatgaaaaaatgactgcgataaaatcaggatagtaaagtagtatgtttagtaggacctcatatatgtacatatataggtgtcatttaaattagtgcatatctgtgtatgtgtttaaaataggaaagaaaaacaagaagaacacacaccaaatattggttactgctcacccctcagcagagatagtgggattgtgaataattttttatttacttcttctctccttatttgtattgtttataataagggtaatttaattctttaataaaaatagttattatattattgaaatcagtgaatgaaacatttgtttctcaccttctgcatttaatgctcattgttaggaaccaacgaaggtgcagagaagtttcagagtctctgtctgtcttcaaggtcattgcaatttaatggggaaatacaatatataaatatgaaaagttataatacaaagtatggggaatatagatggttttgcatagatgttyaaaataatcatcacatacctttttaaatatatacattgccatatttaccctaccatctttggtaaagtttaaagaataaattttttgatcaat

SEQ ID NO: 348882 - DNA, 596 bp, Homo sapiens
gtgtacacatatgtatatacatatatacagatatagacatatatacacagacatatatatgtgtgtrtatatatgtataaacacatacacatatatacacacacatatacacatacacatatgtgtgtatgtatgtacataagcatatgtacagatatatatatgtgtatgtatatgtatgtacacatacatatacatgagtgtgtgtgtatgttataaattgattgaaaagagcagggtatagtatttatatatggtataatttcaaacattttaaatatgtcaaaaaaaacctcccctcacctagaattaacacacataaaaatattaacagagactgtctctgaatattagcattatgggaactttattttctatttttccatatttttaagattttctatattgtatatttttataatcagaaatttagaaaatttagaaattgtcatcagaattacgatatctaatcagagtgagataatattactccatgtcttaaatttttggcccacctaagaaaggcaatgatagctgaatgactctgaaatgcacgtgcattcaatggcttccacacaattggctctattcctgac

SEQ ID NO: 348883 - DNA, 509 bp, Homo sapiens
cttccacacaattggctctattcctgactgcccattactcaacacactcacagagcacacagaattttcatgctggcattgagctttgtgatagtccaaagaatcttgctttcatggaagtcttgggaaatgccaatacttctttaagagtaagtctggaaaacttcctagtttatacatctttgcatctaatttataatgcagaggacacaatctaatggcaacttaccaaggaggctctctgctttctttctttcctccccaagggaagaagkctacctaagagacttgggtgttttcaagagataacgccattacagtttaagccccttaatgtaagttgtccctttttagtcctaccatatcattcctcaggggaaacaatacttgctggctatcacaactgacatgacattatatacagtcaaagaaaaaagagaaagagacagagacagagagaaaagtggcacagaaagagccttttatctagttgtgacatatataaacaa

SEQ ID NO: 348884 - DNA, 660 bp, Homo sapiens
ccaattgtaacactagaaaatgggccacatcagcaaatgaaacaccagatctctctctattcagacatttccacaattttttttcccaactaaagaaatggtggtgacaaaaggataggctctagggaaacaatgactaaagaagtggccaagttgggcttcaggaacaatgttgacatagctaccaatacaaaggaaatgtttccattttgggtggactatgacagatcatcagaaatgaggtttcataaaaaactaccaatgtgaaaatgtaattgggtctctgagagtcaaatgaaatgcacgtgatagaaaaaaatcataaaacaaatgataccaataaaatggtactggtaactcctctcaytgcagctttaaggaagtaggagaattgaacaaagtttgaatcagatatgtaaatgttgcaggagtaaaaactagatggtggaagtggtagacagtgaaaaattacgtaaaattttaagtgaacttggaatgcaacaacaaggtcttcctgatttcctatattaagtttttttccaaatgtttcacttaggggttgcaaaccttaaaaccagtggggggctaggtagaaatgtaatgagagcagaaagctatgggaaacatggtgaactggggggctaaagggatgtcctccaa

SEQ ID NO: 348885 - DNA, 660 bp, Homo sapiens
ccaattgtaacactagaaaatgggccacatcagcaaatgaaacaccagatctctctctattcagacatttccacaattttttttcccaactaaagaaatggtggtgacaaaaggataggctctagggaaacaatgactaaagaagtggccaagttgggcttcaggaacaatgttgacatagctaccaatacaaaggaaatgtttccattttgggtggactatgacagatcatcagaaatgaggtttcataaaaaactaccaatgtgaaaatgtaattgggtctctgagagtcaaatgaaatgcacgtgatagaaaaaaatcataaaacaaatgataccaataaaatggtactggtaactcctctcactgcagctttaaggaagtaggagaattgaacaaagtttgaatcagatatgtaaatgttgcaggagtaaaaactagatggtggaagtggtagacagtgaaaaattacgtaaaattttaagygaacttggaatgcaacaacaaggtcttcctgatttcctatattaagtttttttccaaatgtttcacttaggggttgcaaaccttaaaaccagtggggggctaggtagaaatgtaatgagagcagaaagctatgggaaacatggtgaactggggggctaaagggatgtcctccaa

SEQ ID NO: 348886 - DNA, 616 bp, Homo sapiens
atcatttcgcttgaggactgcagtattaactgcctatgaagtgtttagcacagtgcctggcttgtagaaattccctacattgaagagactgatattgttgatgtaactcttacttcaaaatgactttttaggtgacctgatgacactttcatagagcaatagcccagaataaagtaattccttcatcaaatagaaatgaatcctgcctgccaaccaatagtaccaagggataatatacagccaactgaatctgcgtgacaatcctgtgctatacttgaaactctattagccattattacaaaatgagtatattttattttgttttagagacagaatcttgctctgtcacccaggctggagtgcagtggcatgatctcagctcattgcaacctctgcctcctgggttcaagagattcttgtgcctcagcctcccgagtagctgggattataggcatgcgccaccatgcccagctaatttttgtatttttaacagagacggggtttctccatgttggccagkctggcctcaagtgatccacttgcctcagcctcccaaagtgctgggataacagatgtgagccaccccacctggcaaaatgagtacattttagttgcg

SEQ ID NO: 348887 - DNA, 582 bp, Homo sapiens
tagagttgtatgtctacaattaaattttggcctgattgttagcatatttgttgatgccatcttataygacataaccagagaatgtgccatgctattatattataaatgatttagaaacatctgttcatatatagtaacataaacggtatgagagcatatgttaaaaattttaaaatttgtctcatgttgcttagattttaaggttctcaaaaatctgggttgtgaacttcagcttctgtgtagggtatagtaggttactgcagatgaatattcccactgacaattagacaattccagatacatttcaaaagtcatattttcataggcatcaaaaagcaacaaaaatcagatgaactaaaatgcaagagaaaggagaaccagtgaaaggtgagttgataagctgatgagcagttctttccctggaggtatctgttatactagtagggcacaaggatgagatctgggtgcaagcagaaagtcactataaaaaaagacaaaaagtaaagattttagtgagcaaatgaacccagaataatcaaatttattaaatttggagatttgagggctctcaaacagacagcc

SEQ ID NO: 348888 - DNA, 582 bp, Homo sapiens
tagagttgtatgtctacaattaaattttggcctgattgttagcatatttgttgatgccatcttatatgacataaccagagaatgtgccatgctattatattataaatgatttagaaacatctgttcatatatagtaacataaacggtatgagagcatatgttaaaaattttaaaatttgtctcatgttgcttagattttaaggttctcaaaaatctgggttgtgaacttcagcttctgtgtagggtatagtaggttactgcagatgaatattcccactgacaattagacaattccagatacatttcaaaagtcatattttyataggcatcaaaaagcaacaaaaatcagatgaactaaaatgcaagagaaaggagaaccagtgaaaggtgagttgataagctgatgagcagttctttccctggaggtatctgttatactagtagggcacaaggatgagatctgggtgcaagcagaaagtcactataaaaaaagacaaaaagtaaagattttagtgagcaaatgaacccagaataatcaaatttattaaatttggagatttgagggctctcaaacagacagcc

SEQ ID NO: 348889 - DNA, 575 bp, Homo sapiens
tttgaatttgtctgacatttcctcatatttgagtacaaggtatacattttttttgggtgtaacaacagaagtgatattgtacccctctcagatcattatgctgctttgcttttttttttaagatacaaacaagaaagatttacaatccttgaacccacaattctaaaattggaaaagctctgaaaatccaattttttctctctgcaaattcagcacaaactcatttggcagcaaaacctgacctgagccaacacaagtccacttrtactttttatttattttacttagtgggaatagtcatatgttttccggcagagttacgtgtttgatcatgaggtgttgcccgcaactgtactgagggaggttggggggatacattatgtaatgtacacttcttccactaaagtacttctgtaaatctgaagaatcctgaaacatattagctcaagggtttcatatgcaggactgtggacctatatatttgagcacaatttaaagaagatctttgttgaatagaaagtatatcacataattccattacttaaaatgctaacttgtccacttgaaaaatgcaa

SEQ ID NO: 348890 - DNA, 655 bp, Homo sapiens
taccacagtatcaatttgaatttgtctgacatttcctcatatttgagtacaaggtatacattttttttgggtgtaacaacagaagtgatattgtacccctctcagatcattatgctgctttgcttttttttttaagatacaaacaagaaagatttacaatccttgaacccacaattctaaaattggaaaagctctgaaaatccaattttttctctctgcaaattcagcacaaactcatttggcagcaaaacctgacctgagccaacacaagtccacttatactttttatttattttacttagtgggaatagtcatatgttttccggcagagttacgtgtttgatcatgaggtgttgcccgcaactgtactgagggaggttggggggatacattatgtaatgtacacttcttccactaaagtacttctgtaaatctgaagaatcctgaaacatattagctcaagggtttcatatgcaggactgtggacctatatatttgagcacaatttaaagaagatctttgttgaatagaaagtatatcacataattccattacttaaaatgctaacttgtccacttgaaaaatgcaacaacaaawtaatacatatatgatgttcaaatggtatgaactaagtgaattgctaaattaactgtta

SEQ ID NO: 348891 - DNA, 517 bp, Homo sapiens
gtgtctaaggcagattatgagtaggtgggtggagacataaggaggaggttatgttatgtgggttggactctgggatcctgccctcagttctaccagagcttatgaatttggttttatctgttttatatactagggttccagataagataattgaaaataraggcactatggctaaaaaggaaatattttaatactatcaagttcaaccagagaagtcatagaggttgagtgagctgagactcgatctcacagttagttcccttttgactgcccatgactgctctttcatgtgcatcctcaaataagaaggtgagctgcctgaagatatgtagggaattaaactacgttcaaatgatcagctctggattcattggttatgtttaatagtagcatccctgttatcaccaagtgctatgttttctgtgtgtttgactacagcaaagggctatacacatatttgctgaatcatatggagagtgtttgtgcatccatacctgactaattaaatgcaaaattt

SEQ ID NO: 348892 - DNA, 517 bp, Homo sapiens
gtgtctaaggcagattatgagtaggtgggtggagacataaggaggaggttatgttatgtgggttggactctgggatcctgccctcagttctaccagagcttatgaatttggttttatctgttttatatactagggttccagataagataattgaaaataaaggcactayggctaaaaaggaaatattttaatactatcaagttcaaccagagaagtcatagaggttgagtgagctgagactcgatctcacagttagttcccttttgactgcccatgactgctctttcatgtgcatcctcaaataagaaggtgagctgcctgaagatatgtagggaattaaactacgttcaaatgatcagctctggattcattggttatgtttaatagtagcatccctgttatcaccaagtgctatgttttctgtgtgtttgactacagcaaagggctatacacatatttgctgaatcatatggagagtgtttgtgcatccatacctgactaattaaatgcaaaattt

SEQ ID NO: 348893 - DNA, 517 bp, Homo sapiens
ctcggggaaacaaagggaaaatggaaagtgtgagagaatgaaggcatagagctcaggtaactaaaaaaagatgttgtcaatcacaggctttgccaggcaatgtttttgccatcacttctgaggacaactcacttgagatctttcaagaacttctgaagacgggtatttcataaacaaagctcttcatcagaaggcaaaggaggagacaaatagaactgtttttagaacatgaaatgcagtaattatatacaatccatagatgtgtcttatacttatagaagcccaggtttgactggggtcatggagatggatgaccccagactttcrcagaatgcttatctttcaccctgttgttttgcacactgttacttgttatctatggaactcaaaagacaatcaattcagcaattccacatctgagtatataccccaaataattcaaagcagggacttcaagagatatttgtatacactcatgttcacagcgcattgtttacaatagccaaatggtggcagc

SEQ ID NO: 348894 - DNA, 481 bp, Homo sapiens
atgctcttctaatttgaatttaggccttcatgcagatttgtcgcctgggctgtttttgaaatatatggttttaaatgcatgaagctcatcctttaaaaatgatttgcgagtgtacatttgaaaatggttaatgcttatttattacaaatggaataattacagctaatggaacagtgccatttaacatcagtatagtggtgtgggggagcttgataattagcagctccataagtgcctttttttagcttatgaaatgacagccacagaacacctttccatgaaatgtctccatgtactaaattctctcttgcttatcttattggctgtcgaygactgatttggggggaggcatttggacttaattgatttaatcaacacctgagtccctctctgacttagaatataaccgttatttttaaatatacaggatcgagtaagcaacaggatttttatatgcaaaactgaatttctaaaagtttcc

SEQ ID NO: 348895 - DNA, 560 bp, Homo sapiens
ttctccccatgacaccactgctgtagagtagttagacttcctacatggaagttccaggaacccaagttagtccttttgaaggtgacgtctgcaactgtcatggcatttttcttctgtactctatcagtcataacagtcacaggataatccagatacaaggggaggggaagtggtctcaatctctgaattgaaggaatgtcatggaatttgcagccctctttgacrtgccttatatacactgagaaaaccaatattgcttcaattcctcctccctagctttccagaactgccagatttaagactaatttttcagccttccaaaccctggtgtagtcctcatgggctgccagtaagttcttgtctctgtatgttgttttcatccaaagaagcccaactgatgctgcccaagagttagaaactggttagtgaaaaatcatgagggaaacaggcatctaggattcctcacaggcttatagtttggtagattaaaatgactgtgctgccactctaagatatataaagtacagaagcaagagggttgagaatcagatcatgagttc

SEQ ID NO: 348896 - DNA, 560 bp, Homo sapiens
ttctccccatgacaccactgctgtagagtagttagacttcctacatggaagttccaggaacccaagttagtccttttgaaggtgacgtctgcaactgtcatggcatttttcttctgtactctatcagtcataacagtcacaggataatccagatacaaggggaggggaagtggtctcaatctctgaattgaaggaatgtcatggaatttgcagccctctttgacgtgccttatatacactgagaaaaccratattgcttcaattcctcctccctagctttccagaactgccagatttaagactaatttttcagccttccaaaccctggtgtagtcctcatgggctgccagtaagttcttgtctctgtatgttgttttcatccaaagaagcccaactgatgctgcccaagagttagaaactggttagtgaaaaatcatgagggaaacaggcatctaggattcctcacaggcttatagtttggtagattaaaatgactgtgctgccactctaagatatataaagtacagaagcaagagggttgagaatcagatcatgagttc

SEQ ID NO: 348897 - DNA, 628 bp, Homo sapiens
aattgtttggggaatcatcagataaagaaggagtttggtttgagtaggagagtattgtttctccaagtgagagtgwtgtgtgaacagtgccatgtaatggggtcccccaaaagggaaccaatttcaatgctgaacttcaagtaggaatgtgcctcttcccaaaaaaatgtctttgaagttgcagcagtcaactacattttctgagctaataagccacatgagaacagaagtcatatttatatagttcatttgggagtctctcacacttgacaaataggagatgttcagtaaatatttagagaattgcaattaagagaaaaaggaagggtttagattctaaacagtagatagtctgaaattctgttttcgtttttcatttggaatacattagttttcaccaatgtcttaccttcccagatagagtatgcttcgaaagattctggcttcattttgcatgccttaagccaaaaccaactcataatgaagatgaccaagagaggagaaaacacacaggggttgcagttttccatgaataatccacatgttctttccaatatttcagacattaataaagcaaaatctgaatgctcttgcagagccacagacttttatgacagccttgacagac

SEQ ID NO: 348898 - DNA, 450 bp, Homo sapiens
ttttcagtgattggcattgctgtttagttgtactctggcacatcgcaaaagaccattaaaaaatgttggagtgagtattcaacacatgcaaaatatgtttattatttactagttggttcattcaataaattttattgaaagcattttctgtgctgagtatagtacttggaacagggctatgataatgctgcatctggaatggtaactgaatgtttgaagcttacagtttaacatcagacaatgagtaagtttcaaaaatgtaaaagtgaataggacccagtccttcatgatagaaagaaaaaaagcagtagtttyggaatcaggaaggattcaagtggctcagctatcttttacttctgagaaaatttgaagccatttgtttttctgccttcgtttcctcttctgtataaacaggtttattcagagacttagcacgaaagcatgtaatgt

SEQ ID NO: 348899 - DNA, 533 bp, Homo sapiens
cattatgcccttctgtcagtaggtttttttttatttggtcacgcagtttattctccaatacaatagatagcatttacaagtaagagctgactgattcttagatatctgaygacgaaggaagcacctgccctaatgaaggtggcagcaggagctcaacatagaatgtgctgaggtctccacagaggacgaggagaccagggagggggttgcagtggccctttgttctgggtaggcaggaacatgttccacttccatatcacccccctgtcccagggatcatgacctttagttcagacagacactgtcctttatctctaggctgtaatgcaactagagtccacagaaaatggctgtctccggcctaaaaacccttggggtggaacctcttctaagccccaaacagacagccctaaggctggttcctaccgtactgcaggaacactgctagtctgcatagggagggggagatgagccccacccttcatgcaagcctgtgctggtaagctcatgttaattggggtgcagctgcccca

SEQ ID NO: 348900 - DNA, 501 bp, Homo sapiens
atgctagtggattcatgaatgagagaaaaatagagaaagaaatcagaataatatattcacccaacataagggagaaggtgaaagaacaaggagacaagamaaggtgacaagtttagtgaaagaggataaaaaagtgtagattaagccaaatactgcttcatatattacttgttataatactttatttcccccaatagatagaaaatctcaaaaaacaccattgaatatccttctctattttatagtaaaatcattagttaccatttcttaagaacctactatgtgccaggtaccatgctagacttcacaaaagtctaaagtaatctctacaacaaatccacagagtatatgttggtatctccattttacgagggtgaaaatttaactcaaaggggttaaacatactatccaagctcttagagcaagcatatgttggagctaagattggaactcaaatccatctggctatgtgttcacttctcaccttcttagctgggtgta

SEQ ID NO: 348901 - DNA, 596 bp, Homo sapiens
tgcatctatttttcttttcccctacttatgattaatatttggcaaccttttctgctcaacattctctaaacttacatttttctctgcttttgagtcttttatttaagaaatgcttatgcattctgttttccattcacttcatttctccttattatcattttctggctcagtgyatttaccggccagcagtttccctttgcatttttttggcttcatttgtacttttctggactttttcttcacctatcaaccaatataataatatatcctattgcagtaaatgtgtcagatcatgtttagtagttaatgccttaatttccataaaggtggtgattttcaaaatgctctcagtgattcttctacacttgtctttgtcatttttaatttgctaaaactggctaataatcattaatacaaatatcaaatcatcaaatccaatgaactcaccttttgcttccccacaaaatcaaagatcacatgtaaagaatgtaaagactggcattagtgctcatggaaagaacataaagttttcaaccatctcaaagcatcagtattcatcttcagtgtggtgccttatgaatccttatgtttataac

SEQ ID NO: 348902 - DNA, 591 bp, Homo sapiens
attaatcatcatctccctccttccccagctcctaccatgtggtcccctccccccatgtcctttctattctgttaatgacaccaccgtcctcccagccacccaggctcaaaacctcagagtcactgttgtggcatatcttttcctgcawaatatgtaacaaaatgacaagcaccctaatgctacttttgtaatatttcttacatccattcttcctctttacctcactaattcatggacatttcctcttgctcagaccagagattgatagacctttatctgcagttctgaagcccagaaagatctggtaatccagtttttgtgttttaaaaattgtttgtgacatgagctgacaggaggattttatagacaccattgataatatgtagtttgaatttatctggagaaatatagaggcatttgaccatagggagcttctccagaaccctgtgttattcaatatctgatatataccttgtagcacctttctaaactttggaaaattctgaatccagaatatatctgggctcaaaagtttcaaatgaggaaatgtgaatatttgttattataacctcctgaaagaaattccactta

SEQ ID NO: 348903 - DNA, 557 bp, Homo sapiens
gcagcagcagtaatattaaaagcagtagaactaatagtaggctttttgtcactcaatatgtattcccaaaaatatgtaaaaataattatctttttataatgaaactaaacttctatttgaataaacatatacttttattctaaatgcttttctgagtttcctactaagtatttatagtttattaaacttcaaataattggtgaacatttatactgtaactaatgggatttaaatagccttttaaaggctaagttagttggtacagcttgtgtttgaaaagatgaaacgaggttgagtctaaacttgggccctatcactgaagagctatatgtgagctttcaccttcagtgattcactctctaagctcaatctcctcaattataacacagrgacaataaaaacccccaaaatatttaacttaaaaggctatagtgagggttaaatgaaataatacataaaatatatagaatttggtaagtgttcataaaaatcttttttcaagatcttctgcgcaaagtactaaagactaatcagagattgctttttttaaaacagaa

SEQ ID NO: 348904 - DNA, 557 bp, Homo sapiens
gcagcagcagtaatattaaaagcagtagaactaatagtaggctttttgtcactcaatatgtattcccaaaaatatgtaaaaataattatctttttataatgaaactaaacttctatttgaataaacatatacttttattctaaatgcttttctgagtttcctactaagtatttatagtttattaaacttcaaataattggtgaacatttatactgtaactaatgggatttaaatagccttttaaaggctaagttagttggtacagcttgtgtttgaaaagatgaaacgaggttgagtctaaacttgggccctatcactgaagagctatatgtgagctttcaccttcagtgattcactctctaagctcaatctcctcaattataacacagggacaataaaaacccccaaaatatttaacttaaaaggctatagtgagggttaaatgaaataatacataaaatatatagaatttggtaagtgttcataaaaatcttttttcaagatcttctgcrcaaagtactaaagactaatcagagattgctttttttaaaacagaa

SEQ ID NO: 348905 - DNA, 533 bp, Homo sapiens
ctctggcataagaaattagctagtcacaggaccaggttctgagagccttattcaacaaatagctctgtgcagtttgtggcagttacttgctttgttctgccccaaccattctcacagtatgtgtatgttaagsaaaagaggaattgtgtgtgttttaaatctcaatggtgtgatattttgtggtccatgagaagggtatggacagtggtattctgtcagataatgaagtgagcaacaagtgtttgctggtgatctgtggcaagcagcatcctgtggaatgatgcagaggtgatttcatgagcagttttaagaggaagatctcagatttctggaataaaactccagcagtaaaattataattagaaatggtgattggaagcatcccccggtgacttgggcgaaaaccagggctcggcggtggcagcagctttaagatgacacaaaacagaggcccagagataagcaggagcagtgtaaaagagcagcttgaaatggcatactggagtggattgtgagtgcaatgacacacctct

SEQ ID NO: 348906 - DNA, 533 bp, Homo sapiens
ctctggcataagaaattagctagtcacaggaccaggttctgagagccttattcaacaaatagctctgtgcagtttgtggcagttacttgctttgttctgccccaaccattctcacagtatgtgtatgttaaggaaaagaggaattgtgtgtgttttaaatctcaatggtgtgatattttgtggtccatgagaagggtatggacagtggtattctgtcagataatgaagtgagcaacaagtgtttgctggtgatctgtggcaagcagcatcctgtggaatgatgcagaggtgatttcatgagcagttttaagaggaagatctcagatttctggaataaaactccagcagtaaaattataattagaaatggtgattggaagcatcccccggtgacttgggcgaaaaccagggctyggcggtggcagcagctttaagatgacacaaaacagaggcccagagataagcaggagcagtgtaaaagagcagcttgaaatggcatactggagtggattgtgagtgcaatgacacacctct

SEQ ID NO: 348907 - DNA, 557 bp, Homo sapiens
aagacagaatacttccagccaccaatttacttcagaaacctgataatgcaagtaatattcaacaacaacacgcttytcctaatcactgtgagagtagtggagctcctgataattggaaggggagccctttatctactggcttgtattcccctgaagtcatggagaaataacagccatcccagagtcataaggaacaatgtgtatagagagatagtactaaactaatagtgcagagttgcaggtcagagttgttctggttattgccataatataggactcttgagaaaattaacaaacaaatttatttataacagataaaatccaggtcctccagaaagggcaaattataaactactatagggataaattcccaaccttagacctatggaagccccaagggaaaaaaagaagataagataacaaaaatgatgctccacttgaagatatgaactactgtgaggaaaacgttctatctaagtaagtattgactataaaaataagatgactcatggtaaccagaaacaaaaaaggaactaaaacacaagataagacttcat

SEQ ID NO: 348908 - DNA, 617 bp, Homo sapiens
gttcatgttgttttaatttgtatttccctaatgacataatgctctacatgctatacattaaatatttgtgttcccccaaaatccatttgttgaaattctaacacccatgacgatggtattaggaagtaggatctttaagacatgattaaattctgaggctggagcctttattaatgggataagcactcttataaaagaggccccacaaagagattycttacccttttaaccataagatgttatagccaaaagatactgtgcatgaattgggaagtggaccctcgccagacaccaaattttctgatgtctttgatcttggactacccagcctacagaaaaatgagaaaatctgttgtttataagccacccagtctgtgctttcctattatagaaaacaaaacagaataggacagtgcatttttgagttctttattttgatacacatttcaccgagaatatataggtaggtaaatttcttgttaagggtcttagcattttttagaatgtcttttgttttatttgagtaatagtggatctgttatgcactgcattcaacattttttatgaattagcaagaaaggttttatttcactagcctcacattctgatcccatttt

SEQ ID NO: 348909 - DNA, 617 bp, Homo sapiens
gttcatgttgttttaatttgtatttccctaatgacataatgctctacatgctatacattaaatatttgtgttcccccaaaatccatttgttgaaattctaacacccatgacgatggtattaggaagtaggatctttaagacatgattaaattctgaggctggagcctttattaatgggataagcactcttataaaagaggccccacaaagagattccttacccttttaaccataagatgttatagccaaaagatactgtgcatgaattgggaagtggaccctcgccagacaccaaattttctgatgtctttgatcttggactacccagcctacagaaaaatgagaaaatctgttgtttataagccacccagtctgtgctttyctattatagaaaacaaaacagaataggacagtgcatttttgagttctttattttgatacacatttcaccgagaatatataggtaggtaaatttcttgttaagggtcttagcattttttagaatgtcttttgttttatttgagtaatagtggatctgttatgcactgcattcaacattttttatgaattagcaagaaaggttttatttcactagcctcacattctgatcccatttt

SEQ ID NO: 348910 - DNA, 621 bp, Homo sapiens
aatattcggtgcagttggcgtccccatgactctctcctcatttcacctgaacatccaagagagcagacrccgtgtcacttttgttctccactgtgtccccactgtttagtactgtgcctgtggcctggtagttgctcaacatatactcactgaacaaataaatgctcaaatatgtgtacggaagcttttcatggtgggaatttctgtacagatgtacaaatattagtgaacctgccttttgcaaatattttcccttttgtatttcattttggacaacattagggaacttgagaactttcttcttctcttggagagcatgaaacaatttgtgaacattagactttatgttgaatagaatttgtatgcgttatggtcaaacctgttctttatatcatcaatttctgacacataataggcatatacaactacttccccaacgaatgatcaatgatttaagataccatcagcctcagcagtcactacttatctcaatgattatgtagaaaaaacagctttattttctgaatgatgaactggcctaagccaccagcccacctctgtaatgactttgtatatgaggaagaaaatacagaatcagataatatgttctaacaaatagca

SEQ ID NO: 348911 - DNA, 609 bp, Homo sapiens
tgttgccttttaaactttggaataaaagtttggtaaaacagatatgttcaaaactttctaaagcaatcctagttttatttgataatattcacagattgaataaaataatttttagaatattcttatatagacatattggttgtcacaaagcaaagcaaatatgtactaaatatgtcccaacatgggactcaaagaattaggttgtacagcaaatcaggttttcatctatcagcaagaatcaataaaatggaccagtcttctagtgtgaattcttggaaagctagatatcaacttcccaaaggccttgagcgaatgcgttctttgaattatataataccctacctaatctattacaaaacacaatattaaaggcatgaaaagaggcctaatgatatgattgcttttataaaatattgagtatattttataaatatcaatgagtatattttttgtgaaaatctgatgtatgaatttacggtttgtcataataaatttttttatatttaaaataaatgcacatttaaaaaatgtatttacacaaaccaacaggtattaaattttgtggcacttcctttggcttamtttttactcccccctagaaatgattgc

SEQ ID NO: 348912 - DNA, 501 bp, Homo sapiens
attttttaatttacttttgtctgactaaattagttcagaggaccagtcttacagctctgagagtctttccacagtttggtctattctgctatttgcaattgtattataaaattcttgtagtgtgtctttcagctctatcagatcagtttgattctttccttaaatggcagttttgtctttcagttcttgatccattttattgtcatccttagattccttggattgagttttgagttcctccttaatttccataaccttcattcctatccatattctgaattctatgtctgtcatttcagctggttaagaatccttgctgggaaacttactgtggtcatttggaggaaaaaagaaaaagacacactggctttttgagttgccagagttcttgtgctggttctttttcayctgtgtgggctgatgttcctttaactgtggtgtaatttgattataatcagtttactttatttcagaacattttcagagggtcaaggttttgtt

SEQ ID NO: 348913 - DNA, 528 bp, Homo sapiens
tattgtttttcttatattttctatgtgtaataccattatagttcatttaactagttttatattttgtgagaatttattgacactgtattttatcttttaacagtttggctgcacctctcagctgtacattatcacaaaatagattagcatttttaaaatcttcattcarattattaataaaagttgaatgaaaagaatttcaatacaaattcctttaatacagtataaaagagaatgtacattttgatattgattcattattcaatatacattgagtataattatagtagctgaagagctatctagtcgacatttctccacgtataatttttttttaagtaatacatttctgaaataaaagtaaactctgcctatgacattttatggaactatagatctaacaaattgggctgggagttgaaggggaaaatgcaattgcttggataactgttttctaaatatatgatctttcctatttatcataacttccttttataagtggtaaaaacatacatgttaagtaatcca

SEQ ID NO: 348914 - DNA, 528 bp, Homo sapiens
tattgtttttcttatattttctatgtgtaataccattatagttcatttaactagttttatattttgtgagaatttattgacactgtattttatcttttaacagtttggctgcacctctcagctgtacattatcacaaaatagattagcatttttaaaatcttcattcagattattaataaaagttgaatgaaaagaatttcaatacaaattcctttaatacagtataaaagagaatgtacattttgatattgattcattattcaatatacattgagtataattatagtagctgaagagctatctagtcgacatttctccaygtataatttttttttaagtaatacatttctgaaataaaagtaaactctgcctatgacattttatggaactatagatctaacaaattgggctgggagttgaaggggaaaatgcaattgcttggataactgttttctaaatatatgatctttcctatttatcataacttccttttataagtggtaaaaacatacatgttaagtaatcca

SEQ ID NO: 348915 - DNA, 528 bp, Homo sapiens
tattgtttttcttatattttctatgtgtaataccattatagttcatttaactagttttatattttgtgagaatttattgacactgtattttatcttttaacagtttggctgcacctctcagctgtacattatcacaaaatagattagcatttttaaaatcttcattcagattattaataaaagttgaatgaaaagaatttcaatacaaattcctttaatacagtataaaagagaatgtacattttgatattgattcattattcaatatacattgagtataattatagtagctgaagagctatctagtcgacatttctccacgtataatttttttttaagtaatacatttctgaaataaaagtaaactctgcctatgacattttatggaactatagatctaacaaattgggctgggagttgaaggggaaaatgcaattgcttggatarctgttttctaaatatatgatctttcctatttatcataacttccttttataagtggtaaaaacatacatgttaagtaatcca

SEQ ID NO: 348916 - DNA, 580 bp, Homo sapiens
atttcactcctctgctcaaatgccttcaaaggctgttaatcatattcaaaaataaatccaactttattccactacccataaggcccaacatgatctacacctgacccatgtctctgacctcaactcttactgattggtgttcagtttctccactggccacaatagcctccttgttcttccacaaatatactaaacatgttccagcaatttttcacttgctgctcttgctactttgagcacttctcatacatatcttcacaaacctactctccccttccttaaggtcaccagatcatatgtccccagtttagaaaggcctgccaatcaccatattatcatatgtggatgtaattacttttattcactctctgtccttttactctgcttaagttttctttctagcaatatcttcctatctatatttacacacrtgtatttacgttcaatgagttaaaatatatgatttcatgaaatataaccaattgtccaagggctctaagtcacaagatggtcttgaatcatttgaactgggcttttggaataacggcactcctacattaggaaagtatcctgagaacct

SEQ ID NO: 348917 - DNA, 600 bp, Homo sapiens
tccttttactctgcttaagttttctttctagcaatatcttcctatctatatttacacacatgtatttacgttcaatgagttaaaatatatgatttcatgaaatataaccaattgtccaagggctctaagtcacaagatggtcttgaatcatttgaactgggcttttggartaacggcactcctacattaggaaagtatcctgagaacctgccacaacatgcttgctggtttcctcttttggagattgcttctcatttcttctttaatctcatgattaaagtcactaagcggttttactaattactgcaaattgccgtagatgaacatttaaaggatatgcattgaaaccccattcgagaagtgggaatttaccatgctttaaatgattaacggtaggctttcctaagttcctttaaacaacatctcactttagtgctgatcagggacctgttttgctcctaaatgtctttattctccctaattgaacaagattgtgaactaaacagaatgagaagcagaaatgtgcaccatttgggtgagactgactatattgccttcagaaagtaaaaatagcaaccattgctatggctacaatgggtt

SEQ ID NO: 348918 - DNA, 570 bp, Homo sapiens
attcacaaggatgtacagcagtgagaattctatccattattgattgaaatgaaattggtgtatcaattttggcagcttgtcatgacctaataaagttcaactgtgcattctctagacatacaaatctactattaaatatgtaccttaatattgtccctaccccagaaccatgcacaagaatacttatagcagcattatatacaacaactaaaactattcaaaggcccaccaagaggacaatgttacagaaaattaaagaatagtaaaaatgaaccaactaacatttcacacattgacctagataaatctcaaaaatatttttgagtgaaagaagaaagtcatacagtaaaattaaatttttagataaagttcaaacactggcaaaacttaccagtatttgattcaggataaatacactggcagtaaaaactacagagaaaaataagagagtaaacacaaaattaaagtcttagaggggacacaatggcacaaatgatccttttccttsgcctgtatatgaagtacaaagatgtttatttgattttgactctgtacctgagtgtgtgtgta

SEQ ID NO: 348919 - DNA, 639 bp, Homo sapiens
tttttctaatgttttcaggttcatagttaaacgattttcttttatttaattatgttttaagaactcaacatttttagtaatacattggttgtacatctatttttgcattccaataattctaattctgctatataattgtctgacttcatatttacagtaataattgatttagtaaaagaattaaaatgaaaagacaaaaaataatggaaaggtatgctttcaataactttaaacttgctggggaaaagagacagtatcattttgagatcagaygacagctcaacttccagcatgtacaggtcacaggtctcactttgtaatgctctgaagctcactgcatggcctccaaatgacatcaataaggattccacaaagaactaaaatatcacaattctactgtctaaatatagcctcccactaatactcggttcctcactccgtcttctttcattgacttaaacagtgattgtccctttaagaactgaagaatactcttaacaaacatggagtacaggaaagattctacaagtcatacagaatgaaaatatattctaaatcaattttaataaaatacgctgtagtttaggaataatcataacaaacttgatgtgtatcatgtacttactgcgtgcaagttat

SEQ ID NO: 348920 - DNA, 639 bp, Homo sapiens
tttttctaatgttttcaggttcatagttaaacgattttcttttatttaattatgttttaagaactcaacatttttagtaatacattggttgtacatctatttttgcattccaataattctaattctgctatataattgtctgacttcatatttacagtaataattgatttagtaaaagaattaaaatgaaaagacaaaaaataatggaaaggtatgctttcaataactttaaacttgctggggaaaagagacagtatcattttgagatcagacgacagctcaacttccagcatgtacaggtcacaggtctcactttgtaatgctctgaagctcactgcatggcctccaaatgacatcaataaggattccacaaagaactaaaatrtcacaattctactgtctaaatatagcctcccactaatactcggttcctcactccgtcttctttcattgacttaaacagtgattgtccctttaagaactgaagaatactcttaacaaacatggagtacaggaaagattctacaagtcatacagaatgaaaatatattctaaatcaattttaataaaatacgctgtagtttaggaataatcataacaaacttgatgtgtatcatgtacttactgcgtgcaagttat

SEQ ID NO: 348921 - DNA, 636 bp, Homo sapiens
tttgggaattggagtgtaaggatttttatctgatatgagttctctgggttgttgggttgtttcattatgcagccaaatgggaaaccactatagaaggagaatggcstggttgtatttgtgttttgtaaggactactgtgacagcatggagggttatatattgcaagtgggcaaggctgtgaacaaggaaatcagcttgggttaaattcaagtttgaatgtttcttgccattttcttggccagtggttctcaaccaggagcaattttgcaccctcgcggagtattggcaatctctggagacatttttataagtcacaatctaatagtgtgatgggtttgttactgagatccagtgggtagatgatgatacacaggtcagtactccacccccaaacaaattatcggaccctaaaggggaggctgttggcagactctgacataggcaatgtgatagtcacagataataatagagaatgttatgacagggaacaaaatcactgacagtgtgtttattgagggaatttggtcaaggaaggagttctggataccacacctaaatatatattgccaaaggaagacagtagaaggaatatcaagaaagaacaagatggggaaatcaaaactaacagacttctca

SEQ ID NO: 348922 - DNA, 525 bp, Homo sapiens
ttcaaaatggagaagtatatcgagagggataattagaaaagtccagcctgtcctttccacagcatccaccccaccccttatagatatccactttccatacatttttaaatttatctttctggtatttcttttgcaaaaataagcaaatatgtagtatatatattcttattttccactttttcttatgcaaaaaatagcataccatatattcttttctacacttttctttttcasttaacaatatgtcttggaaaaaatcctttcatatctactcacagagatcttgctcatccctttttatgattcacagaactccactgtgtgtatataatttatttaactggttccctcttggtggatatctgttttgtttccagtctttcaccgttacaactaatgctacaatgaataactatttcatatattgttttatttttgtcaaagtgtattttctagatgggttcatagaagtgggattgctgggtcaaagggaaaatgcatatgaaattttgttagatgttgcca

SEQ ID NO: 348923 - DNA, 588 bp, Homo sapiens
tttttgggatttgtattttgttctgctggtctgtgtgtctgtttttatgccagtattatactgttttgattacattagtaatactaatttgatcacctttctgtgtgatgccttcaactttagtttttctttttcagaattgctttggccatttggggtcttttgtggttccatatgaagtttaggacttctattgctgtgaaaaatattattgggattttgatagtggttgctttgggtagtgtggacattatcacaatattgaatcctttgatccatgagcacggagtatctttccatttatttgtgtcctcttgaatctctttcaccaatgttttatagtttttagtgtccaggtcttttacctccttggtttaatttattcctgagtactttatttgatttttttgatgctatcataaatgagattgttttcttgatttttttaggctaggttgtttgtgtatagaaatgccacagattttcatatgttgattttgtactctacarcttttctgaatttatttattacttctaatagtttttttctggtggaatctgtgaggttttctacatacaaaatcatgt

SEQ ID NO: 348924 - DNA, 517 bp, Homo sapiens
accatggaacactgtctaaccgtggtttggattctggggtagatgaatagctaaactgatagctatataatgtagattgaggataaatacatattttacagcaggatttccagatgtgtggttggaaactaccttttcaagaccgtctgggagcatattaaatacagattcctaggccaaacccccttagattatgaatcagcatgtttgaggtggggaccaggaaactatatttttacaagcaccccatgtaatattcatgaatccggacatttgaggaccactgttcttgtggtgatgtccrgaggatatcaggggaattttgtatctgattttagtttttgttgaaaggggcatggagaaaactatttgggactttgaagagttttattttatattattctactaattgtgtggcattaaggtttgggtgagatttagaacgctagtagcaatcctcttgacactttatagagcctgttccttctacctttagtagtagagagagaaactgggt

SEQ ID NO: 348925 - DNA, 517 bp, Homo sapiens
accatggaacactgtctaaccgtggtttggattctggggtagatgaatagctaaactgatagctatataatgtagattgaggataaatacatattttacagcaggatttccagatgtgtggttggaaactaccttttcaagaccgtctgggagcatattaaatacagattcctaggccaaacccccttagattatgaatcagcatgtttgaggtggggaccaggaaactatatttttacaagcaccccatgtaatattcatgaatccggacatttgaggaccactgttcttgtggtgatgtccagaggatatcaggggaattttgtatctgattttagtttttgttgaaaggggcatggagaaaactatttgggactttgaagagttttattttatattattctactaattgtgtggcattaaggtttgggtgagatttagaacgctagtagcaatcctcttgacactttataragcctgttccttctacctttagtagtagagagagaaactgggt

SEQ ID NO: 348926 - DNA, 594 bp, Homo sapiens
gggttcagtgtagtctccaactgggatccctactgagagctttaatcttaatgtattaagttgcaaagctaccatgtgtgtaggattataactactgactatatgttggagacaaaaaagccattgtaatatgtctgccaaagtttataagtaagccacatttggtcatgtagcctcgtaaacctatcattttgtcaaaatgatcagaagttatattagtttcctgggctgctgtatcaaagtaccataaactgggtggcttaacacaacagaaatttattatctcacagttctgtaggygagaagtctgaaatcaatgttggcaggaccacgctgtccctgaaacctgtgggggaacccttccttgcccattcctcacttctggtggtttgctggcaatctctggcattcctcagcttatagatgcatcactctagtcctgtctttacaagaccttcttcctgtgggtcttcctgtcatcttccctatgtgtgtctgtctctgcggacaaatctccccttttttataaggacaccagtcatattggattagggcccaccataattctctcattattacttgatttgctctaca

SEQ ID NO: 348927 - DNA, 594 bp, Homo sapiens
gggttcagtgtagtctccaactgggatccctactgagagctttaatcttaatgtattaagttgcaaagctaccatgtgtgtaggattataactactgactatatgttggagacaaaaaagccattgtaatatgtctgccaaagtttataagtaagccacatttggtcatgtagcctcgtaaacctatcattttgtcaaaatgatcagaagttatattagtttcctgggctgctgtatcaaagtaccataaactgggtggcttaacacaacagaaatttattatctcacagttctgtaggtgagaagtctgaaatcaatgttggcaggaccacgctgtccctgaaacctgtgggggaacccttccttgcccattcctcacttctggtggtttgctggcaatctctggcattcctcagcttatagatgcatcactctagtcctgtctttacaagaccttcttcctgtgggtcttcctgtcatcttccctrtgtgtgtctgtctctgcggacaaatctccccttttttataaggacaccagtcatattggattagggcccaccataattctctcattattacttgatttgctctaca

SEQ ID NO: 348928 - DNA, 587 bp, Homo sapiens
aatactgttcttatccttgaagagttaatgagcttttggaggagttagtcttatgatcttatgagggccttacctcataaggttgtagttgagattaaatgagttaatgtatgtaagatgcctggcttgtaattattgcrcaataaatgttagctgctactactactactgttaccactactagtatcaccactactgtgctaagtgctgtgttaattaatgtaaacaaagtataatggagaaacagaagattaaatttgcatgggatctgtggaatcaaagaggtcttcatggagaaggtgacattggaaatggatccttaaagcttaaataggatttaccacgtatgtacaagaggcaagggaattcctacacaaaagaaagctatcaggtaaagacataagggagttggagtaaatggcacactcacagagtgagaggtgatccaggaagctagaacccaacctgcaatcatggtaggcagtggacagagagaatcttaggactgctggtcaggcacttatagtactgtgcaaaggaattgagattttatcctgtgagtagagaacaggcattggaggattttt

SEQ ID NO: 348929 - DNA, 537 bp, Homo sapiens
ccccacactgctcctccagcccatctaacacattctccacaccacaaccagaccaacaattttaacagcagttaggaacatcactccccttcttgaaacttccattgccttcccattgtttgtaaagggaaaamccaaaagtctagcctgcccaccgctagactgtgagaattaggaaagctgtcccttcctgctccttacaatagatgacaagtctatgactttgaatgtgaatggtgccccctagagtactgctatcctacggacaagggagagtagcagccccatgggccttcacttgaatccctaaaacttcaaagttctcctctgcctgggtggctgatatggtttggatgcatgtcctctccaaatctcatgttgaaatgtggcctccattgttagaagtggggcctagtaggagatgtttgagtcatgggggtggatcccttatgaatggcccggtgccatccccatggtaatgaatgagttctcactctggtggttcacacaagaattggttgtttaaaagagcctggc

SEQ ID NO: 348930 - DNA, 560 bp, Homo sapiens
agcatcctaagtagcactggcctcaggcagcagtcaatgtatgtgccccatcagcccctccacgcagtgtcttttcctctcttttggttctccttcctagacaacatgttagtgtcaacgagatgcatgtcagtcaggccatgagccggaggcctttcctcctgcctttcccacacagacacctacctgtcctagttaagatggttctgtcagcttgctgtcggggctggaaagcaaccacagcattttctctcccacctctgggtattawgggctgaaaaacaacttcaggaatatttgtattttaacaacagacttttagaaatagaaaaattaatccctaaagatgacattttcaccaccaggctagctaggggtggaaagttgtctatttcataaacaaattaagtcacacatttattataccatctcccaataccacttcagttgagataatccatgttgacagcctaggatgtagccttccacatatttctctgtgtacccatagggacatgccacaatttatcctaatgatggacattcagattgttttcatt

SEQ ID NO: 348931 - DNA, 569 bp, Homo sapiens
actaacatgctggaagttgaaaaaagaagaagtagatacgggacatatagtgaggcagaatcaacaatgtttgttgataaattagctgtgaagaacgaaagacaaagttgaaaatgacctctacgtttcttacttgaacaactgtcagacagataatgycatcatttactgagataaggacaattttgttctacagaaacatttgagatttaagatttaaaacatttgggattgttcaattagtttatcctcttctttaaaaacattcaaaatttggatgtaactcattgcccctacacatgaagagctttcaaggtttcacacaggctacagtactttgaataaaatctatgaagaaaacataagcctaaaaagtccaaaaacaagaaagtactgctgagtcacaaactctcaattccatcattttttcaagaattttaataccagagcaagatggggttgcttaccctgaagctgtcaacaaactgtctacttgaaatatttttttccactcaaactgatgttctcatgtaggtgttttcttcctgaggtcagacaagggtgcttca

SEQ ID NO: 348932 - DNA, 612 bp, Homo sapiens
ttcctgtggtaacagattacatttctgatactactcgcttccttttgtgcactcctcacgaacaytcaatataattaaggcataatatttggttaaatcaacattcaatgcttacgtaattataactatttacatattgattgcttttttcttgtacaatgctttatttttcttgtggaatttctttgtggcagatgcaatttcttctcaaatgcttaaatacatctataagatccaattttaataccctttaccaatacctttttctagatggccaaattcataagatagtctgttattgagtccccacctacctcaggaactgcattttatttaatttattattttcaggagtgaacctaatagaacagacctatttctagagcaaaatgaaagatttgtggagctctttagctgatccaggtcattgttggttgcctgtgcctgtgcctttattgacatgtattatgcggctctgcgcatgcttccatctcattgctccctctgcaagctgtaataagtctcccttgacaggctgcttagggcgtttacaagacatttggccttttggtgacttatgctttttggttttgatgtgaggggccagggtga

SEQ ID NO: 348933 - DNA, 612 bp, Homo sapiens
ttcctgtggtaacagattacatttctgatactactcgcttccttttgtgcactcctcacgaacactcaatataattaaggcataatatttggttaaatcaacattcaatgcttacgtaattataactatttacatattgattgcttttttcttgtacaatgctttatttttcttgtggaatttctttgtggcagwtgcaatttcttctcaaatgcttaaatacatctataagatccaattttaataccctttaccaatacctttttctagatggccaaattcataagatagtctgttattgagtccccacctacctcaggaactgcattttatttaatttattattttcaggagtgaacctaatagaacagacctatttctagagcaaaatgaaagatttgtggagctctttagctgatccaggtcattgttggttgcctgtgcctgtgcctttattgacatgtattatgcggctctgcgcatgcttccatctcattgctccctctgcaagctgtaataagtctcccttgacaggctgcttagggcgtttacaagacatttggccttttggtgacttatgctttttggttttgatgtgaggggccagggtga

SEQ ID NO: 348934 - DNA, 521 bp, Homo sapiens
gtctctacttaaaattttttaaaaaggaaatcagccacatgtattaacatggatgaatctcaaatgtattaagtatgctaggagataaaagccagcgtgaaaagctacatactgtatgattccatttatayaaacttctggaaaaggaaaaagaagagagacagggaatagatcagtaattgtaagggattaagggtgacatgggattatctgcaaaggaatagaatgaaaaaatgttttcagggatgatggaacaaactgctccatatcttgattgtaatggtagttatatcactcaatctatcttccaaaactcatagaactatacaccaaaaaagtgaattttattgtatgtgaatttttttaactaaaaattaaaagttaatagatcaactgagatacaatattaatacatgacaagatttaatatcacaaagttagaaattctccccaaattaatctgtaaagtcaaagcaatttcaatcaaaacctcaaccggatttttcagaacttaaaaaact

SEQ ID NO: 348935 - DNA, 521 bp, Homo sapiens
gtctctacttaaaattttttaaaaaggaaatcagccacatgtattaacatggatgaatctcaaatgtattaagtatgctaggagataaaagccagcgtgaaaagctacatactgtatgattccatttatacaaacttctggaaaaggaaaaagaagagagacagggaatagatcagtaattgtaagggattaagggtgacatgggattatctgcaaaggaatagaatgaaaaaatgttttcagggatgatggaacaaactgctccatatcttgattgtaatggtagttatatcactcaatctatcttccaaaactcatagaactatacaccaaaaaagtgaattttattgtatgtgaatttttttaactaaaaattaaaagttaatagatcaactgagatacaatattaatacatgacaagatttaatatcacaaagttagaaattctccccaaattaatctgtaaagtcaaagcaatttcaatcaaaaccycaaccggatttttcagaacttaaaaaact

SEQ ID NO: 348936 - DNA, 617 bp, Homo sapiens
atcacatcactctgtttatttcctctgtagcagttataactccagaaattatcttgtttgtgtggcgttctcccttgctccattagaatgcagcaccttgagaactgggactttatttcatgcactgctgtgtccccaatatttagaacagtgcctggtgcatagtttgtgctcaatacatagtgattaattgaatgaagtgcttggggacagttacataggatgattaattaatcactattttgatttgcatgagacttaggggccttgtgaaaataaacatgaatttcatccatagccaggattcaaacacacatggccatgcccagtgaactaaagtggtgcttacaaaagccagatatcyggagggacaacaggtctcttgataggaaatccacaggggcagaaggtttcacctgatttaaataagaatgagcctatgacataagacaggcagcattttaaaccaggcagcataatgtgtgggggatgtccttatagcttttggagtctttgggtcttagacaggtcaaaagtatggccaaaagcagcctggggacatgacccttcctatggaagagtggccgagaggcagtgttgtcatcagggagctatac

SEQ ID NO: 348937 - DNA, 519 bp, Homo sapiens
aagattaaggacttgcccatggtcacttaattaataatggcaaagatttgaaaatctgtgattcagatttgttttacaacattttaagtctcattcattgaatctgttttattcacaaaagtttaaaggtatgtggccaatttagacaggccaatctgaacattttttgctatgaagaataatttgaaattccttaaattttggtatttttttctaattaaaaaaatctcacaactgccctttgagggttcactagacaagaacttttctgaagatgcttctgattacttgttatctactggtaataagaaattatcctttcaacagtaactatgtaatggggaatcaggtatgcttttgggtggcactgcaattttcagcaaatgtargaatgccattgaataaatttaaaaacctctctaagcctcactattctatcagagtggaaatagtaataatagtacctatcatataagatcattataaggattaaatgaagtataaagtaatgaatgcaaa

SEQ ID NO: 348938 - DNA, 439 bp, Homo sapiens
gagtaactcagaataagctgatctcctgagcctggcaaagcagaaaaatggaagaaacctaggtctttgagccactaaattaaccaatctcagagccaaattagaaattcttatgtgaaataataaatctgccttattgtctatactatttatattgggttttctatttcttagggctaagaatcttctgatgcacaacttttatatgttttatgttttatattttaagagtaygttttgttgcttcttgaataaaatacgagaccagcatggttcttgcttccttacatgtagtctgtttttgttgactaattgctagcaatattttaaaaaccaaaagtcttcttcagttctttctataattctttcttcttttgctgatctttcttctgttgatattgctttaaatttaaacactactaaataaattatcagggct

SEQ ID NO: 348939 - DNA, 536 bp, Homo sapiens
tgaggaacagtgaggctctgtccttataaaaaaaaatcaaaaaattkgttgggcatggtggcacatgctggtagtcccagctacttggggtctaagacatgagaatcacttgaccctggggggcaatgaggctgcagtaagctgtgattgcaccacagcaccccggcctgggtgacagagtgagaacttgtctccaaaaaaatggaagaattaccacctgtatccaacattctcttacgagcctggcaaaatccactccatttgttctgccagaagaggtcgatggctttactattttggcctaatgttttgttgcctctttaaatgaaaatacgaaaagagctgcttctttctaaaagctttaccaatcaattacaacttcactatgaattaactgtcaggtcccacaaacactttttggtggtaaagaaaggaaagaaaaggcactgggtccatgacgttagaggataaattaacattgaggtataagcattccctttcctctgcagcctcaccagcatctattgtctttcgac

SEQ ID NO: 348940 - DNA, 602 bp, Homo sapiens
gtcataacaatacatcctatatgcagttgtagattactcttcctgactcaaggcacactatttctgattcacagctctagcgaagttattgtcttcttcaatttcctccaatggctcacagctgtcaaaagtacaggtcacactctttagctcagcattcaaggtcctctatgttttgatcctctgatcccaaactatttgtccaaactcgttgccgactactgccgttaatgcctctttcaatccaaccaaatgcattacatactgttttgttactgttgttgcccctcattctcccacttctgcacctttgcatgttctgttccctgatctcctcaagtccaaatgccccctaattgtctagatccagttcaaatgcatctgctccataaagtcttccctgagccctctccaactggaccaatctctgtctcctccaaatatcaaatccctytgcccaaccctctctcaaagcacctattagtactttctgtctggagttatgtaaatagctcatagtgccagctgtcctaccttcctccagcaggggcaggcagaacctatgtctagtttacctttctacttttcttagcgccttacga

SEQ ID NO: 348941 - DNA, 501 bp, Homo sapiens
acctttgcactcttccctcaaatacctagtttcattcacttccttccaggctttatttaaatggcgtgtactttcaattaggtttttcttgaccaatttatttaaaaattgcaatactcattcccaccccaagattctctaacccctttcttcctttattttttccttaacacttataactaatactgtatatattttgcttatctattttttgtctccactgattagaatataaactccatgaaatcatgtctactgctttatctccaacaccaaggacaatacctgataaatactgtactgcccaataaatatttgttcaataaatgaaaattacctttatattagataccattaacacaaytgttgagcaaaattacatatatagcaattctttaactctatctagggggaatataataaacatactaaatgactatcagatatttaaggcaatcccacagcttgtactttgaaaacagtgctttactcgaagggttc

SEQ ID NO: 348942 - DNA, 518 bp, Homo sapiens
actctgttatgtgctgataaggtctggccctagtagtaagacatttgcctagagtgctattctttaaaaattccaaccccaaacatcagcagtcaaattcaggtggtactaaattttttcatgtatttgtcctttcgtgactmactatagacagcaatgacactgcagaaaattcagcttcagttataacatattaaacaccaaatgtgtgctaggcattacgcttaaagcttccatctgtaactgctttccttgtgacatccgtggattctcctcctccaaccctctcttgcctaagttcaggcaattccactaatgcctggactactttagcctctcgcattcctttgaaagttcccaatctcttctagcagtttgtaaaagtacgatccactatccaccttcatcacagtcaccaggagtgcttgttaaaattacaattcttggatccagatcaattgactcagaattactggtggtgaagcccaggaatctgcatttaaaaaatttcctgggta

SEQ ID NO: 348943 - DNA, 542 bp, Homo sapiens
ttgtgacctatgtatgttctatcctggaaaatgccccatgtgcacttcaaaagaatttgtattctgttgttgatatatagagtgttctgtacatgtctgttaaatctaggtaatttattgtgttgttcaagccctctgtttccttacttatcttctgtctagttgttctatccattattgagagtgggatattgaattctgcaaatattattgtagacatttctatttctcctttcaattctgtccatttttgctgtatattctttgatggtctgttattagatacgtaaatgtctacagttatatcttcttactatgttgaaccatttattaatatataatatccttctttgtctctcataatcatttttgatttaaactttatgtcatctggcattaatatagccaccactgctctattttggttattatttgcatagaatactctttttcattctttcacttttaacctatttgtgcctttagaactaaagtaaatctcytgtagaaagcagatagttggattgtggtttttaaaaaat

SEQ ID NO: 348944 - DNA, 558 bp, Homo sapiens
ttgtgtgtgtgtgtgtatacacatttttttcctcaagctatttgagagtatgttgcacacttcatactcctttattaaacacttcagtgtatatttactaaggacaaagacgttcactacatgaccacagtacaattttcaaaaccatttaacattgatgcagtactactatctatgatatagacatactgtccttcatagcaattatgtttttgatccagaattacacactacctttagttttcacttgtctccattaatttgtaatgtttcctcagcctttctgtgtctttcacatcagtgacactgctgaaaagtacaggtcagttattttgtagaatgccccttaattgagtttgtctgatgttttcttaggattagattcatgttatgcatctttggygaaatgtactataaagtgatgttgtgtccttctcagtgcagtttatcaggaggcttatgatgtttacagctgatgttaacttcaatcacttggttaaggtggtctctaccaggttttctcatagtaaagttactatgtttttactttaatattag

SEQ ID NO: 348945 - DNA, 524 bp, Homo sapiens
aagaggctaataaaatatgtttatgttcataaaataaactattatataggcataaaaatcatactttgaagcacattccatatcttaataaatctaattcaatcaattgtagaactgaccattattttacatccatctaggaaaaagatgtagtaattaactatgacatgctttcagttgaagayatatccaaacagagataaaaaaaatttgaaatattacaatcagtaaaatatggtataaataatacaatggggaaacgctcctgatgccatgttgtaatatcaaaggcaaaaggtaggaaattgtcatatacagtcataggggaaaaaaaacaaacaaacaagtgaaaggaaaacacccaatgcaaagggtggtaccttgggagggtagggcaaagtatgatttcaaaatttcatctttacacttttctgatttttcaaattttccagaatgaacatgtatcatttttacaatctgaaatagacactgttattttttaaaaataaatacaaatggataca

SEQ ID NO: 348946 - DNA, 563 bp, Homo sapiens
aaaataaacccaaatacattcagaaatgtagaatgcagcaaagcctgaatctcaaatcagtaggggaaagaaaggattactcattacctggaattatttcaactggatagatacctgggggaaaaaaagttaatctatacctcattctttacaccaagataagttcaaaatgcaccaaagatttaaatataagaatgaaattctaaaagtagtgaaaggcctagtaaaaaggttacttctttataatctcagagaaagcctttctaactatggcccaagatccagaagccataaaagactggtaaacttaaatacttgaaatgtaaacaaataaatctgcactgcaaaaagtaccatttgaaacgtatacttgcaactcatattccaaaaggctcatttccctaacatataaaggacttcttccatcaataagaaattaatcaaagaccctataaaaaataggtgaagaatatggacagacaattcacacaaaaaggaaatgcaaayagattgtaagcatacgacgatattttcaacctcatttttaataaaaatgttaattg

SEQ ID NO: 348947 - DNA, 638 bp, Homo sapiens
aaaagctcacgataaaccaggtagcctagaaatattttwaaaaatttaagaaaaagtcctgtgttagcctgtttaggaaaaaaaaaattaagaaaaaggtatgtcataaatgcatagaatatctgtagatactagtctgtcttatcatttactggcataaaatatatacaaatctattataagaagctgaaatttatcaaaacatacacacactttcagatcatacatggtgtcatttgcagttgagaaaaatgtaaacaaatgttaatgacacagtattaagtcataactgcaccaaattgtggcatctactgtactactgtaataattttgtagcctgctcttgttgctattgcaggaagctcaagtgttgcaagtatctgcttaaaatgcatgtgaggctaatcatctccatgtatatgattcaattcatctctccaataaattgcatatggcaatacaaagtgatctcttgaggttcttgatgtatttttcatcgtgtttagtgcaatagtgtaaaccttgaatgacaactgcagacctcatttcaagataaatgaatccagcttaaggactattgtaaaaaaataaaaggaaattcatgaagttattcctgagttatgccagcaggcatgaaa

SEQ ID NO: 348948 - DNA, 595 bp, Homo sapiens
cttatcaataggcaaaatgtggctggacaaatgatgaccatccaaacaatggaatactgtgtagctataaaaatgagcaaggaaactctttctatatttgatgtgaaaagatctccaagatatataattacatgtaaaaaagcaagatgtagagagaacaatgtaggtagttggtgatcttcgtgtaaaaaagattgacctctgaacaacacgggtttgaattgtttgggtccatttatccacagattttttttcaataaattggaaatttctttgagtttagcgacaatttgaaaaagctcacgataaaccaggtagcctagaaatattttaaaaaatttaagaaaaagtcctgtgttagcctgtttaggaaaaaaaaaattaagaaaaaggtatgtcataaatgcatagaatatctgtagatactagtctgtcttatcatttactggcataaratatatacaaatctattataagaagctgaaatttatcaaaacatacacacactttcagatcatacatggtgtcatttgcagttgagaaaaatgtaaacaaatgttaatgacacagtattaagtcataactgcaccaaatt

SEQ ID NO: 348949 - DNA, 638 bp, Homo sapiens
aaaagctcacgataaaccaggtagcctagaaatattttaaaaaatttaagaaaaagtcctgtgttagcctgtttaggaaaaaaaaaattaagaaaaaggtatgtcataaatgcatagaatatctgtagatactagtctgtcttatcatttactggcataaaatatatacaaatctattataagaagctgaaatttatcaaaacatacacacactttcagatcatacatggtgtcatttgcagttgagaraaatgtaaacaaatgttaatgacacagtattaagtcataactgcaccaaattgtggcatctactgtactactgtaataattttgtagcctgctcttgttgctattgcaggaagctcaagtgttgcaagtatctgcttaaaatgcatgtgaggctaatcatctccatgtatatgattcaattcatctctccaataaattgcatatggcaatacaaagtgatctcttgaggttcttgatgtatttttcatcgtgtttagtgcaatagtgtaaaccttgaatgacaactgcagacctcatttcaagataaatgaatccagcttaaggactattgtaaaaaaataaaaggaaattcatgaagttattcctgagttatgccagcaggcatgaaa

SEQ ID NO: 348950 - DNA, 470 bp, Homo sapiens
attccctcctactggaggaactgagtaactggaagctaggattgaaaggcagaccgtccactgcaggtcctttgcttctgaagtttaaactgtccaactgcatgaaggttttgcctaaatataagtacttatttataaatagataagttattctaagtgggtagagttgtatgcatgtggatattggtgggcgagggcaatccagagggagaaacagccggggcaaaggcgtgtaggagagaaagctggctgcaaagccgcctgtgcctggggacagcgacagcacttcacaaacactgcacaggggctcatcaggcctccatgytgcattctgatcagcgggacgagttcacagtcccaggtataagctctctttggacaggcccatggcactgagtcagcactgagctggggtactttatctactctgtttcatttacaccttgttccaatcccaaagagtaggtctt

SEQ ID NO: 348951 - DNA, 610 bp, Homo sapiens
aagaaactgtagcaggaagagttttaggagtcagaaagaatccagtggtttctatcttggctctgctacttgttagttgtacgactttggactacctactcaacctgtctgaatatcagtttccttaactgtaaaatgagaataatgtcatccagctcactggatacaatgaagtgaccaaacacaaattgcttggcaaagtgtctggcccaggatgggtgcttgctcaacactagctctaccctctctccttctcctgtgagggagtctctgacttcaaataatcaaatgtttacttgrggaggtcaggctttgccaggaggaggaggacagggcgggctgggctgggctgagggtcaggaggagggagggagaggttctggattccagatgtgcacagctgctgggcctgctccctggcagcctctccctgggcccagggccatcctggtctccctcccagatggggagggcccggaaggaaaaagtattcattttgcagctgaatggcccttatagcctctcaagaaatgtaggatggctttttctcccctctgagataatcactatgtacactccacatggaagcaaattgtatcctgtcctcgga

SEQ ID NO: 348952 - DNA, 565 bp, Homo sapiens
ctcttgcgtcttccaagttctcaaaatttctttgcattgttttttggtccacttttgtcaaaaaaaccgctttagtgaggtgtaattcacacaccataaaagtcactcattttaagcttacaattcagcgatttttagtaaagttcctgagttgtacaatcgtaggacttttccctcgcatcaagctgtcagttgtttcctcacacttagatcaaygcgtccacctttgacagccccactttctaactggctgcttccgaactgctacgatgattaaaactgtggataaaggcagagtcagcaggctttgagaaagcttcttcccagcgaggaagatgcacaactttggtgtagattgtggcatctgttttgtctgctctgagaccctttaagcttttcctccaggttctcaattctgattccataggcaagtctacagcgaaatattgcttgatttaactactattcaaccctgccttctccagacccagtgccagaactgagctcaggcccttgttattgccctcctgggctatcacaatgacccctgtgtctctatcttcaa

SEQ ID NO: 348953 - DNA, 565 bp, Homo sapiens
ctcttgcgtcttccaagttctcaaaatttctttgcattgttttttggtccacttttgtcaaaaaaaccgctttagtgaggtgtaattcacacaccataaaagtcactcattttaagcttacaattcagcgatttttagtaaagttcctgagttgtacaatcgtaggacttttccctcgcatcaagctgtcagttgtttcctcacacttagatcaatgcgtccacctttgacagccccactttctaactggctgcttccgaactgctaygatgattaaaactgtggataaaggcagagtcagcaggctttgagaaagcttcttcccagcgaggaagatgcacaactttggtgtagattgtggcatctgttttgtctgctctgagaccctttaagcttttcctccaggttctcaattctgattccataggcaagtctacagcgaaatattgcttgatttaactactattcaaccctgccttctccagacccagtgccagaactgagctcaggcccttgttattgccctcctgggctatcacaatgacccctgtgtctctatcttcaa

SEQ ID NO: 348954 - DNA, 530 bp, Homo sapiens
ctctcactgacgatcccatggactgtcaggtgatggtccagcaggctgggtgggagggaagttcaaacagggggacagacaaggagaactggggtgagctgcgctgaaggcaaaggctgcagccgcctgtgctctgtggagccccccgctgtggtacctcggttgatgcctcccagccattcatccggggtcagtgctggctccgtgcctggtgtcattgggtaaatgtcttcctggtaggaatctgactacagtgggaggagcagaagagaggacacatggggggctgctgggaaagcccctactcttcagtcagactcttcttactgatctccartcactctacctgctctcctgcctctatgcctttgcactgtgtctccctcctggaactacctgactgcactcatgagcaaacccaactgtccccatctgagaatgcccctcaccccaaattaggtttgaagaccccagttcacagcacatctctcacctgggtttctccagggtcatggtcagtggtgagcagg

SEQ ID NO: 348955 - DNA, 530 bp, Homo sapiens
ctctcactgacgatcccatggactgtcaggtgatggtccagcaggctgggtgggagggaagttcaaacagggggacagacaaggagaactggggtgagctgcgctgaaggcaaaggctgcagccgcctgtgctctgtggagccccccgctgtggtacctcggttgatgcctcccagccattcatccggggtcagtgctggctccgtgcctggtgtcattgggtaaatgtcttcctggtaggaatctgactacagtgggaggagcagaagagaggacacatggggggctgctgggaaagcccctactcttcagtcagactcttcttactgatctccagtcacyctacctgctctcctgcctctatgcctttgcactgtgtctccctcctggaactacctgactgcactcatgagcaaacccaactgtccccatctgagaatgcccctcaccccaaattaggtttgaagaccccagttcacagcacatctctcacctgggtttctccagggtcatggtcagtggtgagcagg

SEQ ID NO: 348956 - DNA, 581 bp, Homo sapiens
atccggggtcagtgctggctccgtgcctggtgtcattgggtaaatgtcttcctggtaggaatctgactacagtgggaggagcagaagagaggacacatggggggctgctgggaaagcccctactcttcagtcagactcttcttactgatctccagtcactctacctgctctcctgcctctatgcctttgcactgtgtctccctcctggaactacctgactgcactcatgagcaaacccaactgtccccatctgagaatgcccctcaccccaaattaggtttgaagaccccagtycacagcacatctctcacctgggtttctccagggtcatggtcagtggtgagcaggctaagaggcgatgcaggcccccctcctggagcccagcccagccccacttaccctccggggcacgatcatggagatgggctcgatcaggcccttgagagtcaccagcttgtagaagcggaacacctcgcaggctgacacatccagcccgtgcttgggcatgacccctgtaacaggcacacatgtggctccatggggtcccagaaactgcgtctcagtgacatcaccccatgatg

SEQ ID NO: 348957 - DNA, 536 bp, Homo sapiens
aaactcctttcccaggctaatgcatcccatggatttagcccctgcccccctctccgatggtctcctaacatcctccccccatctcctgctacatcacagagtctacaccacgctcagccacactgacctcccttctgctcctagaacatgccaggctcattctggccacagaggctttgcactaaccattccccctgctgggactgctctttctccttcccatctttcagagctcaacttaaaataycatcatcacagagaggccttccctgaccaccggggtgaagtagcccccagtcactttctgttctagcacaccatttgactctctgcctagaactcattcccatccaatatttttcttatttgtttattgcctgtctcctgctcagtggaatgtgatctccatgagagtaaggccatgttctgttttatttgccactggacttcgcgcagggtctggtacacagctggaggtcaataactgtttgttgaacaactatgtgaaggagcaggaggagtcaagtgctctgcca

SEQ ID NO: 348958 - DNA, 565 bp, Homo sapiens
gtgagctgaaattaagctttgtcatagcaacactaagaataaagaattattgagacttaaagtgttcttgtcagagtaaatctgagatgatctggagtgggaaggagtatggagaataaaagtccctgggagaaatgcattttaacagatacaattctggaacaaattcagattccctctartccttggctaggcctggcaataaatgcgtctttgattttatataccaaacctctcatactgatcttttaaactcttctgatatattgatgtcaagtccccatggttcattttttgcttaggcaaagtctccatccatgaactccaacacttcccatacatcaaactcttgttttttaacttttattttaagttacggtgtacatgttcaggtttgttacataggtaaacttttgtcatgggggtttgttgtatggattatttaatcacccaggtattaagtctagtacccattaattatttttcctgatcctctccctcctcccaccatacaccctctgatagggccccagagtctgttgttcccctctatgtgtctatgtgt

SEQ ID NO: 348959 - DNA, 576 bp, Homo sapiens
catctgcccaccttggccttccaaagccctaggattacaggtgtgagacactgcacccagctgcagtgtcttctttataacagaacaatttatattcctttgggtatatacccagtaatgggattgctggatctaakggtagttctatctttaggtctttgaggaatcacaacactgtcttccacaatggctgaactaatttacactcccaccaacagtgtataagtgttcctttttctaatggagcattttttaaccttgtctgttactactggttgatttcaataccttagttcaggggtcagactgtaagccaaagctgacccaccactcttttcaaaaatacagttttactggaacaaagcttgtcagcccattcattttaagattttctttggcttcttttgcactatagcagcagaatttaggagcaacagggaccatatgacccagaaaaaccaaaatattcactgtctggtcttctacagaatgttttctggacattgctagaagtctaaaatgggttagcagagctgtgtccccttaggagacctcaggggagaatgtttccttgct

SEQ ID NO: 348960 - DNA, 648 bp, Homo sapiens
acaacctaggggagagtaaataattcctgggaaagatgaatgggtccttattagaatagatgatagtttgtaatgacacttatctgagatcgacttctagtctcttctcctggaataggagttggtctttccyggttaataaaactcttgggggaggggattgatgaccaagttccttggagtattatctctaggctaaggagggtcagaaaaagcctaaccctgcatttgctgcttttcaactgtcttcagcttaaactaatgtaccaaagtagcatattttggggtgacacttcccagactcgtcaatagctagctagctttatttatttatttatttatttatttatttattacagagtcttgctctgttgcccaggatggagtgcagtggtacgatcttggctcactgcagcctccacatcccaggttcaagtgattcttgtgcctcagcttcccaggtagctgggattacaggcacacaccaccacgtctggctaatttttgtatttttagtagagatgaggtttctgcatgctgaccaggctggtctcaaactcctgacctcaagtgatccacccttcttgacctcccaaagtgctgggattataggtgtgaatcactgtgcccagactgtttaatgtttta

SEQ ID NO: 348961 - DNA, 576 bp, Homo sapiens
ttgggaaacctttttaaatatatctacccctttcaagtaaaatagcaacttgtgttcaataattccctaagtcattacaacatcattgattccttatgaattatcagaggaactggggattagctttagtggtaagaaaatgtagtcattttcctagggaatagaataggtgcagactytagaagaagatatctctaggtttcaaacctaagtcttctccactaactgtatggttatttatattacctctctgggcattaacataatcatcctaacatcccagagttgttttgggagtttcatgagattacatttataaagtgcatagttcagtacaaagtttgttgaatgtactacgtaaacatttgttctttttcctcctttacccttattaaattgaaaatgtatacaaggatctttattaaccggaatattttattaatcagattacctattccccagttaagggttatcatataaaatagtaaaatttatttaccaaaactctggtatatctattagaatattcctttgtgtctcaatacttcattccctctttgcctaaataagaaattg

SEQ ID NO: 348962 - DNA, 576 bp, Homo sapiens
ttgggaaacctttttaaatatatctacccctttcaagtaaaatagcaacttgtgttcaataattccctaagtcattacaacatcattgattccttatgaattatcagaggaactggggattagctttagtggtaagaaaatgtagtcattttcctagggaatagaataggtgcagactctagaagaagatatctctaggtttcaaacytaagtcttctccactaactgtatggttatttatattacctctctgggcattaacataatcatcctaacatcccagagttgttttgggagtttcatgagattacatttataaagtgcatagttcagtacaaagtttgttgaatgtactacgtaaacatttgttctttttcctcctttacccttattaaattgaaaatgtatacaaggatctttattaaccggaatattttattaatcagattacctattccccagttaagggttatcatataaaatagtaaaatttatttaccaaaactctggtatatctattagaatattcctttgtgtctcaatacttcattccctctttgcctaaataagaaattg

SEQ ID NO: 348963 - DNA, 585 bp, Homo sapiens
tttttgtgatctctgttgttgtgtctccttttttggcttctgaatacatttatttgaycttctctcttttttttttcttaatctagctaaaggtttgccaattttgtgtgtcttttaaaaaatcaagttttcactttgttgattatctgcctttagtttcaattttgtttatttctgctctgatttttattatttctttccttctactaattttgggtttgatttgtttttgcttttctagttccttaaggtgcatcattaggttgtttatttgaagtctttctacctttttgatataggtatttattgatacaaacttccctctcagtactacttctgctgtatcccatagattttgctatgttgtatttccatttttaattgttcaaaaaatgtaaatttatttcttaatttcttcattgacctattgctcattcaggagtaagttgctgaatttcaaaatgtttctgtattttatgaggtttcccttgttaacaatttttagttcaattcaattgtagtcagaaagatacttgatataatttctacttttttggaatttgctgagacttgttttgtggccta

SEQ ID NO: 348964 - DNA, 585 bp, Homo sapiens
tttttgtgatctctgttgttgtgtctccttttttggcttctgaatacatttatttgaccttctctcttttttttttcttaatctagctaaaggtttgccaattttgtgtgtcttttaaaaaatcaagttttcactttgttgattatctgcctttagtttcaattttgtttatttctgctctgatttttattatttctttccttctactaattttgggtttgatttgtttttgcttttctagttccttaaggtgcatcattaggttgtttatttgaagtctttctacctttttgatataggtatttattgatacaaacttccctctcagtactacttctgctgtatcccatagattttgctatgttgtatttccatttttaattgttyaaaaaatgtaaatttatttcttaatttcttcattgacctattgctcattcaggagtaagttgctgaatttcaaaatgtttctgtattttatgaggtttcccttgttaacaatttttagttcaattcaattgtagtcagaaagatacttgatataatttctacttttttggaatttgctgagacttgttttgtggccta

SEQ ID NO: 348965 - DNA, 425 bp, Homo sapiens
actttgcaccttcttaggtgaagagtgttgtttttacactaaccagtcagggatagcatgagacgctgtccagcatttacaggaaaaggcttctgaaatcagacaatgcctttcaaactcttatactgaccactggagtygggcgacatggcttctcccctttctaggtcccgtgacagccatcttgccattacttgccttcaggtcgtgtgtttttaacctccttgtcaaatttgtttcctccaggatcgaggccatcaagctacagatggtcttacaaatggaaccccaaatgagctcaactcacaacttctactgaggacacctgaattgacccgctggccctttgactggcctagagagttcccctctggaggacactacaactgcaggtccccttcttcacccttatccaacaggaagta

SEQ ID NO: 348966 - DNA, 535 bp, Homo sapiens
ctcatttttggaatcttttctgtggctgataacaggtggatagaaattttatttattaattcttctagtcattcattcattcattcgtgtcttgtctattataaagtgacactttttatgttgttattgaactctattggggattatgactcttggaatttcatcattaaaaccctcctgctctagaaattttagcagtaaagtatcaggttctacatttcatatgcttgatgacatttatttagaccttaaggttttggaaggtcaagagatttctgagttcaactcattttgttcagacttgtatttaaatacatacttttgcttggaaattattgtgtagttgagatttggctagcttgacaaacaatatatatgagtatgtattaaaaatattaaagtgtgtgtgtgtatgtatgtatgtrtgtgtgtgtgtgtgtgtgtgtgtgtgtgctgtatgggaagctggcaaaggaaaatatttcttttcttcgttactttaattactaaaaatagcttagattacaaattagca

SEQ ID NO: 348967 - DNA, 501 bp, Homo sapiens
cctatgcccccatccaccaggtgaaaattagtgaagacagaggcatgacaccctagggtgtttcggggcatactggagtcatgctatccccattaacagaggacaatgtgatttttgtggggagatattgaaactacaagaaatgtaggacctatctgatattaacctatcataccacaaactcatgwtatataggaaaatatttatataagatagtattaagcaataatatacaataggagagaacaaaaatctggcttcattgtatggcaaatgattatggagagcagcttgtacataattaccgccctagatctcagatattccacagattatttggacagtacctaacaccacaattcattgggaggcaattgggttgggaaatactgtctataacactaagtaatttcaatcaaatgtcagttgatggttgatatattctctacccacaatgaacaagtcctggggtacaccaaagcaagactttgaaaggtgaag

SEQ ID NO: 348968 - DNA, 620 bp, Homo sapiens
aatattcctcttgctaaattttgtcccttgttaactttaaggaagaaaacacctttggttgagtggcaagacactagtctccagctgatagccagcaagaaactgaagtcctcggtccagctacccactaggaatgaatgctgccagtaatcctgtgcacttagaagcagattgttccgcaactggacatcaggtgagactgtagcctcaaccaaaattgagaatttaatgctgggagaccstagagcaggggacccagctaagccactcctagatttcctagatcccacagaaagcatgaggtaacaaatgtgtgtcattttaagcctccaaatttgtggtaatacttgtacacagcagcagaaaactaacacagtaacccattagatcatgcttcttcctaagatgaaagatagggcattatctgtgcattcagttccatactgctggatgacttgttttagttgtgtgtggaccttctgatggtaatcattccaacaccagttaagggtcaggtttgcttattcttttggtggaaaatgcatttattggatcatttgatgggacagtgacccccccacacacacacacagcatttaagcctctaaataccgtatatt

SEQ ID NO: 348969 - DNA, 620 bp, Homo sapiens
aatattcctcttgctaaattttgtcccttgttaactttaaggaagaaaacacctttggttgagtggcaagacactagtctccagctgatagccagcaagaaactgaagtcctcggtccagctacccactaggaatgaatgctgccagtaatcctgtgcacttagaagcagattgttccgcaactggacatcaggtgagactgtagcctcaaccaaaattgagaatttaatgctgggagaccctagagcaggggacccagctaagccactcctagatttcctagatcccacagaaagcatgaggtaacaaatgtgtgtcattttaagcctccaaatttgtggtaatacttgwacacagcagcagaaaactaacacagtaacccattagatcatgcttcttcctaagatgaaagatagggcattatctgtgcattcagttccatactgctggatgacttgttttagttgtgtgtggaccttctgatggtaatcattccaacaccagttaagggtcaggtttgcttattcttttggtggaaaatgcatttattggatcatttgatgggacagtgacccccccacacacacacacagcatttaagcctctaaataccgtatatt

SEQ ID NO: 348970 - DNA, 631 bp, Homo sapiens
aaatgattcaacagatagatgttttcttttagcttggcagacggaattttcttccagaattcacatttaaaactacttttttctttgaacagagtcttgctctgttgcccaggcttgagtgtagtagtagcatgatctcagttcactccagctgtgacctcctgagttcaagtaatcctcttgcctcagcctcccaagtagctgggaccacaagtgtgcaagaccatgcccraataattttacattttttatagagatcaggtctcaccatgttgctcatctcaaactcctgggctgaagggatccttttgccttggcctcccaaagtgctgagattataggtgtgaacccctgcacccagcctaaaactaaaacattttctttaacactcaacctgagttcgatcaaccattttgaaatcctaaaaacaaacaacaataacaacaaaaaaagaagggccatcaaagtcttattgggctgacatagctctaatattgttataaacatgtactatacacacactacacataccgtggacacttatacatcttttttcagatgcccatattttttttatttggttttactgtataataaaaacactcaggacacacaacccctccccacaata

SEQ ID NO: 348971 - DNA, 570 bp, Homo sapiens
  misc_feature (1)...(570): n = A,T,C or G
ggaagttgggttacagtttatttcagggagacagaaattgcagataaaatcataagtcaatatgtgggaggtatgcattggtttggtctgaaaaggtgggacatctccaagagggggcttacaagtccaaggtgggttttagaggttctttagtcaacaattggtggagaaagttaagctattgtctcaagacttgaagtcagtagaaaggaaatcctgagttaagataaggaggttgtggaggcaatggatcttgttgtagagatgaagcctcaaaagcagcagtccttagagagaataaatagtgtctcttttcagatcttaaaagatgtcaggctctcatttaatctctcctagatctaggaaaggcctagaacaagcttgtccaacctgcagcctgncgtgcatgcagcccaggatgkctttgaatgaagcccaacacaaatttgtaaagtttcttaaaacatgagatttttttgcaattttttatttttacttttttagttcatcagctgtcattagtgttagtgtattttatatgtgacccaagacaattcttcttcttccatt

SEQ ID NO: 348972 - DNA, 649 bp, Homo sapiens
agctagaagagccctgtggctctcttggtccccagggaaaccatttctgactttgtctcacagaggtccttggggagtgctgccagaggaactgggaaaagaccacagggaggaaacttttagctgaactgtgtaacaacttcaactgaacacaaagtttcctggatggaacttgagggaggggtgaatctggagtgcagacacagcacagaagctgtggcaggtggggagccatgaaacctgaaagccctgcttgcttttacagctggagattggtagcctggagcaagttatcagccctgttcacccactgcctggaaacaaacttggtgctgtagagggggccacagcaagagtgagactggcctttgggatatgtgggagctgggtgaggcctgtaactgctggatttcccccacttccctggtggcctacaagacaaggcagaggcagtcataatccccctaggaacataactccattggtctgagaaccacacactccattcccaacagkgtctacagcaagccccacccaaggatagtctgagctcagacctgcctaaccctgcccccacctgatggtctttttctacccgccctgatatccgaagacaaaggacatattgtcttgggagttccaaggccct

SEQ ID NO: 348973 - DNA, 616 bp, Homo sapiens
ctttgtttctctcataataatattttacttctagcacataataagcaaatamctatatttattggcttttttgcaacaagttgtgttcatataaataatgtctgttgtttaaacaaataagttaacactgaaattattgaagctatattatatatgcaacttccttgtggcatacttgaaaggtaaggctcctaccctcttctcccacacccatctccaacaactagaatgtggatattatagtagctggtacaactaactatattagactgcaagatgcaagcctaactaagactatagaagagaagtaatacaaaaggggctcaagttgccaaaaccatggagttagcatattagccctctttccttaagaatagattattagttgctgtgcatcgctaatgtgatgttaagaaactggatgttagcaatatagtaagggcatgtgattcttctgtcaacaggaaagaaaaaatagaaatttcaggaaaaaatatgttaaaaaatcatggtgcaaatgtaacgcaaacaaagatatggactgattttgaaatatatggaatgcaacaatgtgacaggaagatctgttcttcaaatttagaaatgatcctaattt

SEQ ID NO: 348974 - DNA, 616 bp, Homo sapiens
ctttgtttctctcataataatattttacttctagcacataataagcaaataactatatttattggcttttttgcaacaagttgtgttcatataaataatgtctgttgtttaaacaaataagttaacactgaaattattgaagctatattatatatgcaacttccttgtggcatacttgaaaggtaaggctcctaccctcttctcccacacccatctccaacaactagaatgtggatattatagtagctggtacaactaactatattagactgcaagatgcaagcctaactaagactatagaagagaagtaatacaaaaggggctcaagttgccaaaaccatggagttagcatattagccctctttccttaagaatagattattagttgctgtgcatcgctaatgtgatgttaagaaactggatgttagcartatagtaagggcatgtgattcttctgtcaacaggaaagaaaaaatagaaatttcaggaaaaaatatgttaaaaaatcatggtgcaaatgtaacgcaaacaaagatatggactgattttgaaatatatggaatgcaacaatgtgacaggaagatctgttcttcaaatttagaaatgatcctaattt

SEQ ID NO: 348975 - DNA, 616 bp, Homo sapiens
ctttgtttctctcataataatattttacttctagcacataataagcaaataactatatttattggcttttttgcaacaagttgtgttcatataaataatgtctgttgtttaaacaaataagttaacactgaaattattgaagctatattatatatgcaacttccttgtggcatacttgaaaggtaaggctcctaccctcttctcccacacccatctccaacaactagaatgtggatattatagtagctggtacaactaactatattagactgcaagatgcaagcctaactaagactatagaagagaagtaatacaaaaggggctcaagttgccaaaaccatggagttagcatattagccctctttccttaagaatagattattagttgctgtgcatcgctaatgtgatgttaagaaactggatgttagcaatatagtaagggcatrtgattcttctgtcaacaggaaagaaaaaatagaaatttcaggaaaaaatatgttaaaaaatcatggtgcaaatgtaacgcaaacaaagatatggactgattttgaaatatatggaatgcaacaatgtgacaggaagatctgttcttcaaatttagaaatgatcctaattt

SEQ ID NO: 348976 - DNA, 600 bp, Homo sapiens
aaatgaaattctattctgaactacattgctttatattatatgtgctgttataacaaatagattctggggacagggagtttgtgtgtgtgtatgtgcatctgtgtgtgtacgtgtgtgtgtgtgagagagagaaagagagaaagagatggttttgtgtaatttattttccaaataatacttaacatctccaacccaaattttaggaaaagtttaacttctgttytttgtatggcaatttaaatagaattaccatgatggcctaaaaatgcaagcattcatttatttcccattttctcttcatccacttggaattgcagtgcaaactctatgtcattttaaaccccataattgtaaagctaaattatcagccaactcagtgtgatgtttgaatacatatggagaaaatgtaattaagaaataagaaatttttaaagagattatgtactctttagatatctttgtctaattttatgatttatactataatacatcaatgggatagatcaactggtgtaaattttcagtatatatcaactgatgtccttagttagacataattaaacatataacggaatatacttttttgcttatccctatgta

SEQ ID NO: 348977 - DNA, 628 bp, Homo sapiens
acacgtacctctaattttaaataattgcaatgcaaataataatttataaataaacatattatttcatatatcagtgactattcagaaaatacttggttatgattacaaacttctttcattttgcaatgaaaatgagtaatgaaacattggtgaatgtattttaacacagaaatacctcttgcaagttgttatttgaataattcaatatcattaacagtttaaagtttcattggctctttctactgtatagttgaactttcatgattaataggaaaggactccatgttgccaaatataactcagccaattataacatttgaattaaaaagtgagttttatttcaattttctttcaagttaattctgatttaagattttattttcttctataattagtttaagtaggtgtttttgcaacacacatttaattattgyaacgaataactaaattttaatagaagaaattgcatagttttgttctggaacaacagtttttaatgtcaaattaatgatttatacatgtattgcgtatgcatactttaataatggtagaaattgacatttttaattttatgtatgaattctatattctaaattttgcatgaatttgcattgacatttaaatctag

SEQ ID NO: 348978 - DNA, 529 bp, Homo sapiens
atctatgtatatttgatgtcatacatcacattgatgtgcttaaatgtattacatgagtcattggtcattgatatggcttcactctgtgtcccaacacaaatcttaccttgaatagtagctcccataatccccacatgtcatgggtggaaccaggaggaaggtaatttttaatcatggggggcagttaccctcatgttgttctggtgatagtaactgagttcccatgagatctgatttttttttttttgagacagagtctcactctgttgcccaggytggggtggcacaatcttggcttactgaaacctgtgcctcccaggctgaagcgattctcctgcctcagcctcccaagtagctgggattacaggtgtgtgccaccaccacccagctaatctttgtatttttagtagagatgaggtttcaccatgttagccaggctggtcttgaactcctgacctcaaatgatccacctgcctcgacctcccaaagtgctgggattacaggcatgacccagcgtgcccaggtcaag

SEQ ID NO: 348979 - DNA, 511 bp, Homo sapiens
taccagcattatattatcatcagatctagtcaaaagcatttctttccaaaattgcataagactcaaaaccagctattgtctcctacaatcattggtttcaatagacagaaaagaaaaatagggccttccagcatggaccaattgaaagagaaaaayttggaggttgaaaaataaggttaagtgcacggaaaaagtactagttaaaattgcatgcagttatccatgtgaagggtaactgcaggaagaattatatatgaagcagatagcataaatactaaggtagtagaccgagaggattgtggttaattcagaagtctattgaattttaaggagtaggaggcagtcatggctgactgtgtttctttcctattaatctggggtatggaaaggcaagaagcaggaacaattacaagtgtctattgtagtcatttaaatgaacctatacattataaattatattcaataaattataatctataggttataaaatttttgaacaagcagttaccac

SEQ ID NO: 348980 - DNA, 581 bp, Homo sapiens
tacatctatacctttgtcatattttatttatggtttcttccacaggcataacatataattgaaattatttgaattcttcaagtcccatttcttttcaaaaatttttctgattctttctaccattgtcactatatactttcataattttcaataggcataaatattttcatgacatatcatwttacttattatttcatagtgatttctgaccttcctttatgccattaagtagattatacattttgtagtaacaatgccaagtattaaatttggttatatttcttgaagcttctaagacaaataataggactaaaaggaatctaagatatttgggcatatgttagaaacaatatagctctttaattggcaacattattttaaacactactagaatatattacattgctatttccatgttaaactgaggattcattaaaagttggctatttaaaatgtataaagcacatattaatgtgcgctgaatctgagccaaggattgtgaaaaaatatatatgcacatgctcacaaattcataaccttagtggtaggcaggataacgtaccccccgcaccacacacaca

SEQ ID NO: 348981 - DNA, 628 bp, Homo sapiens
tcctactgtcccgtataacgttggcatatataaatgcagtagctttgatgtgttctatattagacatgtttgtttttgtttagactagacacagcagagaaacattcaaactagtttgttatgggaaacattacattttgcattataattgtagcttaataatatgatatttctgccccaattattatgaaatacacwaacatacctaaagactgtaacttacgtcagataagaagatatgttaatatacaaagcttttaatgtgtaacataaatatatgtcacataaaagcatcagatggtagcaaaaaatgctctagactacaaatagtaccagaaaaactggatatcctcatgcaaaagaatgacgcgagatccttacttcatactgtaaacaaaaattaattccaaatgaatcatagacctaaatataagagctaaaactatgaaactcttagaagaaaatatgagagtaaaactttgtcaccgaaaattaaacaaacacaattgacaaaaaaatcaattaaaattaaaagttttatgttgcagagaacatcaataaagtgaaaagaaacagaccatacagtgcaagaaaatatttgcaaatgatatatttgataggagacttg

SEQ ID NO: 348982 - DNA, 628 bp, Homo sapiens
tcctactgtcccgtataacgttggcatatataaatgcagtagctttgatgtgttctatattagacatgtttgtttttgtttagactagacacagcagagaaacattcaaactagtttgttatgggaaacattacattttgcattataattgtagcttaataatatgatatttctgccccaattattatgaaatacactaacatacctaaagactgtaacttacgtcagataagaagatatgttaatatacaaagcttttaatgtgtaacataaatatatgtcacataaaagcatcagatggtagcaaaaaatgctctagactacaaatagtaccagaaaaactggatatcctcatgcaraagaatgacgcgagatccttacttcatactgtaaacaaaaattaattccaaatgaatcatagacctaaatataagagctaaaactatgaaactcttagaagaaaatatgagagtaaaactttgtcaccgaaaattaaacaaacacaattgacaaaaaaatcaattaaaattaaaagttttatgttgcagagaacatcaataaagtgaaaagaaacagaccatacagtgcaagaaaatatttgcaaatgatatatttgataggagacttg

SEQ ID NO: 348983 - DNA, 595 bp, Homo sapiens
ttcacaatttttttgttattyttttacatcttgttggtcaaacaggaagtacaatcatcagttgagaacaaggctcaaggtggaggcatttgaaaaggaaagaggagcgtataggggaatggaagggtaaatgggcttgcagaaatacagtaaaattaacaagaatagttgatgccaatcaattagcaggggcataattggtgttataatttctagattcaaaataaggctactcaacaagtttttagattttattcacccacatttatctgccctgctgtggacatgaattgggatttttcaagcctgcatcattaaaagagtgatttgtgacaagatagttgtactgttatgtaaagtctcagaattatgaaatatgggatccaaactggtgagtggaaaattcagatgttgaaggaactgttgcataaaacattaagttaataggattggtaaatttaaaacttcactgctatacatagaagatgatgagtaaatgaagagttttaattctttactgatgagatgatttagcaatataattttttattttttccgtattgatcaacgtatgaaatgcaataatgtatgtata

SEQ ID NO: 348984 - DNA, 625 bp, Homo sapiens
atcttagatattagttcttatatctatatatctttacatgtatttttttctatacatagttattatatctatagataatatttctaggaatagattttaaagtgttttagaacaaggaggcctgtcaatgttgggtcaggacaaattcaccagtgtggaggcagtagtgactgagaagtgttgccctgcatattaaggaatataatggttgtcaaagatttgtgagttccctggtgtcctcaccaatcccccaaaagaaaaaaaaaatagaccaaaagcttcatgtccaaaccaccaatarcaaagacatatgattccataattgtacatctattccactagagatagagaagaataagctaagcattggaaagctgtaaacttgcttgctatttgtaattttatttgaaatttctactggaaaaaagtgtggattattttcttgcattccttgtcatccattccccaaatttatctgagtttcacttcagtgtcatagtctcatctttcttcaaaggacctgtcaaaatcaggttttaaaacccacaattacatttgttgaggaaatatggttgaggccattgtgttttatgtcatagattgtcgctgatgtaatgtgcacaaa

SEQ ID NO: 348985 - DNA, 555 bp, Homo sapiens
aactaggactacgggcatgcaccaccattcccagctaatttttgtatttttagtagacatgaaatttcacctttttggccaggctggtctcaaactcctggcctcaagtgatctgcctgcctcggcctcccaaagttctgggattacaggcatgagccaccacaccaggtctattcccaagacttctataatttgaatttacctggcctagtgtatttatttacatgatagtacatttttagagtaacaaccctagatgttatacaaaataacgtatgataccatctacagcacccattgtctaaggagcatgcatattgtattgaatatattcagtaatgggatactatgtccttattataatgccatttctaatgtttcactytatgttatttattatttttactggaaaccaaattacgtgtaattcctatccagttgttttgatttttccctttggcatcatccataacaacataatttttttcattacagtccttcacatgttaataccaagttttatatttcttcttaatcttatatttccagaaaaac

SEQ ID NO: 348986 - DNA, 593 bp, Homo sapiens
ttatttacatgatagtacatttttagagtaacaaccctagatgttatacaaaataacgtatgataccatctacagcacccattgtctaaggagcatgcatattgtattgaatatattcagtaatgggatactatgtccttattataatgccatttctaatgtttcactttatgttatttattatttttactggaaaccaaattacgtgtaattcctatccagttgttttgatttttccctttggcatcatccataacaacataatttttttcattacagtccttcacatgttaataccaagttttatatttcttcttaatcttatatttccagaaaaactatcagtattgtaactaaaaattatttcacagaaaaagggaataaatataattttaactttcacaaaaattgccttatcttcaatttattccatatgatatctagattttcttcactatactgattacaaaagtttaaattttctttgtaaagcttcaaatatgaaattaaaagtaaatatgaaagtaaaaatatataacatagttgasaaatagcacatctgagctggctgcagtaggatgcctagagtccca

SEQ ID NO: 348987 - DNA, 617 bp, Homo sapiens
tctcattaggactggttagacagtgggtacagcccacggaaggcaagcagaagcagggtggggcatcacctcacccaggaggtacaaggggtcggggaactccctcgcctagccaagggaagctgtgagggactgtgccatgagggatgatgctatctggcccagatactacatttttcccacggtcttcacaaccacagaacaggagattccctcgggtgcctacaacaccaaggccctggatttcaagcacaaaactgggcggccatttgggcagacacctaactcggtgtctgcaaactgcaggagtttttgtcatacctcagtggtgcctggaacaccagtgagacagaaccattcactcctctggaaagggggctgaagccagggagccgagtggtcttgctcagcagatcccacccccatgaggcccaaaaagctaagatccactggcttgaaattctcgctgccagcacatcagtctgaagtcaaattgggatgcttgagcttggtgggaggagcggtgtccaccawtactgaggcttgcaaacgcagtttgccccttacaatgtaaacaaagctgctgggtggttcaaactgggtgcagaacccaccgc

SEQ ID NO: 348988 - DNA, 643 bp, Homo sapiens
tactttaatctataacaatagtttacacataataaatgttcataatatgagcctttcttccttttctgtctttagaatttctttagaacacaatgcccagactaatgtaactaaatatatcattctgactttagctgtctacggcagcacgacatgagcacatatgaaaatatttcatggtttttagttggtgaagtcatttatttttacttgctataattcttcacagaattatttgaaatcatttcaatcacataacatctcagaaaagattttttctttcacattactaaaaatgtatgactcaaaataattactagttataaaaacctatttacataccttaacatataagtaaactgaatcctttcaagaaggaaatttatataccttaacatataaatgaactaaatccttccaaaaacgaaatataagggamtatttgaatcaaatcaactgtgtacaaatcattaaaacttagaattttagttctgaaattagaaaattattgatatgtaataacctaaaatgaccaatatattttagtttttattaatgtgagacaatcatatattttctctcattcagaacttggttactttcaaataatgtttataatttttttttttcctagtgccttatg

SEQ ID NO: 348989 - DNA, 641 bp, Homo sapiens
tattcatctttatgttcactttctgaatattaccacaaccatttgtaagtccttgacttttgcaaatgtaaaaaataagtaggattttctttacatttgaaatttcaaataattttcagcatgtttttccagcaacagccctccatctttgatatactcaaagaaagaaatggtagcagaaatcacatataatttgcaattttaatgtagaaaatgttcttataaggacttatcaaaaatttaatgcttttccaagtttaatcaatagtgccaccaggtggttacattaatgcaagaaaaaagcattgttaaaatgatttaatttcgtttwaaaatgttgttggggcttattcacaacaaagtaaaataatgactgtattgaatacttatatttaatggaaagtaatatgaaactttcattagctaacttctatttctttatagcaaattattatgaattacctagtttcataaagacttggtaaaccatttaatactgatttgttgcacgttatcccttcttcattagtaagcacatatcttaactttcaattctaccagtttatacagagatgccaacagttcagaaataacaatgaggaatgcacagaaagcatcactagttatgtaatatacattta

SEQ ID NO: 348990 - DNA, 641 bp, Homo sapiens
tattcatctttatgttcactttctgaatattaccacaaccatttgtaagtccttgacttttgcaaatgtaaaaaataagtaggattttctttacatttgaaatttcaaataattttcagcatgtttttccagcaacagccctccatctttgatatactcaaagaaagaaatggtagcagaaatcacatataatttgcaattttaatgtagaaaatgttcttataaggacttatcaaaaatttaatgcttttccaagtttaatcaatagtgccaccaggtggttacattaatgcaagaaaaaagcattgttaaaatgatttaatttcgtttaaaaatgttgttggggcttattcacaacaaagtaaaataatgactgtattgaatacttatatttaatggaaagtaatatgaaactttcattagctaacttctatttctttatagcaaattattatgaattacctagtttcataaagacttggtaaaccatttaatmctgatttgttgcacgttatcccttcttcattagtaagcacatatcttaactttcaattctaccagtttatacagagatgccaacagttcagaaataacaatgaggaatgcacagaaagcatcactagttatgtaatatacattta

SEQ ID NO: 348991 - DNA, 641 bp, Homo sapiens
tatattggtaaacatgtagcctcaggtaacactgaaaataacaaaatacttggtttgggcactaaagggaaagataaaatgactattttaagtatagacctgagatcttgaacaaatttatatccacaatcgttggtttctttgctaaaagagtagaattatcaccagaaaaaaatccaaggtatgatgactcctttatctattaggctatgtgatttaaaaggatattgtacatgtttgggatcartagaatttttgtgggtttagccagagacatgatcaggctctttctgttcttgtctttcccaactaatcgtttgcatctgaggtttccactgatatatgacctggttggtgtagtactgagagatctaggattttattcctgtaactattctcaatctctctcaatttctcgttcggctttggaaagttttataagcactaatagttgagtcaaaggcttatagttatttatgcaggatttttcatggctctgatgggttttgtttcagtaaataattgagattctgggttttctggccacataggagggtatgcaaacaggtcaaaatgaagggtagaaggagaggtaaataaaggagcataagacgggaaaacaaaaattgtgagagaaaggt

SEQ ID NO: 348992 - DNA, 573 bp, Homo sapiens
ttttttcatgtaatgtgggtcattggcaaaaataataatcctcctggcttcataaaattaaagggttccaaatcattaacatacaaaattaataataaaccatttaacatagacacttgaggragaccagatgtttctgcctaattagagaaggcctgaccctagatgatagtgtatttcaatcacctttttaaataagcataaagccagcacacagagcttaatgcagcccacagtgacactcctaggattaaggaagcctcagtaaaatgtcaaaatcatgcaaaggtgaaagggggaaaaagtaacactatcataaatatagaaactcttctctctttttgtcctataggaaagtagagttgttttttgttgttgttgcaattattgttgaataatgaataacatctacaaattgaaatttgagcaatgcaactaagcagggattaaatggtaatatttaaacttaggtgcatgtattaaaatcttaaatctaaagaaatataaaaagaaactatgaaaataacaattgaaaaataaaaaaataattttgaaaatattaagtaattggga

SEQ ID NO: 348993 - DNA, 592 bp, Homo sapiens
aaaataacaattgaaaaataaaaaaataattttgaaaatattaagtaattgggaatgttatcaatccaaatgctaatgaaaatatgaacaaactgtaaatctcaagcttgatcattaaaaagtagagaaaatacacacacaaacaagagtagatatgaagaagcaaatgacatgaagataaaagagaagtaataatagtttaaaaattctagaacatgtagtaagacatggcaaacatttcaatraaaaaatagataattatataacaggaaaatctaaatagtcaaaagaattaccaagaagttttagtacatgtttccttggaccacatctacttactataaacctacatacatttaaggtttttttatggtttacacttaaaagcagaattatattttggtcgattgaaaatatctgtaactttcttgcatattgctcactttctcttcgacatgactgtacttatttatatttccttatattcttataccataaaattcttttatactatcagattgtttaatttttgtcaaaggttctgaaatggtatttcattgctattgtagttccctgataccaattagtatgt

SEQ ID NO: 348994 - DNA, 585 bp, Homo sapiens
ttcactcttgtggcccaggctggagtgcaatggtgcggtctgcactcaccgcaacctccgcctcccgggttccagcaattctcctacctcagccttcctgagtagctgggattacaggcatgcaccaccatgcccrgctaattttgtatttttagtagagacagggtttctccatgttggtcaggctggtctcgaactcctgacctcaggtgatctgcccgcctcatcctcccaaggtgctgggattacaggcatgagccaccgcagcaggccaaagatggtataattcttaaatatgtgtctgtgtatgccaatgaacaattgtaaaccatatttttatttaggtcatgcatctcatattttccatgaaaattatattatatcataatgttccaaataaaataacttcagattgccgcatcttctacagacattcagtttttttctacctttgaagaaatagagaagagtattttattctttgatttgtgagtcaaagaattataaattaattcaaaactggctttacctgaaatgcctttgaaataatgttattaaaatcatatggcatataatatagatgaa

SEQ ID NO: 348995 - DNA, 585 bp, Homo sapiens
ttcactcttgtggcccaggctggagtgcaatggtgcggtctgcactcaccgcaacctccgcctcccgggttccagcaattctcctacctcagccttcctgagtagctgggattacaggcatgcaccaccatgcccggctaattttgtatttttagtagagacagggtttctccatgttggtcaggctggtctcgaactccygacctcaggtgatctgcccgcctcatcctcccaaggtgctgggattacaggcatgagccaccgcagcaggccaaagatggtataattcttaaatatgtgtctgtgtatgccaatgaacaattgtaaaccatatttttatttaggtcatgcatctcatattttccatgaaaattatattatatcataatgttccaaataaaataacttcagattgccgcatcttctacagacattcagtttttttctacctttgaagaaatagagaagagtattttattctttgatttgtgagtcaaagaattataaattaattcaaaactggctttacctgaaatgcctttgaaataatgttattaaaatcatatggcatataatatagatgaa

SEQ ID NO: 348996 - DNA, 585 bp, Homo sapiens
ttcactcttgtggcccaggctggagtgcaatggtgcggtctgcactcaccgcaacctccgcctcccgggttccagcaattctcctacctcagccttcctgagtagctgggattacaggcatgcaccaccatgcccggctaattttgtatttttagtagagacagggtttctccatgttggtcaggctggtctcgaactcctgacctcaggtgatctgcccgcctcatcctcccaaggtgctgggattacaggcatgagccaccgcagcaggccaaagatggtataattcttaaatatgtgtctgtgtatgccaatgaacaattgtaaaccatatttttatttaggtcatgcatctcatattttccatgaaaattatattatatcataatgttccaaataaaataacttcagattgccscatcttctacagacattcagtttttttctacctttgaagaaatagagaagagtattttattctttgatttgtgagtcaaagaattataaattaattcaaaactggctttacctgaaatgcctttgaaataatgttattaaaatcatatggcatataatatagatgaa

SEQ ID NO: 348997 - DNA, 593 bp, Homo sapiens
tacatgataaaacaaaagacgtttcgctctgcaaacagaaaaaatcatttatttacagcatctcaaacttttcctctagatattattttcatcatttttatgtttacctttccaagttaattttattcatcccatagcatttaaaaaattaactttgtattatttttgaaaatctggtttatcaaagtgaacatttgcctgtatacatttactatatttttcaatacaatatatttttttcaacacaaatattktatgtcaatacaatacatacatacaagtgaccttgtatgtcactttctacaaaataatttgcatgatttaatataataatgggatttagttctcagacagatggttagaactccatgttccttcttagagtattaacatttttaataaccatcctgaatggcattgttctcatcagactcaattttggagataatccagttatgtgaaacatgattgtcatcttctctatgacacttcaaactgcaataaaaacatggaaatgaaaaatatattttaaaccagagacacaaatcagagaagacatatcaatgtaaaggtgttacagtgtatcttagtgt

SEQ ID NO: 348998 - DNA, 551 bp, Homo sapiens
aaaggtgttacagtgtatcttagtgtcaagagtttagagaccacaaatgatgttacagattcaactctcaacacatcatacacctaaattaaatgatggttttgaacacaaagtgagaatckagggtggagaaacattacagctagataattttttaaagttgactagaaatctgcctatttattcaaagaaaacaaattctatccatattctgattaagtcaaatcaaatagagtaattttacgtggaaattttgtaaatggtaagatgatgagatgggtgatggaggtacacatacttaattttattaaatagaaaacaggcttgctttaaaacagtcacatctgcaaatataatataaaattacttttatttgaatagaagtccattccctaatcttaagcgagtaatatctccctaaatgacatggaaaagggaagggtgattgtgcctatctcattcctggtataaggtaaacatttcagatgtttatttcttttactcaatactagttatcttactttaaaattatctttaattataacgtaatt

SEQ ID NO: 348999 - DNA, 557 bp, Homo sapiens
cctcaaaacattattagtgccaatgaaatttcccaaagaaccatgtgtaacatttctcctttttataaaacctatagtcttttctttatccttcagagagcacacttcacttacactgaaggctgtgccttcccaatctgcaggtgggtttttgttgttgcttttgttattttaaaatagaaaataaacttctctttttcttccacagatcttaccatgttttgtttacaaggcctgagataatttagccagaaaaaaataagtttggtaatttaaatatctaaacaatgccatggataaaagaatacaattggtcctattaaaatttcttttttcctagccaggatgagcatttgctattgaaatctgaaatagttcagttccatayacagtagaggaagcacttggcagtaactcaactcatcctctgaggatttgtggcagcttttaccaaacattctgcattcatggtgccataagtgtttcatctttcacagcactcctagagtaaaagaattacctgagttgccgggtgtggtggctcatgcctataatcc

SEQ ID NO: 349000 - DNA, 596 bp, Homo sapiens
catgacacgtcaaaggaaccatgaatacactcccataggtagaatgtaggtagaatgcccctacctcagtgacataccaggtgatggggctgcatagacagttatcctttcattcctggggcttgagcccagttgttcatttacctcagtgtgccttatgaaaaagtttaggtaacactgatttggtacatagtagaaggacaatgggagctgagctggaaagttggactgggtacaaattgtgaagggctgtgtgggccataccaagaggagtttggattcctttgtcagctgtttagagatagccaatctctctgtgaaacactactgtgcaggtactaaatagaagatatggattcccaagttgcttaaaaacacagaagctggtgttcttttacgctatcccaacaatttygtaacatgtatttttccccctaaataaaaatgtgatgctattagctctgtatactgacctgtttcacacctctttggggaaaatattgcaatgttggaactacacagtggaaacttgcagttgtgaagtctgttttgagctggaaaaaggtgacagtctaaggaggaatgatttgaaaagt

SEQ ID NO: 349001 - DNA, 596 bp, Homo sapiens
catgacacgtcaaaggaaccatgaatacactcccataggtagaatgtaggtagaatgcccctacctcagtgacataccaggtgatggggctgcatagacagttatcctttcattcctggggcttgagcccagttgttcatttacctcagtgtgccttatgaaaaagtttaggtaacactgatttggtacatagtagaaggacaatgggagctgagctggaaagttggactgggtacaaattgtgaagggctgtgtgggccataccaagaggagtttggattcctttgtcagctgtttagagatagccaatctctctgtgaaacactactgtgcaggtactaaatagaagatatggattcccaagttgcttaaaaacacagaagctggtgttcttttacgctatcccaacaatttcgtaacatgtatttwtccccctaaataaaaatgtgatgctattagctctgtatactgacctgtttcacacctctttggggaaaatattgcaatgttggaactacacagtggaaacttgcagttgtgaagtctgttttgagctggaaaaaggtgacagtctaaggaggaatgatttgaaaagt

SEQ ID NO: 349002 - DNA, 551 bp, Homo sapiens
aataatctagatttcctgactcctcattcagtgctcttttctctaagtcacactttctgtggtggaatcagaaatcaataatacattttctgcctgagtacaaaagaatagcagaaaggaataatttcaccagggtcagggaattttatttattgagaatggcgaaactacttcatgcaagtaagcttgtgatacatgaaaccatggagctctaggccacctttggaattcatcttgtccagccctggttcaatgcctactctgcrggcaaacgactgtctgaaatcacctaggacacatggttgtcctgcacaggtaacctctctgagtaacctgtgtccatcagagcatgtctcaaggggtcagtataaacatacatgttattcagatggctctgcatgtgaggtttatagagttgtgtgtatgttttgtattatctatgtggatacatatattatgtgtagtattatggatataaaccgtatccacgtgggtgtatgaaaatgtgtgtatacatacataggctacagcaaacaatttactcattcaaa

SEQ ID NO: 349003 - DNA, 551 bp, Homo sapiens
aataatctagatttcctgactcctcattcagtgctcttttctctaagtcacactttctgtggtggaatcagaaatcaataatacattttctgcctgagtacaaaagaatagcagaaaggaataatttcaccagggtcagggaattttatttattgagaatggcgaaactacttcatgcaagtaagcttgtgatacatgaaaccatggagctctaggccacctttggaattcatcttgtccagccctggttcaatgcctactctgcaggcaaacgactgtctgaaatcacctaggacacatggttgtcctgcacaggtaacctctctgagtaacctgtgtccatcagagcatgtctcaaggggtcagtataaacatacatgttattcagatggctctgcatgtgaggtttatagagttgtgtgtatgttttgtattatctatgtggatacatatattatgtgtagtattatggatataaacygtatccacgtgggtgtatgaaaatgtgtgtatacatacataggctacagcaaacaatttactcattcaaa

SEQ ID NO: 349004 - DNA, 545 bp, Homo sapiens
ttctggacctaagcaccttggctgtccttaacttggcccacagggtaaggcattcaaggccaggagttggctgctgctgacctcatactctcagcttctgccaggactcacatacacttttgtatttgaacaaaattagatgatctacacttgtctttccccttagccctcattccctagccattcctttctccattgaaacccagatttaagaattgacctcatctgaaagccttgcatacatccctttgctacacttttcatgctcatgttttacttggtgtgtgatttcctttctgcttctttactaaaccgtggacttcttgagggcagaggctagatcttgttcatctttggagccatagtctccattagttggatgaatgagtaygtgaatgaatgcttgaatgaatggagtggaatgaaccctgtctccccagttctatgtccacctcttattcactctgtgactttgggtaggacatttaaccatagttaataagaatcatcacaactgtttgcctttctcacatactggtttcaaa

SEQ ID NO: 349005 - DNA, 580 bp, Homo sapiens
aattctcagtgattcccaatgctatgatgagaatgccattgatgtaaaatattgatatagattaagtctgcatgtgttgtgtcttagaagtaagctttgtgttccttccatgctttcctgccctactgcccccactccagaacaagccatatcacttcatgtctgagttgttctgtctgtctttcttgcctgtcaccctctgattcatttctccctcttcaatttttctggcttaggatctggaaactttttatatgtgaagtattatttattaataagcaataatgtgtgtttcttgctttgtatgaaaaamcctaaaaattgctaattaacagtatggaactgaaaacacagaaaatgctatgtaagcccccttatttctgtcttaggaagtctattaatacaacatattagtagaccaaaggacattaattatgggatcatttcaatggatgtcaaaaaggtatggggtacaacttagcagttatttttgattaaaaaacaaagcaaaaactatttttaatagactaggattaaggacattctttcttaacttgataatatgtctaaaaccaatagt

SEQ ID NO: 349006 - DNA, 580 bp, Homo sapiens
aattctcagtgattcccaatgctatgatgagaatgccattgatgtaaaatattgatatagattaagtctgcatgtgttgtgtcttagaagtaagctttgtgttccttccatgctttcctgccctactgcccccactccagaacaagccatatcacttcatgtctgagttgttctgtctgtctttcttgcctgtcaccctctgattcatttctccctcttcaatttttctggcttaggatctggaaactttttatatgtgaagtattatttattaataagcaataatgtgtgtttcttgctttgtatgaaaaaccctaaaaattgctaattaacagtatggaactgaaaacacagaaaatgctatgtaagcccccttatttctgtcttaggaagtctattaatacaacatattagtagaccaaaggacattaattatggratcatttcaatggatgtcaaaaaggtatggggtacaacttagcagttatttttgattaaaaaacaaagcaaaaactatttttaatagactaggattaaggacattctttcttaacttgataatatgtctaaaaccaatagt

SEQ ID NO: 349007 - DNA, 552 bp, Homo sapiens
aaacatgtgtatgcatatgtacacatattatagtgggttggtgagtctgyaatgcaaacatttcttttaggaatttggagccctccatgcaaatccttatgctaagtccctttccaccttgtgctctttcttgtctttttcttttctcacagatgcttcacttcaaacttctccatactttctctcctattgtgtggtttgcagctctcttaccatgctggctctctctgtggtcagacatgactctgccatcaggaacagctggcacactctctgcagagcctgccctcccctgccactcctttgaccccagcccctttcagagaccagtatttaccagtacaggcttcaccctctaacatccagagcaaaagctgcattccatatggaggtgacaactgtaattctgttttaactaggagtagtaagaactggacatctactccttggaaaccctggctttgaagcaaaaagactgttctatttttaatcctattacagatcagccttcaggagctaaaacatctatgctgcctatggtgttttgggttt

SEQ ID NO: 349008 - DNA, 524 bp, Homo sapiens
tctagttgcccttcctctttcactgcatgtattaaaactctacccatcagtattagtttcccatgaatgctgtaatgaattaccacaaactaggtggcttaaaacaacagaaatttattttatcatagctctggaggccagaattatgacatccaagttattggcagggctacaccccatctgagtggaatgaagcgatctcggctcactgcaacctccgcctcccgggttcaagaaattctcctgcctcagcctcttgagtagctggaattacaggtgcccaccaccatgtcgagmtaattttttgtatttttagtagaaatggggtttcaccaagttagccaagccagtcttgaactcctgatctcaggtgatctgcccacctcagtctcccaaagtgtcaggattacaagcgtgagcaccatgcccggccctcctccaggttctaatgactgaccacattccttggctaatgtccccacctctccaatctctgcctctgtggtcacaatgcctcttcctat

SEQ ID NO: 349009 - DNA, 576 bp, Homo sapiens
tgaactgcactttctaagatgtgagaaaaatatatttttcatattattggtatcagaaacttgtcttctgggaagcccttcacccccaaatgggccctaactcacttcaaccacttatggtttatctgaaattytaaaatgtatgttttgctgaattctgatatagcaagagctctttatttttcttaaataactactttgaaagaatgattttgcaatcctataactagtacttattacttcagatcattctaacatgactcatagattaagtccttgccactcactcaacttttggcaagcatgaacatcacctccccaaaatctacagaaatgtttatacatgctatgttaactgtgggctcttctgaggattgactggaaattcaataatatatgcgtttttttttagcttggattcctataaattaaagcaaaaatagaaattgtatttatagaataaatgagagtttactgtaagaaatatgacaacaaaaaaatatttttgtcatgtttctcagtttaacaaaatactgttaacaaatgtgccaatgtttctctgggcagcttatattt

SEQ ID NO: 349010 - DNA, 633 bp, Homo sapiens
gacattgtgtcctccatgttggccaccaagaagctgcactttccattttcccttcctctscccttagctgaggactatgtctgacacccagcaggccctcaatggacagacaatggataacacagtgagtgtagaaagtaacttcttttttatcaatggcaccttcaatagtcccagtgtaaaactggaagcatgtggcacaataaaacacatgggaacaacagaaaagatcaggaagaattctcagagccacattctgggtgataccaagctcttaactctaacacttaactgtatccctctgtttctccaactggaccacaaagcctgtaaagtgattcctgtcactaatcttggggatccaaaacttttccctttacatctaccattctcccctttcccacaacctaataagcctcatgagtgatgaccacagccttgctttcttctgttttcacctctacttaggtctccaaaatctttatagtccaggatctacttactacaatctgttggaaggaaatacattattgagttaaagcagagatctcaactagttgagtaagggtgttgagaaatgaggtggaggagaagaaaatgaaataaaattagtaacagattattgtctaagat

SEQ ID NO: 349011 - DNA, 633 bp, Homo sapiens
gacattgtgtcctccatgttggccaccaagaagctgcactttccattttcccttcctctccccttagctgaggactatgtctgacacccagcaggccctcaatggacagacaatggataacacagtgagtgtagaaagtaacttcttttttatcaatggcaccttcaatagtcccagtgtaaaactggaagcatgtggcacaataaaacacatgggaacaacagaaaagatcaggaagaattctcagagccacattctgggtgataccaagctcttaactctaacacttaactgtatccctctgtttctccaactggaccacaaagcctgtaaagtgattcctgtcactaatcttggggatccaaaacttttccctttacatctaccattctcccctttcccacaayctaataagcctcatgagtgatgaccacagccttgctttcttctgttttcacctctacttaggtctccaaaatctttatagtccaggatctacttactacaatctgttggaaggaaatacattattgagttaaagcagagatctcaactagttgagtaagggtgttgagaaatgaggtggaggagaagaaaatgaaataaaattagtaacagattattgtctaagat

SEQ ID NO: 349012 - DNA, 602 bp, Homo sapiens
ccaactaaaattatcttatgatgacctaccacatagcagaaaaaataatcttcagatacaggcttttggtattttatgaggcaagaattttgactaatgagattacccttcaaataatacatattactctaagtttctaggatataattcattctttccccttctctgttttctaattttgactcccttttgatagcattaacytaaaatggtgtcattttacaacaaagacagaaatggaagtcatgtaaaggtcaggtttctacaagggaaataagggaatagaattgcctgcttaagaacctgcatgaaatgagatgccatctcaccccagttgaaacggcttttactcaaaagacaggcaataacaaatgctggagagaatgaggagaaaagagaatcctggtacactgttggtaggaatgtaaattagtacaaccactacggagaacaggttggaggttccccaaaaaacaaaaatagaatcaccatataatccagcaaccccactgctaggtatatgacgaaaagaaagaaaataaggatattgacgagatatctgcactctcatgtttatttcagcactgttcgcaatggccaag

SEQ ID NO: 349013 - DNA, 539 bp, Homo sapiens
ttggtattttatgaggcaagaattttgactaatgagattacccttcaaataatacatattactctaagtttctaggatataattcattctttccccttctctgttttctaattttgactcccttttgatagcattaacctaaaatggtgtcattttacaacaaagacagaaatggaagtcatgtaaaggtcaggtttctacaagggaaataagggaatagaattgcctgcttaagaacctgcatgaaatgagatgccatctcaccccagttgaaacggcttttactcaaaagacaggcaataacaaatgctggagagaatgaggagaaaagagaatcctggtacactgttggtaggaatgtaaattagtacaaccactayggagaacaggttggaggttccccaaaaaacaaaaatagaatcaccatataatccagcaaccccactgctaggtatatgacgaaaagaaagaaaataaggatattgacgagatatctgcactctcatgtttatttcagcactgttcgcaatggccaagat

SEQ ID NO: 349014 - DNA, 563 bp, Homo sapiens
taaataaataaataaataataaataaacttcctgaaatgtaatgagattcggggaaaatgttagagtgtgatccacagattgactgcaattagtttttcatcagcccctaacggaaataagaaattttcaagttatagaaaaaaattaagttgtatttttcacactttctggatccagagatatatccacgatgtgatttccttccatgctgtccaatgtgtctcagctagtttgaagtatgctcccctagcaccctggccccacctgccttcctcacattgtatttaatagwtgtttgtgcctctgtctcactgaggtgaacaccttgagaaaagaaattaaatcctttacatctttagatctttcctcatgcctagcactgtgattaggacaccaaaatgccttagtaaatttggcaaatgggagaatattatcttaaaaaatgacaaatataagaaactgaggatgataaagacaaaccacaatgcttcccactatgcaaagttatcctatcaggtttctgtcaaattgccagtcagaatgttttatgcaatttgacaga

SEQ ID NO: 349015 - DNA, 521 bp, Homo sapiens
gaaataaatgacccaaacctataaaaacaaagcaatgtccaaccttcttttgaggagcaattgttttctgcaaaaggaaatgatgcagtaatcctttgccattttccagattgctaaaaggcaaatgtatccttccaaagttaaatattgcctttttttcccctttgaacctatatttaactttaatttctgatcaaactaactgcctgtggaatgacagaaattcattatcctgtaaaaagcatttmtcttggtgtcaggtacctaggggaggaaaaagaacagttgcatggaaacgagaggctcaggttcagggtgacttgtgcacgtctcacgggcttgtgacttatgaatatatgcaaaatgcctccataatttgttagatatatatgtagctggaaaaattaaatactgccacagagtgttatttaaggagtgattgaatccgttctgatagagttagaattgatatgtgcacttcgcagaattttaaacaaatcttgaatcaggcatttcaatct

SEQ ID NO: 349016 - DNA, 607 bp, Homo sapiens
ttagcacctgaattttagtttctttaaccccttaatgattttaatactcctagagaactcagaatagcatgaggtgcatacattaagtgcttgaaaagatttaactaatataatcctcttcattattattgtattaaggtctgcacatgaattccatcccatatattttggttaaccatttatagtcagatgtcatattctttttgcattcccagagcctacaataatttctggcaaataattggtatttctaaaatatttgttaactgagagttattttaaaaagcatttcagtctattaagttttgaaatgcatgctagaaagacccaaaacttttacaycttagattgattacaaatacacacacacacacacacacacacacacaaatatatacatatatgtatgtatatattcaggaattttagcagttgctcaattcatacttctccagttcctaggcttaattatattaaaataataaaaccttcctcaagaaattactcagagaaattctatacccaacctgatgaaaaatctaatttaaaaattcaataacagggttattatggttacaaagaactggtggtaagcatttaaagcaat

SEQ ID NO: 349017 - DNA, 595 bp, Homo sapiens
cacatattgaaatgtaagaatgaaggaccatgtttaaacccaaactaatagtgctcaaatgactacagtgacctcatttaaatgttagtgctgggtataaaagggcaaaatataaatgcagctttgtgatgaccctggacctaatgatgagattggtgctaaataactaaacctttcccagaaggtataatattcacatactctacagttctcaggagctacttcgacccagacatccgagaatctagaatacatakagctattattctaacaataattctcaaacacctcaatggcttataaagtgtggtaccttaaggcaacacacatctgttgctgccatattaagtggctggatgggaaacggtgaggtgaatcaaagtttacagtattcttcctgccttctcggcaaccttatttcccaggctttctcccacaccctatgcccaatctctcttttctcttgccaggggctaaggagattaaaccagtacagtctttcttgcctgatcacacctgatgcttttgacatgtggacccggcaactcacgggccaacatcagaccttgctttcagagcatgtcagcctgtcttc

SEQ ID NO: 349018 - DNA, 595 bp, Homo sapiens
cacatattgaaatgtaagaatgaaggaccatgtttaaacccaaactaatagtgctcaaatgactacagtgacctcatttaaatgttagtgctgggtataaaagggcaaaatataaatgcagctttgtgatgaccctggacctaatgatgagattggtgctaaataactaaacctttcccagaaggtataatattcacatactctacagttctcaggagctacttcgacccagacatccgagaatctagaatacatagagctattattctaacaataattctcaaacacctcaatggcttataaagtgtggtaccttaaggcaacacacatctgttgctgccatatkaagtggctggatgggaaacggtgaggtgaatcaaagtttacagtattcttcctgccttctcggcaaccttatttcccaggctttctcccacaccctatgcccaatctctcttttctcttgccaggggctaaggagattaaaccagtacagtctttcttgcctgatcacacctgatgcttttgacatgtggacccggcaactcacgggccaacatcagaccttgctttcagagcatgtcagcctgtcttc

SEQ ID NO: 349019 - DNA, 639 bp, Homo sapiens
agctacttcgacccagacatccgagaatctagaatacatagagctattattctaacaataattctcaaacacctcaatggcttataaagtgtggtaccttaaggcaacacacatctgttgctgccatattaagtggctggatgggaaacggtgaggtgaatcaaagtttacagtattcttcctgccttctcggcaaccttatttcccaggctttctcccacaccctatgcccaatctctcttttctcttgccaggggctaaggagattaaaccagtacagtctttcttgcctgatcacacctgatgcttttgacatgtggaccyggcaactcacgggccaacatcagaccttgctttcagagcatgtcagcctgtcttcctctcttgatcactgcagcccacttccaagacaggaagtacttctccttcttgggtgatgatggaccttcatgcagtgaaccttgagattcactctcctacaacgtttttactgatgtgattattgtttttgagacattattcaaaataaatcagattgtaatttaacagaggatatagataagcaagcccacaattatagtatattgtgatgattacttaatagctaacactttcagagcatacgttctggcactgttg

SEQ ID NO: 349020 - DNA, 595 bp, Homo sapiens
acaaaatctggctaatgtttagagttagctttatacrtagctcttgtacaattcaagactctctatgaatctaaaattttgctctcttaattaatatatacagatttcttgaaattcttagaaataataacaaacagtaaaatggttttcaacactgttctaagcaacttataattgttaataattcactatacagaagctctataagttaggtactcgtcttattatcccaattttacaagtcaagaaactaaggcacaaaaaggttaaataacttgctctcagcacccagctggtaaatggcagagcaaggatttgaactcaggtagtgtggctccaaagagtgtgttcttgacaagcacattgtaagtctttatagaaaataacagtaaatgatggacagaaaaaaaaaaactaacatttttgaacaccccttgttgccagacatttttgcaaaattatctcattatcttttttcttgcagggaaaatattgtcatcatcatttttacagataaggaaactggaactcagagaagattcataattcagccaaggtcacacaaatagaacattggagaaatacaaattagaat

SEQ ID NO: 349021 - DNA, 431 bp, Homo sapiens
tcagctgtttcttttctgttggtcaatttaggtgggcaatagtctaattttcgtaagattggcaatcagaattacttgattacttttatatctccaccaacagtgtacccagtatatttgacacccagagcagattaaattttaactctccccttctttatgcaacaawcttattttctgtaatgattattatttcctttaacacttgttgcaatacattatgaattccctgaagtcagagaccatgtcttacttatttttgaaactttaggggctggtatttcccttgatttttagtaggtatgaaagaaatgcccatgagttgaataaacaaagaaatgaatggattattatctctagcatggccaagattgcttccttagtgacttttaatatgttacagatcatacacaattaattaagcagaggtt

SEQ ID NO: 349022 - DNA, 386 bp, Homo sapiens
gcaccaccatttaaagaactttggtgctctgctactctggggatgrtccattttcaaataacctttctgttaggacttcgtttatttgtggctataaaggcaagcaagtaaacaagaatgcaaattatgttttaatatgttactcctttgccagttttacaatttcagcctgaaaaaataggcaattcatataaatgactaagagctcaatttgcttcccaaactatagagacttattttccagcctcaaagtgtgacaacatattcatttgtttgattcagtaatattttgaagaatatcaggccttaggaggcagatgtgtattgtcttacagcacactttggatagtctttcaagtagtctaatcttcaagatgggaccaggc

SEQ ID NO: 349023 - DNA, 529 bp, Homo sapiens
agttgcccatctatgcttgggtttatttcttggctgtctattctgttttgttggttggtgtgtatgtgtttttatgccagaaccatactattttgattaccatagctttacagtatattttgagatcaggtggtgtgaggccacaagctttgttctttttgctcaagattgctttggctattcagagtcttttgtggttccacatgaattttagaattgtttttctctctgtgaaaaatgtcattgaattgtgatagacattgcattcaaccaatagatttctttcggtagtatggacaytttgatgatattaatccttccaatccatgaccataggatatctttccatttttcagtttcttgtttaatttttcatgcatgctttatagtgttcagtgtataggtctttcacctctttggttaaatttatttctatgactttttttgatgctattgtaaatgggaatattttcttaatttcctttttggataattcattgttaatgtataaaatacgttcaaaatctcc

SEQ ID NO: 349024 - DNA, 477 bp, Homo sapiens
aatcatccataatatacctgaagataaattttattaacatttagtgtatatctttctagactttaaataaagcattttatgacaaaatgctatcataatatagaaactgttttataatatacttttccacttgatatattgagaagtcccttccaagtcaataaatatgtatttatgatatcactttatcatgtctgaatgcaactgatgtatttgaccactttgatgctctatgagttattaaggtaataaagttcccttcaacctacgtgataagaaacaaaaaaaattgatacagccctgagayaagatagcaaatatgtactgctgtccctgctaggtaaaggcaaatttttttctaatttaaaaaaatactgataggaataggggaaaagcatttgctgggttataaaagttgcatatcaaaagccaaggactgtgtggatttattcgataaaaattccacattccaaagca

SEQ ID NO: 349025 - DNA, 580 bp, Homo sapiens
cagaaggcctgaatctgaccgtagacttacatgctgagaaaaaatcttgcaaattactcggagattaattttcttgtacataacagtcctagaaaattccagcacttagagttttttgaagcaacagtgcattgtgatttagaacatggtgcttrtattagaattgcattctctgtaaattattacctgcgtaactagttacctaacctctttaaacttcattttcttctaaggtaaaatgatacttaccattaggagtttttgaattaataagtgagataatcaaataaaattttaagataatgttctacacattgccattgttgttgttgctattttcattataattattatgtgaaaattaaatgaaataatggctgaaaaaaatgtcttgtaaagggtaaagttttatctgcactaaaattattgcataacaatttaatattaataaagcaatttaatccatcgtcatttcagcctcatagcaactcactagaactgtaaaattttaatttctaatgaatgggcttccacacacattgcttgatatattttacttaccgtctctgcggagcttatt

SEQ ID NO: 349026 - DNA, 543 bp, Homo sapiens
tgcctggcctttaaaaaaacatttgctgatccctgattcagtatattaatttcatggactgtccaatgttcacagctcaaatmaacaaacaaaaaatcaaaataaagatcaagcaccaacttagcttaaccattaccattaagggagaggttaacattttctgcagaaaatattacccatagacggaatcccagagaatggtcaattagttttttattgcagatttaatttgtattttaataaatgcagtatgtaatgtaaatatttcgaaacctggtagccatgatggttacacctcttctggcccttccttccccatagttgatagaagctggggcgaacacttgacaagttatgtcaatcagactctttttcctgatggatcagggaataggattacagttagcatctgaatgtgggttgattttaggcacagttaaatagtcttgctgtgtgagtcagccattttaagcatgtccacagagatcagagaaagttgttctgcaaaggaataagaatatgagtagagaacagaagagaatc

SEQ ID NO: 349027 - DNA, 431 bp, Homo sapiens
ttgttttttaaattattttcaagttgattttcacctttcccttctgccttcwtagtagcttctgaattcttaatctggcaattcagtttttttggggggtggtgggggtgcggtttggatccattgctggagagctgatttgatctttcggggcggttatacaaccttgttttgtcatcctaccagaattattttgctggttctttcccatttgagtagattgtttcagtggaaagatctggaacttgagggctgctgttcagattcttttgtcccatgaggtgctcccttgatgtggtgctttctccattcctttatggatagggcttcctgagagtcaaacttcagtgactgttattgcccctttgggtctagccacccagtggggctaccaggctacaggctggtgctgtggaatgtctgcaaagagt

SEQ ID NO: 349028 - DNA, 602 bp, Homo sapiens
gaatttagttgatgattgcagccaaatctagcctgccagcagaaagctgggaaagttatttgtttggagaagggtctggatgactcttggtctctcactgcaaaccacaattggatttcccacgtgtatggcagggtgggaacaggatggggtggggtggagtggtgaggttttcagatgcaatttaactgtgctgtaattaggagtattatgctccaggggtggcccctcctgactcttctggatcctttgccattacattaaaactggcctgctacaggcacaagctcacatgactcattggcatgaatgaaacttcccgattaggggttgcactggttgtaatttattagtgtagagctgtcataacaaagtcattgtaaagacattcagcacttaccaccaacacaaacactgccttctgcaaaaggctttgacttttcatagccacctgcaccacctgcccctcccgcccctagaaatgagacctcagtctggtgatttttcaacctattacagctctttgaagatgaaaatctcrcacatctttctgaccaaaactccttttggtattttaggatctataatcgttctgcacccct

SEQ ID NO: 349029 - DNA, 595 bp, Homo sapiens
tagtttcctcacttagaaaatgcagatagcaacacttaacttggttatgaaggttggttgtaagaccagaatgcaatgataattatgtaataattgtagtacatgaaagaccttaataacaaaagttattaataagtgaacactgaggatatgctaattccctctcttggtctttttgattggtgagagaagcaaatcgaaccccatctgtctcttcctcattcttggtaaaaagaacaaaagtctgatgttgaccttcaccatggggtaattcaaaaagtctgaatgggactgtgaacatgccagatcttccaggggtaaactgtcttttgcctggacagcacacacactttaaaataatatattgttctaaaatgccacttttcacctccattgtcaattctgaatatttgttkccctcagaaattgaaacacaccagtggagtcattcccatctatccattcatcttaatagtaatggatttgtgagaggaaactggctggagtttagcaaagacaaagctccattcagcttccaaaggccagggagaaagtccaggagaacagtgggttctcaggtcctcttatccattct

SEQ ID NO: 349030 - DNA, 380 bp, Homo sapiens
acccttgcattaatggtgaaaaagacagacataattattgtccttgtgaatyctaaaatttaatgagttttaggtaaaaaataagcaggcaattaaaaatggtgtgatacatgctacaatagagaatctacagaatgctgtatcaacaaaaacgtagagcttggcagagcataggggaacagtcagataaggctagcttcagagacctaatgggtaaataagagttacccagaggaatgtggtgcatggtgctcgggtggggaacagacagaaggaacagaagtaggtgaagactagtgaaaaaatgaaggggctaaagagttgagcagtgagcatacccggcagggtcatctgagtgaaggttttgtacactatccaaa

SEQ ID NO: 349031 - DNA, 460 bp, Homo sapiens
aaggaaacgcccacacactgttggcgtaaatgtaaattggcacaacgactatggagaacagtttgaaggttgctcaaaaaaactaaaactagagctaccatatgatacagcatttccactgctcggtwtataaccaaaagaaaggcaatcaatataccaaaggcactcccatgtttgttgctgcagtgctcacaatagctaagatttggaagccacctaagtgcgttgattcatccatcaagagatgaatgaataaataatatatggtatttatacacaataaagtaccattcagccacaaaaatgaatgagatcctgtcatttgcaacaacatggatgaaactggagatcattgtgttaagtgaagttagccagatactgggagacaaatattgtatgttctcacttattttgggaatctaaaaataaaaaaaaaaatacccatagacatagagagtag

SEQ ID NO: 349032 - DNA, 607 bp, Homo sapiens
gtgattttgtttttctatcttcctcagtgaagggttaggttatttatctttattcttttttgtgtaatatktaatgcagggaaatatatgaatatactactgaataacactttggatctatcatatacattttgcttcatagtattctgattttctagattagttgtagttgcatttttaaatttttttcttttattcattagttatttttggagagagatacttaatctgttagtgttagttttctgtttctttgagtgttttttgttactttataattttgttgcaacatgaccagaaaatatggcttgaccattttgtactttcttgagctcaatgaaattttcttattgactttgtatagtttcagtttcaaaacttactgcatgaatctgtgaaaggaagtttaattagctgtagtctatagaattcaatcctttaaattgtatttattgcctctgtgtctttatttgtagacatttttgttgtgataaaagtaatatataccttcttcataaatttttcagtgtaaagtattgataactattcacacagtgtttcacagaagctccctagaactcttttaacttgcatgattgaaacttga

SEQ ID NO: 349033 - DNA, 505 bp, Homo sapiens
gccagtgaatataaactgtactcaatagaatagcatttaggagtaacaagagtgtatgtccacacacaataaaatattctaatggtgttttaaagagaagttgtcctttttcatgtatatcatgcaccccaaggaagaatttctattgtatttaggtcaagaacaaggcatatcaaaagtaatgagttttgatcatatatgtrttacaaggggctgtttgagattcccatttcagagccagggctggtcctgccactgattagttatgcaagcctggcttttgataaaaccgaaagcatccttgagaaggaaccaccccaaattgttttatcactgcatctcacgcatccgtctttaatttaatcttcagtaaatttatggagttcttcaacctgtttcacttaaatgtcctttttacacacatccttatatcatttttacgttagttcattatttccagcagaaaaaaaatgtagttggccagaaagctaaattttacttaaaa

SEQ ID NO: 349034 - DNA, 603 bp, Homo sapiens
ataatcgacttgttcttgatagcctcattaaagcatttggtttttcacatagtggtggcctattgtgttaatgccaattttgaatgctatctgccatatcaaaaaatggtagtgcacattttcttctgatttaatgaataacaaattgcatgaaaatttagaaaatgccagtaagtactttttttgtttaaaatgccactctaagatgttactttttggttttaaacatttttgattactttttgacttacactcagatgaggtrtaattatgcaccttttttatccccctctgaatttggggagattttaaactcccaaatgccaagacttcattttagatataggagttttatttaaaatgtttcattgagaggtggctttaaaaaagagaaattgtcagagaaacccttgcatatttacagaaaagatattgggtttttaaaatacaaatttacaataatgaaagcttaatatacccaggctgccagctcctggttgccttttttttttaatacactacttaagaatcatttgataaatgttggatttgaattgggaagtgtcagacaaaacatgtctttattccctagctagaccttaa

SEQ ID NO: 349035 - DNA, 581 bp, Homo sapiens
ctgcccttttaaaaaatatattctggcttaacctctggagaaaatgagcaagaaacttcctgtaatgcttctgatctgactgtcagctttttcctacttttaattttcttcttaaattgtaatatacaataatcaaggcctttcttttttagacctatttgaattatttatattttccctagaagtataactgtaggatcccttaaaaacatgtaaaagtagaaagatttccttttggaacaagagagaatattctgggcaaaatcaaaagcaagtaagttgaaaattggggcttttcatctccgggggatctgcagcaataccttcacccacatttctgtcctgatatttaccagtaaatagtcatttcacagcccataagaatccttcatctttagcttcccccacttacacacasacacacacacacacacacacacacacacacacacaattaacgtgttatagtggtgttacctgaagattagacatttgcctacagtgtgtatgacttcatttgatatccacagagttacatttcttaaaattttattaagccaattcactttcaaataaattat

SEQ ID NO: 349036 - DNA, 568 bp, Homo sapiens
ccagccaacataaatgaactcttagaattactctgtttttatttttttgtgtatgccaagacttaatgcatagccaagtagcatgaggaaagctcctttaagaggagcgttgtaaagttagattttcattatatttagagagaggttgtgatgatctcttaattctttgctgccacatctgaggctcaatagcagtggctttatgwctgtacccataataacatgaatccataatacacgtctgaacagagtgtaagtgaagaagcttttattatcccagttttcccaagaggcatatatcctcctcccctcaaaaaagtgtagagtaaatctgccatattaaaattgtcaaggtcctgtatatacataaaatgtagacatggttaattgtatttgtgttcagtatatgtaggtcttttgagcctattacctataccagatacactggaaagtaatatgagtatacacaaaaccaaataaatttcagcaacgcatgtaaatggtaaagacagtttgcttttgaaaaatttgcattttaaatttctaattatggagtcagttgaagata

SEQ ID NO: 349037 - DNA, 568 bp, Homo sapiens
ccagccaacataaatgaactcttagaattactctgtttttatttttttgtgtatgccaagacttaatgcatagccaagtagcatgaggaaagctcctttaagaggagcgttgtaaagttagattttcattatatttagagagaggttgtgatgatctcttaattctttgctgccacatctgaggctcaatagcagtggctttatgactgtacccataataacatgaatccataatacacgtctgaacagagtgtaagtgaagaagcttttattatcccagttttcccaagaggcatatatcctcctcccctcaaaaaagtgtagagtaaatctgccatattaaaattgtcaaggtcctgtatatacataaaatgtagacatggttaattgtatttgtgttcagtatwtgtaggtcttttgagcctattacctataccagatacactggaaagtaatatgagtatacacaaaaccaaataaatttcagcaacgcatgtaaatggtaaagacagtttgcttttgaaaaatttgcattttaaatttctaattatggagtcagttgaagata

SEQ ID NO: 349038 - DNA, 574 bp, Homo sapiens
ctaatgtctctgtttttgtccttgtttttaacaaaaaagttaaaaattgttttaaaatgaaaaatagtaaaaagcttatagaataaggatataaaaaagaaaaattattttatttacttttatttttattctctttgagacagagtcycactctatcccccaggctggagtacagtggtgcgatcttggctcactgcaacctccgcctcccgggttcaagcgattctcctgcctcagcctcctgagtagctgggactacaggtgtgtgccaccaagcctggcgaatttttgtattttttggtagagacggggttgcgccttgctggcccagctggtctcatacttctgacctcaagtaatccacccacctcggcctcccaaagtgcagggaattcaggtgtgagcctctgcgctcagccaagaaaatatttgtgcacagctgtacaatgtgtgtttcacactgtgttattacaaaacagtcaaaaagttaaaagcatcaaaaagtttataaagtaaaaaattatagtaagccaaggttaatttattactgaaaaaagaaattttgagtaaatgt

SEQ ID NO: 349039 - DNA, 574 bp, Homo sapiens
ctaatgtctctgtttttgtccttgtttttaacaaaaaagttaaaaattgttttaaaatgaaaaatagtaaaaagcttatagaataaggatataaaaaagaaaaattattttatttacttttatttttattctctttgagacagagtcccactctatcccccaggctggagtacagtggtgcgatcttggctcactgcaacctccgcctcccgggttcaagcgattctcctgcctcagcctcctgagtagctgggactacaggtgtgtgccaccaagcctggcgaatttttgtattttttggtagagacggggttgcgccttgctggcccagctggtctcatacttctgacctcaagtaatccacccacctcggcctcccaaagtgcagggaattcaggtgtgagcctctgcgcycagccaagaaaatatttgtgcacagctgtacaatgtgtgtttcacactgtgttattacaaaacagtcaaaaagttaaaagcatcaaaaagtttataaagtaaaaaattatagtaagccaaggttaatttattactgaaaaaagaaattttgagtaaatgt

SEQ ID NO: 349040 - DNA, 586 bp, Homo sapiens
gtcaactctgtcctgatgttggcctaagagcctcccttagaacttatgtagtgggcttgtttggagatcatggagtgaacaagggyggtgggtattaggagacccactctggctcaaataagaacagtgctgcttctgtctggtaacacaatgggagagagagtctaaacaaataatccatataacaaataatgtcgatataattgtgattaatattagttaataaaagtccaatgtctttaaaagcatttcccagaaggagctaacctaggccaggggttcggggcagtgtgtgtgagtgtctctgcagaaatgacatttaatctgagaatggaaggttaaacaggagttaggctacatgttggtggggaaggtggtttggagagaaattattgccggtaaattctcagccttttttccttaggaaaatgaaccctcaaaccaccttggtttctgctccttttcttgctttcacatgcacttacttgccaatacttagagggaacacaatgtagtcagtggaaaaaatgtggagtggtatgaacagatgtttgaaccccagcgctgctcttcactgagctgtgca

SEQ ID NO: 349041 - DNA, 509 bp, Homo sapiens
accatttccttttgattatggctttacccaattctatctggactgccattcacactgtccttcccctctggcttcaacaattagcytgagtggtagtcatatgatcgaagaagggtcaagcagggtccttctctagaatgaaatatacagaaagatgttaagaaatccctctcagggccctaaactgggatggtataagttgaggatgattggttcataactcaatctcctcctccgccccgactacttttatctccagtgcttatctacagtagaagaggatgagcccaacagtctgagggctgggccaagagatggagagagaaaaaggaggagaaatacacacagacaaatctggtgatattatctctgttggcttcaccttgggcttcccagttatgtgagccattatcccttagcctttcttttccatctcttaagctaacttgagttctgtttctgtcacttgggaagaagactccaatgctatttcactcatcattcttgca

SEQ ID NO: 349042 - DNA, 622 bp, Homo sapiens
gcttgatgggagagggaggtgcctgacaggctcctaagagaggtccctgctccatctcaaatcctttatgagagactgttgtgcaatcacatacttttctttgtaggactcgtcgtgttatatatttcacatttgttagcatgattttagcattatgtttaaaaagtaggctcaacacccagctctgccaattgccaggaaggggaacctgagcactcaatttctgttggcctcagtttcctcacctataaaatatagacagtaatggttcttaggagttgttttgagggttaaataagaaaatatatagaaagaacttaggctatttatgtgccacaaataagtgctatmtaagtgttaactataatattcttgttaactataatatgtcagtgcttatctaccccacttcactagaagttctgtggggtccaagaaaataactaatttgacgtatggttgcatctcaatgcatatcactgacacatataagattattgccacattaccacaaacttagagtctgaatctaacacatgtttatttttccacagtttctgtggtcatgagtccagcatgactgagctgagctttctgcctcagggtctctcacaagtcaacg

SEQ ID NO: 349043 - DNA, 603 bp, Homo sapiens
ttgttgttcaaacagagaaaaaacaaagccaaggtcaggagagatgtgggccctagatggcactcatgattctgtttcttcrccatgaggcctactgttctttgaaagcaggacagtcttattccaagtattggttctttctccaaaggaggctaggcacaaaattgtggatgaaccggtataaaccattacctgctattaggaaaactacttgaataaacttcttttgctatttttataaagcatctagtctatatatttccattaaattttataacttgatttgttgccttcagcccaaaccctagtttattcctaacaggccccaaatcaggatgaatcgtattggcagatgttgggtgccaagactgaagtcacttattcgaaagggctcagaattattacggcaaattgaaactccaaatacaatttgtatcattaacctcttagggattatatttttgactttctcctatgtgacatatatctggtcacatattcattgtgaaccagtgcttaaaatgcataatcctcaaaggttactcgcaatcatttaaaagaccctatattcatctcaaaacccagaaccgggagataaggttt

SEQ ID NO: 349044 - DNA, 578 bp, Homo sapiens
tgtttttgggtgaagctgaaatttaaattggtagactttaagtaagcgaactgccctccatgttgggagtgagcctcacccagtcagttgaagacttgactagaacaaaaatactggtctctccaagcaagagggaattctcctacagactgcctttgaactttatctgcaccatgagctctcctgggtctccagccagatggccacactgaagatttagtcttgccagtctccataattgcaatcgtgtgatccaattccttaaawcacatctcttcacacacacacacacacacacacacacacacacacacacacacacacacactttctattggtttttgtttatctagtgaaccctaatatgcctattggaagtctctgtctcaggggaggtggttcccatcagccaaggacaagtcttctgcaaagctcacaggtacaagctcttagaagtggtccctgcagcaactgggtgcaccagcaaggaacaggaatcttggtggagtgccattctacttcagggaggatacatttggacaatgcttttatggagtgcttgaagaatgctagaggaa

SEQ ID NO: 349045 - DNA, 610 bp, Homo sapiens
gtaaattttatgttatgtataacacacaggagagggtgaaatatttctgggcaaagaaaagactaggtaagaactgaaatgtaaagctaagtataggcattgcttaaaattgtagtgactatcagttttaacagatggcaaacatttttgcaggaaaaaaaaatccttattttaggtgtatgcctrattagtgggatttggttagcttttctaaatgaaaccaacttggtcttccaagagaattcgatgatgagacattaaaacactgtagaccgacagagtttgtaatggcagagtggttcttcatgcttaagaataaatacagccatcagcacagtaccaggctcacagtaagcatgcaacaaagagttgttgaatggaacacctaaaattatcaaaaagcaacagctatgtaataatttcaagttaatggtaaagattacttatgagttgtgttttacacatttttgtgtgcaatgcacatttttccctaaccataagttttataaaatggaaaaataatgcaaactggcacactcaatcaaaggcactggaattctatttttaaatttataggaatttgggaacatgattcttttagggatgagag

SEQ ID NO: 349046 - DNA, 573 bp, Homo sapiens
attgtacacttacaattgttaaaacagtaaattttatgttatgtataacacacaggagagggtgaaatatttctgggcaaagaaaagactaggtaagaactgaaatgtaaagctaagtataggcattgcttaaaattgtagtgactatcagttttaacagatggcaaacatttttgcaggaaaaaaaaatccttattttaggtgtatgcctgattagtgggatttggttagcttttstaaatgaaaccaacttggtcttccaagagaattcgatgatgagacattaaaacactgtagaccgacagagtttgtaatggcagagtggttcttcatgcttaagaataaatacagccatcagcacagtaccaggctcacagtaagcatgcaacaaagagttgttgaatggaacacctaaaattatcaaaaagcaacagctatgtaataatttcaagttaatggtaaagattacttatgagttgtgttttacacatttttgtgtgcaatgcacatttttccctaaccataagttttataaaatggaaaaataatgcaaactggcacactcaatcaaag

SEQ ID NO: 349047 - DNA, 586 bp, Homo sapiens
ttgggagattggatgaatgacgatgtctttagctagaaaatatggaaaaaggaggatgtcagaggatggggaaggacaggagagaattgggcacgcaaaatctgaacagtgtcagtttgggatatgtcctctggaagactcctatgagctatcccagtaagattaaatggacaggtgacaagatggatctatatttagggagaaaaaatggagctagagatagaaatttgaaagttattaacttttgtactggataccatggaattagatgaaattgcctgagaataaatggtgaaggggaaggagagatggaaccaaagctgggccgtctgtttgagcatcacataagacatcaaataaaagtttatattaacaaaataaaataatcacctatatttccaacacatttcctggaatatacattacaaagttgcacgatattgctattctctatgtatgtgtatgaagtttgactgtctatagatttttaaaaggctatatttagtaaaataatttgatgaatatattcaycgaagaatgggtttggctgaattgatttctttgtgatttttgaacttgtatgtag

SEQ ID NO: 349048 - DNA, 593 bp, Homo sapiens
agttttgtctgaacctaacatgttgtttacaccactcatggtggtttcaaagacatagtacacgcacactttatttggcttggctacctctgtccaatgcccccacatagacacaaccctaagtaatatatcaaataatattaatattttactactaaatatgttctcaaccatcttcctaccagctgccaaattacagacaggcatcagttgatttttttcaataactcaaaaatccgtataatgtaacatgcctcagagtttggagaactaaaaattaggaggaaaacaggttataatcccagcccagggaaatttaacagctgcatagtattattatgaagtgaggttaaaatcattccatgagcaaaagtccagtctattttgaaatgagacattctttctgcctgaagtcttttcctcccactttatatggytggctcagtggcatcctgtaggtctcagctcagttgttagctcctaagaaggcctctgactcccctatttagagcaggcccctctgtatcagttactccctatcacgtcactctgtttggtgatctcaactacctgcctgctctccctttttcctt

SEQ ID NO: 349049 - DNA, 578 bp, Homo sapiens
ttcaattttccagataaataaatcaaggcatagacagattaaataatttgtcccaatccattcagctaataaaaagtgggaaccaaaattccaaccccagtctctgactgtaccacgtgtgcccttacccacgattcagctttgttcttccagcaaggtctcttcgcctcttggaagatcagtttctccacctgcaatctgggcataaattgcctccctcccacctagtctgttgtgagaatgaaccatgataaggtattttaaagtgctttgaaaactgtaaagcaccacagaaaatgtgtctattattgttatatttatatttttatatttaccactttaatttgagtgtgataagttgtgtttgcatatttgtcatataaggctttctgtttaatccatcatggttcacatagaacctgttagccagcctgggagcctctgtagtgcttycttaaactttcattagtcaaccccactttttgaagatgatccctgtcagttctcctccaagtggaagaggaaatacagaagataggaactgaaaccatctactgtttcggatacttgttaaacgt

SEQ ID NO: 349050 - DNA, 580 bp, Homo sapiens
tttaaaaacaaatactaacaccacattacacaggcagtgagttcagataatgagacataaagttttgtggagaacgttatctattatccatccttgagtatctttctctgatcacgtgtaaaacaatacatagagttcatgtttaagcatctacacctaaggctttaaatcctaggccaaatgacccacttagccactttttttcattttactgatgacaaaatggaagcccaaagggggaactgctttatccagcattgtttcactgagtggcagagcccgggctggagccagaactctgaatgctagaccaatgttttctcatctgagtgcgttctctctctttgctacaatgtttcagtaagaggagatttttctgttgaaatttcattgaagggaagagataatcctgggccaatagaaattyactccttcaatgaaatattttattttaaaagttacctgaaagtctgtggttattctcttatccctcctgcccttgtttaagttatatattgatgaataacagagcaccccaaaacttagtggcttaaaaagataataatttattattattcac

SEQ ID NO: 349051 - DNA, 585 bp, Homo sapiens
gatagttagccaaagagactgtgcaaagagaaaaagaaatagtttcttaatactcctactaaattacattcagagcacttcctttctattactttgtcaccacatgaccttgcccaattttagtcaagtcagaatgcaaaataagtttcgtggataattttgttattggggaaagggggttaaaaatgatattctttaaatatgcccttcttttctatcttacccccttccctctctacttttgaatgcgtatcttcttttgagagttaccagatcttcaaagggtacagtatttttaattcattttwaaagaatgtttctatatacattttttaaattttggattattctcgtgggactaacacaacactgaaaatttggcatctgcaagcataattcaatgaagaattgtctttgccttgtttgaggacatttagttttgaaataacagcattagaatcttttgaaaataacagaacatgaacagaaaattatttcccttggaaaaaactgtagctaatttttcctttggctgatttgctgctgaaatcacacattcgtataaatgccaagctatacatatgc

SEQ ID NO: 349052 - DNA, 554 bp, Homo sapiens
aaagacttgctacagcctgagtgtggactactgtgagagtgagaaaattctaggggctgcagtcttagrggaaagccccacactctcatgggctttacctccagtacctccactaaaatcttatggtgaagaaccaagaaagttgatgtccttgtgcccccagcagaggaaagggaagaataatcattgtaaaaacaccagtgccttctccacaaggagggccagctctccaggggaagactgtcagaggcttatcccagtggaggaagggtattatttctactctgagccaggctagctttccctagccttcccgttttctaaccccaacaggggtcagagattcaaggaaatagatttggaatgctgcagccagagaagacagtgggggacagaagcaaatatatgtatatatatttaggtcatatatatagatatagatctatctatatatatagatctatatctatgtctatatatatctagagaatcactagtgaaggtcacaacctcgagacagcccaccaaagaactgagattaaatcataagatta

SEQ ID NO: 349053 - DNA, 554 bp, Homo sapiens
aaagacttgctacagcctgagtgtggactactgtgagagtgagaaaattctaggggctgcagtcttagaggaaagccccacactctcatgggctttacctccagtacctccactaaaatcttatggtgaagaaccaagaaagttgatgtccttgtgcccccagcagaggaaagggaagaataatcattgtaaaaacaccagtgccttctccacaaggagggccagctctccaggggaagactgtcagaggcttatcccagtggaggaagggtattatttctactctgagccaggctagctttccctagccttcccgttttctaaccccaacaggggtcagagattcaaggaaatagatttggaatgctgcagccagagaagacagtgggggacagaagcaaatatatgtatatatatttaggtcatatatatagatatagatctatctatatatatagatctatatctatrtctatatatatctagagaatcactagtgaaggtcacaacctcgagacagcccaccaaagaactgagattaaatcataagatta

SEQ ID NO: 349054 - DNA, 609 bp, Homo sapiens
ggcgcaatctcagctcactgcaacctctgcctcccaggttcatgtaattcttctgcctcagcttcctgagcagctgagattacagatgcatgtgccaccatgcctagctaatttttgtatttttagtagagacggggttttaccaygttggccaggctggtctcaaactcctgacctcaaatgatccgcccacctcaacctcccaaagtgctgagattacagagatgagccactgcgcccagcctaaaaaccatctttaacattaccagattgttacttggatgagaaaagaatatgcaagaagatttaaaaaaaaaaatttgttactgttaacttgttgattattttattttgtttatttttatattttacttattgtctaaaaaaagacttaaggatgagttcaacatcaaaatgtgacccaaacaaagggaaccagaaataaattataaggtgttttgattttccttcagttaaggccataaggacaatatgccacatgatatgattttacttatttgataaaggagtgaatgccagttcatttggagaaacagattatttcctagtactaaattctaaataaaatctatcatataaatttctaca

SEQ ID NO: 349055 - DNA, 590 bp, Homo sapiens
tttggtcacatttctaaacatctttttggtctggttgctcactgaatgctctgggacctatagtgtgggatcagaggaagctgagggggatggaagaaggaaagttattagttccataatttgacattttagttaatttagaaaactttcattgtgtttctgtgtatacatatatccctgtgttcaaatgagttttatatgctttttacatgctactttagttaaggaagaagcctgttttattttcttgtatttctaaatagtgaaaataaaaatgttaacccaatacagatacaataaaaccaytgtcaattcaaaattctctaatttttaaatatacttactgcctaacacataatgatgaatgctgaagcaaaagcaccaattttcaggtgaaaaactgatgcaaggaagtctgccgtttccggctataatgttgtaacagtgtgttacaactaaataagacatataccttgaggacctaaaaaatgatagaatcaatacagtaattaatgaatgcttatgcaagttagttcattctaaaggtcctatcttcaatcttgtggcaccctttcagttgagaattttaa

SEQ ID NO: 349056 - DNA, 550 bp, Homo sapiens
aggcctctctttccggcttacagatggctgccttctagctatgtccccctcatgacagagagttagatagagaaatcaagctctctggtgtctcttctatatggacactaatcctctcatgagggccccatttttaggagcttatctaaacctaattaactcccaaaggycccatctccaaatacaatgacttcaacatatgaatgttgggggaacacaattcagttcattgcactgtgtataaaaatatttgaatatttaatcatagactcagcatactatagattttaaagagacttagttacacttagccaaattcccccattttttacaatggagaaaacagaaaacaggagtggttagatggcctgcccaaggttattacaccaattaacaaataaaatgaaagtagaattagattctctgattttttaactagtattttcagcaaataaatggcaaataaagtgacacatgggcacaaaccacgaaaaatgctcatgcagaatgagagtaaaggaaatagaacagaaagttttagaaaagagta

SEQ ID NO: 349057 - DNA, 622 bp, Homo sapiens
tgacctggctcactcttgccctcttgccatttgatacctcccaccatgttataacagtaagaaggccctcaccagatgtggcccctcaagcttggccagcctccagaactgtaagaaatcaatttcttttcttgacaaattacccagtgctgttctgttatagcaacagaaaacagactaagacaaacatgatatcatattttgttgcaagtaaatactgttaaatatgaaaatatagttagagacaggtagagagaaagacaccaacatcttaacagtatctctgcatggtatattgtcagtaattgttttttcttctcattcatttgggttttctgcaaataatatgcattattttgctattaagaagaatggraatggttactttttataaagggctttattttctcttagcatttggtttgcatagttacgcactagaacaaatgattgactgtaactgaaatagtaatatataaatagcaagcatgacagaaaccatttaaacaatataccttgactctcactaaaatctggccctcaggtctatgtcacaagattgtatgattaatttaacagtattcaatgacttgctcctaaaaaagtaaaaaagcctgtaggt

SEQ ID NO: 349058 - DNA, 562 bp, Homo sapiens
cttgtgctcaccttgtaaaacatgtactctaaatttcattctttcccacttattaatacttcattttatgtatctttaatatttccctattccttggattattcctatcatcctttaacatgcccaggtgtttctcatcaaacaaagtcacctcttggtatcccactttttcctttagctattgctctatctatttctctttacaatctgttcttgtgggagagttatctactttgctaaccaagccctccacaggtctggcttccccattcacccctcaatttaccctaatctgacttaatcccccttcccacaacttacctcctttgtccttagggtatcagtgaaacagccccagacaagatcaccaatgtacycagttgctcattaaaatagatattttactcattcttgattcaattttttttttttgagacagaatcttactctgtcatccaggctggagtgtggtagcatgatcttggctcgctgcaatctctgcctccagggttcaagtgattcttgtgcctcagcctcctgattaggtgggattacagatgtc

SEQ ID NO: 349059 - DNA, 604 bp, Homo sapiens
gtgagtactgatttggataatcaaataacattccgtcaagggctatctgtgtagggaaccaaattttggatgccaagcaaagtactaataataaaatccacatcagaagatccaatagtcagttttaatactaacttgccattaaaatggcttaaatataaaagctgtattttagacaagcaaaatgtgtctgaagtctcaatatatacagtgtaatgttgtgagacaaatggctctgactctgacacagcaactgcagtacgtcytttcaattcagctcagatttcttgaagggcagtgcagtgattctcagagcaaatcaataaaattcaacagcattttaaggcctgttctcgaaaaagaaattaagtgttctgtgtaaattcagatcatttcccaataaagtttccaaaatgaaattatcaaatcaggatgtcttgagtaccacaaagagagatattactattttatacttcagttttgcaaaatataatcctttatcattttgtatgcaatcttagaaataaggatcatacataccgaagtcttacatacagaatatgcataccctgaataagcaaaataagaaatactctttagtggc

SEQ ID NO: 349060 - DNA, 604 bp, Homo sapiens
gtgagtactgatttggataatcaaataacattccgtcaagggctatctgtgtagggaaccaaattttggatgccaagcaaagtactaataataaaatccacatcagaagatccaatagtcagttttaatactaacttgccattaaaatggcttaaatataaaagctgtattttagacaagcaaaatgtgtctgaagtctcaatatatacagtgtaatgttgtgagacaaatggctctgactctgacacagcaactgcagtacgtcttttcaattcagctcagatttcttgaagggcagtgcagtgrttctcagagcaaatcaataaaattcaacagcattttaaggcctgttctcgaaaaagaaattaagtgttctgtgtaaattcagatcatttcccaataaagtttccaaaatgaaattatcaaatcaggatgtcttgagtaccacaaagagagatattactattttatacttcagttttgcaaaatataatcctttatcattttgtatgcaatcttagaaataaggatcatacataccgaagtcttacatacagaatatgcataccctgaataagcaaaataagaaatactctttagtggc

SEQ ID NO: 349061 - DNA, 546 bp, Homo sapiens
tatccaaagagaatttattaagaaagcaatcccccaaacaataaaaatktactaatttttgaaaaataattgtttaagctgttacaagcgccagtgctttttatagctaatattcttttctctagctttgctaaatttagtagtttatctcaattattaagtgacagtaatatgtaagtatctaagaggtggaataatctacgttaaccttgtatagaacggtttctataacaatgttcaaactttatgagaatgcaaaaatactccttaaatattgtaatcatccagaaacactgacacacatgtctaatgagtcaaaaatattaatttcctttttctctccttcaatatatgtaaatgttagcaagcctgatgaaaggttgaatcagagattagctcaaaactgtcaaggagaatatcaaaacgacaccttctggggcatgtaggcaaaccaaatgcttagtggagacaggctaatttatcatagtgcagttgcgatggcaacaatagttcttggtgccatgtgacccaaagcagtttctgttg

SEQ ID NO: 349062 - DNA, 610 bp, Homo sapiens
aaattcgtgctgtgctttcaagagcctgattcaccatccctgcaggtgcttctggcagtccctggaaggcgtctcagttgtggctcacacacagcccagctggccatcgaaacccgtaggtctacagtacggtcctcttctcgcactcagtcctgcatcctctgtgcccccaggttctgccagccgccatcacttcctgctgtcttccatccctgcctctgctccaagctcttatttctcaatcagttaggaacctggcaggagtcagaaacttctagttatttgaggagagacaatttaatgcaaagaattgttagctgtggaattgaaaagatttaaaagagtacttgaagttagaacaaaggcagcagctgtaggcagcagccaccatctctggggctggagacaacaaaggaagaggttaggattgttaaaagatttggaagttttgaggagggacctggaagataactgggggtgmggctgcagaggcagtcagctggtgttcacatttcccagctcatgagacccagagctctgaggaggggatgctgggcagcttgtacgatgtctctggccagggagtggttgatacatctcattctgcaaa

SEQ ID NO: 349063 - DNA, 610 bp, Homo sapiens
aaattcgtgctgtgctttcaagagcctgattcaccatccctgcaggtgcttctggcagtccctggaaggcgtctcagttgtggctcacacacagcccagctggccatcgaaacccgtaggtctacagtacggtcctcttctcgcactcagtcctgcatcctctgtgcccccaggttctgccagccgccatcacttcctgctgtcttccatccctgcctctgctccaagctcttatttctcaatcagttaggaacctggcaggagtcagaaacttctagttatttgaggagagacaatttaatgcaaagaattgttagctgtggaattgaaaagatttaaaagagtacttgaagttagaacaaaggcagcagctgtaggcagcagccaccatctctggggctggagacaacaaaggaagaggttaggattgttaaaagatttggaagttttgaggagggacctggaagataactgggggtgcggctgsagaggcagtcagctggtgttcacatttcccagctcatgagacccagagctctgaggaggggatgctgggcagcttgtacgatgtctctggccagggagtggttgatacatctcattctgcaaa

SEQ ID NO: 349064 - DNA, 533 bp, Homo sapiens
aaactggacctttatgtgcatggggctgtgggtgaaccagagcaagtcgtcaggagaggaaatctgcccccctccccaccttgtgccactcctcctccaacaagctgtcaactctgcagtggagaacagtgccagcctgcaggctttctgttcccagagctcaggggatgactcagttactgaggtatttccttttttcataagcctaccatgcagagattttcaaattatttccctgaaatgtttctcccctcacctttgctgcatgccttgtctccagaaggcacaattttcaatagattcttcctaacaacgtaccagccagcatctattaggctcttcttagatgccagacacccagctcarcatttcatatctgtcagcccagcgctccctcacagccacactggaaggtctgcatactaggcttcccattttctggatgaggaaaaggaggcccagagagtttgcccaaggccattttgtccagaagtagcagaggtggagctcaaacccttgccagtttgctcaaa

SEQ ID NO: 349065 - DNA, 577 bp, Homo sapiens
gaggcacttgtctctagggagaagtcattaaaaggccctttagttttcatctgtgacgttttatttaaagaggaaaacaggccacaaatgtgaccaaatgttaacggttgttaaatttgggtggtagaaatgcactctgggctgtaccacagtgtggtccaaatcttctccagattcacaaaaggagatgacggacagcaccccggatggagtggcaggtgcaccactcccctgctccgtgtgcctcctccccacgtcccctcacctgtctgcgggaaagtgcaggtcgccgccggcccggtgcagctcactgctgttctccagcctggccagtgcgtccatgcgcttcaccatcagctccagcaggtcgctcatcttgcgcaggaygccgcgggactcggggccccccatcactgtgggcagagtgtgggtatggttaggggaggcccgagcagcctggaggccacctggtgtccgagctggggcagctcagacaaagctggccccaaagtccccccagcaccaaccaacaccagaccccagcctcagctccatcttcccaggcactgctgacccc

SEQ ID NO: 349066 - DNA, 572 bp, Homo sapiens
ccacagcgtggcttttggggtgacgctgtgttccctggagcgccttaggcctggcaccctgcctgctgcactaccggtcccactctccaagcccaccccaagcttcctctgcccctgcctatcgcctgagccccctcccagaaacctcacggtcacagctccctacccacaccccacgctcccagtcccattgagcaggctgaaaaacagatgatgggccaaaaactatgagggctggcctagagctgcagaggccccygaaagtcaacaaagtggaggctgcagcagcagcatggtggcatgggcccagtcaagggggatggggcagaagcctggactccaggcccgctctgctgcggaccagacaggtgagcaggtcaccgtccttctcttggcctcaatttaccctcatgtaaaatgagggggctgggctcactgagctctgagtctctatcgccctgacttctgtttctgtgtcttcccctaattgcctccggagattagagaaatgggaaaagaaagaaacgctcctataaaaactggcagcaggccaggtgcagtggctcatgccc

SEQ ID NO: 349067 - DNA, 572 bp, Homo sapiens
ccacagcgtggcttttggggtgacgctgtgttccctggagcgccttaggcctggcaccctgcctgctgcactaccggtcccactctccaagcccaccccaagcttcctctgcccctgcctatcgcctgagccccctcccagaaacctcacggtcacagctccctacccacaccccacgctcccagtcccattgagcaggctgaaaaacagatgatgggccaaaaactatgagggctggcctagagctgcagaggcccccgaaagtcaacaaagtggaggctgcagcagcagcatggtggcatgggcccagtcaagggggatggggcagaagcctggactccaggcccgctctgctgcggaccagacaggtgagcaggtcaccgtccttctcttggcctcaatttaccctcatgtaaaatgagggggctgggctcaytgagctctgagtctctatcgccctgacttctgtttctgtgtcttcccctaattgcctccggagattagagaaatgggaaaagaaagaaacgctcctataaaaactggcagcaggccaggtgcagtggctcatgccc

SEQ ID NO: 349068 - DNA, 540 bp, Homo sapiens
ccatcccagctgtcccacagagcggggaaccaggatccccactacctctgggtcctcccagtccagaaaacccaccccttgctctgtgcccagagtcggggaagaggctggacccctggactcacctcgtccaccaccagattgtaatcactcttgtcttcgtcgctttcctgggggaagatgggggagagagctcrttgtggtcatgcccctgcctccacaccccctatccgctcctcaggagttggaggcatgagcccagccagccctggggcatgactgggattctcagaccactgcacccgtttgctcatagcagaagggaaggctgcacgtgcccgcatccgggaaggatgtggggaggcagggcaggtgggcaccttgtggagaggactttgaaggatgtggactacatgagtgccctgtgtgactcccggccctctcaggcctcagtttacccctctgcatggtgaggggagagccagagaccagcaatcatccttaccgccttcataaagactccgccttaataaataaata

SEQ ID NO: 349069 - DNA, 540 bp, Homo sapiens
ccatcccagctgtcccacagagcggggaaccaggatccccactacctctgggtcctcccagtccagaaaacccaccccttgctctgtgcccagagtcggggaagaggctggacccctggactcacctcgtccaccaccagattgtaatcactcttgtcttcgtcgctttcctgggggaagatgggggagagagctcgttgtggtmatgcccctgcctccacaccccctatccgctcctcaggagttggaggcatgagcccagccagccctggggcatgactgggattctcagaccactgcacccgtttgctcatagcagaagggaaggctgcacgtgcccgcatccgggaaggatgtggggaggcagggcaggtgggcaccttgtggagaggactttgaaggatgtggactacatgagtgccctgtgtgactcccggccctctcaggcctcagtttacccctctgcatggtgaggggagagccagagaccagcaatcatccttaccgccttcataaagactccgccttaataaataaata

SEQ ID NO: 349070 - DNA, 624 bp, Homo sapiens
taatatcgctgtgaattttatccatctcacttccttggactcttcctccattagacatactytcttcttttgtgtcaacatttttgccagctctgtctaatttgtattaaagttactcttcttcttatctcaaaaaataataaataaggcactttagacacctctctagctatatttctttctcctcccttacagccaagattcttgcaagaataccatatactccaactcctcacacctcttattaattcctcaaccctttgcagtctggcttttgatggtaccatatgactgtcaacaaaggcacgccaacaatatccttcttgttaaatctaataaacatttttcaattcttaccagatttctccacaaaacagttgatacccataagtataccttccttcttgaaacaatttacttagcacctgtagtattattttctactttttgtctttctatgattcctctcttcttgttctatttcatattgtcctcttcctttacctgtctcttaaatttgtttccagagttttttccttgttcttcatttccatggcactacattttctcaactgttttcatcaatgcttatgcttttaatctccaaatctctacctccaacca

SEQ ID NO: 349071 - DNA, 596 bp, Homo sapiens
tgtattttaaatatcaaagaatgggaaggagactttaataaatttattcttatctgttcaaactcattttacagatgagaatattaagcaccgagaaaagttaaagagcttacacttatacaagagcagccaatttctgatatatgtaagactagaatccaggtttactggtcccctgccttgtgcttcatccatcataatctcacatgtaacataatgataccrtaaagaacatttaaaggattctgatgcacttcaataggaagaactctgagtttaaagacagggctcatcaagtcttaaaaataacacagcaaggaccttaggaggaaagggacattcttattcaaatgaaaacaatactgttgaaatattattacttgcttttttcagtcactatattttcacctattaaaaaatgccagatgaagatattaagaacataaaatagtttattccaacgtaagttcacatcttaaactgaagagcacccccgccgaactctgcacatttcaacaacaatattttctctccagattcaattgtatttatgctaaagaaattacacctgagacttttgatgcaaacttgtttgg

SEQ ID NO: 349072 - DNA, 384 bp, Homo sapiens
agttgctctaaatccaggtcttaacgtaatgatttcagagtaagtgctgagtactttccctcagatagatcagtcttttcatcatatattaaattattcaagtagaaaatatccattttcttcaatgatttktcccttgttgtaacaggtgatctgcagaagtggcacattgtttagagtgaagcagttcctaaaaccattaagccaactttggttggctatgtgtttcatttccatttaagcctacccatctctagttagagatttgactcactcatagaagttgaagccttttgtctcaaggtattccgatccctagtaatacctacaattcatgtcttccagtcaacagtttcacgctatttcactctcaattagagtctt

SEQ ID NO: 349073 - DNA, 572 bp, Homo sapiens
tgctctgtcacccaggttggagtgcagtggcacaatctcagctcactacaacctctgcctcctgggttcaagctattcttctgcctcagcctcccgagtagctgggactacaggtgtgcaccaccacacccagctaatttttttgtatttttaatagagatggagtgtcaccatattggtcaagctggtctcaaactcctgacctcatgatctgcctgccgtggcctcccaaagtgctgggattacaggcatgagccaccacacccagcccaccagcaggatttctacgttacagtgttgaggttgaattcttcttttctggaaaaacctgattttgctcttaaggctttcaactggatgacattcactcagattatcacattatcaatggttagctcctttacttaaggtcaacttatggtaaatgttaatcacatgtgcaaaatctctttccagcaatgtccagactaatgtttcaccaaacaaatgattascatagcctagacaaattggcacatacaatttaactatctcacaaactttctcttgtcatctataaggtctaaagtctt

SEQ ID NO: 349074 - DNA, 535 bp, Homo sapiens
ctctgtgttggtagtcagaacattgtaaattcattttataaggaaactaaagctcagagagtaccaatggtaacttgaaattatttggaattagaacgcagtacctcactccaagaccacagcatttcctaccagttggactagtccagatcatcaccagtggtagaataggtagatatcattctcctggtggagtaagcaatctctttgaaaaaacagtgaaaagagcatcaacgttggtcttagacaaagatttgtatgcaagctccaccaataagcttaattatatgccaggtctgtcccacagaccctggctgagcaatggatgaaaggaatagtcagacacaggtatgcagtgtaaaagcagctaggagattggctggcattagtggctgaagaatgagccgtcctgaacagctggaccagctgtaatcaaatgtgtgaacagctggagctgcttgcttttattcaatacagacataatgcygaaagcctggagcaaacacaatctgtgggtaattagcattatttttcc

SEQ ID NO: 349075 - DNA, 572 bp, Homo sapiens
ctgctatggcctcaattaatcctttcataaatgggctagcagctccattttctctaatgcttttccttttctctttaaaagtgtcgaaagtaatgggttcatatacccaattgccttgttcgtcttgcatcactgggcaggccaagagctacccttctaatgccgcttgcctaagacagggtcccataactgttgtgtatcccttgtcttttttccagtttactgggggaggggggtcaggaaaaacctctgtttccttgtttgtatctttacctggtaacagcggggctgagggaggaggaggaggaggaggcagtaaggtaggtgatggttcctyctcccttccctgtttaggctcttctgagtcgagtggggccaaagcagccctaaggcccataatgttaaagatgttactggtacccattgcccttgtgcatgatattgtttaagatttctgcccacttgttcccagagctctaggtctagcatgccttcttccaggaatcatgggttatggaaacaacagtttgcattaggtcccttaattagccggggaaacccaggcttcacta

SEQ ID NO: 349076 - DNA, 572 bp, Homo sapiens
ctgctatggcctcaattaatcctttcataaatgggctagcagctccattttctctaatgcttttccttttctctttaaaagtgtcgaaagtaatgggttcatatacccaattgccttgttcgtcttgcatcactgggcaggccaagagctacccttctaatgccgcttgcctaagacagggtcccataactgttgtgtatcccttgtcttttttccagtttactgggggaggggggtcaggaaaaacctctgtttccttgtttgtatctttacctggtaacagcggggctgagggaggaggaggaggaggaggcagtaaggtaggtgatggttccttctcccttccctgtttaggctcttctgwgtcgagtggggccaaagcagccctaaggcccataatgttaaagatgttactggtacccattgcccttgtgcatgatattgtttaagatttctgcccacttgttcccagagctctaggtctagcatgccttcttccaggaatcatgggttatggaaacaacagtttgcattaggtcccttaattagccggggaaacccaggcttcacta

SEQ ID NO: 349077 - DNA, 572 bp, Homo sapiens
ctgctatggcctcaattaatcctttcataaatgggctagcagctccattttctctaatgcttttccttttctctttaaaagtgtcgaaagtaatgggttcatatacccaattgccttgttcgtcttgcatcactgggcaggccaagagctacccttctaatgccgcttgcctaagacagggtcccataactgttgtgtatcccttgtcttttttccagtttactgggggaggggggtcaggaaaaacctctgtttccttgtttgtatctttacctggtaacagcggggctgagggaggaggaggaggaggaggcagtaaggtaggtgatggttccttctcccttccctgtttaggctcttctgagtcgagtggggccaaagcagccctaaggcccataatgttaragatgttactggtacccattgcccttgtgcatgatattgtttaagatttctgcccacttgttcccagagctctaggtctagcatgccttcttccaggaatcatgggttatggaaacaacagtttgcattaggtcccttaattagccggggaaacccaggcttcacta

SEQ ID NO: 349078 - DNA, 399 bp, Homo sapiens
cagtaaggtaggtgatggttccttctcccttccctgtttaggctcttctgagtcgagtggggccaaagcagccctaaggcccataatgttaaagatgttactggtacccattgcccttgtgcatgatattgtttaagatttctgcccacttgttcccagagctctaggtctagcatgccttcttccaggaatcatgggttatggaaacaacagtttgcattaggtcccttaattagccggggaaacccaggcttcactagctttaagcagctrtttcaatacttttatatttgctgttgagctgataactgttgtcccatgatgaaaccctagcttgaaaattccctcaaacttggaaatcccaagcaggcacccattacttattgactgggcagtcac

SEQ ID NO: 349079 - DNA, 593 bp, Homo sapiens
ttgtaacctttcagaaggtctgctctttccctatagtttctctcaccactctcaccagtctcctacatctcccccttttctgttttttgcatcaggttttgttgattgaagagtaaagatgtgtgcagagacaggtttgacaggtgcagtggttacagctcgtgttccagcttggcatcctagaattagtaaataacataagacaaacatgagtatgatcagtaatattattttccaatcaaggagtaatatgtagtgttacttggcacctcagtccaatgtgtgccattcctgaaggaccccactggggrtatgtcgatccttcctagccaatcagtcacattgttagaggctaggaagggggtgcctgcccaagtaacagggtggaagaaagggggatctagaagatgggcccaatagagggtagcaggtgtgagttgcaggcaaagtgagagaataagaaaggttaataccctatgaaagttgcaatgtacaacagaaagcatagaaaggaacaaattatctggagtgaatggtgtctgtgtccagagtaggattcactcagcctcctgagttgtcttcttcagcaccgt

SEQ ID NO: 349080 - DNA, 368 bp, Homo sapiens
gaagtggtaagagtatgcatgctccttcctagcatttttctacagacaaaataaagttaaatgagcacttacgtattcaaatgcatatgcacgctctgtgtatatgtataattaaagaggcaactttgtcaaccctcaattagtttgtgcgatgatttagagtcctttgtaacactggtagatagtatcactagcatcttccctctgactatgtctttgagtcatggatcatctgctttttaatagcacaraatccttaagtcatggagctaagagtaatttctcagattcagtgtatttgggcagtggggtccaaatgtcaatctaagtatatgccattgttttttcagtcatatttctgttttgaa

SEQ ID NO: 349081 - DNA, 512 bp, Homo sapiens
tactgtttattgtagagacaatttctgcctctttctcwgtctaaaattgttaatactaattaatatgaaagaagacttatactgctggccatatgataaactatacatgtaaatatctgattcaatagactacataaaatttctgagtattcagaataaagtatttttataaataattatttagaatacagtgttttcttataaatgtaacttaagggtaaagtatggaaaatattaagaagtcaaaataattgtatttctgtcttctctgatggttccacctcttgcctcagactcaatgttggagtcccacagggttcaatgtcttagtcctctctgtcaacactaactcccctgctaatgtcatgccatcccatagctttaaatatattatctttgtttataatgcctaactttatatttaagtctagttatctaacttgaactctagcctccatctaatagtttttcaaattcaggatggagagacaaagcagctacacgtcacaata

SEQ ID NO: 349082 - DNA, 512 bp, Homo sapiens
tactgtttattgtagagacaatttctgcctctttctcagtctaaaattgttaatactaattaatatgaaagaagacttatactgctggccatatgataaactatacatgtaaatatctgattcaatagactacataaaatttctgagtattcagaataaagtatttttataaataattatttagaatacrgtgttttcttataaatgtaacttaagggtaaagtatggaaaatattaagaagtcaaaataattgtatttctgtcttctctgatggttccacctcttgcctcagactcaatgttggagtcccacagggttcaatgtcttagtcctctctgtcaacactaactcccctgctaatgtcatgccatcccatagctttaaatatattatctttgtttataatgcctaactttatatttaagtctagttatctaacttgaactctagcctccatctaatagtttttcaaattcaggatggagagacaaagcagctacacgtcacaata

SEQ ID NO: 349083 - DNA, 512 bp, Homo sapiens
tactgtttattgtagagacaatttctgcctctttctcagtctaaaattgttaatactaattaatatgaaagaagacttatactgctggccatatgataaactatacatgtaaatatctgattcaatagactacataaaatttctgagtattcagaataaagtatttttataaataattatttagaatacagtgttttcttataaatgtaacttaagggtaaagtatggaaaatattaagaagtcaaaataattgtatttctgtcttctctgatggttccacctcttgcctcagactcaatgttggagtcccacagggttcaatgtcttagtcctctctgtcaacactaactcccctgctaatgtcatgccatcccatagctttaaatataytatctttgtttataatgcctaactttatatttaagtctagttatctaacttgaactctagcctccatctaatagtttttcaaattcaggatggagagacaaagcagctacacgtcacaata

SEQ ID NO: 349084 - DNA, 564 bp, Homo sapiens
catcaaataataaataaaacaaataatgctgccacctctaaaccaccaggttctggacaaacagggaggaggcaggatatgtcttccaaggcccacaacaaccagctctggactcccttttgtacttttaggaattctctccctcaaactctcctcaaggtttccagtgttctgataacaatgataataattcctcatttttatatctcaatgcatttttaattttattactgcatttgatatgcttattcgatccccaaaatcaactaatacccaaaagtgatttaatttaatattatctttccaagaaatatattaaaaaaaaaaaaacttattggctgaaagtggaagccaagggactcaatatgttacaagttttagagacacatggataggaaaaaagattttaaacagttggttctccagaaaatagcatgtggatgtgtcctctcagattctttgtgaagccagtcaactctgtaagtaaccttayccactacttacttaaatgccccaaccttaaacaaaaccacctcactatcctccaatgcagtgctcttgaaa

SEQ ID NO: 349085 - DNA, 554 bp, Homo sapiens
aaagcagtcttcaagctactctcactgtatctactcttacccctcccattctctgcaccctcacaactcagcacacttgtcattttgtcttcaacatctgtcttcccagctagactaagaaggtccatgaggggaagagccatgtagatcttttgatatggtagtaccaatagcttgcatgttacttggtacaaagtggtatgaattaaatatatgttaaatgaataaatgaaagactgacagacgagggacaacagacacgtaaaatagagtaagggaagaaagaagaatgtgaacaaagacagtggaaagctcaatagcacaatgtgttcagtgaaccacaagtagttcarccgtacctaattttaatgtacatacacagcaaagaatcctttttagaggtaagtaggattaatttatgaactttaagcacaggcattggcctaagtcattttaaatagggaggcagaaacacagtcttatttgcatttttgataaataatgacagtaacagaggggagaatgatttaaaggtaggttagttagaatgcttt

SEQ ID NO: 349086 - DNA, 528 bp, Homo sapiens
gaatgatttaaaggtaggttagttagaatgcttttcattgcaaattcagctagaataagcttaagtaaaaagagatttattacaaggatattggaatttctcatggaagtcaatcatagctaaatggctgarctataagaattttctgaaacctggattgtgttctgttcttctctgtacatcaactttaaagatattacttcgatccactaatatcaattttgtcaggtcatttatcaggaaaagatactgataatgcattttaatagtataaagagaatctgaacgaagagaacaccagacaaaatcattctgaagaaggtcatttctacaggagtactgcaagagtttttagaagactgtcgcagcattaaaggaaggtactgttctgataaagagcagttgtcagtgttatcttttagtaactaaggtttactgaaagaagagacatgggatagagaaaagaactaaagacaggctttatctgcctcacaattttgcctggaactagccctagttaggaagaga

SEQ ID NO: 349087 - DNA, 644 bp, Homo sapiens
gctcccatctgcaaaatgttggcaatagactagagaatcttcaaaatccctattcaccccatattctttgtattctcyttctttgtgtgtgtgtatgtttatgctgctcaatatgcaatatctgaaactgcttttgaaaatgtaaattactcaattgacccactaggtggtagcaaatttctggttactgtataatggcaggcttccaaccacttccataaccttctaaattctgccatcaagaagttagtgaaaaggacttctttgccttgtttgtcaaaaatcatgagttttattctcagctctgtcatttactacttgcatgatcttgggaaaatgagtattgcagggtttttgatttcccaccataaaatcaaagggagtcttgcagatctaaaactttttgcatattgttaccataataaaaaacaagacatttaaacagtaatgtcctcctttttactttgagccattcaaaaagaaaaattccattttctgtctatgagacatcaagtaattaatattttttagtttccttatctaaaaattgggggaaataatagtgtccatccttaaagggtattgtaatgattgaataagatcacacaataaatgttcacacaataagatcacagttaataaat

SEQ ID NO: 349088 - DNA, 422 bp, Homo sapiens
gctgtcagaaaagagtgtggctaccccgttaatgagtcagtgttaggaaatctgtctgcttacacccctggttcttgttcactgaaagatgcctcaggacttcaaaaaaggctaataaaattaaagtagtacttgaatacacatcccacatttagaaataggaataaatacaaaattggagaaaggggaaagggaaataaaaaaagctgacctccaattatatattctttagctcagggagtattctgcagacacaaaccaactatcactagctacactgtgagctcactgagggcagaaacgaaaccaggrctaccctttctatcaccagtgaccagtctggtacctgccacacacattctctcaaagaatgtttgcctttgttactgctgttgtggaagatgcaactgagtatataccaa

SEQ ID NO: 349089 - DNA, 619 bp, Homo sapiens
ttaaagggatgacaatgagatagtaaaattttaactaaatttaaatttttgactccagaaaaatttcctaatgaataaaaataccaacttttgctataagcctgcttggttatttctcctcagttcacaccattacactatgtttacaaatttgtggtcttgttgaagatgtctgttatgagtttaagggcatgggtagaggaaagccagggtcaagaaaagtgtgctagcttatattcaataggctaaaagtttcaggtgtaccactataacttaatctctaacccactcagacttatctacgccccctgtggggaacatcactaaagaacagaaaaggtacaaagagaaagatgagacatcaaaaaaatgaatagcacaatgtggcagatggtaggtatattagtttaccattgctgctctaacaaattatcacaaactgaaaggcttaaaaccacacaatgtattctcttatctttatgtagctcaggggcctgacacaggcctcactggctaaaatcaagttgtgagcaggactaccttccattctggaagctctaggraagaataggctgtaagtagggaatagctctgatggaaaggagccaggagaaagaca

SEQ ID NO: 349090 - DNA, 581 bp, Homo sapiens
tagtcatctttttaaggtaaaatttctaaaaatcttttctaccagtgaagaatggcaacgtgatgaattacttatgtaaactaacttctcaccatcttccgtaccatcctttcatcagattcggagaagttaaaaattagactctttttcatcctatctctcttttcagtccatctttttcctttccattcatttccctggcaacccttctttttgcctttttaaagttatcttctttcaagtaaaaaaaggttgacaaaatgtcaaaacacttttcaaaaatgttttgaacaagcaggagaaagagaaatatatcatgcaaaaaatatcaatgccrtatctgttttcttatgctccaggattgtagagacagatcatatctctgatcaagggatgtattagcaaatatatgaaataaaataaaaatgtgctctgtcatgttgatgatttgacgctttcttattttaaggtggtacagaagttcaggttaaaataaaaaatatttatgaacttggtggaagaaaaggattataaaattctgaaaaaatagataagggacaggtaaagcaattaatgggtaa

SEQ ID NO: 349091 - DNA, 455 bp, Homo sapiens
ctctctttccttttgtgggttggttacctcctcatctgtaattgcttttgtaggggtaaagatagagggggaggtttgcctcttccacttttgggatgggtaaaggtgatatcccctgcatttaatttggacgcttagaacacattgaagcacttagattctacagcaatataaatataaataataataatatcatgataacaattaaaatttgagtgccaacaatttggtggtactgttctaaatatttgacatgtattacttgctttaatcttcacaaaaatkttatgaggtttgtggttatcacagtttacatcccatgtttactacctatttttatgcatcattttaagaacttcatctcatatttaaattatttctatgaaaaattgtactttaacttctaaataacatataactttttgagtacattttgtccatgagttagagaatta

SEQ ID NO: 349092 - DNA, 573 bp, Homo sapiens
tcattttcttccccggccctttttttttttttttttaaatgaaaaagtttgcagggtttggcacaggaaaatagaaaggtgagcagattggttgaaagactcaggcgctttggtcttagtagtgacagagacttgaagtaatactcactagacgtttgctaatagatcttataaaggcagcatatactaatattgcctttaagcaaaattgtctttattttccatgaaggttctttcagggcaaagatcatgtctaaatttttaggtcctggatgcctggcacaattctggacattcccataaaagtcacttcattaagcaagtattataaaatctgaagaaagtatcattcaacaagggctggcacagtcatagttccacatggcactcctttgataaggtgatataaacagtaagtggtggtgattctgcctccctggctagccatgtatgatctatctcaattaaaacttgagaaaatatcaactcaaaatggattaaaggcttaaatgtaagacctgaagctgttaaactaatacaagaaaacayaggggaaaagctccatgatgttgg

SEQ ID NO: 349093 - DNA, 592 bp, Homo sapiens
tggttgccaaggaatgggaggatgagtgaggggaagtgggagcagagcaaatcagtgtttaatgagtacagagttttagttttgcatgagaaaaatttctagagatctgttgcaaagcaatgtaaatatacttaaatactgaatgtataccttaaaaatggtcaagatagtaaatttaatgtcrttttcaccacaattttttaaaataatatttaatcatattcatgatatattaggaatattaatattgaaaaaatatttaatgttattcctggtatattaagtgaaaaaggcaaatatgagaatagtatagcataccattcacacataaaatactgaaaggttacacacccaaaatgtgaacatttgttaactctgtggtgtaaagctacaggtctctatagtttctaaaagaatttataaaacacacttttacaactctgtgagaggccacaaaaatacaacattggccttatgaatagaaagagacatttgtgacttcttcattgatgctttagatctaacattttaaaggagtgctttcactatgtatatctggcaagaagagaagctgcatttgggtactgaaaat

SEQ ID NO: 349094 - DNA, 540 bp, Homo sapiens
gcacaaactaaccattcgttttgtagctgcctgaacacacagtaaaactctgtgacaatttatccacaaagaattctaagtttgaagactgttgtcaagaaaaaacagccatggacgtttttgtgtgcacttacttcatgccagctgcccaactccccgagcttccagatgtagagttgcccacaaacaaagatgtgtgtgatccaggaaacaccaaagtcatggataagtaagtagaggtgatgtgaaaacgtkttcccattttaagttcatctggacaaaaagtgggggccagccagatggagggaaggtatgctatcactcatttcaaacataggcaaagtactacctttatgcttttcatggactttaagtatttgttaattaattgtaaatgactaaaatttttaaaacaccataatcgagtgtgatagaaagattttgggtagtgagaaaggagcttagagttcctaattgtgccttctctgtttcctgtgcatggccaaaagaagtgacttgataattctgaacttcagccta

SEQ ID NO: 349095 - DNA, 540 bp, Homo sapiens
gcacaaactaaccattcgttttgtagctgcctgaacacacagtaaaactctgtgacaatttatccacaaagaattctaagtttgaagactgttgtcaagaaaaaacagccatggacgtttttgtgtgcacttacttcatgccagctgcccaactccccgagcttccagatgtagagttgcccacaaacaaagatgtgtgtgatccaggaaacaccaaagtcatggataagtaagtagaggtgatgtgaaaacgttttcccattttaagttcatctggacaaaaagtgggggccagccagatggagggaaggtatgctatcactcatttcaaacataggcaaagtactacctttatgcttttcatggactttaagtatttgttaattaattgtaaatgactaaaatttttaaaacaccataatcgagtgtgatagaaagattttgggtagkgagaaaggagcttagagttcctaattgtgccttctctgtttcctgtgcatggccaaaagaagtgacttgataattctgaacttcagccta

SEQ ID NO: 349096 - DNA, 597 bp, Homo sapiens
ttatttttttaaaagtagttggaatctaacatctgtataagaagaagctaagtttttctggaggaaacatgtcatgtgtagcaagtgggtggccaattaaaacagccataaaaatatagatgacgaaatctatctgcaggaacttgagtcaaaatggcaaaatgagcacatagcttagcaacattcttaccccagaattttctgtagatattgctgtacaaaattgaggacctataaaactgctaaaaatgttatctaacttcatggcatattgcctggcaagaagacccaaactttcaatcaagcatactgtcagctatcaccagcatatattccctataaattagaaatagaaatgttaactaccaataatgttatataatagtcatttttctcaattaagagaaggaaaaagcatttctctataaatagacattaacagtaaaataataggccacaataaggtaagaagtggtactgggttcttggggaaagtctccattgagaagaccatgtcatttttcctaacgttagtaaatttctcagatcctattccctcctccccccaacttyctttttttttttttgcctcctttg

SEQ ID NO: 349097 - DNA, 635 bp, Homo sapiens
agttcaatttttctctattgctataaaaacaattttagttattcttggaaaagagaaaggttgtattgacaaaaccttgcaattataagatagagttatgagtttttctgcctaaattaagggacattgtacacaaccactgtcctgtcctgttcaacattcatgtcacaaaagacagaaaggctgaggaactgctccagattaacaggaactaaagagacattacaactaaatgcaattcctgaattccgcttgggtcttgaattctggattttgggaaaattctataaaggctattgttgagccaactgagtttgaaatatggactgtgtgctaaattttctgaatttgatgattacgttgtggttatgttaaaaaaattctgtttccaagagttacacgctgaagtatttaagtgttaaagggagtgaagtctgccatttattttcaaatagttcagaaaacaacaacaacaacatataactgtgaagacagacagaaagagatcaatttagaaaagtaaatgtaggctgggcaccrtggctcatgcctgtaatcccagcactttgggaacccaaggcaggtggattgcttgagtccaggagttcgagaccagcttgggcaacatggtaaaa

SEQ ID NO: 349098 - DNA, 601 bp, Homo sapiens
caaatagctagcactacaggcacgcactaccacacctggctaatttttaatatttgtagagatgaggtctcgttacgtttctcagtctggtcttgaacacctggtcttgagtgatcctctctgtttggtccctcaaaatgctgggattacagacataagccactgcacctggcctatttttagttttttaaggaatctccatactgctttccataatggctctactaatttacattcccactaacaatatatgagttcccttttctctgcatccttgccagcatttgttaatttttgtctttttgatagtagctgttctaatgggataagatgatatctaattgtggttttgatttgcatttccctgataattagtgacattgagcattttttcatttatttgctggccttttgtatatcttttttgagaaatttctmttcagatactttgtccattttttaatgagtttatttaattttttttattttttgctgttgagttccttgtatattttggatattagttccttatttgataaatagtttgcaaatatcttatcccattctacagcttctctctactctgttgattgttttcttt

SEQ ID NO: 349099 - DNA, 515 bp, Homo sapiens
gcaccttctcatgagatcataatcatggaatcctttgtggrgaattattgacagcacatcaataagagctcataaaacatgtgctggaattaatggggcttcaacaaagatctcagacatgaattagctgttctaatgaaaattagattatgtttgctaaacactaagacattgaataatatctcaacatatgtaatgttacaacacaagatatacaagatacatcattgtcttaatctgttcaggctgctataaccaaataccataaactgggtgacttataaacaacagaaatgtatttctcaaggttctggagactggcaagtccatggtcaaagctctggcagattcagtgtctggtgaaggcctgccttctggttcacagatggtgtcttctcaatgtgatctcagtggtggaaggaacaaggcaactctctggggccttttccgtaaaggcactagtcacatttgtgagggcagagctctcatcacctaatcacctccccaaggtttca

SEQ ID NO: 349100 - DNA, 626 bp, Homo sapiens
ccatagcaataacattcactgctgatgctcaagtagatagttgactcagttggtttttaatgctacgcacacatcaggtacaaatggataacaaggcatgtatgtatgaattcatgttttcatgaatttaactcctggcatcctgagggggtgacacaacttggaggcagattatctcaaagtaaccaatgtataatagggttctgaatttttttacctatacactttttgccttaaaattttattggtttttgttcaattacaaatatattccttattgttaaaaagtcaaagtgtattcaaagatgttgagttggtcagagcccaatcagaaatgaaaaatcacatagtaattgggatagaaagttgcatataaagattatgaactgtaataggagattagagtatcaagagattgactgactgacaagaattaaagagaactttacaaaatatcatawtagcagatataaaaaggcatcactgaaactgaggggttaatttgatcagatgtgtctgccctccttgcttttggtcatttgctttttgttatttttttttttttcctttttccatgaaggcgaaggccagggtagctgaagtcctcaccactaaatactgaaacc

SEQ ID NO: 349101 - DNA, 619 bp, Homo sapiens
ttttcacttttgcaagttccttttggccgcaatctgaatgcagtcctgtatgggataaaggaatatcataagtatatattttttaaaacagcaacacgattcatgactctgttgcagaatgtgaaggagcaagtctctcaattggctaattgaatcaagctctggtgagtatgttgagctctgagctctcctgaagttgggctctgagcctgaatcaattggtctgatctccctttctctttatttgtatagaaatgagtaggaattctgtctgtgttaataatgtagggtaattttggaaaggtaacttaaatttccaggctatggtttatgttcataaagtaaagataatttgaatattgaaccactgttggctaaaaggcagaattaggtgtgacctcacttagagtacttagttgcmgactgttgggggaaaattctcatattaaggtttagactttgagaatagggtgattgtgagccttctgtacataactgactttcaatacatgctcattaaaaccaaaaaagctaaatgattcaaacactaaaaatattcatcgtgttaatttctcataacctttatgcagtggcaatattgcataaatatttgtttgta

SEQ ID NO: 349102 - DNA, 571 bp, Homo sapiens
cacaccattgacccaatatgaagccctgacaaggagatttgttgggtttttttgtgagtaccctcctgagccagaggtggagtgtctcctcttgggtagacaactttagtgtgattcatgtgtttgaatcacacagcctccgaaggccacgtgtctagaatagcaccaaacaatgaaaaatggctctagaaacatttattgttccttcagctttttctatctcccaaacgtatattgagactaatttattaatgttaagtcatacgataaattcattctgggaggaaaagcatttccagggagtaactatacgctctcatcacttatagctttgtccccgcctcatcatccagggtgatgattttaatccagacttctccatgtactaactgtggaaccctgggcaaaactggctctccatttgcttatctttccaaaggggactataatagtataccctgcagaggtacacatggctgttattactgtttacgcatttgggcttcatttggagacagtctcagaactgatcttatagcgtragattatagaatgagcttatcatataaga

SEQ ID NO: 349103 - DNA, 316 bp, Homo sapiens
ttgcttttagtttcatgccataccattcccaaatctccaacttaccagcaagcagtgataaatggcagcctgtagattattgttaatcaagaaaaaaaaamcaaaataaattattagtctattatacaccattgtggctattctatttctcatttggtaacattcagaagtctcctcaagaactcggacaacagacccttgagagtgtgagtggtgacaatggatacagactgagctgcccagaagcctgttcatagtctcagactccaaattctagggctcaactccagttccctgcccacagtgtggcatttcc

SEQ ID NO: 349104 - DNA, 578 bp, Homo sapiens
tcccgtgctgttctcatgatagtgaataagtctcatgagctctgatggttttataaaggcgaagatcccctgcacaaactctcttgccaggtgtcatgcaagatgtgtctttgttcttccttcaccttccaccatgattgtgaggcctccccagccatgtggaactgtgagtccattaaacctctttctttatgaattacccactcttgggtatgtctttattagcagtgtgagaaccgactaatacagtaggtaattatgataactacctcatatttctggtgtgatggttaaatgcactaatacttataaaagcatttagaaaaaatagctggacatagcactcgataaaggttaccttttgaggttgytgtttataattcccactgtataccaggtaagttggtatacttgtcaaaatgaacatgctttttacaatcccatctccttgcccttgcgtactttaatcttgcttcccagatggttttcccaaatggtccagtcttctatgatcacagaatcttatccatctcttaagtaaggcctacttcaaatctcacccatttgtgaaaccatca

SEQ ID NO: 349105 - DNA, 581 bp, Homo sapiens
atctttgctattgtgaatatagtggtgatgaatttatgartgtgtgtgtctttttagcatagtgatctacattcctttgtgtatatagccagtaatggggttgttgggtcaaatagtagctgtgaacacttttgggactgtggttaggccagatgtcatggttcaaatgatgttagacattaaatgttgtacgcattttaaatcttcagatcttataaagttttaataatttctgtagttttattgaaaacattgacactgcttatttgagtcatggattgttatatccatctggaaagacagtcacccctgatagaacacagcattttctgttagtcagcataatacaggtttttagagtattactcatggggttggaagtttgattttattcagaaatatttttaagagatggtgtcttactatgatgcccaggctggactcaaactcttagtctcaattcagagattctaatatccctcacatagggttttgaaccctgaaaattggtaaaagtatacttctatggtataaaccaatatattatacggtggaatttcactgtgatttgctaatacctg

SEQ ID NO: 349106 - DNA, 581 bp, Homo sapiens
atctttgctattgtgaatatagtggtgatgaatttatgaatgtgtgtgtctttttagcatagtgatctacattcctttgtgtatatasccagtaatggggttgttgggtcaaatagtagctgtgaacacttttgggactgtggttaggccagatgtcatggttcaaatgatgttagacattaaatgttgtacgcattttaaatcttcagatcttataaagttttaataatttctgtagttttattgaaaacattgacactgcttatttgagtcatggattgttatatccatctggaaagacagtcacccctgatagaacacagcattttctgttagtcagcataatacaggtttttagagtattactcatggggttggaagtttgattttattcagaaatatttttaagagatggtgtcttactatgatgcccaggctggactcaaactcttagtctcaattcagagattctaatatccctcacatagggttttgaaccctgaaaattggtaaaagtatacttctatggtataaaccaatatattatacggtggaatttcactgtgatttgctaatacctg

SEQ ID NO: 349107 - DNA, 581 bp, Homo sapiens
atctttgctattgtgaatatagtggtgatgaatttatgaatgtgtgtgtctttttagcatagtgatctacattcctttgtgtatatagccagtaatggggttgttgggtcaaatagtagctgtgaacacttttgggactgtggttaggccagatgtcatggttcaaatgatgttagacattaaatgttgtacgcattttaaatcttcagatcttataaagttttaataatttctgtagttttattgaaaacattgacastgcttatttgagtcatggattgttatatccatctggaaagacagtcacccctgatagaacacagcattttctgttagtcagcataatacaggtttttagagtattactcatggggttggaagtttgattttattcagaaatatttttaagagatggtgtcttactatgatgcccaggctggactcaaactcttagtctcaattcagagattctaatatccctcacatagggttttgaaccctgaaaattggtaaaagtatacttctatggtataaaccaatatattatacggtggaatttcactgtgatttgctaatacctg

SEQ ID NO: 349108 - DNA, 588 bp, Homo sapiens
cagctggttggaaggagcctgtcttgctgaggctcattacagaactggcgcaagatactcagatccgttcattcccctggctgtgaactgttgcgtactgcagaagctgagtcagccttctacatctgggctgcaggtgtagcccagacatkgctaattaaaataccaggccttagtggtataggactctttctctggggcactgcacagctctagcatgtcatcctaaaaggtttatgcctgaaagtaaaagttcagaatattaagaagaaaaaaaattgtataatccctggaatgctaatgtcttgagtttctaaattgaacggcactgtcagattaggctctatcgacatagtcagcaagttcttattcttcttgcctgtgccaggctgctgcatgtcaggacataaaatgttcccttcataggcaaaagaaagcacccgtgataagtatactattaaggaaaagtggtcagtgttcaggctgagttgagacaggagtggaatgtcatctttctcatgtagtgcgctttaatttacagccaggatggtcatttaagcttttacacactgtaataaaggtgtccca

SEQ ID NO: 349109 - DNA, 588 bp, Homo sapiens
cagctggttggaaggagcctgtcttgctgaggctcattacagaactggcgcaagatactcagatccgttcattcccctggctgtgaactgttgcgtactgcagaagctgagtcagccttctacatctgggctgcaggtgtagcccagacattgctaattaaaatrccaggccttagtggtataggactctttctctggggcactgcacagctctagcatgtcatcctaaaaggtttatgcctgaaagtaaaagttcagaatattaagaagaaaaaaaattgtataatccctggaatgctaatgtcttgagtttctaaattgaacggcactgtcagattaggctctatcgacatagtcagcaagttcttattcttcttgcctgtgccaggctgctgcatgtcaggacataaaatgttcccttcataggcaaaagaaagcacccgtgataagtatactattaaggaaaagtggtcagtgttcaggctgagttgagacaggagtggaatgtcatctttctcatgtagtgcgctttaatttacagccaggatggtcatttaagcttttacacactgtaataaaggtgtccca

SEQ ID NO: 349110 - DNA, 588 bp, Homo sapiens
cagctggttggaaggagcctgtcttgctgaggctcattacagaactggcgcaagatactcagatccgttcattcccctggctgtgaactgttgcgtactgcagaagctgagtcagccttctacatctgggctgcaggtgtagcccagacattgctaattaaaataccaggccttagtggtataggactctttctctggggcactgcacagctctagcatgtcatcctaaaaggtttatgcctgaaagtaaaagttcagaatattaagaagaaaaaaaattgtataatccctggaatgctaatgtcttgagtttctaaattgaacggcactgtcagattaggctctatcgacatagtcagcaagttcttattcttcttgcctgtgccaggctgctgcatgtcaggacataaaatgttcccttcataggcaaaagaaagcacccgtgataagtatactattaaggaaaagtggtcagtgttcaggctgagttgagacaggagtggaatgtcatctttctcatgtagygcgctttaatttacagccaggatggtcatttaagcttttacacactgtaataaaggtgtccca

SEQ ID NO: 349111 - DNA, 615 bp, Homo sapiens
ttatgtttaagtcccccaaccttttatttcaatgagatgatctgaagtatatcaaattccaggttaattgattccagatctgttcttgctaaactgttggtcagctgatccatgaaaggggccttggagcttgttatcagatgagctgagattactttctggtcctgaattatactagggtttggggtacatatcttaaatttctctgaaactcagttttattcataatacaataggaatccaaaggaatcctattgcataatattttactttatggctgattttggaaggtaaccttcctcattgaagctgtgaatctactatatttttaaactctcagaacaataaagagatgtaatttgctttatgataatagagaattaatacttaaaccaaataagtaaaccctgcacacaagcaggaatgcttgaggccattctgctatacttcctcaccctagaggtttgataactatsttaaaatgcaaagggggcaagagccctgaatctgcatatgactggagattcagtcttatagtctgacttttcttatagtctaactagctgtttctcaagcttcagtatgcatatgtattactgttttggattatacaca

SEQ ID NO: 349112 - DNA, 596 bp, Homo sapiens
ttatataatcatgcaattcttattcaaaaatgctctgctagtactagcctgtagggagaaaaaatgaaatatgcctatcttttcaaagataaaaatgactagctttgtgaagatcattgtagaaataactaagttttgaaactaggccaagttacttcagtttccaaggaggttagctcatgtcttgaagtatttgggtacatacatttttgtarcatttattgaagtgaaaaccacatatcataaatgtacagctcaatgaattttcacaaagtatgtgaccactgcctggtgaagaaatagtatatttttaaggtgcctgttcatgtctctaacccatatttattagtttctgctttttaatacataggaattgtttatatacagtctttacatatgttgcatatgaattttctgttcattatttgtattaacaaaagcccactatataggttgcactttcactcttctaatggtgtcttttgttgactctaagtgctccattttaatgtggtccaacttacgactctttcctctatggttcatgtttttttgtgtcctattttaaaatctctccttatcccaaggtcataaag

SEQ ID NO: 349113 - DNA, 608 bp, Homo sapiens
atggtagctgtgttagtcaggtttctgccgccctaatactgtgtaacaaacaaccctcaaacccagtttcttacaactgcaaacatttgtaggtttgtgggtttgcagttcagttgtggtcttgctgaccttggctgaatttggctgagcaaagttatatttttaagctttaggcctagatatatttatgcttttgtcagattcaagtccacttcatgtgtctttgttctgagacttgggctgaaagactaatgactctctggggcatgcttttcccacagcaaagggcagaaactcaacaggactggtgaaatgttacaatactcttaaaattatggcttagaactggaacacagtcatttctgcccactgatcaaagcaagtagaatggccagcctcaaagtcaatggggtaggaatgcatactgtccctccacaggaggagtcactaccaagccaaatgacaaagggcatgaacagttctaccctggggagaaagtgaggcattaagagcagcatttctatctacyttggtggctgaagtatgatcaaatggaaatctacattgttttccccacgtagatttttccggtgtgcaagattggaatt

SEQ ID NO: 349114 - DNA, 538 bp, Homo sapiens
gccacccagtttgtggtactttgttatggcagccatagcaaactaatacattagctttgcaacttaggacaaaatacttcaaagtatgaagtcttagtttccttatctttaaaatggcagtgacatcagtagctgtctcatagggttggtgtgaggttttgttggtaaagtgtataacatagagaccggcatataggaagtcttccctacaggtgtgtgagcgtcatcatcgtcattatcagtactaactagtaatagttgtcttctcccacatttctctgtagtagtcagtttttcggtatgcccatttaatttcctgtaatcctgtttaaagtggatatatcccttacatgcccatccatgtctgggtcctcacatgctgcttcagtgttctcttcatatcagaggctgaatgtatgcttgaagaggttgtgactatagccttaaatagcccagagcatttggaaatgttctttcaagccttactctaatttkgggtttgccttgtaatatatgtgcatttgtttaaatataaaaa

SEQ ID NO: 349115 - DNA, 537 bp, Homo sapiens
gcatgtggcacatctttgtgagtgtttcatgtgagttggagaagaatgtgtgttctgctgttgttggatgaagaaatctatagatgtgaattttttctggttcacttgtggtggtggtgaattcaactatgtcctttctgattttctgcctgctggatctattcatttctaatataagggtgttgaagtctccaaccataataatggattcatctatttctctttgcagttctgtcagtttttgcttaatgtattttgatgctctgttattaggcacgtagataaagattattatgtcttcttggagaattgacttctttatcattgtgcaatgtctctctttatccttggtaactttcatgcattgtagyctgccctgtctgaaataatatagccactgtcttagtttattttatgtttctataacagaatacctgacactaggtaatttataaagaaaacaggtttatttagctcatggttctacaacatgggaagtacaagaagcatagcagcagcatctgctggctttgggtg

SEQ ID NO: 349116 - DNA, 572 bp, Homo sapiens
ggtatactttcattaatatgtaccatatttgttactatttctatttactgtttatgttctttgttcctatttttgtctgtgactctttttctgccttgtggttttaatgatacatattttataattcaattctctctcctttctttagcacgctatactaaagacttattttataacttatttagtggttatacttcttttttcacttatttagtggttattctagagtttgcaatacacattcacaattaatcaagccaaattttaaataacaatataccactttatgggtactgtgagtaacttacaataacaaaacaawactaatttcttcctcccatcctttctatcatttctctagtgaaatttacttatatataagcaaaaataagtattagatatcctatatatggtaatatgagcatatgtaattgatatgttgttacttttattttgaataaattgttttctgttaaatcaatgaagaataaaaaaacaaaaatttttattttaccctcacttagtttttcttcaatccttgtcttttcttaatagatctttttaaatagagt

SEQ ID NO: 349117 - DNA, 484 bp, Homo sapiens
caaaagttgacaaaagagatttaattaaactaaagagcttctgcacagcaaaagatagtatcaacagaataaacaggcaacctacagaatgggagaaaatatttgcaaactgtgcatctgacaatggtctaatatccagcatttgtaaggaacttaaacaaatttacaagaataaaacaatcccattaaaggacattaacagacatttttcaaaagaagacatacatgtggtgaacaatcatatgaaaagaagctcaacatcactgatcattagggaaagggaaatgaaaaccatgaaataccatctcacacaaatcagaatgggtattattaaaaagtcaaaaaataacagatgctrgcatggttgtgaagaaaaagtaatgcttatactctgttggtgggagtgtaaatttgttcagccatggtggaagacaatgtggtgattcctcaaaaaactgaaaacagaaataacatttgacccaac

SEQ ID NO: 349118 - DNA, 588 bp, Homo sapiens
taaacaaccaagatgtccttcaatcagtgaattgataaacaaactgtggtacactcatccagtggaatgttattcagccaaaaagataaatgagctatcaagccatagagagacatggaggaaacttaaatgcatgttactaagtaaaagaagccaatctgaaaaggctacctactctattattccaaccacaaaacattctggaaaaggcaaaacttcagagaaagtaaaaagattagtggttgccagaagttcaggaggaggcaaggttgaataggtggagcagagaagatttttttaaagcagaaaaactgctctgtacgatagtctaattgtggacatatgacaaaacgcatttgtcaaaacccattgaacttgaatgcacatacaatggaccttaatgtttgcagatttttaaaaaccgttttcaagarcaggggaatcccagatgaatgcagaatatgactaaaaatcctaattctattaaaatatataaaacaccttcactgaaggcagtgggggaaaacaatgctgactttagtaattttggaaatgtgtagtctgtaaaattaaatgaaaataagactg

SEQ ID NO: 349119 - DNA, 590 bp, Homo sapiens
tcagacttctcaggttcaagtcctgtctctattatttacttattataaaacgtcaggcaaggtatttcacttctctaagcttgaatttccacatcttaaattcttctttgtctttattcttacttggaaaattgtgtaatcttgagcatgttttttgaagtctctgagcctcagataacctatctgtgaaaatgaagcaataacaatatctctatctcaggtttgctgtaagcatmaaaaaaaaaaaatccatatgaaaacactttgaaaaccatcaatatggagagataagattttgttatacataaatttatagcctgtagttgagacatgatgttaaagagtcatatttcacaaaacagaatattcctgcagcaggcagtcattagcagaattgaaattcaggtccaattttcagagttcagtttacttgttcaaagaaagaccgactgattgatggaaaagtgttgtgattttctcagtctcaagggtctgcctttcccactgttccttagagcttgatcagacaattaaaaacaaggggtcagggtataactgaaaataaaatgattttgtgccatatgccaatg

SEQ ID NO: 349120 - DNA, 588 bp, Homo sapiens
agcagttcagaggagtaaagggtacgtagccttggccgaggggttgtggggcacataagagaagctgatttggcctctgtcctctagagaacatttactattataagggagcccagatgcacacaaatgaaacaatgagctgctgaaagccaagagtcaagcagtcattgttactggggtggattccttaaacatctcaaaatgtctgtttttttttgttttttaacacaaggcaaatatttctagcatatgcaaatattcacataaaaatttgtatttctcgaatgtggattagcttgtatcctagcaatctctgtttaggtttcctctaacaggaatagaactaaaaataaatcatatgtcattagataatctcagagtacatccattaatttccyttcctgctaaaaagcaatgaaattatggtttgggctgtgttgagaacattacatgaaaaatgaggaaagggaatcaagacagattagaacataattatgtgggctggaattcagccagacccttcaaagccttgccaagttggtgacatcctatgtccatcctctaggtaaacctggaaaatgagtactt

SEQ ID NO: 349121 - DNA, 506 bp, Homo sapiens
aaataaacatatataacaaatccttatatgctaggtgaaaaagtagaaattcttgctaagatatcttattctaaaacagaaaaaatacctgctgctttactgtctaaaatgtcatcgctcaaccattttcactggtttgtggttgagatgggattttaaaaatcccaacataatcaaagtagtagcacaaggcactgttttgttttggagtgggcttttttttggcaaatgatgcaaaacacttttytaatgtagaaatgagaaatgtggaaacataggctggaactgtagcatggccaagatgattataacatagttgacgttttcttcacatggttaatcattactttttcgtaggtgggaagaagaaattagactaattaaattgtgatcattgtcatatgaacagctctcaatgtgcattcattggaatgaaatatagttgtcaattctttgatgtcagacctgtttcggattccagtttctctacttacatgtgtagttta

SEQ ID NO: 349122 - DNA, 563 bp, Homo sapiens
tgattcatagtagtccttggaaatcatctataagttaatctgatattgacttttcccaggcatgaaattygattgggcttatttatatacaaaatgtatagatcacgacttccttaaggtcagggacaacatctgattcatctccattcttttttgcccactgacttgtgtggagtaagtatgccaatatgtattttctgaatgactccgaatatgctttattggataagccagcacttaatgattttaatcaacttcgtttgaatcaaaataggtttaaaacttagttgcatggtaataaaaagtcctgagagatattgtcaaatgataacaccactgtctggagtgggatacacaatagaaaacagtcctgctcctaacaaaagcaagctcttgcctttgatgacaagcactgatccaaaagcagagagaaaaatgaggctagaaggctatttatgtttgggagaattacagttcaggtgggaacacacaaaaaaatctggtagaatcatgccaaaagagaatcttcttatacaaagatttggttttgataaatcagcacc

SEQ ID NO: 349123 - DNA, 563 bp, Homo sapiens
tgattcatagtagtccttggaaatcatctataagttaatctgatattgacttttcccaggcatgaaatttgattgggcttatttatatacaaaatgtatagatcacgacttccttaaggtcagggacaacatctgattcatctccattcttttttgcccactgacttgtgtggagtaagtatgccaatatgtattttctgaatgactccgaatatgctttattggataagccagcacttaatgattttaatcaacttcgtttgaatcaaaataggtttaaaacttagttgcatggtaataaaaagtcctgagagatattgtcaaatgataacaccactgtctggagtgggatacacaatagaaaacagtcctgctcctaacaaaagcaagctyttgcctttgatgacaagcactgatccaaaagcagagagaaaaatgaggctagaaggctatttatgtttgggagaattacagttcaggtgggaacacacaaaaaaatctggtagaatcatgccaaaagagaatcttcttatacaaagatttggttttgataaatcagcacc

SEQ ID NO: 349124 - DNA, 556 bp, Homo sapiens
cacaagtgggagttaaacaataagaacacatggacacagggaggggaacatcacacactggggcccgttgggggttgggggcaaggggagagagagcattaggacaaatacctaatgcatgcagggcttaaaacctagatgacaggttgacaggtgcagcaaaccaccacgacacatgtatatttatgtaacaaaccttcacgttctgcacatgtattccagaacttaaagtaaaataaaaatgaaaaaaagaaataagaatcgtctgcagtttaccaatgaaaaaacagaggctcagagwagttttctttataataagagtggacccatgcttatttacattgcatcaatggggagaagaggaaaaattacaatcttttcttaacagaagagtagataagaaaaatagagtatttctgacttgcttggcctgttgtgcattttgttcagtgatttctagattattacggtagttcaattttatagttagaagcaaatcaaaaacagttaaatgtagaaaaaaggcgaagcaatgttctagaagattataccccaa

SEQ ID NO: 349125 - DNA, 606 bp, Homo sapiens
attcaacaaactctaggaagttccaaactttcccacatcttcctgtcttttgagccctccaaactgttccaacctctctgcctgttacccagttccaaagtcacatccacattttcaggtatctttctagcacttccccactacctaggtaccaatttactgtattagaccattgtcacactgctataagaaatayctgagactgggtaatttataaaggaaagagctttaattgattcacagttcagcatggctggggaggcttcaggaaacttacaatcatggtggaaggcaaaggggaagcaagggatcttcttcaaaaagtggcaggaaggagaatgaatactggaggaactacctaacacttataaaaccatcagatcttgtgagaactcactatcacaagaagagcacaggggaaaacaccccatgattcaattacctccacctggtctctcccttgacacatggggattgtgaggattatgagtcaagatgagagtttgggtagggacacagctaaaccatataagtgtttttgtgcctccttttatggattcactcccttagctacaagattttttgatcactgctgcaaaccctttc

SEQ ID NO: 349126 - DNA, 606 bp, Homo sapiens
attcaacaaactctaggaagttccaaactttcccacatcttcctgtcttttgagccctccaaactgttccaacctctctgcctgttacccagttccaaagtcacatccacattttcaggtatctttctagcacttccccactacctaggtaccaatttactgtattagaccattgtcacactgctataagaaatatctgagactgggtaatttataaaggaaagagctttaattgattcacagttcagcatggctggggaggcttcaggaaacttacaatcatggyggaaggcaaaggggaagcaagggatcttcttcaaaaagtggcaggaaggagaatgaatactggaggaactacctaacacttataaaaccatcagatcttgtgagaactcactatcacaagaagagcacaggggaaaacaccccatgattcaattacctccacctggtctctcccttgacacatggggattgtgaggattatgagtcaagatgagagtttgggtagggacacagctaaaccatataagtgtttttgtgcctccttttatggattcactcccttagctacaagattttttgatcactgctgcaaaccctttc

SEQ ID NO: 349127 - DNA, 623 bp, Homo sapiens
gctgctaccaagatggggtgtcattagcttgccctgtgttcatcagggactgagggcacaggctcactggggaagatgaaaggaagtgcagacatttcctctgcctaatggatgaaaaagaactaatggacagggaaaacatctccaagtgcaaggaaacaattttgtctgagagggaaacactgttatattacttctgaagtgttcagaaagtataaattaaatcrattgcaagaaagcattatatcacagtaagttcttattgagtgaaaaacaagataaatatagcactattggaaaatgctagacttactgagcttgttgtaataattgatctaattaagtttcaaaataaatagaatattaacttacaaagaaaatttcacaaggaggaaagcaaaagaaggaatatgaacatatagaaatattcttaatacagaagaccccaaaaatgtaaaaaaaaaaaatgaatgatcagaaatcccactgatatcaggagaggaagatcttgctgtaaactttcctcttcattaaataattttcaaaaatgaccaataatattatctacttcactgaggttgataatatctatcattaaaagaggaatacacaaaactgaattt

SEQ ID NO: 349128 - DNA, 579 bp, Homo sapiens
agtggttaccatggtgaatctaagtgttcagagaataatttcaaatcgaaactccagataatgcttatgccacagcaaaagaaagatcagctgtcaatggtgtggtttctcagagccacataacaaatataccaatttatgcctaatattggaaatcttctagtccaaccttactgggtacttgttggagtatcagaagaggttgawtatgtttttccaggttcactttcttccttgggatgtcacagaactgaactctatcagaaatatgctagggcatgttttattctcttctgcatcctctgtcagaaacagccaacaagtgccattttcaagtcgctacagatctcacctagacccttggaaatatcaggttctgctggattctgatcaagagtgcccacgcagtaacttagaatctgaccagcatgccaggactcacatctagctcttcccaaaggcacacgtgggcagggattctcaaatcatctggggatgtcgataaaccacagatgctgactcagtgagtgtggggtgaggactgacactcttaatttccaaaagctcccaggtgccact

SEQ ID NO: 349129 - DNA, 592 bp, Homo sapiens
agaaatttcctctctaggagctgaaatgactgtgggctttgaggtaaatcagttaagattttaagacccatagttgtgttaatcataatagctggcaygtattaaattcttcataagcttattcagttcccataactctgtaagaatcccagaggctcttctaagccccctttttaagtgagaaagctaggatttgagagaggttaaataatctgcccaatgacgtgtatcttgctagtgataaatctgagactggaacccagatcccaaattcacaatcactgctttgtgattgggaagctgttacacaagggactcattacagggcagcaggtgtaaacactttttgatcttagctatttataaataaacttgaaatagaatacattagaatgtctgagaattcaaacaaatggcaatttaaaggaaatattaggacttcttggaattcactgtgctcctaagtcccaaatgttgtttccctaaagctacgtattttcttatttttacttgacaaacaaggaattaacattttcagactgatagaaaatgctggatttcctttttactgatactattattgaacaaaacc

SEQ ID NO: 349130 - DNA, 577 bp, Homo sapiens
cattttcagactgatagaaaatgctggatttcctttttactgatactattattgaacaaaaccaacttttgacatgttccttgtgtcacatatttgaaactcaaatgtgtcttcagttgttttaaatgactgtttactgcagcctctggtttgtgtcattgacaattatctttggaaattaagcctggaaagggaggaactgtgacagaataagcaccattgggaaattgctgggttcactggtcatatctgtgcctcattggtatttcccatttaagatatcatatgttcacatcagtcttggaacatgttgacctgagagtttgcttgcaattcaccccttctgctgtcctgcaaaatcctgcattgtccatgctgtctgttagccattgtgttatcagaatctatgtggccatttcattatcagaattygatatttgaaagaatacatacatttttcaccataaaataaaaagaattatcatggcagaaggaaagaaaatcagaatttgaaaagcccttattatcaggtagacacaatagcacacttatctctcaatattatctcatttcagcc

SEQ ID NO: 349131 - DNA, 567 bp, Homo sapiens
gctagtctaagcatttcagctgttttctgagagatgttaacaaacatttcaaccttggtggattatcacaatttgcctacagcattttccagggatttgcataaactagcaggctaacgtgaggcatagatgtgttacctattcatttttattatgcagtttaytttggaattctctttgcctgagtatcaactcacaagtggcacttatttctgtatactctttatttttttattcattttaaaaaataaactctttatatataataaatatgtatatggccttgcatctctgaagagcagaaacagatgaacttgaactagaaattagagcttaatggtaggaaacaatgatatggaagctaagaagaaaggtgactagtggtaaaccaagaggagtgatttaaaaaatgttatgaaataaaaatcaaataggaaggcaaaaacaaaatggcatcatggttccaagccatgtacaaaattgaaaaaaaagtaaccccatgatgttactaagcactgtgattctatctgtgcccttatctctcccaagcctccttagagaagtaaa

SEQ ID NO: 349132 - DNA, 492 bp, Homo sapiens
tgaataatctctgacctatcatgtttatgaagaaattctgtgctgagagatagagaaatgggagggttttcataccttattaatttagaattatataaaaattaattcacctggttctgggttaaattttgcattagtcttggttttttaagttaaaaatgaccaaaccccaagtcaagctggcaaaataaatacataagtacatgcatacacattggatacacacataaactgaagtactcttgtgtrtccaattgcagggatagctgggtccaggggctcagagaatgttaatagatatgtgactgtgtatcagtaccacttatatatgtgtgttggcctaattcttacagaaactggctttgtccatgtatcatgggcaaatggtcaaaagaagctacaggttacgtcgtcatagttctagatgcaaagaagtctttctcttccaggcttcttctaagaaacctcacttcagattctggttcagtttgg

SEQ ID NO: 349133 - DNA, 492 bp, Homo sapiens
tgaataatctctgacctatcatgtttatgaagaaattctgtgctgagagatagagaaatgggagggttttcataccttattaatttagaattatataaaaattaattcacctggttctgggttaaattttgcattagtcttggttttttaagttaaaaatgaccaaaccccaagtcaagctggcaaaataaatacataagtacatgcatacacattggatacacacataaactgaagtactcttgtgtgtccaattgcagggatagctgggtccaggggctcagagaatgttaatagatatgtgactgtgtatcagtacsacttatatatgtgtgttggcctaattcttacagaaactggctttgtccatgtatcatgggcaaatggtcaaaagaagctacaggttacgtcgtcatagttctagatgcaaagaagtctttctcttccaggcttcttctaagaaacctcacttcagattctggttcagtttgg

SEQ ID NO: 349134 - DNA, 639 bp, Homo sapiens
aaacttgtgaatattgttgtcctctttttatagatggcaaagcaggctagaggggtttgaaattattgagccaggattcaaaactttgctttcttattccaaacctrtatacaaggttgatttacataaactatcatgaagaaagtttttaataatttccactttagcctaacatctggtaactgtattaatcagttattgctaccatactgctgtataacaagttaaactaaaactcactgccttgagacatttgttgtttgcttatgggttggtgagttgtctggagcttgatctaagcaaggcttggattcgtgctgtagattggattcaagtacaggccaagtttttccttctgaggctcaggctaaagggcagcatcttcctagggcatagtcgtctcatggtcaataacaagaagacaagagaaacatgtaatacctctcaagaatatggactagaacaggcatactgtcaatttcacctacattaaattagctaaagcaagtcgcatggccaaaaccaatatcagtgtgatgagaagtgtggaaattagtgtggatgctgagagcagggtaggtatgtaaagaaccgcagcagtgcttacatccaccatagtcacccttccttttcttctca

SEQ ID NO: 349135 - DNA, 639 bp, Homo sapiens
aaacttgtgaatattgttgtcctctttttatagatggcaaagcaggctagaggggtttgaaattattgagccaggattcaaaactttgctttcttattccaaacctgtatacaaggttgatttacataaactatcatgaagaaagtttttaataatttccactttagcctaacatctggtaactgtattaatcagttattgctaccatactgctgtataacaagttaaactaaaactcactgccttgagacatttgttgtttgcttatrggttggtgagttgtctggagcttgatctaagcaaggcttggattcgtgctgtagattggattcaagtacaggccaagtttttccttctgaggctcaggctaaagggcagcatcttcctagggcatagtcgtctcatggtcaataacaagaagacaagagaaacatgtaatacctctcaagaatatggactagaacaggcatactgtcaatttcacctacattaaattagctaaagcaagtcgcatggccaaaaccaatatcagtgtgatgagaagtgtggaaattagtgtggatgctgagagcagggtaggtatgtaaagaaccgcagcagtgcttacatccaccatagtcacccttccttttcttctca

SEQ ID NO: 349136 - DNA, 603 bp, Homo sapiens
aatactatttgttccaccaaggagtttcctatcctttttattttcttctaattattttttcatactgcctcagtttgttctcatacaccatcaaaacaataaattaagcttaagtgattctcaaaaactagtatgaaaatatggtgctttaaactttgaaaacaagccactgtgtttttgacrtacatgcaaattgagtattctactgtagaagacagcacagaatcctaaaagatcacagcctatcatttgttacctgttcctcaaggtataagaaaagaaactaaggttctctttgaatttaaatagccaaggtttcagtggaccaaaaggcatctccttccctgccttctgattccatctgaaataagctacatgaaatccatataactaaactttgtggttgcattggagaatgtacttaacaggatcatatgtcaatatgtcatgtgaatggaatgactttaaatgtagaaggcatttgaatggtagaaatagtctctcctttgcgaagtattatgcgaaggaatgagactgggtaaaatttcctttaaatagactcaccatcgcactctactccttagcaactgacctctccccctg

SEQ ID NO: 349137 - DNA, 349 bp, Homo sapiens
tttttaaatgaaggttttggaaaaccagaggtatcccattgagaatttataccatattttttgagatggggataggaaagggtggatgaaaagatatactgaggatacttggtaatgagatgcacattctcttttttagagataaagatagaaaagattggccggagagagaagcttgttaacttacaggcctgactctaccagcaaactaacagtctgcttagaatttttccagaaggaatggctggctacttsgcagctcttttttttacactgtttccttgggacctcactagctgcatgtggatcagatttgtctaattgagaagccaaaatatttagaagtact

SEQ ID NO: 349138 - DNA, 547 bp, Homo sapiens
tgatagaaaaccattgcaagctacctgagacctattttcctaattttgttcctgtagatacatttcagatgttagaggagggaacatttargctgtaagatccaattcaggcatcctgtttctctctgagctattaattaaacttgactcctgaaacgccaataaattgcaaagggcttccaacttgctacagttctgtaatatttcaatcaaagtttctttatgatccttgttttcttcccacgctcctccaccccaagaacatctgaaagcaattttaaaaactcaacatgcaatgtaagaatgaattactgcaatcagtcaaagagatcacattagttcatgaaaagtagcatggttgaaaaactgcactaggaagatcaaggattcatattaaagagggggttggggcaaaagcaaaatgaatggcttttaataattttaaaacatggttgatacaaggtgtagaagctttttgcttctaaaacaaactggttttcttatgctaaaaccttgttacaaagctgatgccaatctcctgcttgtt

SEQ ID NO: 349139 - DNA, 568 bp, Homo sapiens
ctggcctgtccctgggaagccctaactcagcaagtctggattgaagtccagggatctgtattttaaacaaatattacaggatattctgagagctatatccttctgtcctaagtgctgacttaaagctgaggtgggagatagcaacaaggccttcacttacayttaattctgatttcactttctgttgtcactcctcccagccccagagggtaaatttctcagcttttttcctgtgaacaattactctcaaacacactgtgcaatcttcatttctgagattcctaacctctagtagctcatgctttcaagccaccaaatccatcagctggaaacagtttttcatggcatgttgaacaagacagagacaatgtgacccctgagacactgcagagtaaggtaatgggtaaaaacttatgttcgcaatgttgtaaccttgagaaatcccgcaaggctgcctgtgtcttcagtttgcgtactcataaagaaaaaagctataacttgcctttctttttggatatattgggagatttcattggttattccaggcaagaaaatgagccaatgcata

SEQ ID NO: 349140 - DNA, 568 bp, Homo sapiens
ctggcctgtccctgggaagccctaactcagcaagtctggattgaagtccagggatctgtattttaaacaaatattacaggatattctgagagctatatccttctgtcctaagtgctgacttaaagctgaggtgggagatagcaacaaggccttcacttacacttaattctgatttcactttctgttgtcactcctcccagccccagagggtaaatttctcagcttttttcctgtgaacaattactctcaaacacactgtgcaatmttcatttctgagattcctaacctctagtagctcatgctttcaagccaccaaatccatcagctggaaacagtttttcatggcatgttgaacaagacagagacaatgtgacccctgagacactgcagagtaaggtaatgggtaaaaacttatgttcgcaatgttgtaaccttgagaaatcccgcaaggctgcctgtgtcttcagtttgcgtactcataaagaaaaaagctataacttgcctttctttttggatatattgggagatttcattggttattccaggcaagaaaatgagccaatgcata

SEQ ID NO: 349141 - DNA, 592 bp, Homo sapiens
agctcatgctttcaagccaccaaatccatcagctggaaacagtttttcatggcatgttgaacaagacagagacaatgtgacccctgagacactgcagagtarggtaatgggtaaaaacttatgttcgcaatgttgtaaccttgagaaatcccgcaaggctgcctgtgtcttcagtttgcgtactcataaagaaaaaagctataacttgcctttctttttggatatattgggagatttcattggttattccaggcaagaaaatgagccaatgcataatgatttacttctttaaaaagaaccgggatgagtcttctaaagaaaatcaggcaggatgcatttttaaaattgcaaaagtttttcttatttatgcttccttcaaattgtattttctcagaaaagggttagaagaattaaaaaatgccttgggctttctctggatagggcaagataccctaaagatcaaaagcttgtctttcggactttgaattcccattttccatgtattagctgggaggccttagaaaagtcattcagcctctttgaacattggtgttttcatctatcaagtgggaacactctacctcataagatt

SEQ ID NO: 349142 - DNA, 592 bp, Homo sapiens
agctcatgctttcaagccaccaaatccatcagctggaaacagtttttcatggcatgttgaacaagacagagacaatgtgacccctgagacactgcagagtaaggtaatgggtaaaaacttatgttcgcaatgttgtaaccttgagaaatcccgcaaggctgcctgtgtcttcagtttgcgtactcataaagaaaaaagctataacttgcctttctttttggatatattgggagatttcattggttattccaggcaagaaaatgagccaatgcataatgatttacttctttaaaaagaaccgggatgagtcttctaaagaaaatcaggcaggatgcatttttaaaattgcaaaagtttttcttatttatgcttccttcaaattgtattttctcagaaaagggttagaagaattaaaaaatgccttgggctttctctggatagggcaagataccctaaagatcaaaagcwtgtctttcggactttgaattcccattttccatgtattagctgggaggccttagaaaagtcattcagcctctttgaacattggtgttttcatctatcaagtgggaacactctacctcataagatt

SEQ ID NO: 349143 - DNA, 614 bp, Homo sapiens
atgatgaaaacttagttatgccaacatatgtactggaataccacaatgtataacatgttatattatggctgtaaccaggcaaacagcctagagaggataagcacctatattctactaaatrgttaaattgttaatcataaaagtcttgcatgtgctcaaatggttgctcaaaagggatgctaatagtggtgcagtcaaactattctctacacgtcacacacctctatgaggatctgtggagtaaatattctctgccaaatcaccacgacatttagcatgaggaggcatggaactgaagtgccatcaaagttggttatgtacttttattgttcaagagggaaaatctgtaccatacttcaatcatagctgcaaataatggagaggcattgattgatcctgataaatacaagtgggggtctaaaaaacatacagtaacagaatggtgaacccatgaccccacttcatataatatcttataagggagcacacttgtatttttgtgttcagtttatacatgttttattcaatatgtctcatatcaaggtcctcactaatagattctacgaaatgcttccttataaaactagaaaagtggttcgtctaatggaaaaagc

SEQ ID NO: 349144 - DNA, 614 bp, Homo sapiens
atgatgaaaacttagttatgccaacatatgtactggaataccacaatgtataacatgttatattatggctgtaaccaggcaaacagcctagagaggataagcacctatattctactaaatagttaaattgttaatcataaaagtcttgcatgtgctcaaatggttgctcaaaagggatgctaatagtggtgcagtcaaactattctctacacrtcacacacctctatgaggatctgtggagtaaatattctctgccaaatcaccacgacatttagcatgaggaggcatggaactgaagtgccatcaaagttggttatgtacttttattgttcaagagggaaaatctgtaccatacttcaatcatagctgcaaataatggagaggcattgattgatcctgataaatacaagtgggggtctaaaaaacatacagtaacagaatggtgaacccatgaccccacttcatataatatcttataagggagcacacttgtatttttgtgttcagtttatacatgttttattcaatatgtctcatatcaaggtcctcactaatagattctacgaaatgcttccttataaaactagaaaagtggttcgtctaatggaaaaagc

SEQ ID NO: 349145 - DNA, 614 bp, Homo sapiens
atgatgaaaacttagttatgccaacatatgtactggaataccacaatgtataacatgttatattatggctgtaaccaggcaaacagcctagagaggataagcacctatattctactaaatagttaaattgttaatcataaaagtcttgcatgtgctcaaatggttgctcaaaagggatgctaatagtggtgcagtcaaactattctctacacgtcacacacctctatgaggatctgtggagtaaatattctctgccaaatcaccacgacatttagcatgaggaggcatggaactgaagtgccatcaaagttggttatgtacttttattgttcaagagggaaaatctgtaccatacttcaatcatagctgcaaataatggagaggcattgattgatcctgataaatacaagtgggggtctaaaaaacatacastaacagaatggtgaacccatgaccccacttcatataatatcttataagggagcacacttgtatttttgtgttcagtttatacatgttttattcaatatgtctcatatcaaggtcctcactaatagattctacgaaatgcttccttataaaactagaaaagtggttcgtctaatggaaaaagc

SEQ ID NO: 349146 - DNA, 568 bp, Homo sapiens
tttcctttcatagaaagaaagaacccaagcatccgtgtacgctgccttgtgctacctgctgagcttgagctttatccctttatactcacaaccacccttagggacaagttttaatcatataatatatatgaggaaactgaggctgagggacagtgcttttcctggggccatgcataagcctgaaatcatggagtctgcaggtaagtgctatatcacccagtatatcaaattgtttttttattccaacccaaatactggattcagaaatctagtgcaggacatccctctataatgacggtgttcagcagaactttctattgtgrtggaaatgttctacatttgtgttgtctaataaaggagccgctagccacttgtggctattgctatcagcacttcaagtgtagctactgtatttgaggagctgaatttctaatttcatttcaatttttaaaatatttatttcttttagctaggatttgaacttaattatttaattttaagtaacaaatttaaatagtcatatgtagtttgtgactaccagtttgccgtacaacttgcctagctacaa

SEQ ID NO: 349147 - DNA, 561 bp, Homo sapiens
agtttttgttgttgtttgttttgttttaaaaaatgaacgaaaacccctatagtcaaaactcgagggtcagttagtatatatacagggagaacccactggctgctaatatgtaatctctaatccaatccaagcaccacatttaatggtgggaaagcggaggcccagagatcaaaaacaatttgcttaaagttgtatgaattagttgcagcattttgtctaaaaactccattttgtactgctcagactggggttgattaatttgggaattataatagagcttactcttttttagcccatacgtggaataaagcaagcctggtggattttgcttgcggmgttcatcacacatgttaaaacgttaggagactgaaatactgtgcgacctttgacaagaatgcttcctcttccttccctactgaccttgctcctctgctgtctgcctcaggctcgatttttctgtttcctgcctttttctgaatatttagagttttccttctattgttccctacttccctgcagccattgttgcatgaacagccagattatatagcaaatagtggc

SEQ ID NO: 349148 - DNA, 571 bp, Homo sapiens
gcacaagagcctggaaagtacagtctgcagtgggcagcctctccttgcccagagcagagcagggcaatgatgatgagtatatctgaaagcatgaagactcagaacacacccctgcatccattcaacttggaggggaagatacaaggaagccaggttgtggccayaaactaaagccttgttctcaaactgctttaccagtaagaaagccaaaatgttattttaatcttcatttttaaaacatacaccatctctcaatcgacttggattttactgggaaaagaaaaggggtttgataagtagtatattctaccctcacctcaaatggtgaataaggttaaatgtaaatattatatatatccatatatatgtaaacatactgtatatttactcaaactgcacataaaatattcaggtaaaattatcattttaggagaaacactgttttagtagtattctcatcacttgctttatcaaagctatcaagcattctagtgttactatgaaaataactaattatttctatgataatgaagaatttaaatagctcagtatgataaagtagattcaaacc

SEQ ID NO: 349149 - DNA, 576 bp, Homo sapiens
aatgatgatgagtatatctgaaagcatgaagactcagaacacacccctgcatccattcaacttggaggggaagatacaaggaagccaggttgtggccataaacyaaagccttgttctcaaactgctttaccagtaagaaagccaaaatgttattttaatcttcatttttaaaacatacaccatctctcaatcgacttggattttactgggaaaagaaaaggggtttgataagtagtatattctaccctcacctcaaatggtgaataaggttaaatgtaaatattatatatatccatatatatgtaaacatactgtatatttactcaaactgcacataaaatattcaggtaaaattatcattttaggagaaacactgttttagtagtattctcatcacttgctttatcaaagctatcaagcattctagtgttactatgaaaataactaattatttctatgataatgaagaatttaaatagctcagtatgataaagtagattcaaaccatggcttagttttccccatctttggaatactaaactggagtaaaggatttaatgcttctaatatgaaaac

SEQ ID NO: 349150 - DNA, 576 bp, Homo sapiens
aatgatgatgagtatatctgaaagcatgaagactcagaacacacccctgcatccattcaacttggaggggaagatacaaggaagccaggttgtggccataaactaaagccttgttctcaaactgctttaccagtaagaaagccaaaatgttattttaatcttcatttttaaaacatacaccatctctcaatcgacttggattttacygggaaaagaaaaggggtttgataagtagtatattctaccctcacctcaaatggtgaataaggttaaatgtaaatattatatatatccatatatatgtaaacatactgtatatttactcaaactgcacataaaatattcaggtaaaattatcattttaggagaaacactgttttagtagtattctcatcacttgctttatcaaagctatcaagcattctagtgttactatgaaaataactaattatttctatgataatgaagaatttaaatagctcagtatgataaagtagattcaaaccatggcttagttttccccatctttggaatactaaactggagtaaaggatttaatgcttctaatatgaaaac

SEQ ID NO: 349151 - DNA, 576 bp, Homo sapiens
aatgatgatgagtatatctgaaagcatgaagactcagaacacacccctgcatccattcaacttggaggggaagatacaaggaagccaggttgtggccataaactaaagccttgttctcaaactgctttaccagtaagaaagccaaaatgttattttaatcttcatttttaaaacatacaccatctctcaatcgacttggattttactgggaaaagaaaaggggtttgataagtagtatattctaccctcacctcaaatggtgaataaggttaaatgtaaatattatatatatccatatatatgtaaacatactgtatatttactcaaactgcacataaaatattcaggtaaaattatcattttaggagaaacactgttttagtmgtattctcatcacttgctttatcaaagctatcaagcattctagtgttactatgaaaataactaattatttctatgataatgaagaatttaaatagctcagtatgataaagtagattcaaaccatggcttagttttccccatctttggaatactaaactggagtaaaggatttaatgcttctaatatgaaaac

SEQ ID NO: 349152 - DNA, 589 bp, Homo sapiens
acaatcttttaaatgacgcattggaactctttttcctaatactcaattaccattcccttccacaactcattgccaaattattgacccttcaattaatatgtatttagtttgacttactttttgtcttatcctgtaccagctattctaaatattaagttgcttctgagtcactcatatactgctatcaaaaaaatgaatgaatgcaattcattgcattgaaaaaaatagagtcagaaataatggaggcattgggctatttttgtcattaaccaaaacactttagaaatatttattcattatgctgtctctactttttcttcatatattagaaaagtagaccaagaagtaaccaaatccactgaattcaaatattaacacacagttcaacttcaccaactcattcaacacctattcattgagacctactatgtggcagacactgttktatgtctggcatgaatcccctggtacctagtatagcatcaggcatgtacaaagtggtcaataaatatttgttataaaaattggaatctaatgaattcagaattcactcaaaccagctcataaaaactaaaaggtttttattatg

SEQ ID NO: 349153 - DNA, 622 bp, Homo sapiens
ctactatgtggcagacactgttttatgtctggcatgaatcccctggtacctagtatagcatcaggcatgtacaaagtggtcaataaatatttgttataaaaattggaatctaatgaattcagaattcactcaaaccagctcataaaaactaaaaggtttttattatgttttctggacccattactttcctttgtctgaaaggagatgccaagaaaaaagagagaaaaagcccggaccactgcaagttagcacctaaaaggcagaacattatgaaaagcccgaacaacattataaacacattattctgcagaagatttaaatctaaagctacatgaaactgtattggttaagaattacttctatttcctttttttacctgagggtatatcctcagatattttaggacaggtaaattttccaagccattctaaatttatttaaccagttcatttctaagggagggagtcctcccmcgtggactgaacctcctcctcaccccctgggtattatccagttttgtcaacttcacaactcaggcagtaaaaaatgcacatttgaaataaactatttcattatgtgcattcgtacagttatggaacaaaacagcctttactcagcttag

SEQ ID NO: 349154 - DNA, 622 bp, Homo sapiens
ctactatgtggcagacactgttttatgtctggcatgaatcccctggtacctagtatagcatcaggcatgtacaaagtggtcaataaatatttgttataaaaattggaatctaatgaattcagaattcactcaaaccagctcataaaaactaaaaggtttttattatgttttctggacccattactttcctttgtctgaaaggagatgccaagaaaaaagagagaaaaagcccggaccactgcaagttagcacctaaaaggcagaacattatgaaaagcccgaacaacattataaacacattattctgcagaagatttaaatctaaagctacatgaaactgtattggttaagaattacttctatttcctttttttacctgagggtatatcctcagatattttaggacaggtaaattttccaagccattctaaatttatttaaccagttcatttctaagggagggagtcctcccamgtggactgaacctcctcctcaccccctgggtattatccagttttgtcaacttcacaactcaggcagtaaaaaatgcacatttgaaataaactatttcattatgtgcattcgtacagttatggaacaaaacagcctttactcagcttag

SEQ ID NO: 349155 - DNA, 444 bp, Homo sapiens
gtcagaaagcataaaatctaattgctcagtgggactggaaaagggcatgtgaattggcattctctcttscaggaagagaagagctaacctttcttagaaaaatggttggggcctctgtttcttcatgatttccacaggagactattccatgagcctttacttattgaagttctctttaacagagaagaaagtctttattttgtgtctagttgatgattttcttaatatattttctttttctcttattcaatgttatatagtgataaatattaatattatatataatatttataagaatatatcaatatgtgtataaatatcttatgaccgaagaataactatggtaagtcaatctttagctaactttctcaaactatggacctgaaaattcctttaaacataatttatgatctttttcgtcctgaagctcctcctgtttcatta

SEQ ID NO: 349156 - DNA, 579 bp, Homo sapiens
tgttaatttggtataatgttttaagcaacattaatgttataagcaacatgatgagaaatatggtttggctttgtgtccccacccaaatctcatcttgtagctcccatatttcccatgtgttgtgggaggaccatgtgggaaatgattattcatgggatcaagtctttcccattcttttctcatgatagtgtatgggtctcatgagatctgacgactttaaaaatcggagtctccctgcacaagctctcttttttgcctgccaccacccatgtaagatatgacttgctcgtttttctcttccaccataattgtgaggcttccccagccatgtggaactgtaagtcaaattaaacctctttcttttgtaaattacctagtctcaggtatgtcttcatcagcagcatgaaaatggactaatacaataaattgttaccatgagtggggtgctratgaaaagatacctgaaaatgtggaagagactttcaaactgggtaacaggcagaggttggaacagtttagaggtttcagaataagataggaaaatgtgggaaagtttggaacttcctagagacttgctga

SEQ ID NO: 349157 - DNA, 579 bp, Homo sapiens
tgttaatttggtataatgttttaagcaacattaatgttataagcaacatgatgagaaatatggtttggctttgtgtccccacccaaatctcatcttgtagctcccatatttcccatgtgttgtgggaggaccatgtgggaaatgattattcatgggatcaagtctttcccattcttttctcatgatagtgtatgggtctcatgagatctgacgactttaaaaatcggagtctccctgcacaagctctcttttttgcctgccaccacccatgtaagatatgacttgctcgtttttctcttccaccataattgtgaggcttccccagccatgtggaactgtaagtcaaattaaacctctttcttttgtaaattacctagtctcaggtatgtcttcatcagcagcatgaaaatggactaatacaataaattgttaccatgagtggggtgctaatgaaaagatacctgaaaatgtggaagagactttcaaactgggtaacaggcagaggttggaacagtttagaggtttcagaataagayaggaaaatgtgggaaagtttggaacttcctagagacttgctga

SEQ ID NO: 349158 - DNA, 579 bp, Homo sapiens
tgttaatttggtataatgttttaagcaacattaatgttataagcaacatgatgagaaatatggtttggctttgtgtccccacccaaatctcatcttgtagctcccatatttcccatgtgttgtgggaggaccatgtgggaaatgattattcatgggatcaagtctttcccattcttttctcatgatagtgtatgggtctcatgagatctgacgactttaaaaatcggagtctccctgcacaagctctcttttttgcctgccaccacccatgtaagatatgacttgctcgtttttctcttccaccataattgtgaggcttccccagccatgtggaactgtaagtcaaattaaacctctttcttttgtaaattacctagtctcaggtatgtcttcatcagcagcatgaaaatggactaatacaataaattgttaccatgagtggggtgctaatgaaaagatacctgaaaatgtggaagagactttcaaactgggtaacaggcagaggttggaacagtttagaggtttcagaataagataggaaaatgtgggaargtttggaacttcctagagacttgctga

SEQ ID NO: 349159 - DNA, 599 bp, Homo sapiens
gccttgccctgtgcagctaaacgaaagtaacaatcacatagtagagataaaatataaatattgtttccaaaaaaaagtagaggcaaatctttaataaaaccacaaataagaactggacaaagccatatatacagtaagtttgaaaaaattaacatgtcatattattcatgtatgtagttaagtgttactgctgaatgtrgatgttactgatccaaatatcagatggctggatgtgtagaatttggagctagtctgtatttatatacctggtgattactttacctataagaccactctagaccagcaatgggatgctagaaaaaatatatttgaactatctctttctcattttgaatcccaagattgagcaaataattcttatttaagttaataaaataatttccaactttcgaaaaatgaggtacaaataaacactctaagtaacttttttcatcattgtattataaaatggactttggtcttagaaaatgtgtaatgagaaataatagctaaatttagtgatgctgattaggcacactgctatgggctagggcaatgtattaaattcttaacatacattatcccaacaatactatcat

SEQ ID NO: 349160 - DNA, 599 bp, Homo sapiens
gccttgccctgtgcagctaaacgaaagtaacaatcacatagtagagataaaatataaatattgtttccaaaaaaaagtagaggcaaatctttaataaaaccacaaataagaactggacaaagccatatatacagtaagtttgaaaaaattaacatgtcatattattcatgtatgtagttaagtgttactgctgaatgtagatgttactgatccaaatatcagatggctggatgtgtagaatttggagctagtctgtatttatatacctggtgattactttacctataagaccactctagaccagcaatgggatgctagaaaaaatatatttgaactatctctttctcattttgaatcccaagattgagcaaataattcttatttaagttaataaaataatttccaactttcgaaaaatgaggtacaaataaacaytctaagtaacttttttcatcattgtattataaaatggactttggtcttagaaaatgtgtaatgagaaataatagctaaatttagtgatgctgattaggcacactgctatgggctagggcaatgtattaaattcttaacatacattatcccaacaatactatcat

SEQ ID NO: 349161 - DNA, 628 bp, Homo sapiens
tttaactgcctttctcgggaactgttggagtctgtaaagcagttagaggtcactggactggcctggaaataaacacctctctatctctagtagttttatttaatgaattaagatttaatgtaattattactttggcctttcaaattccaactacaaatatttctctcttcctaaattagggcaaaagaaaacacctgatcttctgtagtgatcattttatcaaatacttatataatatttcatcattttatcaaaagctaaaataacatgatataaaaatgastaattaatacaaaagaactaggataaaatgaactaagactaaaaagctgaataaatctaccaatgaactacgaatacaaatataaataaactaagaacataaaactgaataaacttaccaaaacaaaatatattcccaaaatatgtacattcaatcaatgctatcattctgaaacacaatctttcaacttggtctagacagtgaaatgatgttctttcttgctttcccacataagcaccagttgtcagtcatctgacagacttctgacagtttttagagtattggctgagtctccaatgctagtttttaactcagttatgacctcattatcttaaatagttcaga

SEQ ID NO: 349162 - DNA, 593 bp, Homo sapiens
gcctactttctccccttagaattatcctgtatttgtcattaagaaaaaatcagggaaatggagaatgttaacagatttaaaagctgttaatgctgtgattcaagccatgggtgygctacaaccatggctgacctccccaacaatgatcccaaaatactggcctctcatagtgatagatctaaaggattgcttttttaccattcctttagctgcccaagattatgaaaaatttgcttttactgttcctgccataaataataaaaaaaccagcagatgatctggttgaatggctttttctacctcacaatacaaccaaaacactcactctgtacttagatcaaattgctgtgctagtagggcaagcgaggctgcgcacaacaaatctaatgggatatgatccaaatcagattatagttccattaactaaacaacaaattcaacaagcctatattaattcccaagaatggcaggttaatttggccagttttgttggcattcttgataatcattatcctaagtctaaaatcttccagtttctgaaattaacatcctggatattgccttctattactcaaaaagcccctattgaagga

SEQ ID NO: 349163 - DNA, 521 bp, Homo sapiens
cagcaggaaagcagagaaggcatccctgcaggttggccctggggcagartgctggatcccagcaacggacaagttagttaacttaaaggggggcatcctcaaggcagtaaactggagccaagtgggttaaatccttcttgctgctattaaggggaggagacaggtttctgcagactctacattttggagagaaacagaaaagaatgtccccaagtctcctttgccctgcgatgctggggcagattggcaaggtcccaagagaagcacaatggtaaccgacgctgcccttggctgaacttcttctgttaaatccttcggatgtgagtagacttttatttaataattttttttcttttttttctttttttcaaatgagactgcatctcgctatgttgcccaggctggttttgaactcctgggctcaagcaatccccccacctcaccctcccaaagtgctgggatgctgggattacaggcgtgagccaccgcacccggtctgtagcctttaataatggatttta

SEQ ID NO: 349164 - DNA, 621 bp, Homo sapiens
cattctccacctgctccatatttataccttctgctgttctcttctggggcagatggagcactaaaacttaagcctcttttcaagattctataaatgattttctcccctttccyactccactctgtcatccttgcctaagttctgtctcctccctgtcccaccacccctgccgtactcaaggcacctgcctcccacaccaacccaggcccaggtagaaagttctgcgtttctcccatggtctcctgcctcctgccatccctcctggacactgctcttctttctgcctcccccaccactcgcccatcctccccacccacctggaaagccttcctctctgcctaagccttctggtgctactttgctggggccactcccctctattgagaggtgtgccctgtttggtgtgctgtgggtgtggctggctcccattaagtcctgaaactcctccaggacagagaccgggtcctgcttaacttggaccccccaaacctagtgcagatgtgacattcacccagtgattgcccactgactctggcatcttttgggaaattttcagcaccagagctgtggacagagacccttcccattaaactctttccgggctggctggggaggagactc

SEQ ID NO: 349165 - DNA, 632 bp, Homo sapiens
ctatttgcatgggtttcatgcatttctgcatatcttgtatccacttttattctggacaatctttacaggaagtttgtacagcaaacagagttcccttgtggcagaaagcaagtaaatttactgtccaggataataaagataatatctgcttacaggagaaaggttaggcagatttgcgtatagccccccttagaaggttgccatttcttaagctcagggctcatcaactcaaacataagccaactatatgtataacatatatgtgtaagcatcactctgtagggcaacgggggtgataggaatctttatgaacatgaagctcacactcatactgcctattgtgtggctaataaattcttttgtcactgaactgggagtcccatctcttctgccagcatctataaaactgtgtcagaataacttagtttgcaagtagttcaaaatctcagatatttcttagttcctgaatatatctgtgtctactattatatcatctgtatcaattacctatctatctctctatcrtctatctatctagagatatatctgagcaatttgctttggcaatagtaataatttttctaagcacgatatacacatttacacaatgatgaacaaaagtctaggcaggg

SEQ ID NO: 349166 - DNA, 488 bp, Homo sapiens
atatataccatagaatattatatatatatcacagatatataccatagaatattatatatatatcacatatatataccatagaatattatatatcacacatataccatagaatattatatatatatcacatatatataccatattaccatagaatatatgtatcacacatatataccatagaatattatatatataccatatgtatgtgataaatataaaacttgtatatatacacacatataccatagaatattatatataatcacatatatataccatatgtatatcacattttctttatacaatcatctgttaatggacacttyagttgattctgtgactttactattatgaatagtgctgtgacaaaccatacaagggcaggtatctttctgatgtaataatacctactcgtgtatgcttatcacagtactattcacaatagcaaaataatagaatttgctataatcacaatagcaaaataatag

SEQ ID NO: 349167 - DNA, 461 bp, Homo sapiens
tgatttattcccctaattctgtgaaaaatgacattggtaactcgatagggattgccttgaatctatgaattgctttgggcagtatggtcattttaactacatttatccttgcaatctatgagcatgggatgttttcccatttgtttatgtcatctgcaatttattttactagtgttttatagttctccttatagagatactttacctcctttgttaaatatattcctagctattttatttgttttataactagtgtaaatggaattgccttcggattttgtckttggctggatcattattagtgtatagaaatgccactgatttctgtacatagtttcatgtcctgaaactactcaattcatttatcaaatctaagagttttttggtggagtctccagatgttactagatataagatcatatatcatcagtgaacaaggatcatttgacttactcttttcc

SEQ ID NO: 349168 - DNA, 308 bp, Homo sapiens
tggtttagggtacagttattagatgaggttgtggtgaagtttttctgggaactttatcaccaactgacccagtcttttggccccagtggtggaagcagttgggcaaatgtgtctgtttttmggccccagagcagcaaccactaacacactggctctggtgttagtggcttctgaagggctgattcttgggcctccagatagcttgcttataagccagtagtgaaagtggtgagccaagtgtgtgggtgggttctcagacccttgggcagctggtgtcatgcaggtgattgcagtggcagtggttagag

SEQ ID NO: 349169 - DNA, 563 bp, Homo sapiens
agcactgggtattgttctaagtgtgcttatgagagcttggtcttccctgtcsatcccccagctgggtggtggcctcagctgcatcaccttgaacttggcccatgttaaaatggtgccagtcatggacttgtgaccagagagggccccacactcaggtgagcagcctgggtaagaagctgtataagcagtgtggtctgctcaaatatcagtttcacaggagcccatagcagggaaatggatattgtctgaggtactcataggagagtccactttccttgcccctctttggctgggtggtggctgctgctgcatcaccctgaactcagtctgagggtgaggtgcagcccagtgttaaactctgaaaatggcaccttgggcatgtgacaagagatggaaaggcccctcaagcaagcaggggggcacgaagctgtggggaatgtagtccatttgcatctcagtctcacggcagcccattgcagggcagtgaatattgtcctagatatatgcataggagagctgggccccctgtccttccttggctaagtgggagctgcagacatgtc

SEQ ID NO: 349170 - DNA, 573 bp, Homo sapiens
tattatttattaatttatctgttttcttcagcttcataacatttatgtgtcatttataaactttagaactttgttagaagtttaatttctcttctgtttttatagtgagtagagagaattattttcacatttatattrctctaaatcatgctagccaaggaataatttatctcattaatttataacaaaatctgtttgtcacagcatgtgaaatatgaaaacaccatatagaattacacagtatattctgttttctaaataaacatatggatgcattttattttacaacttgaattatattatctctattacttattcaaggatatggaataatttttactttctgcttcaagactacagattgagctcatgaggtgcatatcttttctttctgagacaccattaaaatgacaataaagaaataaaaagcttttaaacttacaacaaagaagaggataggagaattctacaggaaacaggatatttcaacacacttatttcaaatagaaatgagatagatgagtttatcttgataagccaaagcacaggaagcttccactgtaaatatttatg

SEQ ID NO: 349171 - DNA, 608 bp, Homo sapiens
caatattaattagtcagctggatattcacaagaaacatcaaacaataaccctatcagtgcatactgactaattacaactcttgtatgcttagacatgtaacagtttacttgagcatagaatggctagaagcttagtattttaccctggccaaacaaacagaaagacaaaaacataaaacatgggcaaaacccaaaaccagtagatatttcttctttacagtaatgttaggagctgaataggggtacctaragtggataatatgtcttttgtctatttaggagaccctggttctgtgccaaggatgcctatttatagtggatccaagagcctgctggtcaagaagccctgccagggtgctaaaaacattaggcatttgagaaaggcttgaaacataaaagagaaagatgaagatgattgaacaggataaccatgtcctaggggaaatagagatatttcaggtaatagaagataacttaaaaaatatttcagttgagaagttcaaaataattgaaatatattacatccctaaaataacaacagtgtgcaaagaaattcagaaaagaatctaaactaaagtggaggaagtctgccacagagagaatgaaag

SEQ ID NO: 349172 - DNA, 598 bp, Homo sapiens
atgaggtgtaaagaccttcccaggcaaacagaagctgaaggattttatcaacaccagacctgtcctacaagaaatctaaagggagttctttaatctgaaagaaaagaatgataatgagtaagaagaaatcatttaaagatacaaaagtcctggtaataataaacacacagaaaaccacagaatagtataatactgtagttgtggtatgtaaatttctcttaagtagaaagaataaattatgaacaatcaaaaagaataactacaacacattttcaataagtagacagtacaatgagatataaagataagcaataacaaaattaaaatgcaagaaaataaagttagagttttattagttttctttttgcatgtttgtttatgcaatcagtgttaagttgtcatcagtttaaaataatagattatatgacagtatttggaagtcttgtagtaacatcaaattgmaaatcatacaatggatacacaaaaaataaaaagcaagaaattaaagcataccaccagagaaaatcaccttcactaaaagacaggaaggaaggaaagaagaaagagacgactgggaaacaacctgaaaacacataac

SEQ ID NO: 349173 - DNA, 528 bp, Homo sapiens
attaaagcataccaccagagaaaatcaccttcactaaaagacaggaaggaaggaaagaagaaagagacgactgggaaacaacctgaaaacacataacaaatggcaggagtaattccctacttatcaataataacattgcatgtaaatggactaaactctccaataaaaagacatacacttgctgaatggaagatccaatgatctatgcttacaggaaacacacttcacctataaagatacacatagactgaaaataaagacatggaaaaaagatattctattccaatggaaacaaaaaaagcaatagtgttatacttattcagacaaaayagatttcaagacaaaaactgtaagaagagacaaaaaaggtcactatataatgataaaaggatcaattcagcaacagaatataacaactttaaatatatatgcaccaaacactggagcacccagatatataaaacaaatattatagctaaagagagagatatatctcaatacaataatagctagagacttcaacaccta

SEQ ID NO: 349174 - DNA, 502 bp, Homo sapiens
tcaacacctacattccacattggacagatctagacagaaaakaacaaagaagctttggacttaatctgcactatagaacaaattggcctaagagatatttacagaacattttatccaatggctacagaatacacattcttctcctcagcacgtagattattctcaaggataaaccatatgttaggtcacaaaacaagtgtcaaaacattcaaaaattgaaataagcatcttctctaacgataatggaataaaactagacaccaataaagaggaattttggaaatgatgaaaacacatgaaaattaaacaatatgcttctgaataaccagggggtcaatgaataaattaagaaggaaatcgaaaactttctggtaacaaattataatggaaacacaacataccaaaacctatgggatacagcaaaagcagtactaagagaaatttatagctataaatgtctacatcaaaaaaaaaaaaaaaaagcttaaataacctaatagca

SEQ ID NO: 349175 - DNA, 661 bp, Homo sapiens
cagatgttatccacatataaaggtgcattgcacaattggagtactgtgctagactggataaatctaaggatatgacaaagcaaagaaggaaaggaaaaataaagacaattaaacaatccacgacaaataaaaataaaaataaataagttacrtaagagaagaaaacaataacaccctaagtagacaagtgaaaaatatttacatagtttaaataaagtgaaggttgtttttaaaaaaatatctaacatgttgaatcaacctactgacaaactgtggaaagatacattgtcaatcttaaaacttaaaaatagtaaaggtcctgataatagatgttgaaggtggaaggcaaacagaagtgagcaggtagacaggagtgataatgtctttataaggatagagctaagattgactacatgtggttggtggagtaaataacagaggaactaaaagtaggaatataactagactgggtggttagcatggggaagggaagaaaggggatggtgactgtttggtttgtgaatgagctaaaacattttcttgtgtagtaagaattccatatgcaattcctaatgttcatagataagtattggtttaaggatattatttagagactcaaggacacctgaagaactacaaaaagaaacagtttgaatttgct

SEQ ID NO: 349176 - DNA, 546 bp, Homo sapiens
gtatataatgcatagctctaaagaaatacctattgctctttataattgtctaaccctttaattgatttcataaatcaaagtttttaggcaagtatggcctatattaaaaatgaacacttgagcctaatgaatattttgttgatagaaataatttctgaatttctctgctgagtagcaagatagcactctttagtacaggaagggaaactttagaaaaatgggatgctataaaacttaaagtaagaattggaactgaaagtaacacattaatttccttggcataaatttctgctttatcatcctaaagctttattttggcacaaaggtagcaataacactaatcyctcttctggaatccaaaccaaagatagattattttgtctctaaaaatttcattatgaatgactaagtagagaatagatgaaaaagtattttaatttaatgttaagaatatgcattttagagcagggaacctaaagttgagataccatttcatttgtttgtagcctcttctcttataaaatagaaataataagatttaattca

SEQ ID NO: 349177 - DNA, 452 bp, Homo sapiens
atagatgaaaaagtattttaatttaatgttaagaatatgcattttagagcagggaacctaaagttgagataccatttcatttgtttgtagcctcttctcttataaaatagaaataataagatttaattcaatggatggttgtaagaatgaaagaaatgagaaaatgtgaaatctttttaaactatgtttttctacaaaaatgagatgttaagataataaagaaactgaccctttgtcatttaaaaaatagttttaaatataaacatcctagtctctcagtagaggtactaagaaataaggagaagattataggccttgatattaaaacaatcrgagtttgactcctgatttgaacacacattacctaaaggagccaatcaatgtatttcacatatttttgattatatactgccaaataaagaattgccctaaaactcagtgtcttaaaacaa

SEQ ID NO: 349178 - DNA, 541 bp, Homo sapiens
tagatattttttctcctttttggcaactagagtasacccatgagataggcttaaatagtcatggctatttcatatgaggaatcatgaagtagtgatataaagaatcagagccttgaaaaatacagtctggagacgggaggtcacagctgcatgccagtgtgcaagagtagggggtgaggcagagactgggacagcagtagtctgtagcattcaggaccagctgtagcagagcaagctgtggtattcatactagacttgctttgttgcaggattttatcccaattgtggctgacacctgacttatgtgccttttcaaagccaggtccttcagtcttccctgcaactctgtgactcatttcatttcatatctttgtctgcttaagtcagtcaaagttggattttgttgcttgaaattaaggatcctgatcattatggagcttactatcaagagtgcttataggccatggacccacagggaagtggtagcagtggttctcaattttggctgcacattcgagtaccctagaaggtttgaaaactg

SEQ ID NO: 349179 - DNA, 608 bp, Homo sapiens
atacagttacaagccataaaaaggaattgaatgtattttaatagttgaaaagattccatttttaatataaaaatatatatccaaagtttgagaggggaaggggacacccaggtcaaagctgtggcctctgcactctgtagtcttcatttcacattaaataatttctctctcacaattatcaatgccaggcctcctatatatcatctatcactgtggcttcaaagcagtgcagttaatctaattaggcaatattcaattacctttgttagggaaaaaawatatactttctctttctgccagagtcataataattaaatggagaagggttagaaagagcatccataagcccagattttcaggctttttgagccaagattaaagtagagtttggacaaaaagttgattcttgcatttcttctacttggtggatttaatatttgcaaatcaccagtgtcagggaactgcttactttggaggaatcacttgctaatttgtgatgcaattttagccctaaactgacattacactctatgacctgtggattggtgtagaaatagcaaatatggagacgtgaaaattagcttggcttatggaactttgcccacaaa

SEQ ID NO: 349180 - DNA, 595 bp, Homo sapiens
attttgtggcaggatgctatgggaggaatcagtttctgataccacctgaagagaataataaataaatggttctttttaaatatatgtcagataatgtcatacttctgcacaaaaccagccatttcccaattcactcagagacagactacaatgacctatatgatctcctgcctctgtccttatccctacctcactcagtgtaccagctgctrtgttcacagtgaaatgcaggtcaccgcttttattgtctttgcattacctattccttaaattttgaactttcttgtccaaaatattttgtgttgcattttctctgttccatcaggtctccattggtatatcatcctatcagttcagccttccctaacccccaatattaagtatcatcctctgacctcgtttactcccgtttttgttctttgcatagcattcatcagaatttaatatgtgatgcatacacatgcttgtttatacttactctctcccttccatgatgtaagcttatgagaacaagaatttgttcccttttgttcactgctacgttttaaatactaaaaaggaaactaacacaaaataagcactcaatagctatttt

SEQ ID NO: 349181 - DNA, 635 bp, Homo sapiens
tgaggtggtaggaaaaacacagacttactatacaacatctaaacatttttaattatcactgtggttattaatactgtcactctgaaatctacatatttactcactcagctaagctatataaaatatatattaagatacttttagttgatatcgctgatgatcaaagtgaagaaatatgtagatgatttattaacatacaatccagaatctgaagtcctttgagctaaggtgaactagtctacttcactccagtggggaaagaagaacaagccccatgttaccttttctcagtctggaaggaaactgtttgctggacaaggtagactagagttggaatcagaaaatacataatcaggagtatgggggcagtaaagctcaaattacgatgcatatgtctgggttactgaaaccaggatgagagctctcttgattgtcacttagcctcaagaattacacaygcttattttccctttactaccctggctgctgcttcttggtctcatttactggaacttcctcctgtggctgacttctacatttcagagtatctctgggttcagaactcttccctaagtagtcagacctaaccaatgtcatccaaggccatggtattaacaggctcttttatgctgaca

SEQ ID NO: 349182 - DNA, 591 bp, Homo sapiens
aactcttgtttgtaagtcagagattgtttgttactagagaaaaattagttgatacatcactaaaattattttttaaaaaacaaagatattttaaagatgtaaaaggaaattttaaagttttttttaaatttgtggatatatagtagttatatataattatgaggtacatgagatattttgatacaggcatacaatgtataataatcacatcagggtaaatggaggtactcatcatcttaagcatttatcctttctttgtattacaaacaactgaattatactcttaattatttyaaaatgtacaaataaattatttttaatattatctctctattgcgctatcaaatattagatcttattcattctatctatgttttcaaatccattaaccatcctcacttcctccccactatccttaaaagacagatttaaaatttttgtaatattaactttgcattctctatataggtctttccatagcacacaatactaatttcaagtaacatccaagaatacctgcttttattcttgttttgaacattagctagaaagaaatagcttaaaataatagtgataataactagcattttt

SEQ ID NO: 349183 - DNA, 591 bp, Homo sapiens
aactcttgtttgtaagtcagagattgtttgttactagagaaaaattagttgatacatcactaaaattattttttaaaaaacaaagatattttaaagatgtaaaaggaaattttaaagttttttttaaatttgtggatatatagtagttatatataattatgaggtacatgagatattttgatacaggcatacaatgtataataatcacatcagggtaaatggaggtactcatcatcttaagcatttatcctttctttgtattacaaacaactgaattatactcttaattatttcaaaatgtacaaataaattatttttaatattatctctctattgygctatcaaatattagatcttattcattctatctatgttttcaaatccattaaccatcctcacttcctccccactatccttaaaagacagatttaaaatttttgtaatattaactttgcattctctatataggtctttccatagcacacaatactaatttcaagtaacatccaagaatacctgcttttattcttgttttgaacattagctagaaagaaatagcttaaaataatagtgataataactagcattttt

SEQ ID NO: 349184 - DNA, 532 bp, Homo sapiens
cacggcagaagacaaagcaagagtaagcatgtcayatggcaaaagcaggagcaagagagagtgggggtgaaggtgccacacacttctaaatgaccagattttgtgagaactcactcactgttgcaaagacagcaccaagccatgagggattcacccccatgacccaaatacctcccactaggtcccacctccagcattggggattacaattcaacatgagatttgagcagagacaaatatccatactatataattccacccttgacctctcccaaaaatcatatccttctcacactgcaaaatataatcataccttcccaatagtcccccaaagtcttaactcattcaagtattaacccaaaagttcaaagtccaaagtctcaagtctcatctgagacaaggcaagtactttccacccataagcctgtaaaataaaaaacaagttagttacttccaagatacagtgtgggtacaggcactgcataaacattgctgttccaaaagggagaaatcagccaacagaaaggggcct

SEQ ID NO: 349185 - DNA, 532 bp, Homo sapiens
cacggcagaagacaaagcaagagtaagcatgtcacatggcaaaagcaggagcaagagagagtgggggtgaaggtgccacacacttctaaatgaccagattttgtgagaactcactcactgttgcaaagacagcaccaagccatgagggattcacccccatgacccaaatacctcccactaggycccacctccagcattggggattacaattcaacatgagatttgagcagagacaaatatccatactatataattccacccttgacctctcccaaaaatcatatccttctcacactgcaaaatataatcataccttcccaatagtcccccaaagtcttaactcattcaagtattaacccaaaagttcaaagtccaaagtctcaagtctcatctgagacaaggcaagtactttccacccataagcctgtaaaataaaaaacaagttagttacttccaagatacagtgtgggtacaggcactgcataaacattgctgttccaaaagggagaaatcagccaacagaaaggggcct

SEQ ID NO: 349186 - DNA, 533 bp, Homo sapiens
ggctctctacccctgcaggtagcagtgtcctgaggctttgtagggtagcaaggtcatgsgcctgggcttgggcctggtcctggcccatgaaaccattctttttttcttctgcctggacatcaaggcattttcatatatcctctgaaatctaggtggaggcttccaagcttcaactcttgccttcttcgcacccacaggaccaataccacatggaagccaccaaggcttgcggcttgcatcctctaaagtaacagcctgagctccaccttggccccttttagccatggccatagctgaagcagctaggatgcagggtgccatgtcccagggctgcacagagcagcaaggccctggatctggcccacaaaactatttttccctcctaggcctccaggcctgttacaggatgggctgccatgaaggtctcttaaatgccctggagggattttccccattgtcttggccaataatattcggctgttctttacttatgcaaatttctgcagccttgattcctccccagaaagatgggt

SEQ ID NO: 349187 - DNA, 512 bp, Homo sapiens
ggatggcggcaggcagagagaatgacggccaagcaaaatgggtttccccttatcaaaccatcagatcctgtgagactcattcactatctcgagaacagcacaggaaagacccgcccccataattcagtcacttccccgtggttccccccatgaaacgtggaaattgtgggagttacaattcaagatgagatttgggtggggacatagccaaaccatatcacccagcatccattagctattctgcctgrtgctctcccttcctccatcccacaggccccagtgtgtgttgtttccccccatgtgtccatgtgtgctcattgttcgggagctacatgttttctaggtggatatggattctggttaactacaaaaggggcctagctcctcaaactggaaccagtgatagtcaagctcttggaggaacctcagtgggatggaacataacttgcaagtaaattatgtggacatgacttacacaaaagatgtttatgatctgagaatgtcacgtcatt

SEQ ID NO: 349188 - DNA, 545 bp, Homo sapiens
actcttaatgggaggctctgggaagattccacttccaggcccattcatattgttgacagaattaagttctttgtggttgaaatgctaaggttcttttttttcttgttggctgtcagcgaaggcctgcccttagttgcaataggcccctytctgtccatgcacatgagttcctgcatctcagcagcagcaagggtgcattgaatccttctcatgcttgaactttcctttgctttcctcttctttttccagctggagaacattctctgcgtttaaggactcatgaaattggattgggcccatctggataattcagaatattctttcttatttaaggtccataaccttgattacatctgcaaagtcccttttgccacgtaatgtagcatattcttaaatttcagagattagccatggacatctttgggggaccattttgcctaccacagacagaaaagaagtggaagaaggaaaaacttttctcaatttagaagtctatttgagagagttcttgataatttttgttagatcaaatttgctgtaagtaa

SEQ ID NO: 349189 - DNA, 570 bp, Homo sapiens
ctactgtctttgagtgttttgcattcatctcattcaaactgctagcctgtcaagaatgagattcttgtctcatttttgcatctctcagagtacctaaacagagttttgatggcatgattgaggctcaataaacatttactgagcgaattaagacagaagctctcctattcaaagcaatttatgcagtttgttaattttaaaaaaccagttaaatctgaaaawtattaaaatgtactttaaacattgtgttttaattgaaaacatgtaaaggtacattaatttcccaattcaacttgaggtctacttgatcacagatctgctcaggatttttccctgttgtcttttatgtatacaccaccataacaaaaatggtttatgatttcaggtttctgtttctttagagttacctgaaaacttaaagagccctgcacagcaagccaaatgtggaaatagaatgagaatttttctttaactttttaaggatgcttgcttaaagctaatttaatagcaatgtttaaacaattcacctttatcaagctttccaaattcaattcaattttaaaataacaa

SEQ ID NO: 349190 - DNA, 503 bp, Homo sapiens
ggcttaggacagaattgaagcagacacagctgtatattgtacacattaagctaactaccaaggaggcaggagaagcctctgaactgtgaactttcagtcagtttgcaacacagagggaatagaactgtcacttcatctagcagatggttagcagatccttaaaccacagtacttcccaatatttatctcgtcataccactgtggaaaattatactgtttaccctgttaggataaatgatctaacacaacaggcctgggggctccagctgtccaagtttctgcccagccatcccaagggctgaggggattaatagcccatcaataaatgcttgccacaggttgggaagtttggacttaaagcttctactattatgacagctcatgaggtaacccagatagcatcagctactgtactctgccgtttaacatcctgctttgctattgatagtggaacaccgcyataacctgatcaggtttccattcccaatggcagctaatgcctt

SEQ ID NO: 349191 - DNA, 618 bp, Homo sapiens
tgggggctccagctgtccaagtttctgcccagccatcccaagggctgaggggattaatagcccatcaataaatgcttgccacaggttgggaagtttggacttaaagcttctactattatgacagctcatgaggtaacccagatagcatcagctactgtactctgccgtttaacatcctgctttgctattgatagtggaacaccgccataacctgatcaggtttccattcccaatggcagctaatgccttgctggctgaccccttctggaaagctctatcagtgtcactacttgctgaagctctggctatctacaaaaatgtgggcgcaatggagtaacctggcctggcttcccttggtgctccaacttgttagcatcctygctcattcatctgggccacagtgattccaacatgcagagaaggatgatctttctctcaatgtgactcactcagagatgtcccagagcaaaactgtctgagccccaaaggcttcaactccctagcaggtgacgtcttctgattcacccacacccttctctataagaagcacccatgtcaactgcgtggtggcacttagatggtgctgggatcatcacttcctctagtggcctcaggcct

SEQ ID NO: 349192 - DNA, 584 bp, Homo sapiens
ccgtttaacatcctgctttgctattgatagtggaacaccgccataacctgatcaggtttccattcccaatggcagctaatgccttgctggctgaccccttctggaaagctctatcagtgtcactacttgctgaagctctggctatctacaaaaatgtgggcgcaatggagtaacctggcctggcttcccttggtgctccaacttgttagcatccttgctcattcatctgggccacagtgattccaacatgcagagaaggatgatctttctctcaatgtgactcactcagagatgtcccagagcaaaactgtctgagccccaaaggcttcaactccctagcaggtgacgtcttctgattcacccacacccttctctataagaagcacccatgtcaactgcgtggtggcacttagatggtgctgggatcatcacttcctctagtggcctcrggcctgctcttcagtctcagactcctctctgcgatttccctttactgaaaatctggccttggttagggatcctttagtctatcagctgcatttctctacctttcaagctcaaacaaaaaagaaaataaaaggaaa

SEQ ID NO: 349193 - DNA, 427 bp, Homo sapiens
ttcaataacatatagtaaaatatatagccttatatttgacagaaaacataatttagtagcataaattataatttrgggccatgaaaaagaaattccagtaaatttaactcaatcttagatcagcaaccagtaccaaaatcctccataatctctctggtagaatttgctatagatttatatattgggaggtcattgaaacttaacaaatacttgcctttcaaattttctgatgaagcagctaaattggatttggttgtttatgttaaatagccatgcatcactatcagctgtgggcttcctccttctcaaatgtgccatcacagcattcctgttaaaagcatttttttagatgcatttcctaataccctcgaacaatttaccaaaacttcatttgagcttttcctgccaaggaaaccaaaagtgccat

SEQ ID NO: 349194 - DNA, 427 bp, Homo sapiens
ttcaataacatatagtaaaatatatagccttatatttgacagaaaacataatttagtagcataaattataatttggggccatgaaaaagaaattccagtaaatttaactcaatcttagatcagcaaccagtaccaaaatcctccataatctctctggtagaatttgctatagatttatatattgggaggtcattgaaacttaacaaatacttgcctttcaaattttctgatgaagcagctaaattggatttggttgtttatgttaaatagccatgcatcactatcagctgtgggcttcctccttctcaaatgtgccatcacagcattcctgttaaaagcatttttttagatgcatttcytaataccctcgaacaatttaccaaaacttcatttgagcttttcctgccaaggaaaccaaaagtgccat

SEQ ID NO: 349195 - DNA, 632 bp, Homo sapiens
tgacctatctcctctgatctttagcaggaaattgtaaaagtaaatgttatagtcttgaaagggctagccaactattatttgattaaagtgaagtgagccagagagatggatgggcaaccagagaatataataaagatctaaagtaaagggggtaaatatgatagcaaattgtttcttatatctgagatctagctcctagttaagggaaaatgcttgggggaggaggaaagtaaagatggaatatttccagataacaaccaagagaacttgtggattgaggaacatctgcaatttcttaaacagagaaactgcagatactttttcagaccaaaaataaaayagaaaaaaataccaaaaaccaaaatcaaaacaaaagaatagattttgtaaaagaatgattaagacaataccctaatcaaaattcaaaattctcaagtgcttcacttcattctgcctttgccacaataattttaaacaacaatattgaacttattaaaacaaagctatgagaagaaatagaccagtttgagatacatttctaaaaagggcacaaatgacatacattataagaagaaaaacccaaggaaaagcagacttgttaagggaaacgttttctatattaaaaaaattac

SEQ ID NO: 349196 - DNA, 632 bp, Homo sapiens
tgacctatctcctctgatctttagcaggaaattgtaaaagtaaatgttatagtcttgaaagggctagccaactattatttgattaaagtgaagtgagccagagagatggatgggcaaccagagaatataataaagatctaaagtaaagggggtaaatatgatagcaaattgtttcttatatctgagatctagctcctagttaagggaaaatgcttgggggaggaggaaagtaaagatggaatatttccagataacaaccaagagaacttgtggattgaggaacatctgcaatttcttaaacagagaaactgcagatactttttcagaccaaaaataaaacagaaaaaaataccaaaaaccaaaatcaaaacaaaagaatagattttgtaaaagaatgattaagacaataccctaatcaaaattcaaaattctcaagtgcttcacttcattctgyctttgccacaataattttaaacaacaatattgaacttattaaaacaaagctatgagaagaaatagaccagtttgagatacatttctaaaaagggcacaaatgacatacattataagaagaaaaacccaaggaaaagcagacttgttaagggaaacgttttctatattaaaaaaattac

SEQ ID NO: 349197 - DNA, 607 bp, Homo sapiens
gctttcatgcctcaatttcaataatgaattttataacacataactccctaatgacactccaaaggaaggaattgtgtcatttttgttgatggttgccatttgttcacttatttttatcactttttcaaaacatgaggtcaattttacctccaatgggttctccagtggcccttctctctacgtagtccttcattgctgaacctctttatatcccatccctaaatcacagtcttccgcttgcaatttccagacaatgtaaaaatttctacctacactgctgaacgtgagattcaactgtgcttatgtaaagtctattcatgactcaaatagacacggtttttattggagtataaacatacatatatacacaaattcacaaacatactcataggcttttacacatactcatgcgcacattcacacaccaacctgattgcagcattatcttttatgaaatgacatagaagaaaataaaatataatatyacccaaactatttgttagctttttcatttctactgcaactgcatttgagttcatccatgcctgtatctacaactgagtgccctgctccaagaaatgaaacatcagctcctatttgatatatt

SEQ ID NO: 349198 - DNA, 607 bp, Homo sapiens
gctttcatgcctcaatttcaataatgaattttataacacataactccctaatgacactccaaaggaaggaattgtgtcatttttgttgatggttgccatttgttcacttatttttatcactttttcaaaacatgaggtcaattttacctccaatgggttctccagtggcccttctctctacgtagtccttcattgctgaacctctttatatcccatccctaaatcacagtcttccgcttgcaatttccagacaatgtaaaaatttctacctacactgctgaacgtgagattcaactgtgcttatgtaaagtctattcatgactcaaatagacacggtttttattggagtataaacatacatatatacacaaattcacaaacatactcataggcttttacacatactcatgcgcacattcacacaccaacctgattgcagcattatcttttatgaaatgacatagaagaaaataaaatataatatcacccaaactatttgttagctttttcatttctactgcaactgcayttgagttcatccatgcctgtatctacaactgagtgccctgctccaagaaatgaaacatcagctcctatttgatatatt

SEQ ID NO: 349199 - DNA, 507 bp, Homo sapiens
ctgttctttccaagtaccttttaggaacttgcaaaatcaataaaattctgtaaataaaaggaatctccatcaatatgactataaatatgataacagaaaaagctgtcatattttaattgatagttatttaaaccagaaaacaggaggtgagtaggaattctatcatggtcatccacttttactttaggaaaatgttgtaaacactatgaaaataataaactggagtgttacattaaagttcatttaaatatttttaagattccatatttttaagttaaagatgcattgaaattttccccaattttggcttaaatatgatcaaattccaaaatatataatgatatgraataaatggaatgaacaaagattttacagtggaaaatagagtaaggggctctggacctactatacataaaaaaaaaaagataagtcaggatataagttgttggacacataaaaaaataatgttttaataatgaagttgtgtaacaaaatgctgtttcatag

SEQ ID NO: 349200 - DNA, 507 bp, Homo sapiens
ctgttctttccaagtaccttttaggaacttgcaaaatcaataaaattctgtaaataaaaggaatctccatcaatatgactataaatatgataacagaaaaagctgtcatattttaattgatagttatttaaaccagaaaacaggaggtgagtaggaattctatcatggtcatccacttttactttaggaaaatgttgtaaacactatgaaaataataaactggagtgttacattaaagttcatttaaatatttttaagattccatatttttaagttaaagatgcattgaaattttccccaattttggcttaaatatgatcaaattccaaaatatataatgatatggaataaatggaatsaacaaagattttacagtggaaaatagagtaaggggctctggacctactatacataaaaaaaaaaagataagtcaggatataagttgttggacacataaaaaaataatgttttaataatgaagttgtgtaacaaaatgctgtttcatag

SEQ ID NO: 349201 - DNA, 486 bp, Homo sapiens
taaaaacactctgaagctagaattaagatttctcacaaagaagaggatatcatagggatgccagaaagaaaaagaatgtgtttttaagtaaarggatatgattctcctttagatgatacatttgtagtcactgaaaaaagactcacttgtgtcatcaacaagtgtagcatactagtagtgtccaagtccaattttttgacataaatacctcaataatcagagaaataaaactactgttaaaataaaatacaattatctgatggccataaagaagctcagaggggccaggtgcataactcattcctataatcccagcactttgagaggtcgaggtgggcacatcactagaggtcaagagttcgagactagcatggtcaacatggtgaaaccccatctctactaaaaatacaaaaattagccaggcatggtggtgggtgcctgtaatcccagctactcgggaggctgaggcaggagaatcacttgaac

SEQ ID NO: 349202 - DNA, 486 bp, Homo sapiens
taaaaacactctgaagctagaattaagatttctcacaaagaagaggatatcatagggatgccagaaagaaaaagaatgtgtttttaagtaaagggatatgattctcctttagatgatacatttgtagtcactgaaaaaagactcacttgtgtcatcaacaagtgtagcatactagtagtgtccaagtccaattttttgacataaatacctcaataatcagagaaataaaactactgttaaaataaaatacaattatctgatggccataaagaagctcagaggggccaggtgcataactcattcctataatcccagcactttgagaggtcgaggtgggcacatcactagaggtcaagagttcgagactagcatggtcaacatggtgaaaccccatctctactaraaatacaaaaattagccaggcatggtggtgggtgcctgtaatcccagctactcgggaggctgaggcaggagaatcacttgaac

SEQ ID NO: 349203 - DNA, 560 bp, Homo sapiens
agtgtccacatgataaaatcagctttaagtttgggacaacagaagaaacactcaataaagagacagaggacttacctttaccatggatcgggataattaagtgcacagtgaaaacgtttgggcagaggtaagtcattagagaggaaggcagaagaacagcactatgggagaaggtgaatcagggattaaaatttggagcaatagaaaataatgacatataagaaagactttgtgtgtttggctgtctacaagttttccaaaggagtaattcacagggaaattcaaatggatgraggtgtggaaaaaagaagggagggcagagagattccctggagttacagaataagtctgccatagctttgtgggaagttcttctaagaggatgcaagtcctggtaagcaagctagcagtaggattattttgcacagtcacttaacattgcaaaaataagcagcctttgatggcagaggagatgctgtactttggaatcagtcagacaggatcctgattattttcacaagtcctcaggaagaagctgagttccaggattccggcacata

SEQ ID NO: 349204 - DNA, 584 bp, Homo sapiens
ttattgagcatcttttcatatgcctatttgccatctgtatgtcttcttttgagaaatgtccattcaaattttttgcccattggttgatcagattattagattttyttcctatagagttgtttgagctccttatatactctggttatttataccctgtcagaggggatagtttgcaaatattttctctcattctgtgggttgtctcttcactttgttgattgcttcctttgctgtatagaggctttttgacttgatgtgatctcatttgtccatttttgctttggttgcctgtgctcttagggtattgttcaagaaacctttgcccagaccaatgtcctagaaagtttccccaatgttttcttgtagtagtttcatactttgaggtcttagacttaagtctttggtccatttagatttgatttttgtatatggtgagagataggggtctagtttaattcttttgcctatggatatccagttttcccagcaccatttatcaaagacagtgttttttccccaatgtatgttcttggcatttttgttgcaaatgagttcactgtagatgtgagaatttgtttctgagt

SEQ ID NO: 349205 - DNA, 594 bp, Homo sapiens
atgttcaataaatgtttttgcataaaggaatatatgattatatagttggctttcacattttctaggtttcagaagcactgataggagagacctttgctgagtgagttttgctcctagagtaaacatsaatttccacctgagttcccctacagtgttgaacagatcacatcccttggttgcagccaaagaatctgaaaaatactgaataggctaagctaagatatattggtagcaatggtaaaatttctttataattgtgaatataaatcaagttgtttgaaatcgactgaagttgtagtataagtaagtaattgataaagaaacatttgccagtggacagaaagtgtattatgaactataacatactacctaaaagcaaaagtgggagaaaatggcatacccactttgtgattaaagtgtctgagccagactatatggcttaaggaaatgacagccaacctgtcattgtgtaaaggttaagaaaactgatgcaataattggactgagtccaggtgacataaaataagagaagttagctcttcgctaaggaaaatctgtaccatcaaatactagtagagtcccatccccatgctg

SEQ ID NO: 349206 - DNA, 594 bp, Homo sapiens
atgttcaataaatgtttttgcataaaggaatatatgattatatagttggctttcacattttctaggtttcagaagcactgataggagagacctttgctgagtgagttttgctcctagagtaaacatgaatttccacctgagttcccctacagtgttgaacagatcacatcccttggttgcagccaaagaatctgaaaaatrctgaataggctaagctaagatatattggtagcaatggtaaaatttctttataattgtgaatataaatcaagttgtttgaaatcgactgaagttgtagtataagtaagtaattgataaagaaacatttgccagtggacagaaagtgtattatgaactataacatactacctaaaagcaaaagtgggagaaaatggcatacccactttgtgattaaagtgtctgagccagactatatggcttaaggaaatgacagccaacctgtcattgtgtaaaggttaagaaaactgatgcaataattggactgagtccaggtgacataaaataagagaagttagctcttcgctaaggaaaatctgtaccatcaaatactagtagagtcccatccccatgctg

SEQ ID NO: 349207 - DNA, 594 bp, Homo sapiens
atgttcaataaatgtttttgcataaaggaatatatgattatatagttggctttcacattttctaggtttcagaagcactgataggagagacctttgctgagtgagttttgctcctagagtaaacatgaatttccacctgagttcccctacagtgttgaacagatcacatcccttggttgcagccaaagaatctgaaaaatactgaataggctaagctaagatatattsgtagcaatggtaaaatttctttataattgtgaatataaatcaagttgtttgaaatcgactgaagttgtagtataagtaagtaattgataaagaaacatttgccagtggacagaaagtgtattatgaactataacatactacctaaaagcaaaagtgggagaaaatggcatacccactttgtgattaaagtgtctgagccagactatatggcttaaggaaatgacagccaacctgtcattgtgtaaaggttaagaaaactgatgcaataattggactgagtccaggtgacataaaataagagaagttagctcttcgctaaggaaaatctgtaccatcaaatactagtagagtcccatccccatgctg

SEQ ID NO: 349208 - DNA, 608 bp, Homo sapiens
tggactgagtccaggtgacataaaataagagaagttagctcttcgctaaggaaaatctgtaccatcaaatactagtagagtcccatccccatgctggcgtagccgacaatctcatcattgagatttggcatgtaagtaacaaatggtaacccctgaataatatatgtaacttctctatgatgatatgaggttagttgaagtcactaaattaaaaaagaaatgtgaattgaatgtgtatcagttcgcctgcctccatcttcaggtgttttgattttatcatgaaaagatctgtctgagttgtgatggtctccttacacaaacgggaatatattattagtcactctgaagaatctccaggagctcatgtatgtcctgttgcagaaattcactttctggtatctctctcatacatggagagtgtgagtgaaaactcaayagaagtctgtcattctaattctagaatattacactctaatattcccctagtgtggaagctgtcccagtttgaatctacataagatacagcactttctttcacatgtctggagaacatatagggcaggacaagagatctctatttacagagtaactgaggaggcttatttgga

SEQ ID NO: 349209 - DNA, 608 bp, Homo sapiens
tggactgagtccaggtgacataaaataagagaagttagctcttcgctaaggaaaatctgtaccatcaaatactagtagagtcccatccccatgctggcgtagccgacaatctcatcattgagatttggcatgtaagtaacaaatggtaacccctgaataatatatgtaacttctctatgatgatatgaggttagttgaagtcactaaattaaaaaagaaatgtgaattgaatgtgtatcagttcgcctgcctccatcttcaggtgttttgattttatcatgaaaagatctgtctgagttgtgatggtctccttacacaaacgggaatatattattagtcactctgaagaatctccaggagctcatgtatgtcctgttgcagaaattcactttctggtatctctctcatacatggagagtgtgagtgaaaactcaacagaagtctgtcattctaattctagaatattacactctaatattcccctagtgtggaagctgtcccagtttgaatctacataagatacagcactttctttcacatgtctggagaacatatagggcargacaagagatctctatttacagagtaactgaggaggcttatttgga

SEQ ID NO: 349210 - DNA, 632 bp, Homo sapiens
tgttgcatgcaagagaaataatctcttgctgacttaaaaaaattatttatttaacacttacaatgcagccctgaacatatataaagatttgctgaatctccagawagatgaggggaaaaaaaacaagcatgtaaaaaagacaagaatgaaagaggtaaaacagcagacaggactacagctgaagtcttgaccaaaattaagtacccccaaaacataatgccaaccttggacacctgaggccactcctgagccattgccacagctgccctctggaaacttggtagtcctactgtttctatggctcatcaccttcaaaatagagtctccattctctctgcttgttcaagtcatttattattcatgcagccccatggtgattagatcccatagtccaaacctacatcatatattctcattctcactgggagaaaagctaagctactaagcatctgattttcagattctgtggcgagatgaagggatgctctaccctctaccataacttttgaggtgggcaattcccaaatattaaggagattgagatgattttcatgaaaaagaaaaataaataatataattcatccctacaactgcacaagattcacatataactttatttaaattgttaaggc

SEQ ID NO: 349211 - DNA, 467 bp, Homo sapiens
attattttttccccttgttggctttgtaggtataactatagttttttcctttctccttttatattgtacctgtaagagagcacatgtcttcttgactgctagaaaacactaccttgagacactgaatgtgttctattcctctaacctttttatgcttagattttgagctctttccaggtactctgtcttgggttacttaggaaaagaatacttattttatcttcctcctccctgcttttcatccattctctgtccatttttgttgcatgcaagagaaataatctcttgctgacttaaaaaaattatttatttaacacttacaatgcagccctgaacatatataaagatttgctgaatctccagaaagatgaggggaaaaaaaacaagyatgtaaaaaagacaagaatgaaagaggtaaaacagcagacaggactacagctgaagtcttgaccaaaattaagtacccc

SEQ ID NO: 349212 - DNA, 632 bp, Homo sapiens
tgttgcatgcaagagaaataatctcttgctgacttaaaaaaattatttatttaacacttacaatgcagccctgaacatatataaagatttgctgaatctccagaaagatgaggggaaaaaaaacaagcatgtaaaaaagacaagaatgaaagaggtaaaacagcagacrggactacagctgaagtcttgaccaaaattaagtacccccaaaacataatgccaaccttggacacctgaggccactcctgagccattgccacagctgccctctggaaacttggtagtcctactgtttctatggctcatcaccttcaaaatagagtctccattctctctgcttgttcaagtcatttattattcatgcagccccatggtgattagatcccatagtccaaacctacatcatatattctcattctcactgggagaaaagctaagctactaagcatctgattttcagattctgtggcgagatgaagggatgctctaccctctaccataacttttgaggtgggcaattcccaaatattaaggagattgagatgattttcatgaaaaagaaaaataaataatataattcatccctacaactgcacaagattcacatataactttatttaaattgttaaggc

SEQ ID NO: 349213 - DNA, 632 bp, Homo sapiens
tgttgcatgcaagagaaataatctcttgctgacttaaaaaaattatttatttaacacttacaatgcagccctgaacatatataaagatttgctgaatctccagaaagatgaggggaaaaaaaacaagcatgtaaaaaagacaagaatgaaagaggtaaaacagcagacaggactacagctgaagtcttgaccaaaattaagtacccccaaaacataatgccaaccttggacacctgaggccactcctgagccattgccacagctgccctctggaaacttggtagtcctactgtttctatggctcatcaccttcaaaatagagtctccattctctctgcttgttcaagtcatttattattcatgcagccccatggtgattagatcccatagtccaaacctrcatcatatattctcattctcactgggagaaaagctaagctactaagcatctgattttcagattctgtggcgagatgaagggatgctctaccctctaccataacttttgaggtgggcaattcccaaatattaaggagattgagatgattttcatgaaaaagaaaaataaataatataattcatccctacaactgcacaagattcacatataactttatttaaattgttaaggc

SEQ ID NO: 349214 - DNA, 587 bp, Homo sapiens
aatgtttcaagaaagtttacaaatttatgttgggctgcattcaaagtcattctgggccgcaggttggacaagcatgttttagaggataactccagtactgactatgcctacaattccagacttayagagccaactggtcacttgacatttctatttagatatcaaagaggcatctcaaacttaacatggcccaaacgcttactttcttgttcttcaaatctcctcactcatcttcatttcagtaaatactatagtgcattacttccccaaataacttaaactaaaaatcaagttattgtttgtgtctctacttttatcataatcacttatcaggtcctttggacacaacctcctgagtgaggggtgttcgttctttgatgcttaaagttgtacaatccttttttcttgtagagccagtatgatcatatcacacctgtttttaactctctaaccactgctaatcacaattagaataaaattcactccttgccctggtttatcaagcgcctttagatccaggctatctttacgtcatcaactaatctcatagtgctggtcactagttaatatttttcttatttattgtc

SEQ ID NO: 349215 - DNA, 587 bp, Homo sapiens
aatgtttcaagaaagtttacaaatttatgttgggctgcattcaaagtcattctgggccgcaggttggacaagcatgttttagaggataactccagtactgactatgcctacaattccagacttatagagccaactggtcacttgacatttctatttagatatcaaagaggcatctcaaacttaacatggcccaaacgcttactttcttgttcttcaaatctcctcactcatcttcatttcagtaaatactatagtgcattacttccccaaataacttaaactaaaaatcaagttattgtttgtgtctctacttttatcataatcacttatcaggtcctttggacacaacctcctgagtgaggggtgttcgttctttgatgcttaargttgtacaatccttttttcttgtagagccagtatgatcatatcacacctgtttttaactctctaaccactgctaatcacaattagaataaaattcactccttgccctggtttatcaagcgcctttagatccaggctatctttacgtcatcaactaatctcatagtgctggtcactagttaatatttttcttatttattgtc

SEQ ID NO: 349216 - DNA, 641 bp, Homo sapiens
ctcctgttttctgccaaaatttagtttgtgtgtcctgtctctccttggagggatcgtcatcctttggaatttaattcccttgactgccttgcaaacccagctttctgaatggttcaataaaagttctgatttgatagaatatatggaggcttcttattgttaggatgggcgtgatgttctcttgcaactttctacctcttcaaagaaagcagtgcctagggtaacctagattttgacctttatatacatgaaatcataatgtatgcactctttttttgttctagctactttttttcaacattatatttgtgagatttgttcatgttattaatgtaattccrgtttttagatttttcattggtgtactgaagctcattttatgactatatcacaaataatttatctctcctactgtttatagacatgtagcttatttcaaatgtggagttattctagataatgctactatgagcatttttgtacacgtattttggtaaacatatgaaaaaataactcttaggtatatgcctaggatagcaattgatggttttatatacagagatatgtaaaatatgtgtatatatacatacatatacatatatatttcagatgtagtagatgatgtcacatcattttccaaa

SEQ ID NO: 349217 - DNA, 641 bp, Homo sapiens
ctcctgttttctgccaaaatttagtttgtgtgtcctgtctctccttggagggatcgtcatcctttggaatttaattcccttgactgccttgcaaacccagctttctgaatggttcaataaaagttctgatttgatagaatatatggaggcttcttattgttaggatgggcgtgatgttctcttgcaactttctacctcttcaaagaaagcagtgcctagggtaacctagattttgacctttatatacatgaaatcataatgtatgcactctttttttgttctagctactttttttcaacattatatttgtgagatttgttcatgttattaatgtaattccagtttttagatttttcattggtgtactgaagctcattttatgactatatcacaaataatttatctctcctactgtttatagacatgtagcttatttcaaatgtggagttattctagataatgctactatgagcatttttgtacacgtattttrgtaaacatatgaaaaaataactcttaggtatatgcctaggatagcaattgatggttttatatacagagatatgtaaaatatgtgtatatatacatacatatacatatatatttcagatgtagtagatgatgtcacatcattttccaaa

SEQ ID NO: 349218 - DNA, 641 bp, Homo sapiens
ctcctgttttctgccaaaatttagtttgtgtgtcctgtctctccttggagggatcgtcatcctttggaatttaattcccttgactgccttgcaaacccagctttctgaatggttcaataaaagttctgatttgatagaatatatggaggcttcttattgttaggatgggcgtgatgttctcttgcaactttctacctcttcaaagaaagcagtgcctagggtaacctagattttgacctttatatacatgaaatcataatgtatgcactctttttttgttctagctactttttttcaacattatatttgtgagatttgttcatgttattaatgtaattccagtttttagatttttcattggtgtactgaagctcattttatgactatatcacaaataatttatctctcctactgtttatagacatgtagcttatttcaaatgtggagttattctagataatgctactatgagcatttttgtacacgtattttggtaaacatatgaaaaaataactcttaggtatatgcctaggatagcaattgatggttttatatacagagatatrtaaaatatgtgtatatatacatacatatacatatatatttcagatgtagtagatgatgtcacatcattttccaaa

SEQ ID NO: 349219 - DNA, 546 bp, Homo sapiens
caaccaggggaagggtgctgtaatgtggggaagtgctggctctgaacagaaatgccagctcctgggtacagtcagctctcaaggaaccctggggattgacacagtaggtccctggattaataaggtccacaggccaccctgaaatggtgtttgattctcattgtcaccttctctaggcctacgactgctaccttggcctcagagtccctatttttgtcacctgagagacatggtacagtgctgagaagagaaatgaagtactattcaagaggtcggcctcaggctgggaggagtgggaacagcatgggctctacaggaattcagacccaccaggagtctggttccagccctattccttactagccatgtgattctgggaaatgcccaagtcctgtgagccttgggttctttatctgtgaagcaggtgtgataagccytgtccattaggactactggagtgtgtgcaatataagtgaagaacctggctcagggcctggcatagttagaagtttaatgaatggcagatggctgttatttctaatatta

SEQ ID NO: 349220 - DNA, 496 bp, Homo sapiens
gtgttccatggtgtatatgtaccacattttctttatccaatccactgttgatgggcacctaggttgattccatgactttgttattgtgaatagtrttgtgatgaatatatgagtacatgtgtctttttggtacaatgatttgttttcctttgggtatatacccagaaatgggattgctgggttgaatggtagttcttttttaagttctttgagacatctccaaactgctttctacagtggctggacaaatttcagatgcatagtttgcaaatatcttcttccattctgtaggttgtctgtttactctgttaatagtttcttttgctgtgcagaagctttttagttaaactaggtcccacttgtgaatttttgcttttgatgtaattgcttttgaggattttgtcataaatcctttgccaaggccaatgtccagaagagtatttcctaggttttgttttaggattcttatagtttgagttcttacataaagataatg

SEQ ID NO: 349221 - DNA, 526 bp, Homo sapiens
cactcctccataaaagcaatgagacaattttcaaacattgtcaaaataaactttctccaaactccggaaattaacaaaagtctcctaacactctgaagagcgttattcaagaaaaatgattagttctcagtacaaccagggagccctattcccatcctcttctttcctcctctgtagaagccttgaagattttgtcatgatgaaaaggtcaatccatcagaaaaaagtataacaattataaagaaatacacacttaaacacagagccccaaaatacatgaagcaacactgatagaactgaagrgaaaaataagacaattcaacagtaataattagagatttcagtattccactttcaatacatggatagaacatctaggcagatcaacacagaaatacaagatttgaacaattctataaaccaattagacataaccaacatctatagagcgttccaccaaacaacataagactgaacattattctcaagtgcacatggaacattttctgaggtagaccatatatta

SEQ ID NO: 349222 - DNA, 542 bp, Homo sapiens
acctaatgcaaaatgcaaaaattatacaacttctataagaaaataagagaaaatttacattactttaagtttggtaaaaagtttgtaaattcaacaccaaaagcaaaagtagcaatgagcacacctagcacccagatgtaaatttctagaaccatttcctattaaaaggaaccagatctctggagaaatggctgattttaggactggggcagggcataaacccaatgagcctagagcatcttgtagtcctagaaatgsagggctaaagaatatgataaaggacatcacagtgttgtattcagccaaatccagactatggaaaactggaaagaacacaagatctgtttctttccaacaacaacaaaacagtggcaagaaaacaggtcatgtggaggggaccctacaaatgatagaagacttaaggagtatgaccaaaaatcactatataatattatacttgggtactcatacaaagaaacacaatttttataaagtataagtctaccaggtaagtgtgtaaaacagttgaacatttgataatc

SEQ ID NO: 349223 - DNA, 512 bp, Homo sapiens
tgaccaaattgatccaaaaagaaaaccttaattaaactttacaaactgaaactatacaagctcaaactattcaaagctcaagccaccytcaaacgttccatgttagtcagttttggaggccgattctactaaataatcaggggaaactaaccaccatcttatctcagctcttccaatgcacacaaaatataggcaattgttcactttgttctcccagatgagccctcttggattcaaaaaacagatgaggaccacctcccaccccgatataaaaaacacatcaagcaagctctgttacatagcagcaattattctatgtaaattagtagaatattaaatgaacaaacaggctctgcccaaggaaagacaatatgattccacattaggaaaaaaagtttcattgtaattctttacatacaaaatagagtagaaaaaaatttgattgtgttaatgggtacagaaaaagcttttgaaagaaattcgatgagttcatggtaaaaatatttagttaa

SEQ ID NO: 349224 - DNA, 486 bp, Homo sapiens
tcctttcacctcttcagaagacagacaacaagacagaatgagaaagaaagaagtatagaaaaggagaggattgaggaaaatcaatgtgttcaaccattttgagtcagttattcaaaacaaatggttaatttggtactcttttgaaaagtccatttgctttgccttttagatccacagaatgtaattaatttatgaatatttattacatcttttatatattaaatatttcacatgatcagagataggattaataggtagcgtttggaaatgtgagatggtaaagagggagaattgcataagctcatcaaagtccaactctcatgaaaaacaaatccccaatgccttctcagyggggagagagtgaaggaaagggaaaggacggaaagaagtagagatgcacacagacagaagataaaacaaagaaagaaaagaattgaaaaaaagaagcagagagaaagaaaagagatgggaactccaaagttgtaa

SEQ ID NO: 349225 - DNA, 624 bp, Homo sapiens
tcaggaaccgtgttgggattagatgtatctcctacatacgtaatatggtttggttgtgtcyccaccccaatctcatcttgaattgtagctcccataattcccatgtgttgtgggagggacccagtgggagataattgaatcatactgttctcatggtagtgaatgcttctcatgagatctgatggttttataaggggtttcgcctttcgcttggctctcattcttccttgcctgccatgtaagatgtgccttttgccttccaccatgactgtgaggcctccccagccatatggaactgtgagtccattaagccttcttttctttatgaattatccagactcaggtatgtctttatcagcagtgtgaaaacagactaatacaatataagtggcaattaaagattgtaaccatctttcatgtgcaatagctcatttaatctttgtagtcatccctgggaaagttttattattatgctgtgttacatagaggttaaatgacttgcccaagttcacacagctgggacagtggtatatcccagattagaactcagtattcctgcctccctgtgcctgtatctttttaccattcacactagttccaaccaccacaagctttttcccatga

SEQ ID NO: 349226 - DNA, 624 bp, Homo sapiens
tcaggaaccgtgttgggattagatgtatctcctacatacgtaatatggtttggttgtgtctccaccccaatctcatcttgaattgtagctcccataattcccatgtgttgtgggagggacccagtgggagataattgaatcatactgttctcatggtagtgaatgcttctcatgagatctgatggttttataaggggtttcgcctttcgcttggctctcattcttccttgcctgccatgtaagatgtgccttttgccttccaccatgactgtgaggcctccccagccatatggaactgtgagtccattaagcctycttttctttatgaattatccagactcaggtatgtctttatcagcagtgtgaaaacagactaatacaatataagtggcaattaaagattgtaaccatctttcatgtgcaatagctcatttaatctttgtagtcatccctgggaaagttttattattatgctgtgttacatagaggttaaatgacttgcccaagttcacacagctgggacagtggtatatcccagattagaactcagtattcctgcctccctgtgcctgtatctttttaccattcacactagttccaaccaccacaagctttttcccatga

SEQ ID NO: 349227 - DNA, 624 bp, Homo sapiens
tcaggaaccgtgttgggattagatgtatctcctacatacgtaatatggtttggttgtgtctccaccccaatctcatcttgaattgtagctcccataattcccatgtgttgtgggagggacccagtgggagataattgaatcatactgttctcatggtagtgaatgcttctcatgagatctgatggttttataaggggtttcgcctttcgcttggctctcattcttccttgcctgccatgtaagatgtgccttttgccttccaccatgactgtgaggcctccccagccatatggaactgtgagtccattaagccttcttttctttatgaattatccagactcaggtatgtctttatcagcagtgtgaaaacagactaatacaatataagtggcaattaaagattgyaaccatctttcatgtgcaatagctcatttaatctttgtagtcatccctgggaaagttttattattatgctgtgttacatagaggttaaatgacttgcccaagttcacacagctgggacagtggtatatcccagattagaactcagtattcctgcctccctgtgcctgtatctttttaccattcacactagttccaaccaccacaagctttttcccatga

SEQ ID NO: 349228 - DNA, 588 bp, Homo sapiens
  misc_feature (1)...(588): n = A,T,C or G
gaaaggtagcagagaaaaaaagcagggatatcaggagactatggtgctatggaaaccagaaagaggcattttcaagaataaaatagttttcaacagtgtcaaatgctgacaggtcaaataagataactgaaaactgcccttaggttttagtaacaagggcagtggtgactcagctagaagagcttcactgagagcagataacaaaattagaattctntgagangagaggagcagagatgaagaacaaaaggagaggctgggcttagacagaagggaaacactttttcagtgacagcagagaagggagaggtttgtgatgtagatccaagggctcagtctgtttgtcatgtgtagggacttcccttctaagaattgctgttcttccctgagctgaaactttggagaaaaaaaagggggggaatgtctgttttgtttctgctctttgctctcagtttgcctgtgggcccccttcccggcaccagcacccccttaatctcctcaatttaggatccaacttttcccatgctagaactggagttggggcactaatgawcctgtgtcacatcaagggagaccctgccacatgga

SEQ ID NO: 349229 - DNA, 560 bp, Homo sapiens
atgatgagacaccaaatcctccccagagtgctcagatagcctgctcctccccctcggtcgttgcttcccttccattagatcaatctgatgagggctccagcagccaaaaggaggagagtccaagcaccctacaggtcctgccagacagtgagtctttacccagaagtgagatagatgaaaaggtgactgatttggtgcagtttctgctcttcaagtatcaaatgaaggagccgatcacaaaggcagaaatactggagagtgtcataaraaattatgaagaccacttccctttgttgtttagtgaagcctccgagtgcatgctgctggtctttggcattgatgtaaaggaagtggatcccactggccactcctttgtccttgtcacctccctgggcctcacctatgatgggatgctgagtgatgtccagagcatgcccaagactggcattctcatacttatcctaagcatagtcttcatagagggctactgcacccctgaggaggtcatctgggaagcactgaatatgatggggctgtatgatgggatggagcacctcatt

SEQ ID NO: 349230 - DNA, 560 bp, Homo sapiens
atgatgagacaccaaatcctccccagagtgctcagatagcctgctcctccccctcggtcgttgcttcccttccattagatcaatctgatgagggctccagcagccaaaaggaggagagtccaagcaccctacaggtcctgccagacagtgagtctttacccagaagtgagatagatgaaaaggtgactgatttggtgcagtttctgctcttcaagtatcaaatgaaggagccgatcacaaaggcagaaatactggagagtgtcataagaaattatgaagaccacttccctttgttgtttagtgaagcctccgagtgcatgctgctggtctttggcattgatgtaaaggaagtggatcccactggccactcctttgtccttgtcacctccctgggcctcacctatgatgggatgctgagtgatgtccagagcatgcccaagactggcattctcatacttatcctaagcatartcttcatagagggctactgcacccctgaggaggtcatctgggaagcactgaatatgatggggctgtatgatgggatggagcacctcatt

SEQ ID NO: 349231 - DNA, 619 bp, Homo sapiens
atgagtcatttggttgcagttttatttaaaatcagttggaaatgtttaatcaaagtattcaaaaattggaaacccaaaaaaactgaagcttttagaaaaytgtaattattgaaagcaaagcatgaatataggcattgaaatttgttcttataaaagcatggaataaacagaataaattaaaatttgaaagctcaaaaatgttttaaatttatattttaagttcaggggtacatatgcatgtttgttccataggtaaacttgtctctttgtttttgtacagattatttcatcaatgaggtattaagcctagttaccattagttatttttcctgattctttctctcttcccactctccaccctctgataggccccagttgtgtgtagttcctcactatgtgtccatgtgaaagacttggaaccagcccaaatgtccaacaatgatagactggaataagaaaatgtggcacatatacaccatggaatactatgcagccataaaaaaggatgagttcatgtcctttgtagggacatggatgaaattggaaatcatcattctcagtaaactatcgcaagaacaaaaaaccaaacaccccatattctcactcataggtgggaatt

SEQ ID NO: 349232 - DNA, 619 bp, Homo sapiens
atgagtcatttggttgcagttttatttaaaatcagttggaaatgtttaatcaaagtattcaaaaattggaaacccaaaaaaactgaagcttttagaaaattgtaattattgaaagcaaagcatgaatataggcaytgaaatttgttcttataaaagcatggaataaacagaataaattaaaatttgaaagctcaaaaatgttttaaatttatattttaagttcaggggtacatatgcatgtttgttccataggtaaacttgtctctttgtttttgtacagattatttcatcaatgaggtattaagcctagttaccattagttatttttcctgattctttctctcttcccactctccaccctctgataggccccagttgtgtgtagttcctcactatgtgtccatgtgaaagacttggaaccagcccaaatgtccaacaatgatagactggaataagaaaatgtggcacatatacaccatggaatactatgcagccataaaaaaggatgagttcatgtcctttgtagggacatggatgaaattggaaatcatcattctcagtaaactatcgcaagaacaaaaaaccaaacaccccatattctcactcataggtgggaatt

SEQ ID NO: 349233 - DNA, 619 bp, Homo sapiens
atgagtcatttggttgcagttttatttaaaatcagttggaaatgtttaatcaaagtattcaaaaattggaaacccaaaaaaactgaagcttttagaaaattgtaattattgaaagcaaagcatgaatataggcattgaaatttgttcttataaaagcatggaataaacagaataaattaaaatttgaaagctcaaaaatgttttaaatttatattttaagttcaggggtacatatgcakgtttgttccataggtaaacttgtctctttgtttttgtacagattatttcatcaatgaggtattaagcctagttaccattagttatttttcctgattctttctctcttcccactctccaccctctgataggccccagttgtgtgtagttcctcactatgtgtccatgtgaaagacttggaaccagcccaaatgtccaacaatgatagactggaataagaaaatgtggcacatatacaccatggaatactatgcagccataaaaaaggatgagttcatgtcctttgtagggacatggatgaaattggaaatcatcattctcagtaaactatcgcaagaacaaaaaaccaaacaccccatattctcactcataggtgggaatt

SEQ ID NO: 349234 - DNA, 619 bp, Homo sapiens
atgagtcatttggttgcagttttatttaaaatcagttggaaatgtttaatcaaagtattcaaaaattggaaacccaaaaaaactgaagcttttagaaaattgtaattattgaaagcaaagcatgaatataggcattgaaatttgttcttataaaagcatggaataaacagaataaattaaaatttgaaagctcaaaaatgttttaaatttatattttaagttcaggggtacatatgcatgtttgttccataggtaaacttgtctctttgtttttgtacagattatttcatcaatgaggtattaagcctagttaccattagttatttttcctgattctttctctcttcccactctccaccctctgataggccccagttgtgtgtagttcctcactatgtgtccatgtgaaagacttggaaccagcccaaatgtccaacaatgatagactggaataagaaaatgtggcacatatacaccatggaatactatgcagccataaaaaakgatgagttcatgtcctttgtagggacatggatgaaattggaaatcatcattctcagtaaactatcgcaagaacaaaaaaccaaacaccccatattctcactcataggtgggaatt

SEQ ID NO: 349235 - DNA, 557 bp, Homo sapiens
tgttctgccaggccctgtgagggctacaggtgtggttgtgtgcctgtgtgtgagagaacatatgtggacatgtgtattcatgtgtacatgcacatgcacaagtgtgcatgtagggggcacaatgcaaattcatcccactcagagatcaggctctgggagacaggctgatttggcaggtgctagatgcctactcctccatttccattgaaaggcatggtagcctaaaagtcatacacataccctccttttctgataagaccacttgggatcagacatcagtcctgggagggtagctactttgccaatccaagttctccctttgtaagattcctttccagcctccaacaamgtcgattataactaacctttctctaccagatgatataaattttgctaccgttccagtctttcttcttttttttcatacaagatgaacacttttcttttatcagttatcaagattacttgctgagattcaagtaacagcagactccttggagggcatatgctcaccaatcatctcagcaacatggcacaaagatgtaagctcctcaagc

SEQ ID NO: 349236 - DNA, 557 bp, Homo sapiens
tgttctgccaggccctgtgagggctacaggtgtggttgtgtgcctgtgtgtgagagaacatatgtggacatgtgtattcatgtgtacatgcacatgcacaagtgtgcatgtagggggcacaatgcaaattcatcccactcagagatcaggctctgggagacaggctgatttggcaggtgctagatgcctactcctccatttccattgaaaggcatggtagcctaaaagtcatacacataccctccttttctgataagaccacttgggatcagacatcagtcctgggagggtagctactttgccaatccaagttctccctttgtaagattcctttccagcctccaacaaagtygattataactaacctttctctaccagatgatataaattttgctaccgttccagtctttcttcttttttttcatacaagatgaacacttttcttttatcagttatcaagattacttgctgagattcaagtaacagcagactccttggagggcatatgctcaccaatcatctcagcaacatggcacaaagatgtaagctcctcaagc

SEQ ID NO: 349237 - DNA, 524 bp, Homo sapiens
tttatatgaagagacagaggtatgtcaagaatgcagttttgaactcatatttaagatgtccataaaacagctggaaaagttaaagaaaatgcaagcttggcatgataggatgaggtttggagtcagcaatattaagacattatttaaaaccctcaaatttaatgaaattgcatatgaagtaagcatagctagagatgagatgggatctcaaggctgagccaggaagaattctcatattaagaggatctactaaaatgggagccagaagctcctattttatccagcaaatggatgaaagacacccacatgactatagctactatagagagataaacacataaatcatwacaccttattctcctgactacagtgcttggtttaagagagaagagaggaatagatatgactccagtaaggtcattaagagttatacctatttctaactggaattttcagaaaagattatactctctagtttgtgaaaatgtgaggattgaactaataattaccaatataatcagatt

SEQ ID NO: 349238 - DNA, 554 bp, Homo sapiens
aattcatcataatattaggatttattacaataaaataatacagattataattagcagcaagaaaagcacatggggcagtgtacaggagaattccaagcacaagcttctagttgttctttactggggttgygcaaagagcactgacttctccctgcatagagtattgccaaacaggaagctcaactgagccttcagtccacagtttttattgtgaatcagccatgtagacacagatgaccaccctcatgactgatcttagtctccagcccattcagagatggagctgatacaatgtggcccaaggcccattgtcacaaatcacattgttagcataggctatctggcatggcccaaggcctccagttaaacaaagatatgcttatgatgaagactattttaggtttactttcgtgagccagggacaaagtcccacaccattctctggcaatgttaatctctactttacatcttcctaccaaagtgtgatccccgtaagagtaaggactgtgccatgttcatttctgaattctcattgtctacacatgttcaaccta

SEQ ID NO: 349239 - DNA, 546 bp, Homo sapiens
tgtttctgtactggaggcagcacatgagggactcacaagatttaaaatgattttttaacatcagggtcatgggaagcttagtaattttccataatatcttattacagcacaagaaacaaaatatggccatactatcaaatagttgggtttcatttccggcatctcagtttcccttctttctgatctgtctgttgtgytcattgtcaaatcagttctggacataatggagtcttagcctaatgggcttttttaaagtctgcactttaccttgcatggtcagggtattgcattagactcaaataaacatgttacttcactggaaaacaatggcaactgggcagaatgtatacctatctgctttattagactcaattctcttttatggctgtggtatttgggttggtatatcctaatgcaaacaaagggaagtgtttacactgctaaatgaagttggagtaatgatgttgttaacgagagggtggaaatttagaggataaaagaatacattggtcatgctggaggtttttgagttagcttcatatagat

SEQ ID NO: 349240 - DNA, 590 bp, Homo sapiens
attcattattgccttgaaaaatacccgattcacagagttttattaaattcttgatgcagtggaagattaaccattcttttgaaaaagcgcttgtgcagtttgcacataatgaaygatgtctcagagacagctattcttgcacctttagggtcagctaactgtcttcagatttctgacttgcttaggcatgttaaaaataagaaggtggcatgataaagactgagctaaaattccaattataaagggagattatcaactgcatgacccgagacagaacaaggaaaggttgtaaaaaagttgaggcaggatttttgccttaatcatctccatatcatgttgtagaaaacacatgatttgtttttcttttaaccaaactgaactgaattaaattggattgaactgaatgaggctctggatcatgagagacagtctgaaagaaaagtcagacctttgaaaatacaccaagtgtgaaatgagccaggggagaaagtgatatataggaaggtagtgacacaaactggcctatgaccaaactgccccactccaaaggcataaaaatcaatggcggaagaatggataggatgaaaaag

SEQ ID NO: 349241 - DNA, 546 bp, Homo sapiens
tgctctaacaataatcatgtttgaaaatcagaaaaagaatgatgtaaccttgagtrtgggccacattgctattcattacttgctggaaatgaaaaaaaatgcaaacaagaattactcttcataaacttggtttaattcttgtgagcaagtttgtgagtcattttatgaatggctcccgcttcaaattagggctcctgtttccgcttccaatgagcctctagtattacatctaatattgtttcctctcagcaattgaaatgtacatccctgctgggttggtaagaatagaatttctttccggaattctttcttctttctgaattgcttcattttacttcccccaaaactaaaataatttgtacttaagaccagacaaaattaacctcatggcttgttctcctttcactttgcaacctgactgcttggcaaagaaggctgctttcactcatgctccacttcctcacctctgtgaggtggcaaatgaactcaaaggacatgagagctcacctctgtggaagcagatatagatgaagggctaggacagag

SEQ ID NO: 349242 - DNA, 539 bp, Homo sapiens
attaatgatagcctgaaaaaaattgctggctgataagctctctccctggattttggaattggaactaagagatagcaaattaagttttatatgattcaaataatgacatacaaattttatgtattgctgtcatgggcagccgtatcttgcccaagacatcttatgtaccataagcaaaaataaattcatacatcaaagtagtctgggatgggggagagaaggagagggagggagggggrgagagagagagagagagagagagagaaagagagagagagagagagagagatgatttttaaaagaaacagataaaagcgggaacagatgtgacaactgaccaactggccagtgcttggcttctaggcctggctatattcctgcatttggattttactgaaactcctttgacttaagtaagctctaatttacctctattgagtttacaacaaatagagaatctccgattttacaagcatgataaaatcataatgattgtacaggaataactgggaggaatttgacaagggaagaatcccccc

SEQ ID NO: 349243 - DNA, 556 bp, Homo sapiens
gagatttgtggacctttgaacttgagagagatgatttagggtatctgacagaagaagtttctaagcagcaaagcattcaagaggtgatttgggtgctgtttaaagcatttagttttaaaatggaaacagagcataaaagtttgaaaaatttgcagcctggcaatgtgatagaagagaaaatcccattttctgaggagaaattcaagccagctgcagaaatttgcttaagtaatgaggagccaaatgttaagccccaagacaatagggaaaatgtctccagggcatgtcagaattcttcgtggcagcccctcccatcacaggcctggaggcctaggaggaaaaagtggttttgtgtgctggactgagartatcctgagctgtgtgcagaatagggacttggtgccctgcgtcccagctcctcctgttgtgcatgaaaggggccagtgtagatcttgggctgtggcttcagatggtgcaagccctaagccttggcagcttctacatggtgttgaacctgtgggtacagagaagtcaagaattgaggtttgggaacttc

SEQ ID NO: 349244 - DNA, 620 bp, Homo sapiens
agtgtaccactttttatcttttatactgtatttttactgtaccctttctatgcttgtttagatacacaaataccactgtgtaacaattgcctacagtattcagtaccgaaatatggggtacagatgtgtagcctaggagcaataggctataccatataacctaggtgtgtataggtttgtgtaagcatactccacaatgcttgcacaactatatgcaagcatactctatgatgtaaacatactctaggatgttcgtataagcatactctacagtgtttgtgtaagaatactctaaatttgtgtaagcatactctacgatgtttgcataaccatgacatcacctaatgatacattttcagaatgtawcccattgttaaacatacatgacagtatttaataaataattaaatgattgctgtattccaggcactgtaccaaatgttggggatacaaaaaagaatgaaaagtatattttaaattttttggtgtgtaaaatttagtgttaaatgattgcagatcccaaagcaaattatcatcttaatgaggagaaaaatcacctttagtccaagatgaacaggaactctgcctcaatccctagtttatgtagaaagagactgcac

SEQ ID NO: 349245 - DNA, 606 bp, Homo sapiens
tgaccagtgtttctccaaaataatattttaaaatatagcaaaactccatttagtacttttaattaataatatataaattctctactttagatataataaaacagtagaaaaaatagtaaatgtatactaatattccatgtaatgtagataaaatactggtttaacagatgtatagactcatttgaactctatactttcaacagaaatttattattaatgaagacaaaagtgtttaagtaacaaaaatgttctgggagtgagaatatagkaaaaattatagtaaaattattttgattttttgattattctcttagagcaaaaactaaaatatttaagtcaagtcttttgggggccttatagtaagtagagttcatggaggctcacagggtctccacacagatgtaaattttacttccaaatatgatcaaaaaggacaaatgagggtattacataataataaagggttcaattcaacaagaaaacttaactattttaaatatatatgcactcaacactggagcacccagattcataaaacaaattctaagacacttatgaagagacttaggtaaccaatagtaggagacttcaacactccatggacag

SEQ ID NO: 349246 - DNA, 606 bp, Homo sapiens
tgaccagtgtttctccaaaataatattttaaaatatagcaaaactccatttagtacttttaattaataatatataaattctctactttagatataataaaacagtagaaaaaatagtaaatgtatactaatattccatgtaatgtagataaaatactggtttaacagatgtatagactcatttgaactctatactttcaacagaaatttattattaatgaagacaaaagtgtttaagtaacaaaaatgttctgggagtgagaatatagtaaaaattatagtaaaattattttgattttttgatwattctcttagagcaaaaactaaaatatttaagtcaagtcttttgggggccttatagtaagtagagttcatggaggctcacagggtctccacacagatgtaaattttacttccaaatatgatcaaaaaggacaaatgagggtattacataataataaagggttcaattcaacaagaaaacttaactattttaaatatatatgcactcaacactggagcacccagattcataaaacaaattctaagacacttatgaagagacttaggtaaccaatagtaggagacttcaacactccatggacag

SEQ ID NO: 349247 - DNA, 564 bp, Homo sapiens
gtgccttgccactgatcccacggaaatacaaaaawcccttagaaactattgtgaacacctctgtgcacacgaactagaaaacctagaagaaatggataaattcctggaaacacagaacctctgaagattaaaccatgaagaaattgagtccctgaacagagcagcaatgagttctgaaactgaattagtaaaaacataacaaccaaaaataaaaaataaaaaagccctgggccagatagattcatagccatattctcccaaacatataaagaagacctagtactattttactattcaaaaataaaaaaatcaaggagaaacccttcctcactcattctatgagtccttcatcattctgatgccaaaacctggcagagatacaacggaaaaaggaaacttcagattaatatccctgatgaagttaggggcaaaaatccttaataaaatactagcaaaccaaatccagcagcatatcaaaaagctaattcaccatgaataagtatgctttatccctgggatgcaaggttggttcaacatatccaaatcaataaatgtgattcacca

SEQ ID NO: 349248 - DNA, 659 bp, Homo sapiens
attacttaggtcggtgcctttcccttcacctccttcagtgagatggtgtcactgatggtgtcacattttttatatggttagattgttttgtcattctttgcattccatcaagagatcctgtaacctcctaaatagttttttttttatatttgcatacactaagcttccatctttgtgctgtaaagtagtaygggttttgacaaatgcataatgtcatgaatccatcattacaatattatgcaaaatagtttcaacaccctacaaaaaatccccagtgcttcatctatttaaacatcctgaaacatctagttttcaccaataaatatgatgttagctgtagaggattttttgatagatattctttatcaagttgagatttctctatttcagcatttctgctgcaaatttttatcataaataagtgctggagtttataaaataattctcaattataattttgttctttaacctaattgatatggtagattacattaattcatttttgaatgtcaaacaaggcttggatagttttttttctaacatatgcatttagtgttataagtttctctctaagcattgctttctaaacatccataggttttgataagctgtattttcatttttgtttaaattgaaaatattttataatttatttttct

SEQ ID NO: 349249 - DNA, 587 bp, Homo sapiens
tgttcataatttctttttatagcattgctgtcattaatatcacttggacatatgctatagtgacccaaaacatcattagtgcaattatttacacagtagttttttagatcaattaagatacaaagaaaatactttattttacctttattttttttatttttattttttgcttaaacaacaagcatttatttctcatgattctggaggccaggaagtccaaaatcaagatgctggtagatcccatgcttggtaagagacctcttctttcttgctgtatcttcacatggttgagtgagggatcatatcacctgtgtcttttcctataagagcactgatccaattcatgagacctccaccctcacgacctcaggccccatctccaaatattgtaacattgggattagggtttcaacatattaatataaacggggtaaaatcggtccattgcaacaatctktacaatggccttaagggggtatatttttatctttattttacaactgttaaaacttggttttacagatatcaaatgattttacaaagtcacatagctactaaattgtatagctggtatttaaaccaagggc

SEQ ID NO: 349250 - DNA, 529 bp, Homo sapiens
atataagatagtataaccatttgtgtagactgatgataatatcagaaagctaaagtgtctgagaaggctgaaagttaagaaacttgtttagatttattcaacccattgttttccaaacttttgattgataatcaaatctttactgttattgccattgctgtgcaaaacctaatcattcaatgaatctagtgttatagtccaatgttttgtaaactttaatatgctaacaattcacagggatctagtttaaatgccaattttgatttattagatctagggtggtctagatattctgcatatctaataaagccctggtgatgctgctgctatgggtcatttaggtaggaaggttcattagaaagtaytttagaataatgttgtaaagcactctcaaattgattaatattttccattgtagtatatagagtgaaaacccgaaaagtcagcaatgcagctaaaaattgtaaaggattgactttcaccaaatgctctactccaaaaaatggatacaaggcacagctactcaaat

SEQ ID NO: 349251 - DNA, 573 bp, Homo sapiens
tcataaaaattatgttttatagctatgggtaccaacttggcatcatgatgacaacaatcatgttaataataatgataaaaatattagccaattattattattattattattattatttttttttttttcgagatggagtttcactcttgttgcccaggctggagtgcaatggtgcgacgactgcaacccctgcctcrtggttcaagcaattctcctgcctcagcctcccaagtagctggtattacaggcacccggcaccatgcctgtctaatttttgtatttttaatagagatggggtttcaccatgttagccaggctggtcttgaactcctgagctcaggttatctgcccgcctcaacctcccaaagtgttaagattaaaggcatgagccattgcacccagcctagcccattattaataataacagtatatacctttagatttaaatatattatcttatgtcatttttactatgattgtataagatgcttttttgttaactccatttggcagatgatggaattgaggttcatagaaattaagatatatgtctaagctcatacagccattaac

SEQ ID NO: 349252 - DNA, 555 bp, Homo sapiens
gggagggaaaagataagtagtgagtatagctataaaagtgtagcacagaggatctttactgagaagagactattctttatcttgactgtggtgatggttacataaatacacacatgtaataaaatttcatagaactaaatacacacttgaatgtatataagtctaataaagtctgaataagatcagtggattgtaaaaataccaattttctggttgtgatatcatcttgctgttgttcaagatgttagcgttgggagaaattagatgaagagtatatgaggtcactctatattatttcttacaatagtatgtgaaactacattttcatacaaaraacagtttaattgaaaaaaatttcccaaactggattttttgatcctgccatagattattccaaagataacaaaagtttttctatttctgagcatgattaaagagaagataaagagtgcctctatttcctctgaagacagaataaactattttctttttggtaagaagacatgcaaaataccactgaaacaagtcccacacagtttaatcatctcagagcaa

SEQ ID NO: 349253 - DNA, 605 bp, Homo sapiens
ccatgctgaattacagatcttttctcattagtctgattaaaaacctaagctcattatggctcaggaagtgatttagtttcaatgccttttggttatgttccttttttattttccaggagtgcatattttggctaagaattcattttctattttaaatggttctaaatttcaattcttaaaatgtgtgttcattatcatatcattcagacctgtaaatgttctttttatattttaagaamtattatttataagcaaagtgattttaattttatctcatgtaatattttccttcacaaatgagaatcttcaagaaagacttttggcatgttatttttttgactttctgaataaaatacttttccataatactggagagagaatgttggctttggagttagatctaagatggatgcatacgtcagtcatttcctatagtctcatattggacaattcatttaaacctattaagtctcaacttcttcatcttttaatgaaattggaataatactagtggcttaatagcattgatatgaatattaaatacgttaatatatgtaaagcatgtaaaacaatagtggcccaacaaatgtgagcctcccttcctc

SEQ ID NO: 349254 - DNA, 620 bp, Homo sapiens
tttaacatatttcagtgatatagtttgggtatttgtccccacccaaatctcatgttgaattttaattcccartgctggaggtggggcctagtttggaggtgtttggattatagggatagatccctcatggtttggtgctgtcttcacaatagtgagttctcacaagatctggtcatttaaaaatgtgtggcacctcctccccacgtcactctctctctcgctcctgcttttgttatgagaggtgcctgctcctgcttcatcttctgccatgagtaaaagctccctgaggtctccccagaagcaaatgccaccatgtttcctaaaccacctgcagagccatgagccaattaaccgtcttttcttataaactacccagtctaagttatttccttatggcaatgcaagaatgacttaatacattcaggtactgtatttcaaggagagtaaaacatctaaatttttaatattaatgtagaatgcaaccactgttcagaagataaattcaatctaaaaggttgtccaccttccatttacttctatacaattctaccacctgcaaataatgctaattttgtctcatatccaatagttttatctcttatttctgtttcttgccttat

SEQ ID NO: 349255 - DNA, 620 bp, Homo sapiens
tttaacatatttcagtgatatagtttgggtatttgtccccacccaaatctcatgttgaattttaattcccagtgctggaggtggggcctrgtttggaggtgtttggattatagggatagatccctcatggtttggtgctgtcttcacaatagtgagttctcacaagatctggtcatttaaaaatgtgtggcacctcctccccacgtcactctctctctcgctcctgcttttgttatgagaggtgcctgctcctgcttcatcttctgccatgagtaaaagctccctgaggtctccccagaagcaaatgccaccatgtttcctaaaccacctgcagagccatgagccaattaaccgtcttttcttataaactacccagtctaagttatttccttatggcaatgcaagaatgacttaatacattcaggtactgtatttcaaggagagtaaaacatctaaatttttaatattaatgtagaatgcaaccactgttcagaagataaattcaatctaaaaggttgtccaccttccatttacttctatacaattctaccacctgcaaataatgctaattttgtctcatatccaatagttttatctcttatttctgtttcttgccttat

SEQ ID NO: 349256 - DNA, 559 bp, Homo sapiens
tctctctagcacaataaaactgctaaaatatctgcttatttttaaattattggttaactattttcagtagctgagcatcttgccctgcccatgttgaacttaggaaacaaacaaatgcctcaagaagaaattgcatcagagattgcagctctggacagaacagcaggagggggctcacattgtgaattttacctccagatcaactgcaagaacaaatcagcaatcctgagaggacccacagaccctctgaaggaagtggactgctccttcaggacccaggagaccctaccaaaatggcgagtgccccaatggcagaagtgggaaagggagaccctcctctccagaatatacacccccactagagaagctgaccatctgtttgcaggagaagtttccaactttacttggaactgagtcaattcagagagctgagcaaaatacaggggtagaggaggcagcagaattccctgggagctcactgggtcctgtagcaggccattcctgcctgccaccacagggatacaacaggasaggagcagggagtaaaactacacaggga

SEQ ID NO: 349257 - DNA, 520 bp, Homo sapiens
attgaaattatatcaaggactctctaagaccacagtggcataaaactggaaatcaactccaaaaggaaccttcaaaaccatgaaaatacacagggaaattaaatagcttgctcctgaacgagcactagatcaaaaacaaaatcaagatggaaattaaaaaattcttctaactgaacaataatgatgcaacctatcaaaacatctgggatacagcaaaggcggtgctaagagaaaagttcattgccctaaatgcctacattaaaaagactgaaagagcacaaacagacactctaaggtcacacctcaaggaactagaggtaacaagaacaaaccaaactcaaacccagcagaaaaaaggaaataaccaagatcagagcagaactaaataaaattgaaaaaaacaaaaatacaaaagataaatgaaacaaaaagctgattatttgaaaagataaataaaattgwtagaacattagcaagattaaccaagaaaagaagagagagagaaaatccaaataacctc

SEQ ID NO: 349258 - DNA, 657 bp, Homo sapiens
ccagcaccactctaataccaaaactaggaaagggcaaaatcacaaaacaaaactacagattgatatctttgatgaacatagatgccaaaatccttagcaacatactagctaaccaaatcctgcaatatatcaaaaagwtaacccaccatgatcaaatagttttcataccagggatgcagggatggtttaacatatgcaaatccataaatatgatacaccacataaacaggaataaaaaacaaaaaatcacatgatcatttcaaaagatgcagcaaaattattcaacaaaatccagcatctctttatgaataaaactctcagcaaaattgtcatacaaggggcataccttaatgtaataaaagccatctatgacaaatccacagccaacataacactgaatgaggaaaggttgaaagcattccctcggagaatgggaataagacaaagatgccccttctcatcactcctcttcaacatagtactggaagttgtagccagagcaatcagacaagagaaagaaataaagaacatctaaatcggtaaagaggaagtcaaactgtcactatttggtgatgatatattcgtttaccttgaaaatcctaaagactcctccagaaagctcctacctacccaaggagttgaaagacccctacaagg

SEQ ID NO: 349259 - DNA, 417 bp, Homo sapiens
ggcacttagattaattccacatcttgagaattataaataatgctgcaataaacttgagagtacaaatattccttagacatacaggattgcttttaagctttctacaatgcacaggacagccctctcacaacaacgaattatccatctgaaagtcaatcgtgtggaagttgagaaaacctgctctaaaatcaagagaaagatcctagttccattcmgacttagaggttgaaccatgggaccatgataaggggagacactgagtctctaaacccttggcaacacaagtgttttcttctacccaatggtacctgttttgaaagtttaattatatcaccttcttaacttaaagatggagctttacaattaagcaagaggtggtgacattgtgctggatagaccctaacttgaattcttggt

SEQ ID NO: 349260 - DNA, 417 bp, Homo sapiens
ggcacttagattaattccacatcttgagaattataaataatgctgcaataaacttgagagtacaaatattccttagacatacaggattgcttttaagctttctacaatgcacaggacagccctctcacaacaacgaattatccatctgaaagtcaatcgtgtggaagttgagaaaacctgctctaaaatcaagagaaagatcctagttccattcagacttagaggttgaaccatgggaccatgataaggggagacactgagtctctaaacccttggcaacacaagtgttttcttctacccaatggtacctgttttgaaagtttaattatatcaccttcttaacttaaagatggagctttacaattaagcaagaggtggtgacattgtgctggatagaccytaacttgaattcttggt

SEQ ID NO: 349261 - DNA, 660 bp, Homo sapiens
ctgattaagggtgggtctgccttcctcagcccactgactcatatcttattctaattgggcaacaccctcacagacgcacccaggatcattattgcatccttcaatccaatcaagttgacactcagtattaaccatcacagatgtcttccttagggaaactttctctgtgatcctcacctctggagattagagtaattcctttagtgakgtctcttcatgaaactttgcactttttcttcatacttattacaggtggaaggaattaattgttttagttattatttgcttgatgtttgtcttccctgagttggagcactgcacctgtctcattgaccacgctgctttatcacttgttctttgcacactatcttgctaccagatgctcaataattatttggtgaataaagaaagtcatcagacttaagaatcaagaggtttttaaattaagctaacttataggtactttgttttattttgaatgtcatcttgggaattcagtaacgtatttactttaaataaaagaaaacatcctgactaaaattattagtcaggtgaattattgtgggcctagaaaaattattagtcaggtgaattattgtagacctagaacagataattgctacatatctaaaaatggatcaaaaattatttagaaagatt

SEQ ID NO: 349262 - DNA, 660 bp, Homo sapiens
ctgattaagggtgggtctgccttcctcagcccactgactcatatcttattctaattgggcaacaccctcacagacgcacccaggatcattattgcatccttcaatccaatcaagttgacactcagtattaaccatcacagatgtcttccttagggaaactttctctgtgatcctcacctctggagattagagtaattcctttagtgatgtctcttcatgaaactttgcactttttcttcatacttattacaggtggaaggaattaattgttttagttattatttgcttgatgtttgtcttccctgagttggagcactgcacctgtctcattgaccackctgctttatcacttgttctttgcacactatcttgctaccagatgctcaataattatttggtgaataaagaaagtcatcagacttaagaatcaagaggtttttaaattaagctaacttataggtactttgttttattttgaatgtcatcttgggaattcagtaacgtatttactttaaataaaagaaaacatcctgactaaaattattagtcaggtgaattattgtgggcctagaaaaattattagtcaggtgaattattgtagacctagaacagataattgctacatatctaaaaatggatcaaaaattatttagaaagatt

SEQ ID NO: 349263 - DNA, 612 bp, Homo sapiens
cttacttgggagttggaataatctgtacaacaaaccccatgacacacttatatccctgaacttaaaatcaaagttttttaaaaaggaaataagagaaatagaaacaaaataatrtaaaataattgtaataaatatgtttgagagaatatatgggaaagaattttatcagagaaattgaatatattaaaaataaatctaaaggtaatgaaattgaaaagcagaataactgaaattaagaattggatagatttagcacatttatagaacaaataattagtgaactgggagttatgttggtaaaaagaaaaacccagcttggaacatacatgagaaaaaaagatacaaattagaaaaatgagagtaaaacttatgtagatcccagtaaaaagttttaacttaaatgtaatttgagtctcagtaaggaagaaataaacagtaagtgggtcagaagcaatatcaagaagataatgatactaactaatgagatatttcaactcagagattcaagaagtttgctaaccaaaacagaaaaacttcaatgaataaccatgcttaggtccgtcatagtaaaactggtgaaaaccaaaggcaagaaaagagcatccagagata

SEQ ID NO: 349264 - DNA, 608 bp, Homo sapiens
ctattttgttattgatgagggtcattaaccagattgattttatgagcactgatgcatcacaacctagtgtttaaaaaacactaattcagtcatgtgacagttctgttttcacwgctgaaatgaactttcatgggaggtgctgaattctcttcaactttcaggtcagagagtcagtgatccatgaaaccatgcaattggaagtattttcttgcagaggattacattaaataaattccaactcctattaagtcctatgattctgagaatacatgtttggaaaactaaaatttagggcttaataatcatttttgagtaagtgatcccaagtctcatgtaatcacttcagcacaggtattagtgttcctattttattgacagaaggaaaggaaagggaaggggaaggggaaagggaaggagaaggggaaggggaagagagattctgagagatttaacatccttagtgtcacacggctaataaatttagaagtggacccaaatccatataatcaaattactaacctcattcactttatactatatcactttgccttttcaaggactgttaagctttataaagtgcctattacaagctaaccactattccaaga

SEQ ID NO: 349265 - DNA, 561 bp, Homo sapiens
taagaatcatgatgaatgtcagccttggccttgaccacgtaggaatgggggggatgatttagtgctgatattccgtgaaattttatttttgattaccgacagaatttattaagtaaaataaacttttatcataatctaacatagaaaagtggttcagtttattaaaatrtttgattaacaccaaagaggatttataaaactagcccaaagactttatagttctatggctatattaggattaaagccaagtatttaaagtttaaaagctaataaattgttggtaatatataataggaaataaatagaagtggaaatagtatagattggaaatagtattggaaatactattaacagaggccccattgatttagtagagctgagactggaaatagacaatattatattatttgggtgactttagatgaagagttaattctgtagactgagtacagcagcaggtcttgaagctttttttgttttcgtcaccaatgctgcatagcagtgattcagtgttatttgcagattttggtgaaacatcaaacagtttttcaaaaagtaaag

SEQ ID NO: 349266 - DNA, 567 bp, Homo sapiens
gtgatgattcccatgcatttgtttgtgttactaagcatctggaagggtgtttctgctatcaattgatatagaacaaatggtagggaggtaaggattggaggagtgaaagcagaagaaaagtttaagttatgttttggacatcaaataaatatgtcatgtcagcatttaagtatatatgtcaggaattcaaaagtttcattgtgttcaaaattgtgttgtatcctggagcatacaaaattatgaaagatacaatcgctactctttttgatcctgtaactcctttactacagatttattttttgccttcacagtcacattcctaaaaggtagtttatacttatttcctcttstttaccacagatcataccacccactacaataaggcttcttcctttaccagtcccttaaaactaaccttcccgaggtaacacataagttgtcactctaaaagtttttagttattttgttacttgacccctctatgatatgtgacactgttgatcactttctccttgaaatttgtctttcattgattaatgagacaactcttcttctagtcccctctca

SEQ ID NO: 349267 - DNA, 558 bp, Homo sapiens
tccctttctttttattcttttaattcagcctcctgtgcatacctgccagatatttctggacttgttacctacaaagctggtattatgtgctaactagctgagatgataaagtgaatgctaagctgtatttgcttggtttttccatgaacttcctttaagctcatgactttatttttgttgcccactagacatgaaaatttatcatcctaagaagaatggttcagagcaaaaccaaagatccaaaccctgcacttctaatatgtacttcacttctaatgttttaatggttttatttttaatgatcaaagaagaagtcctgttataaagaggagcaattgttgtaagaacacktcaagagtctctttttattcttttcaaaagtgataaatactctctgagctggaaaagagatttagatgagcaactaaatgagtatgattactatgtcatctatagtttacctttaaatacttctgtaaaaatggttttcaaactttttaaaatcttaatttataggttgaaggactttgttgaagttcagcatgcacaaacatgcag

SEQ ID NO: 349268 - DNA, 603 bp, Homo sapiens
tggctgtattttcctcatttcacccacatacccagctatcacatccctacccatagtcgttctatgctttactgaattaatcttcttagattatttttgtgtactgtcaactttatttcaaatttcaggagctccttactgcctcagaatcatgtaaaccttttaacttggtatttcaagttatctgtgcttctctggaatacattcttatccttatgttttatgccattctatcattgaagaaccttctgtgatttttgtgcccctgagccttgatcattctgttttccttctctacaatgaccaccttgccttgcctttcaaaattcaattcagttaccaagggctagctcaagtcctgtcaacttcttgtttactatcatgagcagtgtaatttctttctcaactagtatcagtatattggaaacgagaatgtatgatgtattttgtattatcgaattgtattctaagttgatttttcttttgtctctttataataatgaaaataatagttaacatttattgaatgtttactgcatattgaacattgtcctaaacacatcacatacaaatgttacmataactccatgaagtaattaccaa

SEQ ID NO: 349269 - DNA, 611 bp, Homo sapiens
tttgaagaaagtacaccatgattcacttctaatgaatgcttttatatgtctctgcaaatgtattcacccaaagaagttttcatagaagcaggccaagaaactattctttcttgtgatatttyatctagcaatttttaaagtaaaataattccctaaagctaagaagttttcttttattatcaaatagcacacatagaaatttcctgtgtctggttaaaatcttaccagataaccaattgaaattaaaatattttctaacccacaaaagcatatattccacaaagactgagaacacttgatagatacacaaaaacatgaactaaatgctttgatagtcaacctaccagaggcaactaatgcagaccttacatccttttaaaaagtgaatgttacccaatatttatacgagtaaacttttgcactctgacttcttggggttttgttttggttcaaattttctgtgttttcttataaagacctatggaactttagtctttataataaaaactaaaaaaaaaaaaacaccaaataaaaataactgcacatccttgattcttagtatctgggactcagttcagttggctgatgattatgtgtttgataaagactta

SEQ ID NO: 349270 - DNA, 629 bp, Homo sapiens
ttcaggaagcctagagcatcttatacatttttggtactccttatggaatgtggattgtgtagttattggccctgaatgtataaactatgaattaagtgtcacttgaatggaaaattatttgaagaaagtacaccatgattcacttctaatgaatgcttttatatgtctctgcaaatgtattcacccaaagaagttttcatagaagcaggccaagaaactattctttcttgtgatattttatctagcaatttttaaagtaaaataattccctaaagctaagaagttttcttttattatcaaatagcacacatagaaatttcctgtgtctggttaaaatcttaccagataaccaattgaaattaaaatattttctaacccacaaaagcatatattccacaaagactgagaacacttgatagatacacaaaaacatgaactaaatgctttgatagtcaacctaccagaggcaactaatrcagaccttacatccttttaaaaagtgaatgttacccaatatttatacgagtaaacttttgcactctgacttcttggggttttgttttggttcaaattttctgtgttttcttataaagacctatggaactttagtctttataataaaaactaaa

SEQ ID NO: 349271 - DNA, 635 bp, Homo sapiens
gatgattatgtgtttgataaagacttatgaatcttgtgtataataaaaataatttaaaaaacaacaaaaataatctgcaaatgtgtggtttctagtatttaagactcagttcactgttcttcgctgatcattatgtaacattatcagagacagatttttgtgctgtgcycgattgcagaagaccttccctgctaattagaaaagtgaggtctaatccaaaagacaaagatccagtagcaaatattgtccaaagggtgataaaatcatccttgttttacggagtaaaaatttgtgacaatttagaaaactgaattgcacccagagcatttggttgtagttgcagtttttcaagtgatagatgatgagggatgggatttaacacattggccattgagatagatatgggaaatggatcttaaaaaatctctagatataactgatactctatatatggtttaaatagaaagaatgggatatagagggggttagtataaaaaatgacatcaaatgccctggctgcggaagcagagccaatgattttaagagaacaagggaggtagagaaagattagaaggagatgagaagttctgttttagaagtgcccaatttcaggtacctataattaaagatggtta

SEQ ID NO: 349272 - DNA, 559 bp, Homo sapiens
ttcaccgtgtaggctaccaattgtttataattcgacctatatttagaagaaaatgaccaggtggatggattgattttgaatggtgcctyggttggctgaattttgctgaaggaattttattacatgtggtttctgaatcattttcagtatcagtgcctaagaaagggaattgtgagccaaaaaactaattgtcagattaatagagttctaatatgtaatgcaaatattatgctaatgaaataaaagtgcagacctgcccttaattactcaacctgtctctccttgggacatgcatgtgtttattttattgctcagctttaatctattctcattattcttgatcaggtttgtaaatgggttcaaaagacctttgggcctgacaatattttaatcaaccccaaaatctttcctgcttcagcaatattatataaaatcacagcactctgtattcccagtccaccttcatgtctgctttttcttaattatctaaatagagaaaaactatttgcaacatcgcaatctctatactagaccatatctccaaagagaaccttaatcc

SEQ ID NO: 349273 - DNA, 533 bp, Homo sapiens
ctaacataatgacaataatgctgctgatgaggatggtgatgatgatgacaatgataattataactacagtaataataacttccaacgtttatggtgtgtttaattcaatcttctagtttggaatactattttcactccttatttttatttttagtggaaaacctctctcttctgaatttkagagacatatccaactgcctactcaacatctttaacttggatatctgtgaggcatctcaaacctaatttatacaaataattggcttcctgtaagatactgaccctcccatggtcactccatcttcataaatgacacttccattccaaaaacaaaacaaaaaaacttgaagtcattttttttcatatctcatcccatttgtcagcaaatcctggcagtcttgtcagtctgatgttagcaaccatgtgtttccccattgtgcaactcacaacgtcgagttttgcagaaggaattgttacttatatgttttgtgccattggaatatcaaaataatttttaaattatgagctgcatg

SEQ ID NO: 349274 - DNA, 649 bp, Homo sapiens
ctagatcataaccagcagccaaagttaccaaattcaactaaaaatttcttatccttctctatatcacctcaactaacacatatcatttgaatgaaggtttttagtgattatcataccccagattaaagtttgcctattgtggtacagttccagtaaattttaaaaagatagtaaaaaatgtgtattaatatacgttatgtctcagtcattactctgagtataccaaatacactcagagttggakaagataaaatgaagtaagagatcaatagctggtttaaaaatggacacatgtatacatgaattaaagaagaaagaaataagtacagctattggatagttcttcactggaggggacttctacacagtcaatctgaggtctgtggtttctggaccccaagtgcgtgatggctgtagaatagttaccatggaaaaccacctctaaacatgtgacttagaatctcctctaaacatgtgaatgttagaagttttaagtgaaagagcgaagaggctaccagccagtttatttgtattatgggtttgtgaggaactgaagtagactctggaattgactattttagagaagttgggccacagtgtgacatggtgtgcaggcattgaagcctatgaaggggtcaccccaaattct

SEQ ID NO: 349275 - DNA, 595 bp, Homo sapiens
gacttggttaatatgcctcttaagttgcttgtcatctataacttgttctcatgcattttgttaaagaaattggatcatttttttctgtacaaatttttacatttttatttcactgattgcattttgtagtgttatcagcatcttgtattattcgtatttccatgtttttctgcacttgcagacctagaagcttgaatagattgaggtttaattgttttaacaagaatatgtcatagggggtgatatatatttcaaaataccaatgctggccaggcacagtggctcacgcttgtaatccgagcactatgggaggcccaggcaggcgggtcacttaaggtcatgagtttgagaacagcctggccaacatggtgaaacccatctctactaaaaatacaaaaaattagccaggcatggtggtgggtgcctgtaatcccagctacccaggaggctgaggcaggagaattgcttgtgcccaggaggtggagaytgcagtgagccaagattgcaccactgaactccagcctgggcaacatagcgagaatccgtctcaataaataaaaaataacagactaccaatgctaatattagttatgaa

SEQ ID NO: 349276 - DNA, 634 bp, Homo sapiens
agggaccagaaattttctgctgaacctggtaaacacaggttatctctctgtattatattcctccgtactccactgacctagctcgctttctctattgcccagacattggttggcctttgttttgtagtttgtgaagggtctcagccctttaatgcctatctggagacactggaggttaataagaaatagtaggtgctaaataaatatttttgaaaaaagaaatgaaccttaartgttttacgtacattattctactctacctcctttctcaagttgccttttctgactacccatctaaatctgaggaaagatttgaactatggaattcattcccagatgtatataaaattaattgaggacttcctatgtgctatatagttgtatagtgaactggatatttaacataatgtgcaatttaatgttgttggcaaccatctctatttttaagattacaaaactcagagacatatacctagaaaatttattgattcaagcacacatcaaataatagttaagtggctaagtgcttatcacataacctgacagtcttctaagtccttgatctcatttagtcttctgatagtcttattaggtaggtgctattatttccattttacttaggacaaaattgtga

SEQ ID NO: 349277 - DNA, 555 bp, Homo sapiens
aatttgaatttcaaatgtatgaaattttagtgtaagtcccatgcaatatttgggacacccttatactaaaacaattattctttgcttatatgaaattcaaacttaactgggtgtcctgacaaccttactctcctacccagactcagcatttgtacactttacactcagcatttgtatatttttattgcacatttaattttttgaagttttggaaactatccagacaactgcatatctaattgatttcagtgcttatcactagtccttttataccatgatttccacattcmcaaactctctttaaggcacatatacgctacactgttttcttgcttatcaaaaatatttgtttcctgcacatatgaaagacacttttgttataaaactggtgataataaacttttcaaatctcaaaattctgaacgtgctgctccattgccttctgagttactgttgcagagctctgtatccaccctccctttctggttttgcagataaccagaatttttctttctgcatgcttttaattgcttctttctaacctgtttctaaggt

SEQ ID NO: 349278 - DNA, 530 bp, Homo sapiens
ggccactggagaggagcggtgctcacgggtatcgttctcgtcagcgggcggtggggacgcggggtcttggaattgggaatcacgcttgagggcgtccatgcggaacgtgcagctyacctcagcttgcttgcagttacccagtttccacgctgccctccaaggtctgtgccggaaaacctggaggagggcgcgagctgacgggagggatggaaacgtgggctgcggaagtaagacaagcgttgagagcagcgacagagggcgagggggtgggcggcgggacggctggggtcaggatccagctccgctaaagcaaggatttaaccacactcctgtcgcctcttccactctgcaataggggcagtctccagacgcgcagagtggttagtatgttatgatcagctggtttgggaatggctggtattgatgcctcatggaaaaaccaagcgtgactggatcaatcaactgggaaagacaatggagttttaattaattcatattgccttgttttcccagtcattcctggccacctc

SEQ ID NO: 349279 - DNA, 601 bp, Homo sapiens
gaactggcgcttgtgagtgactgaacgggccactggagaggagcggtgctcacgggtatcgttctcgtcagcgggcggtggggacgcggggtcttggaattgggaatcacgcttgagggcgtccatgcggaacgtgcagcttacctcagcttgcttgcagttacccagtttccacgctgccctccaaggtctgtgccggaaaacctggaggagggcgcgagctgacgggagggakggaaacgtgggctgcggaagtaagacaagcgttgagagcagcgacagagggcgagggggtgggcggcgggacggctggggtcaggatccagctccgctaaagcaaggatttaaccacactcctgtcgcctcttccactctgcaataggggcagtctccagacgcgcagagtggttagtatgttatgatcagctggtttgggaatggctggtattgatgcctcatggaaaaaccaagcgtgactggatcaatcaactgggaaagacaatggagttttaattaattcatattgccttgttttcccagtcattcctggccacctccctaaaagattaaaacctccaagtatcgtacttattttaaaata

SEQ ID NO: 349280 - DNA, 549 bp, Homo sapiens
atctgttggaatttgatgtttttctcattattagactggggttatgggtttagagcaggaagatcacagaggcaaaatgccattttatcacattgtctcgaggctacatactgccaacatgacttatcgctattaatgttaatcttgatcacctggctgagatggtatttgtcaggtttttccactgtaaatttaccttccccctcccccsaccccacagcatttcctctttggcaggaaattcctatgcagagcccatactcaaggggtggggagttatgctgtacctcgtgaatggctgagaatttgcataaattatttggaatttttctgcataggagatttgtttactctcccccatgtattaataagttgccatttatatcactgccttatgagtattaatttaattgtttgaattatctaatattctgttgcttatattgttccagatttggccataaggagctctttcatttggctcctgtgtacctttgatgtgccccaataaatgtttcagtttcttttttttttttttaattttttgag

SEQ ID NO: 349281 - DNA, 612 bp, Homo sapiens
aaggactatatattactctattaggaagccttgactttattctgtaggtaatagaaatagagaattagatctcacagattgggtaggggagtgagacagtttgatttgccagttaaaaatattatgttgacatcaatttagagcaggagttggcaaaatatggcacacaggccaaatattttttaaaataaagtattattggaacatagctatgtccattttcattttgtctatgattgcttttgtgctatgaccagagttggtacttgtagcagagactgtaytgtctgcaaagtctaaaatatttgttatctgcccctttacagaaaaagtttaccgacatctcctgtaaaggagagagatctgagggttctgaaaataggaaaaccagttagactattgtgatagattaggtgttagagaatgagctttgggaaagcaggagtttgaacctagaggaattataaacgtataaataggataccttttgacataaattcacatgtactggcctgcatgagtggaatttgggagtgggggagaaggtgtaatactttaattatgtggcaagttttatttgaggtccctgtgggactttcacaatgaataaac

SEQ ID NO: 349282 - DNA, 491 bp, Homo sapiens
aaccccgtctctactaaaaatacaaaaaaaaaattagccgggcatggtggtgggcgggcacctgtagtcccagctactagggaggctgaggcaggagaatggcgtgaacccaggaggcggagcttgcagtgagccgagatggcgccactgcactccagcctgggccacagtgctagactccatctcaaaaaaaaaaaaaaaaaaagctggtctagctatcagttacaggaaatacagaggatagtggaacatgttaaactataccgtgataataccatgtgtaaaatccaaactgggaaactataagacagtccagtttttaagggaatagggaggagtatggcaaagtgatatagagattagttatacatcttttaagtttttaaaatcatgtgaatgtgtggaccttataagacatgaggccatgaactggatatytgatgaggaattatcgattggggacagtgattatattggtattgtggttatat

SEQ ID NO: 349283 - DNA, 530 bp, Homo sapiens
actaggagcaattaaatgccaacaaattagatgcacttagatgaaattcacaaattccaaaaacacaaatgaccaaaactgactgaagaagaaatagaaaatctgaactcaactcascaataacaaaagactggtttagttatttttaaactttcaacaaagaaaactcaaagatgatatggcttcactggtaaattctactacacttttgaaaaattaacaccagtattctcaaactcttccaaaaaataggaggaacacttcttaagttatcctgtgaggcaagtattaatctgatgccaaagccagacaaagacatcacaacaaaagaaaaatggcaaaccaaatccaatagcgttttaagaggactatacaaaatgacttagtgggattgatcccagaaatgcaagtatggttcaacaaatgaaaatatatcagtgctgtacatcatattaatacagtgaaaggggaaaaattacacgattatctcaattgatgcagaaaaagcatctgacaaaatccaatgccct

SEQ ID NO: 349284 - DNA, 584 bp, Homo sapiens
attcaatgtcatactaaacgttctagctagtgcaattaggcaagaaaaaaagaaaaggtatcatgattggaaaggaagaagtaaaactatctctactggcagatgttatactcttatatatccaaaatcctaaagaacccagtaaaaaactattagacctaataaactcaaagttgcaggatgcaaagtcaacaaaaataggttatgtgcctatagcaatgaacaacccttaaaagaaaccaagaaaataatttcatttataatatgtsaaaaatagaggtgtaggacttgtctgctgaaaagtacaaaccattgttgaaattaaagacctaagtaaatcctgcgttcatgtattggaaaacttaatatcataaagataacactcccccaaagcaatctacagattcaaatgcaatccctatcaaaatctcagctgcttttttttttttttttttttttttgtcagaaatggacaagctgatcctaaaattcataaggaattggaaaggacccaagatagtcaaactgccttcataaagaagatagttttagaatgtatacttctcaatttcaaaactcactaa

SEQ ID NO: 349285 - DNA, 584 bp, Homo sapiens
attcaatgtcatactaaacgttctagctagtgcaattaggcaagaaaaaaagaaaaggtatcatgattggaaaggaagaagtaaaactatctctactggcagatgttatactcttatatatccaaaatcctaaagaacccagtaaaaaactattagacctaataaactcaaagttgcaggatgcaaagtcaacaaaaataggttatgtgcctatagcaatgaacaacccttaaaagaaaccaagaaaataatttcatttataatatgtcaaaaatagaggtgtaggacttgtctgctgaaaagtacaaaccatygttgaaattaaagacctaagtaaatcctgcgttcatgtattggaaaacttaatatcataaagataacactcccccaaagcaatctacagattcaaatgcaatccctatcaaaatctcagctgcttttttttttttttttttttttttgtcagaaatggacaagctgatcctaaaattcataaggaattggaaaggacccaagatagtcaaactgccttcataaagaagatagttttagaatgtatacttctcaatttcaaaactcactaa

SEQ ID NO: 349286 - DNA, 648 bp, Homo sapiens
tactcagaaaatgttgagaattaagcctcaagagtagaatccagagcaatgtcgcttactaggcaagagtagaagaaacctcaaagcatactaaaaagacaggaccaaaagatgtaggggaaaaccaggaaaatgatgtcactgagaccaaggggtaagaatatttaagggagaaatgctttaaagggtcaaaataatacagcccaagtagtgtctgttcacttaaggagatactaaaatgcactggaatctaagccagactgtggtgtgttgaggaaagaggaagtgaggaagcagacaaaattaatgcagacaacttattcataaagactggcttgaaggagaggraaggaagatgtttatatatttcagtgtgattgaaggtgccaataaagacaaggttgaggatgctggagagagaagtggaataattgatggtgtgatacaggagggaatttattagccaatatttatgtagtgcataatatgccagatactgttctgagggctgaaaatatgattgataaacgaaatcccagccttgtgaagatcacattctagtagacgtatacaggcaaatacaagcaaataaggtaattgtagatagtaataataattacacagaaaataatgcagtagtaactgatt

SEQ ID NO: 349287 - DNA, 433 bp, Homo sapiens
cagcatttcttaattaaagaaaatgccctacctctccttccagcagagcctacattttcattacaaatctctcttagaactaccacaaactcttgctgttttgaactccttttaggtaaattatttgtaaggcatagtaattttttgttcyacagttattccagttgtcttttttccccctcaaccatgtattgtaagctactttagaataaggactgcacttcacttttcttttgtatccctaacagagtatatatagtaccaatttgtttggcccttactaaaatttgattttcatcacttagaacctcaaacattgtcctcagacattgtcctatcaatttctggtgtattctggctcctaccctattccttcaaatccattccttctctggtagtgttttggggagtgacacctttgattaaaaaggaa

SEQ ID NO: 349288 - DNA, 648 bp, Homo sapiens
cttgaaagaggaccatttccatgctcttctttctcagccttctgggctggtcactgagttgaagttctaaattgagggggagtcaccaacaaaaatcaaataatagtgagtctgccccagcactgcccccagttacattaaagaacatcccccactgtattattttctacgagagttcaaagatacaaygaatctattgcagcacttaaatattagaagtgttaaatatttataattctgaatctgctcttattcccaccaccagcagatttaggagatggagacacagagaactacacaatgagaaatcttcctggggagatgggaggaatgagaagtcctaccaggatgaaatcagcttgattctacagatgcttgctaccccatatcatgaaagtagatttaagccggtcctatgaatagcaaatccaggctgtaagagtctacttggatagacaaaagcctcaattataaaaacaaaacaagacaaaacaattcaaagcttacctgagagtctgtagtttacactctgggtgtttcaaggcctcacacaatgactttactccattatcccctatatcactcccttttaggtcaagatgcatcagattcttgttatgaatcaaagaagtagagatatcctgacaa

SEQ ID NO: 349289 - DNA, 648 bp, Homo sapiens
cttgaaagaggaccatttccatgctcttctttctcagccttctgggctggtcactgagttgaagttctaaattgagggggagtcaccaacaaaaatcaaataatagtgagtctgccccagcactgcccccagttacattaaagaacatcccccactgtattattttctacgagagttcaaagatacaacgaatctattgcagcacttaaatattagaagtgttaaatatttataattctgaatctgctcttattcccaccaccagcagatttaggagatggagacacagagaactacacaatgagaaatcttcctggggagatgggaggaatgagaagtcctaccaggatgaaatcagcttgattctacagatgcttgctaccccatatcatgaaagtagatttaagccggtcctatgaatagcaaatccaggctgtaagagtctacttggatagacaaaagcctcaattataaaaacaaaacaagacaaaacaattcaaagcttacctgagagtctgtagtttacactctgggtgtttcaaggcytcacacaatgactttactccattatcccctatatcactcccttttaggtcaagatgcatcagattcttgttatgaatcaaagaagtagagatatcctgacaa

SEQ ID NO: 349290 - DNA, 513 bp, Homo sapiens
cctagtctttaaggtgacatcttctgatttctctcaggatgttgcctgttagaacccagccaccttgctgtgagaagcccaagcctcaaagagaggccacatgcaggtgctctggcccataagaacagttaagttctgagaatcagccagcattaactaccacccatgtgatgtgccatcttggacattccatcccatttgagccctggaatgctgcattcccagctaacatcgtatggaacataagaactcctcagtcaactcacaaaatttgagaatacaatgattgctcttttaagtcactatgttttgggtwatctgttaaaagtaacagataaccaaaaacagtgttctagtagtatttatgtaatagcagaatttccaattgtatttccctaattaaatctttgttactcatgtttgtacaactcatttttcatataacttcctcactgttttttattttgttatttatttatttattttagagacagggtcttgctgttgcccagg

SEQ ID NO: 349291 - DNA, 544 bp, Homo sapiens
tatagtataagtatagttatacaatggaatactaatcagcaataaaaaagaaactactaaaagttgcaacaaaatggataaattttagaagacattttgttgagcacaagaagatggatatagccaggtgtggtggctcatgcctgtaatcccagcactttgggaggccaagatgggtagatcacttgaggtcaggagtttgagaccagcttggccaacatggtgaaaccctgtctctactaaaaatacaaaaattagccaggtgtggtgctgcrtgcctgtagtcccacctactcgggaggctgaggcaggagaatggcttgaacctgggaggcggaggttgcagtgagccgagattgtgccactacactccagcctggtgacagagcaagactgtctcaaaaaaaaaaaagaaaagaaaagaaagagaaagaagataaattaaaaaaaatacatactgtataaatcaatcaaaatgattccaaaaagatacaaagctgaactctggtgacagagattagaaaatgattgtctctgggaatgg

SEQ ID NO: 349292 - DNA, 532 bp, Homo sapiens
ctccattgtcttgtagccagtttgatcctagatccagatgcgtcaggctcttgttgtgtagaagagaagttgacagatattcactgctaagtgaagtgaaatggcaacgcctcagcctacaggaaggacaatgtgaagaaagatggaatcattgctctactgtccagagatttctttctctgaagagatttcatgatttgatcccttatctatttgccaacattccatctcagatgaaacaccctcactgccagcctgtctcacttgggaaacagatatacatcaaattgggctacaaactagactcatattcttcagcatttttcttacaataaattaaatgctaacctcattacattacacatatacatagtactctgttgtagaagtagctccatggactagaagaacaggcagatggagtagaataagagtaatcttaataaagtaagtactctttgtaygtaatagaagcggcattttcaaacagtaaggaaaatccatattatgccattattgcttttgtacaata

SEQ ID NO: 349293 - DNA, 556 bp, Homo sapiens
gcagcctggacctccctgagctcaagtgattctcccatctcagcctcccaagtagctggaactacaggtgcttgccaccatgcctggctaatttttttttwaatttattttttgtagagatggatttttgccatgttgtccaggctggtaaggaccagacttctttagctggtttatttgttttgtttttatcttttttctttcctctgatgcaggatcccaactggaatatcacattacatttagttgtcatgtctctttaggctcttctggactgtgacgatttctcatactttccttgtgtttcctaaccttggcagtgttgaggagtactggtcaagtattttgtatgatctccctctattgggagttttctgatatttttcctatgattagactggagatgaaggtcacagagatagagtgccatttttattatatcatatcacaggtacatactatcaacatgacttatcattgttggtgttcaatttgatcgcctgactcaggttgtgtttgtcagaagacattttttttctttccaacagtggcaatg

SEQ ID NO: 349294 - DNA, 556 bp, Homo sapiens
gcagcctggacctccctgagctcaagtgattctcccatctcagcctcccaagtagctggaactacaggtgcttgccaccatgcctggctaatttttttttaaatttrttttttgtagagatggatttttgccatgttgtccaggctggtaaggaccagacttctttagctggtttatttgttttgtttttatcttttttctttcctctgatgcaggatcccaactggaatatcacattacatttagttgtcatgtctctttaggctcttctggactgtgacgatttctcatactttccttgtgtttcctaaccttggcagtgttgaggagtactggtcaagtattttgtatgatctccctctattgggagttttctgatatttttcctatgattagactggagatgaaggtcacagagatagagtgccatttttattatatcatatcacaggtacatactatcaacatgacttatcattgttggtgttcaatttgatcgcctgactcaggttgtgtttgtcagaagacattttttttctttccaacagtggcaatg

SEQ ID NO: 349295 - DNA, 388 bp, Homo sapiens
taagtctgtactttttatcaattgtcttgctttgtgtcactcttgtaatattcacattgatatttctgaattcctaaattttataaatattggaaagattttttcaaatcagaaaaaaaatcattaacactctcctctcacatgtataaagtaataaaaaatawaactctttcctagttttctagagtttggaggttttttctcacctgtattaatatataacatcaatcaccagtgattcaatcaaaagggaagccaaaagctgaggattatggctccaaactgacccctaaatgtaagccagcaaaacaggagacagattagcttatcacttatatttagttccttcttaagagcctgcacgacttcctcttaatagtgctaccaa

SEQ ID NO: 349296 - DNA, 632 bp, Homo sapiens
tcactccagtaaaaatgacctatccaaaattcagtcaataacaaatactggtgaggatgtggagaaaaaggaaccctcatacactgttagtagcagtgtaarttaacacaactattatggagaacagtttggaggttcctcaaaaaaaccaaaactagagctaccgtatgatccagcaattccactgtggagtatatacccaaaagaaagaaaatcagtgtattgaagagatacctgcactcccatgtttactgcagcactattcacaatagccaagatttggaagcaacctaaatgtccatcaaaaggtgaatggataaagaaaatgtggtacatacacacactggagtactatccagccataaaaaagaatgagatcctgtcatttgcaacaacatggatagaactggagatcattatattaagtgaaataagccaggcacagaaagacaaactttccatgttctcacttatttgtgggagtgaaaaatgaaaatatggagatatctcatggacatagagagtagaatgatggttatcagaggctaggaagcacagtgggggaatgaggggaagaggggaatggttaatgggtacaaaaaaatagttagaaataatgaataagactgagt

SEQ ID NO: 349297 - DNA, 564 bp, Homo sapiens
ccatgttgtccaggctggtaaggaccagacttctttagctggtttatttgttttgtttttatcttttttctttcctctgatgcaggatcccaactggaatatcacattacatttagttgtcatgtctctttaggctcttctggactgtgacgatttctcatactttccttgtgtttcctaaccttggcagtgttgaggagtactggtcaagtattttgtatgatctccctctattgggagttttctgatrtttttcctatgattagactggagatgaaggtcacagagatagagtgccatttttattatatcatatcacaggtacatactatcaacatgacttatcattgttggtgttcaatttgatcgcctgactcaggttgtgtttgtcagaagacattttttttctttccaacagtggcaatggatgcagcaatattcagtttccagaatcagcagctccggcagcagtgtcctgtgctgatggtgttggcaggtaaatcatgcttctagtgctgaatggaagtcttgtcctcatagagccaattctgtggtacaattttg

SEQ ID NO: 349298 - DNA, 564 bp, Homo sapiens
ccatgttgtccaggctggtaaggaccagacttctttagctggtttatttgttttgtttttatcttttttctttcctctgatgcaggatcccaactggaatatcacattacatttagttgtcatgtctctttaggctcttctggactgtgacgatttctcatactttccttgtgtttcctaaccttggcagtgttgaggagtactggtcaagtattttgtatgatctccctctattgggagttttctgatatttttcctatgattagactggagatgaaggtcacagagatagagtgccatttttattatatcatatcacaggtacatactatcaacatgacttatcattgttggtgttcaatttgatcgcctgactcaggttgtgtttgtcasaagacattttttttctttccaacagtggcaatggatgcagcaatattcagtttccagaatcagcagctccggcagcagtgtcctgtgctgatggtgttggcaggtaaatcatgcttctagtgctgaatggaagtcttgtcctcatagagccaattctgtggtacaattttg

SEQ ID NO: 349299 - DNA, 564 bp, Homo sapiens
ccatgttgtccaggctggtaaggaccagacttctttagctggtttatttgttttgtttttatcttttttctttcctctgatgcaggatcccaactggaatatcacattacatttagttgtcatgtctctttaggctcttctggactgtgacgatttctcatactttccttgtgtttcctaaccttggcagtgttgaggagtactggtcaagtattttgtatgatctccctctattgggagttttctgatatttttcctatgattagactggagatgaaggtcacagagatagagtgccatttttattatatcatatcacaggtacatactatcaacatgacttatcattgttggtgttcaatttgatcgcctgactcaggttgtgtttgtcagaagacattttttttctttccaacagtggcaatggatgcagcaatattcagtttccagaatcagcagctccggcagcagtgtcctgtsctgatggtgttggcaggtaaatcatgcttctagtgctgaatggaagtcttgtcctcatagagccaattctgtggtacaattttg

SEQ ID NO: 349300 - DNA, 602 bp, Homo sapiens
actagcaatagaaacagtgttctattatttattttatttctatctataatttacttgtatttatgtatgttctgataacaaatagcatacaacatacacatatcttaagacagtcaacatcaatattatggtcataaaatattaatctgtaatctccagtatccacactgcagtctagaaataccatttcccactaaatgaaacccagattctctctgtaaatggctaattccatgtctgtgataggcaatatctgagcccaaaggtcaaagtttattaggaccatgtcaaaatgactcagaagccatcttggagaggctcccwctggccaagaataaaacaattggagcattgataaaactaataactgcaaaagattgaagctcatcgactatgcataagttcttgaacttaaaatgatacttaaaaaacaaacagatttggaggtttatttactattctttctactttaacattttctattaacatttacagttcaagaagttttaaaaacatcatgcagctataacgtaaataaaggtctgttgcacctgtctttcatttcatcccttttgggcttctgcagtaatttgtgtttatag

SEQ ID NO: 349301 - DNA, 586 bp, Homo sapiens
tgttcactgaaatatgttttctacttttctgtagagtacagtatagggtaagactccgtctcaaaaaaaagaaaagaacgagttagaaagaccacagtaatgtyttccttccccctttcaagaaaatatttaaaatatttcataaaaaatggagcagaaaataagaccacataatccctgatttctagaaacgtacaatagggttggagctcttgtccacagtgcaggcaccacttgggaatgactcggtcagtgaggagcagtgactcaaaacagcctagatgcttctccctggatgatcaggaaggcgatccccgccccagaggtgggttttgggggaacgttgggtgagggtagaattgagaaagactaaactgtgagcaactattctcgtgtttaggtaaaacaagtacaggaagtgggagataccgaaggtgggaagccagaggtgcacgttcccataacacccactaattgtacaggtgaagacagttcagggggctcctgagcagacgctgggaagctctacagcggggctgcagtttagtacgtaggattaggcctggagggaggagacagagttcca

SEQ ID NO: 349302 - DNA, 650 bp, Homo sapiens
accagtgtaagttacaaacatgcaaaaaaatggagcaccaaatagaacaacagaaaaggacagttgttcacagcatgaaagttgaaatgagaaagcagaatagtgctttgttctgctgcagttgggaatgccaacattggacaactcgaatcttctgccactatgcctgagaacgatggcaaaagtgctgtgattatcaccttggggctcacaggtacactttatcacatggktgaatttggaaatatagaagctgtgaataatgaggatagattataagcatttctagtgagctctttctataaacaatgttgtaatgaagatcccaatctatgtctttgttgatatatgtgtggttttcacatttttgtatagaatagatatccacgggtgaagtgaacagtttacaaattttaaaattaaataggtattgccaaattctttttcaaaaatgtttttggaatgtgcactcccactacagatgtatgaatgcatgttttcttcccttctctggaagcataaggtgttttttctccaattttgaccctcctgtagatgtaaacatgcctcattagtttttgtttccctgcttatggatacatttgatccttactatccacgttttagacaatgttgattttatctttaga

SEQ ID NO: 349303 - DNA, 650 bp, Homo sapiens
accagtgtaagttacaaacatgcaaaaaaatggagcaccaaatagaacaacagaaaaggacagttgttcacagcatgaaagttgaaatgagaaagcagaatagtgctttgttctgctgcagttgggaatgccaacattggacaactcgaatcttctgccactatgcctgagaacgatggcaaaagtgctgtgattatcaccttggggctcacaggtacactttatcacatggttgaatttggaaatatagaagctgtgaataatgaggatagattataagcatttctagtgagctctttctataaacaatgttgtaatgaagatcccaatctatgtctttgttgatatatgtgtggttttcacatttttgtayagaatagatatccacgggtgaagtgaacagtttacaaattttaaaattaaataggtattgccaaattctttttcaaaaatgtttttggaatgtgcactcccactacagatgtatgaatgcatgttttcttcccttctctggaagcataaggtgttttttctccaattttgaccctcctgtagatgtaaacatgcctcattagtttttgtttccctgcttatggatacatttgatccttactatccacgttttagacaatgttgattttatctttaga

SEQ ID NO: 349304 - DNA, 514 bp, Homo sapiens
tgtcaagtaatggaagggaaatgaatggtagaaagcataaatatacccagaggcttttttgaatacaacctcctcatgaaactcataatgaaaaaaaaccctaaatatacaagatgagtaatgatcaacaaaagacaaatactgaaaagattgttacaggaggatgctatgtgcaactctgtgggtgcacacatcaaatttaacataaatagatgattgtattctcccttcctggtcaatgagaaagacagaacccttgggcctggcgataatgttaatgatagtggccacagcctgcctctgggccctgaattcacctaagaayaatttaattttgaatcagacagactcgggtgctgctcccagcactgcatttactgagtcagagaaaacctgaaaacatagatgctatagagcagagtggaaagatgattaaatagccacatcgaaaaagcgtccagatggtttacagctcggttctctctaaccttgaaacagatcgttccccaggact

SEQ ID NO: 349305 - DNA, 549 bp, Homo sapiens
cagtgaaaaggaaatgatactaggtggaaatccctgtggtttgtttttggataaaagtttcccaatactaggtaaagatgttcaggtttaaataatgttttgtgacgtgcatgtactggtgttttgcttgtttttccttctagctacacatgaaaataaggatattttccttgttactataaaagtattacatattcctttaggagctgctttcccccccttgtttgtcgtctcttaaaaaaagcattttctaagcagactgagaaaggagtctattaacaagcaaattgcatttgtgagtaagctgaagtgtagggagtggtatttcccactggggctctggaggctcagctccccagtgcagyggctgaacagggccaggcagtgtgaggggactggagctgggcactctgctcagggggtggacagagaagggaacctgggaaggcccccggcaggcaggactcagaggctctcaaactgctctcagatctgcaggactggcttcccacaactctgttcatcctcctccatcgcaaaatgaatatg

SEQ ID NO: 349306 - DNA, 628 bp, Homo sapiens
aaccaatattatgatatgcaatactttttttctacatttctctaacatgctgatctgtggagataggtggaggaggtagtgcttgttataattaaataatcacacattagttttcactaaggatctttcatcgaaggatgttaagagcaaaatggattctgcattattgctgcagtagatttttaattttactgttaataagcattaaagtcccacagcatgcaatattttgtttcttcccttttaaagaattaaatttggtgttttcccttagagcttgattgatttgctagattaaaaagcatttaaaatcattgtttaacacatggaaaaacatattgattgttgcagttctttataaagaaaaaagtacagtttggttccctgaaaaatacatgaattcttttagctgactcttagaaattaagacacatgtatctacaagtaggtttgggccaagaatgttccctgccccaactccgtgaaaaatttccattacatcagatacttctaggattgtrtattcccttggaagatcacaaaggacatccgtctctacctttgcttaaacctaagtgatctttataaagaaaagactctttaatgtttagtagagatgtcacagaag

SEQ ID NO: 349307 - DNA, 579 bp, Homo sapiens
tctcactcccattgcccaggctgaagtacagtgtcgtgatcatggcacttgacctcctgggttcaggtgaccctcccacctcaccctcccaagtagctgggaccacaggcatacaccaccatgcccagctaattttttatatttttagtagagaagggatctcactatgtkgccaaggctggtctcaaactcctaggtttaagcagtctgcccttcttggcctctctaagtgcggagattacaggcatgagccacagtgcttggcctcaatttttatctccctagaatatttatgattctttctgaatatcagttgcaaacccaaatctatatgataactaatcttccagaaattctaccccacaagacagagtcaactgtatacatgaagacatttatgaactctgttttcttttaggctcaacgatacttcttggcatatttttaacttttgtttataggccgttattaattttgaagtacctggtattgcttgtgtggaaataaatctgcattcgagtaattttaactctatgatttgggcgctaataatacttattgcaagagcatcctgaagta

SEQ ID NO: 349308 - DNA, 579 bp, Homo sapiens
tctcactcccattgcccaggctgaagtacagtgtcgtgatcatggcacttgacctcctgggttcaggtgaccctcccacctcaccctcccaagtagctgggaccacaggcatacaccaccatgcccagctaattttttatatttttagtagagaagggatctcactatgttgccaaggctggtctcaaactcctaggtttaagcagtctgcccttcttggcctctctaagtgcggagattacaggcatgagccacagtgcttggcctcaatttttatctccctagaatatttatgattctttctgaatatcagttgcaaacccaaatctatatgataactaatcttccagaaattctaccccacaagacagagtcaactgtatacatgaagacatttatgaactctgttttcttttaggctcaacgatacttcttggcatatttttaacttttgtttataggccgttattaattttgaagtacctggtattgcttgtgtggaaataaatctgcattygagtaattttaactctatgatttgggcgctaataatacttattgcaagagcatcctgaagta

SEQ ID NO: 349309 - DNA, 512 bp, Homo sapiens
caatatcttttttttttaactttagaaatcttttgaagttttgcattgttatacagcacttattcaatgccgcccaatccgagtgacttcatctcactcgacgacctcacctgactattccctggcctctgccctgcccagggcacacactgtggcaggtgagtgcttgtgcatgggcacacaaggcagatgcctgggtgttctgggygtgctttttgcctgagatgttccatgacctggtctggtgtctcacaaagcctcctcatgagaaacacctttcttagggaaataccttgtgttgctcttttagaagattccacatgtggtccaagaggcatcagcatcccctgggagttcatgagaaatgcagctcagacccccatcccagccctcctgagggagaacctgcacttcttgagattcccccactgacctccaggcttaggaaagtgagagacacgctgccctatagtggtcctcggtatagattcaaggcagctgcccaccccagt

SEQ ID NO: 349310 - DNA, 460 bp, Homo sapiens
tttcaagatacatagtgtgaatcaatcaatcaatcgtacartcttcctttacctaaattaatcacctttataatccttttagtggttcttgatctcttataggatacaatcaaaattccccatcttgatatctaaagcttcttaagctgaatcccatctcccttatcacttctttttatcatctctctctctactttcctttacacatattctattccaaataacctacatgttataccccaagccttactcagtcattcctcagagctgcgtttttatctgtggttacaaaacagatctgctgtcagaccagtcctgacttgacctttctgtgaggttgccatcaggtgtcggctggggctgtgtcttctgaaggatagggctggatagggctggaggagcctccacctaactgtcccccttgcgtggctgtcaagttagtgctggcctcacacaggtt

SEQ ID NO: 349311 - DNA, 599 bp, Homo sapiens
attctattccaaataacctacatgttataccccaagccttactcagtcattcctcagagctgcgtttttatctgtggttacaaaacagatctgctgtcagaccagtcctgacttgacctttctgtgaggttgccatcaggtgtcggctggggctgtgtcttctgaaggatagggctggatagggctggaggagcctccacctaactgtcccccttgygtggctgtcaagttagtgctggcctcacacaggttgccgaagggtgctcacggcatggtgcctggtgtcttccatagagatacacgagtccaaatctgaagctctggtggctttggtaatccagcctctgaagtcacacactgtcacttccagtatgttctgcaggccacttgtagccagccctgatggagtttggaagggagtgagtagcaagaggcctgggtcccaagggtcatcttgaaggctggccactgcagggcctttgtccataccaacaaagctcaccctggcccatctctgcatgcttccttccacaccctgatagatccttcttcctctaggagccttcctgacccactctagattgaagcaactcaccaca

SEQ ID NO: 349312 - DNA, 599 bp, Homo sapiens
attctattccaaataacctacatgttataccccaagccttactcagtcattcctcagagctgcgtttttatctgtggttacaaaacagatctgctgtcagaccagtcctgacttgacctttctgtgaggttgccatcaggtgtcggctggggctgtgtcttctgaaggatagggctggatagggctggaggagcctccacctaactgtcccccttgcgtggctgtcaagttagtgctggccycacacaggttgccgaagggtgctcacggcatggtgcctggtgtcttccatagagatacacgagtccaaatctgaagctctggtggctttggtaatccagcctctgaagtcacacactgtcacttccagtatgttctgcaggccacttgtagccagccctgatggagtttggaagggagtgagtagcaagaggcctgggtcccaagggtcatcttgaaggctggccactgcagggcctttgtccataccaacaaagctcaccctggcccatctctgcatgcttccttccacaccctgatagatccttcttcctctaggagccttcctgacccactctagattgaagcaactcaccaca

SEQ ID NO: 349313 - DNA, 614 bp, Homo sapiens
aatctcacaccgtcctgctccatcctgctccgtcctgttctgggacatgaatcagtcctgtgtccagcatctcaggctgtgtacaccaccctcccattagtcagcaacatcatcttctgacagccaaccatggacatcatcatgccgatgattcaggatcacccaagcagatgatcctgcttctaacctattgtcagaaggtcagtagtaagctaacacaacacgatgcctgtgtcattccccagacttcatctcatataggcattgtatcatctcagatcatcacaagaagaaaggtgagtacagtacagraagatattttgtgacagtgagagagagagaaaccacagtcacataacttgcattgcagtacattgttatacatgttctattttattattaattctaaaaataaaatctcttactgtgcctcacttataaatgacactgtatcatagctatgtatgtataggaaaaacagcacatatcaggttcagtgacatctgcagtttcaggcatccactgggggcatccccttggcgtgtattctcccccaccaaggatcaggggagcaattgtaattctctgctaaattctagtctgtcaggatactt

SEQ ID NO: 349314 - DNA, 588 bp, Homo sapiens
ccttgtgttaattatgatctgtgttggcttttatcacctttgtggaaagagaagagccaccaataatgaagactgagtaaatgagccagtgaaacagagacggggatgtgcaccccccaggctcctggatgattattgacggacacgtgtcagctgctaaatgttatttaaaacttgttcttgccatcctatcatcatttgctgtcctcctgaatatggaaatacaatgattagaaggctgttttaccatcctgagatatgtgcaccattgattttgtaatttgttgctaccttctacttatagtaaatggtccatgatacataaaagaaatttatgtcagagcttttcacagtgaataaatattaggaagaaaatacatttagacaatagaaggaagcagtgtaatgggagatcctgcagtcatgtatgtgtsgtttattttctcccaatattttttatagtagctgtgtgaatatcttactttttacggtgctcaattccacattggcctgatatttgacatattttaaggcacagtgggagaaggaaccaatcctgacctttctctaggcacttttctgatgtca

SEQ ID NO: 349315 - DNA, 608 bp, Homo sapiens
cctgctttgggtcaatccacacttacattcccccatgaaggagggatgtagggtgcgagattgttatccacttatccaaaatcttcttgttagtctcaacatttgtcccacaccaataaaagattaattgggcacattaaaaaacaaaccaacaaaaactcaactctaattccaagaggaaagtttggggcaattagcttttctggtaaagcctcctctagctacatttgagtgactacccacagtaatgcagatgtctgggactgtgaggttggtgggagttctgttggacattcgttattcacaaaaagcagtggtttcaggttgactaaaattaggtaggatggaatagaagatatggaaaatcattccattcccagcaaaaatggccctataagtcatttatgaagaaattctataattgagtagacttaagggcttcaggataaagagaaggaagaagaaaataatgaaagaactagygtatttggggtgtcacacttttagattactggaaggatgctctaaagaccttttcaatagaatagattgtatttttattctcattgcttaggcacagtccctcccagaccacaaaattgaagatg

SEQ ID NO: 349316 - DNA, 541 bp, Homo sapiens
tgtggttgccaggcactgggaggagggaaatgaggagttattaatgaacaggtataaaatttcagcgatgggggtgggtagggaatgaggaaatacagtcaaaaaatgcaaagtttccatttgacaggaggaataagttttggagatctattgcacggcatggtaactatagttaataataatgtatatttcaaaattgctaaaagagtagattttaaatgttctcacaacaaaaaataagtatgagatgatgaatatgttaatcagcttggtttaatcattccacaatgyatacatccatcaaaacattccactgtagcccgtaagcatattcatttactatttgtcaattttttttccaaaaaatcattatgcaaaatgagtaagttctacaaatctgctctacaacattgtgcctatagataacaatgctggtattttgcacttaaatctgttaagagagatgatcttatatgaagtgttcttaccacaataaaactttaaaaaataaaaataataaaataaggcaaagtttaaaaaa

SEQ ID NO: 349317 - DNA, 525 bp, Homo sapiens
agcacagctgaaaattttgatttcattgtttaaagcaaattttggaaagaactattgagtgcaagttaaagccggaaactcacagaggcaaagaaacatagaggatggtctgttcccctactgccatagactctataaagagcttgtttcacggcctttgttttcaatgttcctcctatggaaaaaataattgccagttttcccaccaatgtggacacatatatgaaaaktttttgactcttcccaatcatttgtaaaaatgatactatcctctcctgtttttgcacgccattagagagatgaggtgcaagtgtaccataggcctagaaaccttgcaatgtcagctacgcactgtttatctcaactcacatacgcagatatttgttgcagattagggtgttgtctgtaaagaaagaaaagtgttcaaagaaaacctgctaggtgatgtatttgttttcgcttattgctgttacaaattaccacaaacttagtgacttaaaacaacataaatttattatcatatga

SEQ ID NO: 349318 - DNA, 593 bp, Homo sapiens
aatttagtagccagagagtggtaggattagggagagaagaaagcctttgcctataaaataataatatagagctggacatggtggctyatgcctgtaatcccagtactttgggggactgaggcgggtagatcgcctgacatcaggagttcgagaccatcctggccaacagggtgaaacctcgtctctactaaaaatacaaaaattagccaggcgtggtggcaagtgcctgtaatcccagctactcaggaggctgagacaggagaatcgcttgaacctgggaggcagaggttgcagtgagccatgattgcgccattgcactccagcctgggcaacagagcaagactccaactaaaaaataataatgataatataggagttatcatagaaaaacattgtggccatagataaaacagtatgtaactgttttatccgttctcatgatcatagtagatgcctatttgtgcaggcaaaaaagttttaattctcagtaaatacatacacaagcattagaccttaagatgaaaaaaagtagatattataatataaaacctttttccacaggtacaacaaatgtgggcaaattataatccagg

SEQ ID NO: 349319 - DNA, 601 bp, Homo sapiens
attaaaaagatgaactttatgatatgtgaatttcatctctattaagctatgagtttgataaaaagatgggaaagctgttgggggagaaaagtgtaacctggccacaaaagtgccagacatactaaattgccttaaaaacttgtgtaactccaaagaggcttcaggagcagttccgggagagagagcgttgcagtctcctgcgtgagcgagcttcgtgaatggagcacagttgcctggaacawtcaggctgaggattcaatccagtgcttcaatgcccaggaaacagatccctgcacctgctgaaatcagatgaccagggtttagaggggctgggggaggaactgcaaagccaatccttgttttgttttatggtggtggtgctgatgatctcacacagctggggactttaaccactacatatttctaacgaatatagaggaagtcaagttttcctcagggtctgtggagcatgtgtttctgcctctacttttctttgagcagaattgtgctttgtgtaagaacatgattactgcagattcgatcttgtggttgtctggcactccctttgggacttgaaagcagtggtgtctaggggtttgca

SEQ ID NO: 349320 - DNA, 525 bp, Homo sapiens
ttctctctctggatgagaaccacagcctgcttgctggcttgctgggacccagcctgctctatccagtgcacactctctgattcatttccaagaggtccatggcaaacaggtcaacccagctcaggaccagagccagggccacctctttggcccccacagctcatgttataccaagtgcaagcttggccttccagacccaccacagcctggaccttgagtrtccacctcagcttggccttcacctcttagaacacccctgaagggagagcaagtctgtggggcctgacatgccttacacaatctgtgtctcacaataatccttcttttgtcctcattttacaggcttggaaatggaggttagactttccccaaatcaggcagctggtaaacatttggaatttgaacacaaatgatatggcttccatctcatgccctgcacaggcattttcctaactctggttatctctttgctattttcatgattttttttttgcaatagtctcattatgttagccttataattta

SEQ ID NO: 349321 - DNA, 614 bp, Homo sapiens
aactctaaaccccttgctcacctatgacccgttatgctggagagacttctgggtggacctctctgctggatagacatcagtactcttgtcggatgctgggtaggtggtctgctgatgttgaggcagctgaaagcctgtttcagacacagtcccttttgcctgtggcttggagccaagctgcctggagttctacctctgaaaggctgtgtgactttacaaagtcacttactctctctgagtcttagtttctttgttcataaatggggatacagatatgaagctgtcaaggttaatataagggttaaatcaagtattgtgcataatgaatccagagcaaaatctgtagataagatcaggggtgagcaaaagactaccaaaatactaggagaaatagaggttgtattcggtttctctctctgmtaaggagagctggggcagtatcttagattcagtgttgatgcctatgggagggtatggaatgaacttctcactcaccccaacaatgtctgtgtttgcagaagaaaccccctgccctcttggatatgtatgtaaatcagagggctgataaacacagtataggggcttatctgtgatctcctaagcagaccagtgaa

SEQ ID NO: 349322 - DNA, 480 bp, Homo sapiens
aactatgctgatatttgacatgaatatcttatttttagttcrtcctcataacaatctaataagtactgctgcataccctttttgcatttgagaaaattgaggttcagtgaggttgaatcctttgcccacagacagcctgttccaaagtggtcaagccaggctaagaagccctttgcatgactttgaggttcgctctctccccacctggttccatgcagaggagctgagggtgataaaattggaaaggaagcttgaattcactgaaatcaatgagctagagctttcacaaaaataggattgaaactcttttctaatttactggcccctgcatttgctttcatttgactgagttgtatagttatttttgccttcactttgaaagtaaaatctctgcaggttttggaggcagtcaaatgactgacaacttcggttacagtcaaactcaaggtcaactatttccaatttctagtttctgaaaga

SEQ ID NO: 349323 - DNA, 576 bp, Homo sapiens
attttgtcttatatttccaacttagttatgtagtcctggagggcacagattattttttcctcatattgccaagtcctgcagcatttaacacagtgccagcacagtgttgacttctcatagaatcaatatggttctgagaacctacagaatgctacattaataggatgttttccaccttctcaacctaggtgggaaacccactcagaaaatgcctagttgctctgtgattcaacatagctgggtagtcaggctgggatgagggtgattaattacaagcggcatgctgtgctgccccagaggctggtagcctatgttacatagtcaattagctaccagacacaatcatctaagttgttatttattactgggtatgtctgagccgtgaatcctgtgaggcagagaamaagtgaggggatctgtcactgtgggcctccaggcagaaaaagcagagactatggaggaggaccaagaactcctgagccaggcagctggagaggttccaagtcctcccacctacggttcaatacagaagatgaggaggagccaaacagatttagttgaccagaatgtgcaagg

SEQ ID NO: 349324 - DNA, 565 bp, Homo sapiens
agccagactgtgaggataaagggaagggaattgcaggaaagaaggaaaaagaaagcttgaacggcacaggcacctcctctcagacattgtwtcagatattgtgaaagacagtgctacgtagtggtaacggtgtagacactggggctagattcaacctgactttgaaaatcctgattctgccacttaccttgggctaatttcttagcccatctggggctgtttcctaatcagtgaaaattgggaaaagatattcatcccaatgtgtggtttcaagaatgaattgagataatcatgtatgtggaacacttggcaggtagtcagaaagtggtagctcctgtcagaatttttgctgtccaaaacagacccacaaaactgtcttatccattctgcagatgaggaaaactgaggcttaaagaaatgatatcatttacccaaaatgacaagctgggagcagcacaatcagaatttaaactcatgtctgtttgactccaaggtgcatgcctttaccatcttgaaaagaatggggcaacacagcaaaaatacagacactttaaggtatatatat

SEQ ID NO: 349325 - DNA, 587 bp, Homo sapiens
ttttgcctttggaagaattgggtcatttcgatcccattctgcaatgtatagaagcactcgtagaatattcaaactggaagattgctaaaagatcaagctattgaatcctctgatgcaaatgatgagaaaatagatgaccagagagagaaagtgacctaccgaggttgggcagagtataggttctggcttatattgatggatgtccagggcttccctcagcagagcttcctaggcagcagcaataggcaacaccctcctattctgtcccaaattccactttgtcacwtgccagatactatgtcacctacagcatatacactggtccttttgaccctacacattcccatcctctgaccctacatgatcttggctaacctgccttcctataccagcagaacctgtatttcttttttagaccctgacaaatgttaggtcaatttgtcagtgcatttgtagtcaaaatttggttgtctagatgtggatgaaccctggcgtaggtgcaataggaacctgaaatgagattatctccccaaagggctttagaaaatttggagttgctgctctagttgaaaaggaacaggatccag

SEQ ID NO: 349326 - DNA, 615 bp, Homo sapiens
ttgatccctgaatctcagagatgaaaggacttgccgaccatcctgggctaccccataattttacagcaggggaatataaagctcatagagttgataatcatacagattttacgtgyatggtactggagcatatatgctttcgggaaactgaaaattcaccagtgagctatgtggaaaatgtcaattattccatgagttagctcactactctggtcctctgtcaaaattgatattcagctctgtgtctttttacttggacagcctttgaggggagttgctctatgtccactgctttaggtagttgacccaaacttccccaaaatgtaggaaagttggttaactaactttaggtgggttaagcaacttttccatagtcacactgcttgtaagtagtagaggaggaattaaaattcaggattttcagatctaaagttcatgcttttaagcactggaccatatttacccctcttgctttcttcctttctgaatacatacatttttgcttttgttgcagtttgcttgtgttacagtattgggacaagccagtctcacttaactatactgcttccctctctcccaatactttgactgctatgtaatagaaacttaatataa

SEQ ID NO: 349327 - DNA, 512 bp, Homo sapiens
accattggcacattcttttgacttgtaccagtggcaataaatctcagaacctgcagcatgggtatgattttttattatttttttattatgccttaagctctgggataatgtgcagaatgtgcaggtttgttacataggtatacatgtgcratggtggtttgttgcacccatcaacccgtcatccaggttttaagccccacatacattaggtatttgtcctaatgctccccctccccttgcccccaacccccgacaggccccggtgtgtgacgttcccctccccgtgtccatgtgttctcattgttcagctcccacttatgagtgagaacagagcatgggtatgatttcaacatcacatgcatcctccagggtgtcatgttggttcatgtctattacagttgatcaagcctatgatgacagctttcagtaaaaaagatgtaaggcagatcagcatagagatttagagttcatggcctaagccacatgggcctagattccaaatgctgttgcta

SEQ ID NO: 349328 - DNA, 616 bp, Homo sapiens
caagtcacttggtttcttcagacaaataatttgacatctctgagtctcactttccttatctgtaaaatagggataatcacacctgctgtgtggagttttgtgaggacttaatgtgttaattagatattttattgctaggcagatagcatcctataaatggtaaccactctcactgcaatagtgatgccactgctgctgctgataatcatgatgaaaccaggtcatcttgcctaygactgccagtggagttggatgaaatgccccttccaaacaagcagccctcctcggtctgccagaaggctaaaatctcaccattggctttttcaagttatggcatttcagtttaaggactcgatatcctttaaatttccagttacacctggcaaggttaacacaggcaaaaacattacaaactggaaacagaacagcaaagtgaaaaaaagcatgtgatttaaaaaattttagaactagttttggttacaagtccttccagatctaaactaacagtggattaaatgtgttagaaatttgacttccatgtaaattacaagtaggtctggagccatatgatgttctatagtgtcagagacccaagctctttctgtcttctgtctat

SEQ ID NO: 349329 - DNA, 570 bp, Homo sapiens
cttgtgaccattttatttatagttagggagccttcactggagtatgagatgaagcaggacaagagaaaggagtggtttttcaagaaaaagcatttgaaagtaaaaaaaacaaataaaattaaagcacccactgggaatgaatgggaagaatatggaaattaaaattactatatgactctcccctccacttgatgtgggaaaaaataatattgattttcctcttctaccttaatggaaagaaatctgattgtcttttagatcagctttttaaagaacatctaatccttaatagttaaacaaatcatagaagagtatttttaaaagtgaggcatttcaatttagcaaggactttccttagaacccctaaaatttttttaaaatgcaatggatatccacacaatgcaaagagaaatactgcatcagcaaaagggccataggtatggtgtttgttaaaaaataaagtaggcatatgtactrctaagcagacaattttgagcctcattgttttctagctcatttttttcctttgagggaattctgggcttaattttttttttttttaatcagttg

SEQ ID NO: 349330 - DNA, 637 bp, Homo sapiens
aaccttctctaaggcaaagggggaatttactgcagctgccagggctgaggaaagtgtcacagagtctatgtgaagaaatgaaatggggagttgaggtggaagtggtggaggtggagtggggaagacagtggatcacagttcaaaatattctcttgccctactaccatttcattcctggttaggatgctctatgccaaaccgtgtatcgggcaccttatttaacttttataacaactctgtggaaaatatattgttttctgatttaataaatgaggcaaaggaaacccagagaggttaagtaatgtatacaagatcatacaaccagyaggcagcagacctggtgttcaaagtcagggctttctaattcccagatctgtttgcatgaccactcattcactagccatattgtgagcccagagagatgcattttgagaaaaaaaaaatgccatgtcctctcccttactttatttctatatttctaacaccagtttaaatggaggtctcatacaaattggtgctgtggggtgaccattcttttcggcttagacctggactatgtggtaagggtacacatatagctggaatgttaagaggtcaagcttctttttgctatctgagccattacagaggtgtcagc

SEQ ID NO: 349331 - DNA, 543 bp, Homo sapiens
caggtgaaaccaaattataagcagaagattgtagcatgatcatagaatctgtataaagagattaaatttattccaatgtcaggctaagattacctgacacagtggtgattctccactctggctatgtctctgggactattggagtctacraaattttcagaagcttgggatccatttcagacctacgattagggcaagacatttgtatttgttttctcttaaaaaccatatgtgattctcttggttatcagggttgagataattggtctgaagcatttgtctccactacaggaatgattttgcaatggtgccatattattcaaagtccactgggcaagattctctccctcttggatagtatgtagaatcacagcaccaacatttgctttgtacgtaagtaagtaagtagtcacagggacaatcagttctctctttagataggtttatgcatctagacaaatgcatactctggccagattcctttcaatttttggtaactttctccatctctgctctcatccggcttgcctggaacatacaatt

SEQ ID NO: 349332 - DNA, 547 bp, Homo sapiens
atctgaggttcagaaaagtgaataattaataatatgaacaacaatattagttaacatttattaagtacttactaagtgccaggtactgtgctaagcagcttggattacaaggattatttcaaatcatccccataggaacctctgagatgggtactagttcccattgggcagaggggaaaattggagctcagaaagctctcagctcacatagctgagagcatcagagtcagatggtcctcacctttcacttttcacttttcatatgagacacagaagaaggtygctttctgtcaggcaaatgagcctcccttaagagtggggaaaacaacctgtctaaccctactgtatatggtcttcccatttcatttctagctatgtgtcttggcctcaatgactacttgttagttggttttgcagaataaccaaagagctgcaaagactaggcatagtccttataaggacatttcttgttttcctcctcctggaatccctacccctttctcctagtaatagcaccctgatttccagttgaagactcactcttctt

SEQ ID NO: 349333 - DNA, 468 bp, Homo sapiens
caagaaatacattgagtgatagaccagtaagcatgttgaaaaatgagggctgttatagtgacagaaccagctctagggttaagccatactcagtttcttttacttctgcaaacgtggtatgctctctggtttctatgccttcatgcatgcccttctcccagctggaatattgttctgttcctgacctctctgcattttcttttcactgaaccaactcctccaacttatgttgagatgtcagcttaagtctttctttctctggacagtccaggaaagtcccctttagacctgagttactccagctctcatggtagagtgcttacttcctttgtcataggacttttcatacttcctcttattgttyaacacctttctttcctgagagccctatgctcaatgacagtgggaacttgtctgccttgttctcctcaccactacaacctcagcacccagcatgatacctgtagt

SEQ ID NO: 349334 - DNA, 545 bp, Homo sapiens
aggtgggccttaaatgcaatgatacgtatccttataagagagagacagagggggagatttgacacacatggaggagaaggaaaggagaagacagagcagagagaaacctgaagatcctggccttgaaacctggaaagtgacacagccacaagccaaggatttctggcagtcctcagaaaccggaagaggcaaggtacagattccaccttagagcctcaggagagagtgtggccctggctgttaccttgattttaaatccagtgatatggattttggatttctggcctccagaaccatgaaataataattttctgttgtttaaagcctccagtttgtggtcatttgctacagcaatgtcaggaaactaatacagtaacctttttaggtacatcctggaattcccaaggtattccagtcaattcccacagcatcctgtattttccctactctaygacttaccacattgtatattaacagcatgtttctgcattctctattagaccagaaactccgtgaaggcagagactacacctcatttatcttta

SEQ ID NO: 349335 - DNA, 489 bp, Homo sapiens
ccattacttagagccttgtaatgttgcaatcaaggtaccagccaagttgtgttctcatctggaggcccaactgaggaataatttatttctaaagtcattcagatttttggtaaaatttatttacttattgctccagagctgagacttctgttttcttgttgatctggtcagaggtctccttcaaattcctagaagctgcccttagctgtttgccactggactttctaacacagatgcttatttcttcaaagccagcaaaggaactagtctctgaagtgagtctgatagcaagatggggtcttatttaatgcaacataatcacaggagtgccatattccattttctataggcatgtcacaggtcccacccacactctacaggaaggattagacaaaggcatggacactagaaagtggrcatcatgagggcccacctcatgtctgtcacagtggccaaagaaggccagaataagggaatattaaagccatg

SEQ ID NO: 349336 - DNA, 656 bp, Homo sapiens
tagctccactaagaagttgtggtttttgaaccatgtttgtacgtataaatactcaatgaatataagcaccaattttctcatatacaaagcagtgattttcaaaaaacgtaaatgtaatctcacatttactttatgctaaagctacactgtacgaatctgaatctttctgttttggttgagaagccatcctaaggtcttagagagccccaattaacattatgaacataaattaccgttgtgtgagatggagaaagagttggttatttgagctcttgtattgtgtggattctggctgctgagatgaacctttcgggtcacactcagtgattttaatctgaagctraaagggccaaataagaacaatattattgctaaactgaagtcactagacagtccctcttttgaatgcctgaggctgacattcaaaaatcttgtcattacttgcattatgacctcttatgtagctggacgccttgtttcaaaaaacagaattccactggtacactgcatttcccaacaccagttacatgaaacacttgtttcttaggatgttaatagacattgtatgaaaaataggcccatgttgcatgtttaactacaggacttctcaggcctttaacatgctaattcatgctatgaatcttcaagattggacc

SEQ ID NO: 349337 - DNA, 656 bp, Homo sapiens
tagctccactaagaagttgtggtttttgaaccatgtttgtacgtataaatactcaatgaatataagcaccaattttctcatatacaaagcagtgattttcaaaaaacgtaaatgtaatctcacatttactttatgctaaagctacactgtacgaatctgaatctttctgttttggttgagaagccatcctaaggtcttagagagccccaattaacattatgaacataaattaccgttgtgtgagatggagaaagagttggttatttgagctcttgtattgtgtggattctggctgctgagatgaacctttcgggtcacactcagtgattttaatctgaagctaaaagggccaaataagaacaatattattgctaaactgaagtcactagacagtccctcttttgaatgcctgaggctgacattcaaaaatcttgtcattacttgcattatgacctcttatgtagctggacgccttgtttcaaaaaacagaattccactggtacactgcatttcccaacrccagttacatgaaacacttgtttcttaggatgttaatagacattgtatgaaaaataggcccatgttgcatgtttaactacaggacttctcaggcctttaacatgctaattcatgctatgaatcttcaagattggacc

SEQ ID NO: 349338 - DNA, 396 bp, Homo sapiens
gatgctatttttaacaaccattcctccctaatgagcgtatacgtccctgtttccagtcagagcccacgcaaggtaggcgctaggcagggcctgtgtccgtagcagctggctcagcccagaggccctcagcagcctcmttatcacaattcccagaacccatgcagccctttgtctaggagcttataatgtgttagtggcttaaggttgattcatatctttcctgcctagatgggaatggcacaggccccagataagcatttatctggctccatatatgtcaggtactaggcactggagaagctgagaccttgttttcaaagatctcacacttggggtaggggtagctgagaggaagactgtatggatacccacagttatgatccaacataattcaca

SEQ ID NO: 349339 - DNA, 580 bp, Homo sapiens
gatgattaaagtgtttaaagcagacggctgtcatgatttggctgtcctgtggtgtataaactatgtgaagaggtggcaaagaaaaggagagagagcagttaggattctatttaatgatagaggcaacagtggtggctttttagaccaggawagtaaaagtatcagtcagcctgaaaaataatcagatcacagatatacttataaaggaatgtccaccagtgtgttaggctgttcttgcattgctataaagaaatacctgagactggataatttataaggaaaagaagtttaattggctcacagttctgcaggctatacaaggatggcaccagcatctgctaggcttctggggaggtctcaggtagcttttactcatggtgaaagttgaagtggaagggggcacgtcgtagaagttcataggtaaggtcaatgctggaaacgaaaatttggtaattatcagcatgtggatggtatataaaaccatgagacttggagtgacctggggagtcagcattgatagaaagggaaaaactgatatctaaatcttgagctagggagatgaggaggattcagcacagga

SEQ ID NO: 349340 - DNA, 580 bp, Homo sapiens
gatgattaaagtgtttaaagcagacggctgtcatgatttggctgtcctgtggtgtataaactatgtgaagaggtggcaaagaaaaggagagagagcagttaggattctatttaatgatagaggcaacagtggtggctttttagaccaggaaagtaaaagtatcagtcagcctgaaaaataatcagatcacagatatacttataaaggaatgtccaccagtgtgttaggctgttcttgcattgctataaagaaatacctgagactggataatttataaggaaaagaagtttaattggctcacagttctgcaggctatacaaggatggcaccagcatctgctaggcttctggggaggtctcaggtagcttttactcatggtgaaagttgaagtggaagggggcacgtygtagaagttcataggtaaggtcaatgctggaaacgaaaatttggtaattatcagcatgtggatggtatataaaaccatgagacttggagtgacctggggagtcagcattgatagaaagggaaaaactgatatctaaatcttgagctagggagatgaggaggattcagcacagga

SEQ ID NO: 349341 - DNA, 588 bp, Homo sapiens
tgattgtggccttgaccaggttggaaatgagatgaggacaggaagacaaatgtggggtaagttttagagatagaactgagtttttgctattattgggttgttggggggtggtcagctagatctacccaatccacgaacatttttatttcaacatcttgaagtgatgttatacatttattgaaggagatgtaaatgtsatttgctgagtagctaaacaagcataacattacgcagagaaaactaaaagcactacaatagggctctggaattagcttctaatagctccttcctaggaatcggttaaagatattatgtgagttttttcttttgtttgttttttctggtttctactaaaatgtaagctccttgagggccaggacttctatgttctagtcagtaatgtatgtccagcatctagtataggctgcctagcacaagaaggtgttcaataactatttcttgattgccttttttactcagtaccatactgtattctccttgtaacagaccaatcagcatgacactaagattactactagtaataataagaatatttgctgagtgcttactacataccaagcattgttt

SEQ ID NO: 349342 - DNA, 588 bp, Homo sapiens
tgattgtggccttgaccaggttggaaatgagatgaggacaggaagacaaatgtggggtaagttttagagatagaactgagtttttgctattattgggttgttggggggtggtcagctagatctacccaatccacgaacatttttatttcaacatcttgaagtgatgttatacatttattgaaggagatgtaaatgtcatttgctgagtagctaaacaagcataacattaygcagagaaaactaaaagcactacaatagggctctggaattagcttctaatagctccttcctaggaatcggttaaagatattatgtgagttttttcttttgtttgttttttctggtttctactaaaatgtaagctccttgagggccaggacttctatgttctagtcagtaatgtatgtccagcatctagtataggctgcctagcacaagaaggtgttcaataactatttcttgattgccttttttactcagtaccatactgtattctccttgtaacagaccaatcagcatgacactaagattactactagtaataataagaatatttgctgagtgcttactacataccaagcattgttt

SEQ ID NO: 349343 - DNA, 580 bp, Homo sapiens
gatgattaaagtgtttaaagcagacggctgtcatgatttggctgtcctgtggtgtataaactatgtgaagaggtggcaaagaaaaggagagagagcagttaggattctatttaatgatagaggcaacagtggtggctttttagaccaggaaagtaaaagtatcagtcagcctgaaaaataatcagatcacagatatacttataaaggaatgtccaccagtgtgttaggctgttcttgcattgctataaagaaatacctgagactggataatttataaggaaaagaagtttaattggctcacagttctgcaggctatacaaggatggcaccagcatctgctaggcttctggggaggtctcaggtagcttttactcatggtgaaagttgaagtggaagggggcacgtcgtagaagttcataggtaaggtcaatgctggaaacgaaaatttggtaattatcagcatgtggatggtatataaaaccatgagacttggagtgacytggggagtcagcattgatagaaagggaaaaactgatatctaaatcttgagctagggagatgaggaggattcagcacagga

SEQ ID NO: 349344 - DNA, 577 bp, Homo sapiens
catattttgttctttgtgccagtgccctgaagtggggctgtacctgctggaaggaaggggtacctttcctttattttcattaagttgctatatggactatctcagtcctgtggccaatgcaagaaatttggctcagctttctgaggggctggtactgtatcctctatttcttcrgatcactttgtgaggtcattattctccagtgggggcttgtgggagaggcagtggaggcagaaagcgcatgcccagaccatattctcccagctcagtcaggcttctctacctctgattgaacctgtactcacggtgaagcttcctgggccacctgtatccagcagctgacatggatgatttctctcatacttgtgaagattctctgatggtaaaatagactaccatatattaagacctctgtgtgcttcatttcatattcttaccattttgggggtggttgtgttttttctttgtaatagttacctattgttgcatgacagattaccccaagacttagtggcttaaaacagcaattaaaatttatcctatttcagccaagcgcggtggctcaggcctgtaatcc

SEQ ID NO: 349345 - DNA, 577 bp, Homo sapiens
catattttgttctttgtgccagtgccctgaagtggggctgtacctgctggaaggaaggggtacctttcctttattttcattaagttgctatatggactatctcagtcctgtggccaatgcaagaaatttggctcagctttctgaggggctggtactgtatcctctatttcttcggatcactttgtgaggtcattattctccagtgggggcttgtgggagaggcagtggaggcagaaagcgcatgcccagaccatattctcccagctcagtcaggcttctctacctctgattgaacctgtactcackgtgaagcttcctgggccacctgtatccagcagctgacatggatgatttctctcatacttgtgaagattctctgatggtaaaatagactaccatatattaagacctctgtgtgcttcatttcatattcttaccattttgggggtggttgtgttttttctttgtaatagttacctattgttgcatgacagattaccccaagacttagtggcttaaaacagcaattaaaatttatcctatttcagccaagcgcggtggctcaggcctgtaatcc

SEQ ID NO: 349346 - DNA, 552 bp, Homo sapiens
tctcaaatcaataaaaaatgtccccacaattttccaaaacattaycccaggggtgggactgcttctattgaaaactattgacataaagcatgatttcatatcactgaaaggtttaaatttttactttgcatatagtagcaaggtttaaaaaatctcgtgaatgaatgggatacaaaaagtaaattttcataaaacagtaatttccatgatgctagtacaatgaatagatttctttgctaagtccaagttgaagagatcaggctaggacagcaaatatgggcagctgcatcttttaccaggtgtaaatagggagacatgtttattttctcttgttctgccaacatgaattaagcatctcctagccatgaggtctatgctgaggctgcgggatccacagtgacatacaacaggctacccacacggcagttacaccaggaagggacaaagtattgaaaaagaaatggaatgtattcagcagtttggcagttaacagagctcataaaaaatgactttcccttaagacagtttttactgggttgtgtttttattgaa

SEQ ID NO: 349347 - DNA, 581 bp, Homo sapiens
tactgacctgtccactccctgaacccattgatgttccagccacctgctccctgttggattgtcttcctcttccttttgaatgcacttctgaagtaacccagctctattttatagtttaaatatttgttcttggatctgctttacaatcctagccgttctttccctctagtttacgttcagtgactcrtttaaaattttgcctaattggataaatgaacatttatgcttctgagaaaatggtgtaggatggtgagtgcatttgctcactagagaattttgatctatacagatccatttttctaaatctagtggcaataacatctgaagctgcccctttttgcagcttgttgtacaattttgaccgctaccgttttgtgcattggaggacacaaattacctaaaaggatcagaaaaaggaatggggtgtctagttaatttgatatcctagttatcttaggataaattccaaatacacttttgttttctaaaaaatgtttaaactttttaaaaataaaatcttgagtcttgctttctactttaacaatagcatacagttatcctaattgagtcttagaaactca

SEQ ID NO: 349348 - DNA, 569 bp, Homo sapiens
aatttactgaagataccttaagggacatggaagagaggatgtacaacaaaaagcttacagcaaacaacctgacaacaccacttaaacattttgccaaagttcccttctcactgtgmtccctcacccaaccaccaccttccagatgtcctttctctctctccttcctctctcctatgtgacatggtagatttcctaactgccctctctcacttatgcaaaacaatgctgtgctaccggcagatgtgcatattttctctatcttctgctcagcaaatcctacaatcagtagaatgcacctctttagaaagcagaagagtttagggattatggtttattacttgagtataaccttgggggtcttacacccatccaagcaacttatcaaagcacagcttctaaatgtctgcagtactttaacccagagaaatagtaataccagctggtaagatgataggttttttttccctattctcacctatatgcttatttacagaatagagatcattttatagttctgtactctgcttttgcatttctcatcattaattattccactaaaatttcatttt

SEQ ID NO: 349349 - DNA, 569 bp, Homo sapiens
aatttactgaagataccttaagggacatggaagagaggatgtacaacaaaaagcttacagcaaacaacctgacaacaccacttaaacattttgccaaagttcccttctcactgtgctccctcacccaaccaccaccttccagatgtcctttctctctctccttcctctctcctatgtgacatggtagatttcctaactgccctctctcacttatgcaaaacaatgctgtgctaccggcagatgtgcatattttctctatcttctgctcagcaaatcctacaatcartagaatgcacctctttagaaagcagaagagtttagggattatggtttattacttgagtataaccttgggggtcttacacccatccaagcaacttatcaaagcacagcttctaaatgtctgcagtactttaacccagagaaatagtaataccagctggtaagatgataggttttttttccctattctcacctatatgcttatttacagaatagagatcattttatagttctgtactctgcttttgcatttctcatcattaattattccactaaaatttcatttt

SEQ ID NO: 349350 - DNA, 619 bp, Homo sapiens
gatttaattgagaggcaattggccaaggggtcacttttctgtcttcatgtcctaactgtttagcatctaacctatttcagatggaataggtgagagaaaatggatagaagcagtaagaattacatgcattagtctgtcgctggtctaagccctgactccttttagctttcatacatatcatccaacatctatgaaatcagggggaatggagcaagagggagaactggcacccaccatgcacaaggtattttacatgcataattatacttatttccatcaattgggcacctactatatgctaggtacttggacatacatatattctttaatcctcttaaatcctaatgaagcagataatattagccccatttattaattaagacatgaagggccaaagagccacttattgtggctatgatggttaattgtggcccaatgtctgccctcctcttccttcccagtaatagaacacccacttcttaactagaaaaatgactagccagaataatgactacrtttctcagcttcccttgtaggtatgtgtatgcacgtgaccaagttctgaccaatgagatagaaacaaaataagtatgtttctacttccggataatgttcttat

SEQ ID NO: 349351 - DNA, 622 bp, Homo sapiens
ggattggtgttcctgatgagtatagctaatatactagtcctaggtggcatgcccttacatgagagagaaatacatttttattttgtttaagcagkggttatttgggcattttcctaaatcacagacccaagatcccatagctaggaagaggcagaacatgcatctcaacccatgtgtgataccagaccttctgatttctccagtctattctgctacttcctggaactctgagtgcctgatagtaatagtgagaaatatggctgggtgggcactgggaacatagcttctccttgagactaagccattgcttggctttttctcatgctgattagagggagaggcaaacaaccaaccaatcagtaatgtaacagaatccacatttccaaatctagtgctcttcccaaattgccaaccattaagtcatcagtccaaaggacttgcgagtaagtggcagaaatcaaatcagaggcttagtttcctgaatttcagtctcacattctttccaccacacaaagttgctttggtggtgtctgggccaaatctgagaatatattatcttctatcatctccaaggaaaacacaaagagatcatgaacagactagggagaaagttagaaggcaa

SEQ ID NO: 349352 - DNA, 579 bp, Homo sapiens
cttatcttgggcatttaatagagaatccatcttctaaacttatttatttgattcctctccttgaagtatttgcatttttcaaagaagcccaagagaaagaagcccaatgcagagagtcacaagttcaaatgcctacagagaccacaaatgcaaatamgcataatgcaataggtagtgacggaaattgggtgattggagatctcccatccccaatcagattcagccaacaattgatggataggagaagaccccatgtagccaaattttctcatatttcaagacaagtcaaaactgtattttttgtgaaactcctcaatgttaggtgctggtaactaattcaaacttttaaatagatacctcattagccagacaaatagtcatagtccagacctgctctgtgggccaccatttggggatctctgacttaaaaggatgaatggaggccttcctcatgaccctatggttctgactggaaaagatctgggatagggcgtgagtacaaacagtggtatggcagagaaggacaaaaaacaaacaaaggtttgcttgaggtcaggcaagaagacaatggtggcttgt

SEQ ID NO: 349353 - DNA, 571 bp, Homo sapiens
ttcatgctttatataatatttattgattcacattcttcctttgcctttgcattgtcagaaacttaagtttagtctgcatgacacaggattgtcagaaacttaagtttagtctgcatgatacagattgaatatattcttattggatttggtcttttccataatgatcttccagtatggaccaagggaggcaatggagctggaaaataggtaaaacgggtagtgttgtaaggaattggctgaaaggtaagtctatcccctgactcttggctgaacatatgatgctgacatgaaagtgtggttttctcaaaaaaaaaaaaactttgaaatcagatgtatcttggttcaaataccargtttgccacctcttagctgcctgaactttggcaaactccttaatctccctgaaccttagtttcctcaactgaaatgggaactaccgcacccatcccataggatattgtgaagattaaggagagaaagtgtgtaaatcaacaagcctagtgtgtggtgcctcactggctcttaataggtcttagatcccttcttttttcactggtcacactagtgtttg

SEQ ID NO: 349354 - DNA, 589 bp, Homo sapiens
cgagaagatgaccaaggatcaagttctggtttaccatcaaattgatgtacttctgtaggcaaagtgctattattttaagctgctgctttttaagaaacaggatagatgagaccaaagttttccaacttaggtttgattagaatcacctgagggcgggggattcaataaatttaaatttccagggtccaacataaaccttctaaacaagcatcttttttgctttgtttcattttttagttttgctttaagctcaccaagttattctgataataagccaggtttgggactcctgaactgaaagatttcttgtccctcttagcttttggtattggtgaaatagtagtgaccagctgttaagaattccrtctctggggttagaaagcatctgattctgattctggctgtgtaactctctggctctgaaactacacaccatctctaagcattagtttcctcatttcaaaaatgggaatgcacctacccacatgagatatttgcaataattaaatgagataaagcactggatgctctgggctcagtgtctggcctgtgaacaactcccagtaattctaaatggattattatgagg

SEQ ID NO: 349355 - DNA, 539 bp, Homo sapiens
tggcaagctggtgctggctgttggtgggaggtcttagtttctcttcttctaggcctctccacagagctgagtcttctcctgacatggtggctggcttttcccagaagaagcaatgcaaaacccaaggtagaggtgaccatgctttttttttttttttaatctagccttggcagtcccacatcacacactgtaacttctgcagtattctgttaatcacacagttcatcccagagtcacaaaagtatgaatacaaggagatggagatcacagggagtcatattaggatactgcaatagccattctgttaggcatcttagtcatgcctactacactctgaaattaaaaaatatttgatayttactgcatagttattagttctccagcaggcttttgatcacagtagcctaatcttcaatttgtaagcaggtagatatagatatgtatttatagtcactcatttattcattcatttatatatccaaaagtatttgttgggtacctattatatgctagacactgtttctagtcacctgacagat

SEQ ID NO: 349356 - DNA, 572 bp, Homo sapiens
gtcaggaaggaagatgggaatgggggatttacttaactgtaccttttcagagcctatgctataatcccatgggagtccaggttatccagcattagaactttgatcttatcttctgggagctgaacttctagtttgattttctagaaaacacatctctcctatggcctctcagttttgatatttgggaatacacccctcactccgcatacacacacacacacgcacacacacacacacacacacatccacacacactccccaggtcagcttccttaataaaattgtttatttctgttagatgttttacagaggcgctttatgtttgactcttctttgtatctgtatctgggaatctaggacttcattaatgaggagacttcttgacttagccccattttaattcttgttttatggaaagcatatttaaaaaaaaaaaaacagtagaaaaatggagagttgggtgcctcagtcttatagacagccaatctcttggggagtgtttaaaacttgagtatctagaacttcaagtgagaggaartgtggactgggcagacaggaccccatgtgaaagc

SEQ ID NO: 349357 - DNA, 592 bp, Homo sapiens
tgacgtgccaatgtgaatttagcagaaaaaagatttgccataacttctaagtgagcagccttcagaatgctagcttagattcctggcattaacttgccaggtattttttcaggaaggaaataaattacaattgagcttaaaaacctgagggtagaactcattttcaagcaaatgtgaagcatcagtttgaagttaacaaagttaaagtttggagtagggttcctccagtcctttataatgtagtacaagtattttttttaaatgtataacactagccttttaaattgtattgtgctactaaaagaaattgtgcctgcattcatcttacaacctgggaaccaacgcagagggtctstggggtagcggtatccagcttcatgccctctgtcctttattgctttctggttagcctgcgtatttcacatacattaaatattccacaataaactctgccatctgtgctgtagggtagtttgtattggtcatgtgctctgtcaagttgacagaggtgcaaagctaaatgtgtgacactcgaagaatatgcatatatttgaataatttgactatttagtccaacaatttgcaaaggcgc

SEQ ID NO: 349358 - DNA, 526 bp, Homo sapiens
ttagggctgccataactgataccatagactgggtggcttaaacaacaaaagtttgtgtccttacagttctggaggctagaagtacaagatcaaggtgctggcagggttggtttcattctgagatttctctctttggcttgtcatctcctcctcaccacccttcttttccccccatggtctttcctctgtgagtgtctgtaccctaattgcctcttcttctaaggacaccagttatattagattagggcccatccataaaagcccatttaatcttaattacctctttagaggccctatctccaaatacagcctctttctgaagtaactgtgggttaggactttaacacacaaattttgggggcgtgacgggaacacacaatcacaatccagccyttaatacctggcgattgtagagaccatctagagagttcttttttttctttgtttcaatacatttgaaatagtaacatatgcacttgttcaaaagaagtgcaagcagttcagaatggtatacagtgaataatca

SEQ ID NO: 349359 - DNA, 529 bp, Homo sapiens
ggattggcaaaaacacctacacagtagattctttataaaaacccttcatatatttggaggaagtatttgagctaagcctaggccatctctgtcagggtttctgtggagctcatgggcaggctttcagaagtactttgtccaagaaacttcaaaatagagctctccagtagayccataaccaaatgagggagacaaggtaaatgcttcaaggaatttttgctgctttcaaaaaacaataaatgggatgcatttcataaatcgcacagacttttaaaaatccttttgtctctcttccttaatttattcttacccccaaactgttctagtgcctctctcttcccctgttcatattctcctcaaaacccatgccattctcctcccagaagtggcatctggagataaacctcctacggctattaaaggattaggcagctttgggtcctctgttctttgtacaaaccctgtagaagacacagtaccttccaggaagtttagttcttttcttgctttgactatttctttatgagga

SEQ ID NO: 349360 - DNA, 528 bp, Homo sapiens
agtaaattccttcgtcttccttttcctatctaaatctagtttgactatgtttttaattcaacaatatgattcctggctttgacagaagatgcctaagcaatgtgttccatccagatttgtttttcttttcagaattttctctgccctacaaataatttggggatatgtgactataattcacaawtggtaatcctctaagatgtactgcaatagggaaagtgtagtacttttgcagcaccagtatgtttagcttttttcttcacaaacctctgttttctccttcaaatgtcaaaaagttgggcagtttcttgcccagttattcccagaagagtgcaaaggactgaggaagagggagaaaagacaggtggaagaaggaggtgaccatcaaacgctgcctcatcccacctccttatcacagcacagtttctgctgtacccatctatcaatccttgctccacataaagacaaaaacaacagagtctctgtgcctgcacttcttcatgccatcttgctatatttccatatgca

SEQ ID NO: 349361 - DNA, 519 bp, Homo sapiens
caagccacaaacagtaatcaccttcttagggagtggatatttttttttcttttattattatactttaagttttagggtacatgtgcacattgtgcaggttagttacatatgtatacaggtgccacgctggtgcgctgcacccactaactcgtcatctagcattaggtatatctcccagtgctatccctccccccttcccccaccccacaacagtccccagagtgtgatgttccccttcctgtgtccatgcgatctcattgttcaattcccacctatgagtgagaatatgcggtctttggttttttgttcttgcgaatgggagtggatatttaaagtagttgtcccttctgtttamagaagctcctttacaataaatagtactatgttgaaatgtgaaaataagtactatattcagaatattcaagagttatctgtactcttgaaattcctggaatttcaaatgatggatattgccttgtagaatgtgtattcatcactattattttctaaagaaaaaaa

SEQ ID NO: 349362 - DNA, 565 bp, Homo sapiens
ctcaatttaatctcctcacttgttgccccaggcaaccactgatctgctttctttcattacagattggattttcttttctataatttcttttaagtgaaataatatmgtacttacccttttgtgtctggctttttgcacttaagcaggattttgagattatgttgttgtatgtgtcttaatctgttcccttttagtgctgagtatgtagaatatggttttgaacaattttattagtgaaataaggctgaagctataataatacatagatttcttattgttttgagatagaaaaaatctgaaggtgtttttaagcaggtaagaggactcaatagagaaacggagtatactaaaaacaaaaaaaattatagtaaaaatttcccagggcatcatggtttgtaagagaaaaccaccattaaatagaagtacaaatagggaatttaaacttagaatttaaaacaaacaaaaatgataaaaacaaagttttaaaaatctgtttaagcagaatgaagaagttaagatgaactaaaaagagaatccagtgaaattgaaatcttcaggatgtaaa

SEQ ID NO: 349363 - DNA, 497 bp, Homo sapiens
ggaagtctgggtctgaattagtacatttcctgagtgcctcagctaaatgaccctgaaactgtagaattttcatctttttcctgagttatttctctaatgactggcttaaccacacactttttcctctgcttcttttccatggcactgcaagcagacaacaatacttgtaactcatgacaatttaaattaaagaacatggtcagcttaacaaactcctctataaacttttctggattttatgaaaaccggccaaatttttccttgtataaagccaaattacacatasaaaatggcatatgtactctaagtgattccctcattttcactagctaacttgaacaattaatgtagggttgaatttaggggttgatgtgaggccccactcgtggtagtaactggttgtgcttattttttccagtattaggggtgtatagtctggggctagttggaatagagggaggggtgtctgatgaccttggagtggaatccttcattaa

SEQ ID NO: 349364 - DNA, 589 bp, Homo sapiens
tgcttattttttccagtattaggggtgtatagtctggggctagttggaatagagggaggggtgtctgatgaccttggagtggaatccttcattaaagaacagatggaatccccctcagaatcggggaactaagaaaactccagggaaggcgtaggccttttatgggaagcagttaggatgggaacccttaggcatgactttctggtgcctggaagtaacgtgagccagaaaagggccataaaaacctgtacataagggaccttttcccattttccttctttttttataggataaatccaattgtaaaatatcattatacagaatcatgtttaggtcagttctgttggttttctaatttttattgaacccaaatggtggtgcaatagaaaatgagtttctttttctttaagccaaatttgaattttctccagtatcctaaaaaccatcctagtggtgaatcctctgggaggctcatygttgtccctcaggactaacaaggatttttactgggcacagaagattatctaagtctatcaagatataaagtaactggacccttgttatttttcccctttagatttctactttc

SEQ ID NO: 349365 - DNA, 607 bp, Homo sapiens
ctccttgcagagcagagctacctcacaggcagtatgcccagagaagcagctcagaggtagttctgcagtcatatttatacctactttaattatatgtaaattaatgggctgataatgaagaaatttctagaaaatgggttgtaacttataggtcattagagtcattgccatgaaaagggttggtaacttctgggtgttgccatggcaatggkatcatgacatggcacactggtgggcatgtcttacggagaggtgctttcatctcttccctgccatcactagtcctcaatctggtctggtggctgagctccagctcttagttaagttctgcatcctacctcactttaggccttttatggagacttcatttgttgttcatgattgaagccaagacaactgtgtcaaaatgtgatcaaacgaaaagcacatgatctaaacacagcaaggcatgtctgttcagattcttcttggtctttctgggaagcattccttcctccatagtatggagtaggaccctctctgaaatgagggtcttatgacacacaatcagattcacgtccttccttgggcagatggcaggaggacagaagaaataaaaattgtgttt

SEQ ID NO: 349366 - DNA, 646 bp, Homo sapiens
actgtgtcaaaatgtgatcaaacgaaaagcacatgatctaaacacagcaaggcatgtctgttcagattcttcttggtctttctgggaagcattccttcctccatagtatggagtaggaccctctctgaaatgagggtcttatgacacacaatcagattcacgtccttccttgggcagatggcaggaggacagaagaaataaaaattgtgttttctgaggcctgcttatgagtctaaagcaccccaacatcataaaaaaagagtgtaacaacggttatgggagttaggaactaggaaccttggatgacaagcacctacaccccccccgccccacatacacatatatatacacacatatatatgatcaaaatattatgttatataatcataatatgttatagtaatgtatatacaaatagctggacaccttatctgatttagtgggtctgggcttgggcctgagaatgtgcatttctagaaggctaccaaaatatgctgaatgcatgtgcttgaatcacaccatgagtaacaagagtctagcctgtatttttccatattggcatttgcaggcagaaatatgtcaaggaakaatgaactcaatgatatgattcaagattgaatggagagaatattaaggtcataggagt

SEQ ID NO: 349367 - DNA, 563 bp, Homo sapiens
taatcacatgctgattaatgaatcactaaatagtatcaaacgaattaaagcataaagtttttatcatgctattataagactctagaaatgcagtagtaaagaaagcaggattctcagtctcatgaaactcataatattatggaaaataaaagtattaacaaagttagcacaaatgttttttacaattattagaagatatgaaggaaactgcaagatctgatgaaacaacagggaggcaaattttagattcatagctcaggttacggctctctgaagatatggcattttggctgagtcctaaaggatggctaagcatkacatgatgaaagagcgaggatatttaaggcatgtgggaaggccctgatatgaattaaggcttagtgtgtttaaagaacattgtggataaagtaccaaaaatgaacagtagtctctctaaaatatgtttagtattttaaacctcacgtccttcaggaagtctttctgatttctcctactttcagtgctctcccttgcgctccccaacactgtgtatctccaccactgcacttcttagattttgtaat

SEQ ID NO: 349368 - DNA, 544 bp, Homo sapiens
cttttttgggttcatatgaattttatgattattttttctagttctttgaggaatgattgcggtattttgattggaattgtattaatttgtagattgcttttggcattatggtcattttcacgtatttccatttgtttgtgttttctatgatttctttcagcagtgttttgtggttttccttgtagaggtcttcacctcctttgttaagcatattcctacatttttgttttgttttgtttttccagttattgtaaaagggttcttgagttcttgatctgattctcagcttggtcacggttgtatagtagggctactgatttctgtacattcattttgtaccccgaaactttactgaattcatttatcagctacaggagcttttargatgagtctttagggttttctaggtatatgatcctgtcatcagcaaacagtgacagtttgacttcctctttatcagtttggataccctttctttctttctcttgtctgattgctctggctaggatttccagtactatgttgaatagaagtgatgaaagtg

SEQ ID NO: 349369 - DNA, 601 bp, Homo sapiens
gtttttgatgacacaatttayattcctttataatttgcatccctcaacaagatattatagctataattgtttgtaatagtttttccttttagccttcatactagaaataaggttaacttacacattgccattatagtattagaatgttttaaatctaaaaatttatttacttttattttgtgagttttatacattcacatgttttcttttactaatttgcatccttttccttcagcttgtaaaaattttgttagcactttttgtgaggaagttcagtgggaataaactcccttagcttttgtttgtctgagaaagtctgtatcatctcttcatctttgaaagacagaattgcctggcatattaatcttgacaggcaaggtttgtttttttctctcagtattctgaaatatcaaaccacttctttatgattgcaatgtttttgctaaaaaaaaatccactaatagttttacggaagtttccttgtatgtaacaagtagttctcttgctgttttcaaaattttctaattttgataatttaaaataatgtgcctcagagtgagtatctttatatgcatcctatttaatatcttttgggcttctt

SEQ ID NO: 349370 - DNA, 601 bp, Homo sapiens
gtttttgatgacacaatttatattcctttataatttgcatccctcaacaagatattatagctataattgtttgtaatagtttttccttttagccttcatactagaaataaggttaacttacacattgccattatagtattagaatgttttaaatctaaaaatttatttacttttattttgtgagttttatacattcacatgttttcttttactaatttgcatccttttcmttcagcttgtaaaaattttgttagcactttttgtgaggaagttcagtgggaataaactcccttagcttttgtttgtctgagaaagtctgtatcatctcttcatctttgaaagacagaattgcctggcatattaatcttgacaggcaaggtttgtttttttctctcagtattctgaaatatcaaaccacttctttatgattgcaatgtttttgctaaaaaaaaatccactaatagttttacggaagtttccttgtatgtaacaagtagttctcttgctgttttcaaaattttctaattttgataatttaaaataatgtgcctcagagtgagtatctttatatgcatcctatttaatatcttttgggcttctt

SEQ ID NO: 349371 - DNA, 505 bp, Homo sapiens
ttctgagccctaacatacatgtaaaatgtttttgttgttgcttcaatatatgcgaaaacatgctgtatatttactcattatatttttatctcgtttctttagatatttcaccaatgtaatctgcaattaagtgttatacaaaactctaagcttttaagtatatttataaataaagccattgtaggctttaattagtttttgttttctgtgttttggtaagttctttttacaggggatagtacttgatcgcccagtactggcactatttctagaactatgtgagagattttgtagacctctatttaaagcaacatgcccagataagtttcaaaatgaaataattggaatttcatgttggttctttcacayggctaatttaaagatctacagacttcaatagataagggaaggaatcagatacaaatgtgatagtggcatggagttttatttctgtaacaagtatttgttttctgtatttgatagttagaaatatttttaaaatgtg

SEQ ID NO: 349372 - DNA, 615 bp, Homo sapiens
atgtacccagtcaaataaacagaacatcactgcgtctcctcaggtctcaatgccagctgtgatttctacaatttgtgctagaggagctgtggccttggcatagcctggttccaaatggcctaccttattccttttgtctgctcttgcatcagaattgccagagaaagtagaaaaatgacctccaagtgaatagacgatctatgctgtataagtcttcattcaatggcagactagaaataccatatattgccttcaaggaaactgaggttccaaagtttggggataaagtctgaacaataaatagattrttaattccagcaacattattattttctttgctttcagattgcccaatataaatttttcagctacaaagatgtcacagtaaaaagagagatgagactaccacattgatttatttcaccaccattctgacctcagcattcctaccatatgacagaagtgtcctggggctagtccagctgtggttcctgctttccaaggaaagcatgctgctacttacactgcagcaaattccacataaaccagtgtatttcaaaatatttagaggtagtgtcatggactcagctattatgacttctcaaagacaggata

SEQ ID NO: 349373 - DNA, 576 bp, Homo sapiens
ttcccactcttaagccttttttacttttccctaataacggctctccttccctagaaattctgattctaattaccaagtttaattctcaatgatttttcagaacattctctgtgtagatatgtaggtagcatatattattgtaycttttgtcaatcatacataagtgcacacacacaatttcaatttatagatacattcatttaaatttaaacattcaccatatacacaaacaacttcatttatacactaactcacacagttttacttatacacacatgcagtttcacttgttcattctattctgttagattttaaattcctgggcatcaggaagtaaaactatactggtaatttcatgcaattatcttgggccataaaaatccagctttatttcctattgtttttgataataatgtcctttagaatgttgattatttaatatattaaaccatctgattaaaagaaaaaataatcatttctaattaaaagaaaaactaaaactatttttcttaaataaaaaaactaaagtaaaaatggtacagtagaaagtgtgtatatttagcatgtaaatataac

SEQ ID NO: 349374 - DNA, 576 bp, Homo sapiens
ttcccactcttaagccttttttacttttccctaataacggctctccttccctagaaattctgattctaattaccaagtttaattctcaatgatttttcagaacattctctgtgtagatatgtaggtagcatatattattgtaccttttgtcaatcatacatamgtgcacacacacaatttcaatttatagatacattcatttaaatttaaacattcaccatatacacaaacaacttcatttatacactaactcacacagttttacttatacacacatgcagtttcacttgttcattctattctgttagattttaaattcctgggcatcaggaagtaaaactatactggtaatttcatgcaattatcttgggccataaaaatccagctttatttcctattgtttttgataataatgtcctttagaatgttgattatttaatatattaaaccatctgattaaaagaaaaaataatcatttctaattaaaagaaaaactaaaactatttttcttaaataaaaaaactaaagtaaaaatggtacagtagaaagtgtgtatatttagcatgtaaatataac

SEQ ID NO: 349375 - DNA, 576 bp, Homo sapiens
ttcccactcttaagccttttttacttttccctaataacggctctccttccctagaaattctgattctaattaccaagtttaattctcaatgatttttcagaacattctctgtgtagatatgtaggtagcatatattattgtaccttttgtcaatcatacataagtgcacacacacaatttcaatttatagatacattcatttaaatttaaacattcaccatatacacaaacaacttcatttatacactaactcacacagttttacttatacacacatgcagtytcacttgttcattctattctgttagattttaaattcctgggcatcaggaagtaaaactatactggtaatttcatgcaattatcttgggccataaaaatccagctttatttcctattgtttttgataataatgtcctttagaatgttgattatttaatatattaaaccatctgattaaaagaaaaaataatcatttctaattaaaagaaaaactaaaactatttttcttaaataaaaaaactaaagtaaaaatggtacagtagaaagtgtgtatatttagcatgtaaatataac

SEQ ID NO: 349376 - DNA, 463 bp, Homo sapiens
tctgtcaaccattcactttgctaaggggaaagaaaaccaacaatcaccaatcacctgcaagcagtaagtgaccacatgtctgtacaagaccacacacagttgtatgggaggaaaccttaaattttattcaagcttgatgaaattgaactttccttcctttattcaacaaacatttattgagctcttagtttgtgtgactcacaatgtgaagcactgaggatatagagaagaaagtagatattatatattcactgcccttcataaagagctatagagtgaggcagaatattaaaggaaatcatacaactcattatttatatacaatttagacaaagtccattatggagaagtaaaaattgggcctctctaaattracattacttttcaggaggcaaggctttggattttgattctggttttgttatttacttgctctgtgattttggcaaattattcaacctct

SEQ ID NO: 349377 - DNA, 586 bp, Homo sapiens
cagcatcacctgagtacctggtgaaattcaattattggggcctaccccaaatatattgtatcagaaactctaggagtaggccaagcaatctgtgtcttaaagaacgctttgggcgattctgttgcatgctcaagcttaagaatcactgccctatgtagtaaataacatatcagaagcaataattttaacattaaatagggtaatttaggtaaygtatttagtgcaaacatagttaaccttcaacaaaataagtgttatctgtaattactattagttcttgttaaatgctacaatcagcaggaagaaaaatcaaggttgggatactaacatgtatataaatatagacttttaggaaatgtaacattcttagagaaatatttcagggttcctcttacactttaacattcatacaaatcagccgggggtctaaaatgcagattctgatacaggtccggggttgcgtatgagatcctgcatttctaaccagctcttagttgatgctgcggctgctggtcctgggatcacagtttgattagcatccatccagcccatggcaccctttactcccacttaactggtttttgca

SEQ ID NO: 349378 - DNA, 586 bp, Homo sapiens
cagcatcacctgagtacctggtgaaattcaattattggggcctaccccaaatatattgtatcagaaactctaggagtaggccaagcaatctgtgtcttaaagaacgctttgggcgattctgttgcatgctcaagcttaagaatcactgccctatgtagtaaataacatatcagaagcaataattttaacattaaatagggtaatttaggtaatgtatttagtgcaaacatagttaaccttcaacaaaataagtgttatctgtaattactattagttcttgttaaatgctacaatcagcaggaagaaaaatcaaggttgggatactaacatgtatataaatatagacttttaggaaatgtaacattcttagagaaatatttcagggttcctcttacactttaacattcatacaaatcagcygggggtctaaaatgcagattctgatacaggtccggggttgcgtatgagatcctgcatttctaaccagctcttagttgatgctgcggctgctggtcctgggatcacagtttgattagcatccatccagcccatggcaccctttactcccacttaactggtttttgca

SEQ ID NO: 349379 - DNA, 567 bp, Homo sapiens
tgtttaattttatagtgaatgtgtgcttacttaccatgccttcctgcatgtatgcattttaataacagtattacaaatatgtggtcatttgtttaaattatgtatcagcataaaatgtgagagaaaaacaatattaaacatctgatagaacttaaacatctcaaggcaatgttttggttgagataaacttttaaaaatgttcttgctttacaaatacctacaattcaataatattagaaaacctaacttctttctttttttctgtatctattctatgaaaatgtatttctctaaacaagtgctcatcaattatttcygacgtataaaagacttagagctttcttctacatgtatatgtaaacatatttaaatcaggatagctacctctactattttttcacaagtaagtaaaaactttttatggttacagaagtggaaaacagtgtttagatattatttatttaattttctctcagttgactttgtcatcttgtgttgcgggatgtcagggaccccaaatgaagggaccggctgaagccacggcagaagaacgtggattgtgaagat

SEQ ID NO: 349380 - DNA, 375 bp, Homo sapiens
attcctaaagtttcatggaacactaatccagaagctttatgataaaagagttcagtggtcaaatagattagaaaaactgcacataatcttcaattttgaagttacaatacaaaccaaaacagtaaagattctacaggaaataattctgctaaaattcatttaacccatatttttccaagttaatttgtacttagatctcatgcatcctatgtaatattcgttaatatcatatataataagttttgggaaaataagtgagtaaataggttaggattttaatttttttgatctatttcaaaattggtatgattgtatcactttgtaataraaaaatgtgtacaaacaatgactaagctcaaattactgcctcaatat

SEQ ID NO: 349381 - DNA, 573 bp, Homo sapiens
ttattatttttattattatcattttgagggggaggagtttgcaatcacttgggtctytgggtgattaggaaaaatagtcaccaggcacttctacaagatcctaatgctgctcaaataggccagttgttcccagatgctcaataataacaaaagatttaatgaactgtgaacaaacatgtacatccgtcagcttttaagatcttgttttgatcggccccttctgtacatacctgggcccaggtcttgggcagtgctagcaggcattatctaagagaacagacacatggaactgtgtaggaaaaattcaatatcgttgccatttgttttccctaagtttatctcttatttagaataatttttaaaaaggtgatacagggatttcttctttccaatgaatagcaatatagtgtaacaagaaaactagtcatgacattacaagtttctgtctacttttgatttttaccgcctgagtgaccacggaaaatcgacttcacttgtctacagcttagtttctttatatatacagtgtggatagtttctgctgtgcaggtctatcttgtagtgcttaggcac

SEQ ID NO: 349382 - DNA, 588 bp, Homo sapiens
ccacacaatcttttaaataatatcataaccattagccctcatgtccctgtggaattctttcatttacacaccatatggaagttctgcaaaatactgtaatgtgaatgagagatatggtatctaaaataatatatccatcagagggctgccaactggctgttcatggtgaatcatttaaatttaaaatttgatgttctgcacggagaagtgtgcaatccctgttgaatttttgaagctccctgaagaagctcttctttctgcagctgctgtgttcatttgcatytcaatatgagcattcagaggtcaactgcctgtatttcaggcacaaaataaactggagacactgcaaatattatgaactggtgtctctacaggcatgtggatacagctctgggtttccagtattgccatgctgcctgacaaagaataggcagtatagtgttaggcataggatgaatgatttatgtgatgtcatcagttactccacccttttcatagactatttgttttcttccctacaacaccagtcactgcccaagccctaaatcaatagctagtcatttgttttattaaacttgatctatgttc

SEQ ID NO: 349383 - DNA, 483 bp, Homo sapiens
ctaaatcctcatagtcaaaagattatcagaattaaaagttaatacatataaaatgcttagaatggtgtttgatctattacaaggattaagtaactgatgacttaatgatgataacgattttaatacctgcaaaatgcttagtatatataaatgatgakgataatgataattctattcttgttttccctttgcccttatttttaaatattttatcttttttgttgttttaatttataaagttgcctctaacgttttatggacttgctggcacatgatccaagacttgccctcaagggtggctctccttaccctgactattcatttttatgagtatacacaaagcacctactgtttactcagtagtgtccatgaacttttttctactgctgttcatttgaatcatctagcaaacacagaaaaatactgggcctcacttgagaccatctgaaggaactctgagggggcaggtcctaagcataatat

SEQ ID NO: 349384 - DNA, 553 bp, Homo sapiens
tcagccaaatgctcactgccagaaggaagcaagggtatggtcacatgctatggccctgaactggtgtggctggaagatttaatgacaactctggtaattacctctgtgaaaggccaaagtctgtgttcatagtttcatttttatttcatctctaacaggacacatcctgtcccccatacatatgaccacacccccggaccacagcagcccatggccctcacaccagaaaggactctgtcccgcatggactgaaaacatagagagatcacacagagagatattccactcggcaaatcccctgaagtgaatgcagcagacaggctggaatrattgagctcatgggacaccaggagaggctccatccttgctgcaagcaggggacatcaacacagttgctgaggcacagccccacatgggcgccggccagctcccggctgtcccagggctgcaagggaagttgttgaggtacgacctcaggcttaaccagagctggtcaggtcgaggtaatttcggtgcagccggccaagggggtctttctcccctgagcctgatc

SEQ ID NO: 349385 - DNA, 488 bp, Homo sapiens
ctgttcacccccaagactattggatcagtggtaaatggggttcctccccactctgtgctgtctttttgggaagatcctgaagaccatactttatataattacagggctttcactgtgatgagacctgggggagaaacagtggccagtgggcggtttgttggggaggtgggtggagactgcactgcatttatttcattacatctcagaacacggttttattcttttgctttcctttcttgtgcagtgacagagagtcgagggattgtggatagcctgcagaagttttcctcgctccctgcttacctccccacgaacttgcacatctccaatgcagaggagtcmtttttccttaaagaagccaaccaagacctcacaaggaactccagtctgcaggcccgggtggagccattcttcatctaccgagccaggacaccccctattatcaatgccagctatggcccattttcagtggagaagataatccccca

SEQ ID NO: 349386 - DNA, 627 bp, Homo sapiens
atgcgtcgtgcacagggcaccygcctgtagggagagccacacttaacagagaggagggaggtttgtttttgtttgtttttattcatgctagaaagtgacaacagagtcctataagaaatggaggactcctccctgaccccttcaaaaagcccaggcctgcaggagaaaagaaaagaaacatttaaaaacactccacttattttttctaaccagtgggaagtgctttgaatttatgctgctggccagtttcatcttaagtataacaaaaggcttcttacttcaaaagtaatagatgattcaattgtagaaaatttagaaaatacaattgggtaaaatggaggggataaaagtcatctccaaatctatgattgaaagggtaataactgttaatattttgagtatattggcattctatgtgatcacatctatatacagaaatatgttatttctgtgcatattagacttgctcatttagctttgaaaacttgttttctgtactaataaagaataaatatatagtaacatattttcatgtcattgaatatttaactataatgattattatcaagccctttacaaaaattggtcaaagtggttaaccctcttcccagaaaaatgcaaatacac

SEQ ID NO: 349387 - DNA, 627 bp, Homo sapiens
atgcgtcgtgcacagggcacccgcctgtagggagagccacacttaacagagaggagggaggtttgtttttgtttgtttttattcatgctagaaagtgacaacagagtcctataagaaatggaggactcctccctgaccccttcaaaaagcccaggcctgcaggagaaaagaaaagaaacatttaaaaacactccacttattttttctaaccagtgggaagygctttgaatttatgctgctggccagtttcatcttaagtataacaaaaggcttcttacttcaaaagtaatagatgattcaattgtagaaaatttagaaaatacaattgggtaaaatggaggggataaaagtcatctccaaatctatgattgaaagggtaataactgttaatattttgagtatattggcattctatgtgatcacatctatatacagaaatatgttatttctgtgcatattagacttgctcatttagctttgaaaacttgttttctgtactaataaagaataaatatatagtaacatattttcatgtcattgaatatttaactataatgattattatcaagccctttacaaaaattggtcaaagtggttaaccctcttcccagaaaaatgcaaatacac

SEQ ID NO: 349388 - DNA, 627 bp, Homo sapiens
atgcgtcgtgcacagggcacccgcctgtagggagagccacacttaacagagaggagggaggtttgtttttgtttgtttttattcatgctagaaagtgacaacagagtcctataagaaatggaggactcctccctgaccccttcaaaaagcccaggcctgcaggagaaaagaaaagaaacatttaaaaacactccacttattttttctaaccagtgggaagtgctttgaatttatgctgctggccagtttcatcttaagtataacaaaagkcttcttacttcaaaagtaatagatgattcaattgtagaaaatttagaaaatacaattgggtaaaatggaggggataaaagtcatctccaaatctatgattgaaagggtaataactgttaatattttgagtatattggcattctatgtgatcacatctatatacagaaatatgttatttctgtgcatattagacttgctcatttagctttgaaaacttgttttctgtactaataaagaataaatatatagtaacatattttcatgtcattgaatatttaactataatgattattatcaagccctttacaaaaattggtcaaagtggttaaccctcttcccagaaaaatgcaaatacac

SEQ ID NO: 349389 - DNA, 627 bp, Homo sapiens
atgcgtcgtgcacagggcacccgcctgtagggagagccacacttaacagagaggagggaggtttgtttttgtttgtttttattcatgctagaaagtgacaacagagtcctataagaaatggaggactcctccctgaccccttcaaaaagcccaggcctgcaggagaaaagaaaagaaacatttaaaaacactccacttattttttctaaccagtgggaagtgctttgaatttatgctgctggccagtttcatcttaagtataacaaaaggcttcttacttcaaaagtaatagatgrttcaattgtagaaaatttagaaaatacaattgggtaaaatggaggggataaaagtcatctccaaatctatgattgaaagggtaataactgttaatattttgagtatattggcattctatgtgatcacatctatatacagaaatatgttatttctgtgcatattagacttgctcatttagctttgaaaacttgttttctgtactaataaagaataaatatatagtaacatattttcatgtcattgaatatttaactataatgattattatcaagccctttacaaaaattggtcaaagtggttaaccctcttcccagaaaaatgcaaatacac

SEQ ID NO: 349390 - DNA, 326 bp, Homo sapiens
tacatgtctcaagtaaaacacagatgagtggcaaaaggtctactgcattctctggaacctgccaccccagagtagttaactggctactagaggattaacacacagggctgagcaggtcaaagccagggctctgtcaggtaagggccagtttttactactgagcaactcacaaacaccactggtaaagcaaagaggtstgagtgtgcatatagctcagggaaccctgagtttacgcttagttaccactaaaaactaacaaatgagactccactgaggcttaacttcatatacaaaaatcaacacctttgcctctttgacagtggtaa

SEQ ID NO: 349391 - DNA, 326 bp, Homo sapiens
tacatgtctcaagtaaaacacagatgagtggcaaaaggtctactgcattctctggaacctgccaccccagagtagttaactggctactagaggattaacacacagggctgagcaggtcaaagccagggctctgtcaggtaagggccagtttttactactgagcaactcacaaacaccactggtaaagcaaagaggtctgagtgtgcatatagctcagggaaccctgagtttacscttagttaccactaaaaactaacaaatgagactccactgaggcttaacttcatatacaaaaatcaacacctttgcctctttgacagtggtaa

SEQ ID NO: 349392 - DNA, 603 bp, Homo sapiens
gatattcttagcacttgttatttaaaaattacaatatctaaaactacatggaaaagataatggtctcaccactgtaatgagtttgcggaatttgggctctgagcatagaaaaatatatgaccacaaggtggcagtagcatacaacgagttttatttgggcaacgctttgacaggtttgcatgaaagaagcccctcacagcatgagacagtccaaaggatgtggcctgaggggccaccagccagaggggaggagggaaagaactctgaaagtagaggtagattcaagacaggggctcacatgtctagataatgtcactcagcagctcagtggggagtctctgggtcagagagctctaaagggcagttgcagcttgagttcttttatagctaaaaggtttatcttatttacaactaacagacaytggactcagttttgcagggtatgcaaaacaggcaggctccaaatggctaaaaatctgtttatttgggctatgtttaaaacaattggatgtgtaaaaatatgaatttggtgccagcaggcttttgagctaacaggtcccagcctgctgtgaagaaacaaacaacacaggggccaatgagcag

SEQ ID NO: 349393 - DNA, 589 bp, Homo sapiens
tgtctggttggggactgatctttattcactactaaagctctctgggtcagcatttagattacttattaagctttatttgatggccagagaaaaatgcattgagattgtggatataaatgaagaccacccaaatgaraacaaacagaggaatatttactcagagcttactgtgtcagtgggggttggtcaccagcacttgcattagcagagactcaaaggcaggcagaggaatgagaaagcttcaggtgtgcttggattggagggtttggcctggaggagctggaggcaggatagctagaagcagacattttatgtgatgggcttgggagcacagttggctttctctggttggcccggagctggaagcagaggcagaaaagagaagagctgggagtcattgaccaggctatgactattctaggctgattgttgcagaggttgtggcttgacttcctggctgctgcacggtggaagatcagagttgtattgttatatgttgtctggccgttgtccatttgtatattcagtctctcgaaataagatacttttcttaggcctaaggaaatgtgttatttcccagcgtaactga

SEQ ID NO: 349394 - DNA, 565 bp, Homo sapiens
gactttttaaaacttaactttaaaatacacaagtaatactgtaaaacaataatctgcaacaatacagacaaggccagcgtccatgttgacaacccccttccagtcctgattgcttcgaaggggtaaccaacccatttacagtttagtgttgaaccctaaagagcactttctcatgccccattctttgtatctgctcgaagagctctatggtaagttaactagtcattctcccatcagtgggcattagtttgcctccagtttttcactggcacctcaagcagtgctgcaggggacatccttgcctgccacgttgaacacaaacaaggatttctctggggtcgaggcagcagggtagagtggctcagagcctggagcctggagccagtttgctggctcaaatcctaactttaccatctataaagtaccagttttaaacttaagtgtaaataaagttaaaaaatgaagkctcaattgaacaagggtccccagagttgccagccccaggatgtttcaccatcccttactgatccccacaaccctgcctatacctctgtgaatagtccct

SEQ ID NO: 349395 - DNA, 565 bp, Homo sapiens
gactttttaaaacttaactttaaaatacacaagtaatactgtaaaacaataatctgcaacaatacagacaaggccagcgtccatgttgacaacccccttccagtcctgattgcttcgaaggggtaaccaacccatttacagtttagtgttgaaccctaaagagcactttctcatgccccattctttgtatctgctcgaagagctctatggtaagttaactagtcattctcccatcagtgggcattagtttgcctccagtttttcactggcacctcaagcagtgctgcaggggacatccttgcctgccacgttgaacacaaacaaggatttctctggggtcgaggcagcagggtagagtggctcagagcctggagcctggagccagtttgctggctcaaatcctaactttaccatctataaagtaccagttttaaacttaagtgtaaataaagttaaaaaatgaaggctcaattgaacaagggtccccagagttgccagccccaggatgtttcaccatcccttactgatccccacaaccctgccyatacctctgtgaatagtccct

SEQ ID NO: 349396 - DNA, 598 bp, Homo sapiens
cacacacacagtagtagacacatgtgaagcactgctctgctgcccctcagcccacctgatttcagaaccactggaatggacagttccatgtgccatagctaggcgctatcaccaaggcagtcttgacttctccactgttttctccaagttactgacccagatcaaccttcaaccaattgggaagggaggccaatagataaactctttagcctccccattttcctgagggacaattctgagggtccttgtacacagttccaagagagcaccccagtggtatgacgtcccagggacccttcatcttcctccttggtctcactctccccatcctctcacttctgctttctggtatcacctcccagattaactacctgggccccaggtcctggtcaggagtctgctttgtgtctacatgcacagcttgcgtgcacttgtacagcatgagatgtctatgggagagtggggccttggaccaccagcaggttgaaaggtgtgtggaatatcaaatccccartgtctcaaccacaggggctcaacacaccgtgcctgtaactccacagagctggaatggggctaaggctggttttatgcatatagt

SEQ ID NO: 349397 - DNA, 396 bp, Homo sapiens
atttatcacggaggtactaaggtttatttataatgggtgttttacattgtttctttcaacttggaaaccttttgtttgcwtattaatcatatagaaatactcttctttgttacaaagaaatgtgctttttcacttatctgaaaacacatcactctttgtctatctccccccaacttttgatctagacatggatgctaataatattaattcaatcaatattacaggttatttattctgtgccagacaatgttgcaagcactttacattgatgaaatcatttaatcccacaacaaccctatcatgtagagacaaaattctccctatcttaaggttgaagaaactaaggccaaaggattttaaataacttgttcaaggtcacatggctaataagtggtg

SEQ ID NO: 349398 - DNA, 396 bp, Homo sapiens
atttatcacggaggtactaaggtttatttataatgggtgttttacattgtttctttcaacttggaaaccttttgtttgcatattaatcatatagaaatactcttctttgttacaaagaaatgtgctttttcacttatctgaaaacacatcactctttgtctatctccccccaacttttgatctagacatggatgctaataatattaattcaatcaatattacaggttatttattctgtgccagacaatgttgcaagcactttacattgatgaaatcatttaatcccacaacaaccctatcakgtagagacaaaattctccctatcttaaggttgaagaaactaaggccaaaggattttaaataacttgttcaaggtcacatggctaataagtggtg

SEQ ID NO: 349399 - DNA, 563 bp, Homo sapiens
ataggttttttcctttttgtactttcatgcttttatttcatttgggtttctgtggagatggagggartaagtgtgctcagtctgctacttaaaagtaaattccgtatctttctttttgaaggaagaatgtcaatatttctcttagattgaataagcagcacatgttcattctagaaaacttgaaaatacgtagaaaaatatggcaggaagttgaaaggcatccacactctcaatgtgtagatcctcacctccagctaacagtccatttgagttttgacatgggcaacttgaccatatgattctaaagttaacttggaaggtggaaagcagggaagtctagctaataggattttgataaagaacaataatgcctctgtatgaatttgctagggctgccataacaaagtaccacatattgggccacttaaacagcagaaatttattttctcacaattctggaggctggaagtccaagaccaaggtgccagcaggtttgttttcttctgaggcctctcttggcttgtagatggccgcctgccttcatgccaccacatggtcttccc

SEQ ID NO: 349400 - DNA, 563 bp, Homo sapiens
ataggttttttcctttttgtactttcatgcttttatttcatttgggtttctgtggagatggagggagtaagtgtgctcagtctgctacttaaaagtaaattccgtatcyttctttttgaaggaagaatgtcaatatttctcttagattgaataagcagcacatgttcattctagaaaacttgaaaatacgtagaaaaatatggcaggaagttgaaaggcatccacactctcaatgtgtagatcctcacctccagctaacagtccatttgagttttgacatgggcaacttgaccatatgattctaaagttaacttggaaggtggaaagcagggaagtctagctaataggattttgataaagaacaataatgcctctgtatgaatttgctagggctgccataacaaagtaccacatattgggccacttaaacagcagaaatttattttctcacaattctggaggctggaagtccaagaccaaggtgccagcaggtttgttttcttctgaggcctctcttggcttgtagatggccgcctgccttcatgccaccacatggtcttccc

SEQ ID NO: 349401 - DNA, 388 bp, Homo sapiens
ctgggggccctgtgtgtttgtattcccagtggcagactcactcttggttgctgagcttatcaggtgggtttgtgtccctgcaggtagagaagtttgggggtggcgtggtaccaggaatgtagggtcaggtgctcaaccagtaaccttagcaacctgtctccctggtttagctttttctcagacaggcccttccctcctggaggcaagatgactgctagcagctcccagcaaacatctgctaacttggtcacttcagggagaaagctgctgtccccagataggccaggcacacgtcccrgcgctggtcaccactggctctgtttggcataacttagattgtgcacccaccctgaaccaatcactgtagccagccctgaaccaggggttt

SEQ ID NO: 349402 - DNA, 388 bp, Homo sapiens
ctgggggccctgtgtgtttgtattcccagtggcagactcactcttggttgctgagcttatcaggtgggtttgtgtccctgcaggtagagaagtttgggggtggcgtggtaccaggaatgtagggtcaggtgctcaaccagtaaccttagcaacctgtctccctggtttagctttttctcagacaggcccttccctcctggaggcaagatgactgctagcagctcccagcaaacatctgctaacttggtcacttcagggagaaagctgctgtccccagataggccaggcacacgtcccggygctggtcaccactggctctgtttggcataacttagattgtgcacccaccctgaaccaatcactgtagccagccctgaaccaggggttt

SEQ ID NO: 349403 - DNA, 551 bp, Homo sapiens
ggacatgttatttaacatttctggacctgaatttactctgtaaaataagtgggttcattcttttgtcctctcaatgatcagaaattacctagaaaatatatggaaattaaggctgtaatttgcctattattttcagtaaggtccaatgatgaaaagtgctgacacttctaactagtgttgatattattctaattgatgagattgataaggagaacaagacagttactaaataattaatgccttcatcaggtaaggcaataactcctcttattaatgcattatgactttgtgtgtctacctggtatctagaawtgaactgctcagtgacaatgtcctatccaactcaatccactgctaaagagttaacaggaaagtatcttagagtctggtttacattattgcaggcaagcctggacctggcttcctactcccttgagagacactggcctagggtgtgccccctggacggacagcctctggctcttagctgcatctccagtggacacaatcttacatactttattgcaattttattgggctaattgcttaat

SEQ ID NO: 349404 - DNA, 572 bp, Homo sapiens
attccaagaagtgatggtactgggtattgatacttttaagatttattacatgctctggaaaactgcttcccaggaagtatcagtgaattcttgagatggtcggttttatgtgttaacctggctgggctgtagtcctcagttatgcaatcaaacactaatctaggtgttgcaatgaggaatattgcagatgtgattaatgttcataatcagttgactctaagtaagcgagattatcctagataatctggtgggcctgaytgattaattgaaaggccttaagagcagaactgaccttctccagaagaaattctacttgtagaatgcagccttagctgctgcccgagaatttccaccctgctgcctgcccccacaaccacggaaggcaattctttgcaacaaatccgccttaacatatatcccctactagttctacatctgccagttgaacccttactgaaacactgctccaagaagtatatgaactgctcaactcatctcatcctcagagtatgggtctaaggacattaacatttttgcttatttgataagtgtaaagatacagtcaattattt

SEQ ID NO: 349405 - DNA, 604 bp, Homo sapiens
caacaattttgtgtggaatccttggggttttctacctatcaaatcatattacctgtgaacagagataattttattttttcctttccaatttggatgccttttatttctttttcttgcctaaytgctctgtcttggactcccagtactttgttgaatagaagtggtgagaatgggcatctttaccttgttccagatcttggaggaaaagcttttagtttttcaccattgagtatgatgttagctgtgggcttttcacatatgggctattttagattgaggtaatttccctctactcctagttctcaaggcatgttaagtttcgtttctgccattgtaaccaaaacactctttacaaatataagattataattgttcaaagttataagtgatgttattttttctaccttaaaagacctcattctcattcatacagttggtcaatacatattggcttagcatgtgccagccaacaaacaaatattatttatggtgattttgacaagtatctccatttacaaatacatgaacatttgtgttgtgctgccttgggaggggagtaggtgtgcctgggtctttgatgatgaggccagtgagaagtagagga

SEQ ID NO: 349406 - DNA, 548 bp, Homo sapiens
tgttttcagtgtatccatttgttactgaaaggaagacatataaaaatggccaattttgggcaggcatggtggctcatgcctgtaatcccagcactttgggaggccgaggctggtggatcacttgaggtcaggagttcaagaccagcctggccaacatggtgaaaacccatctctactaaaaatattaaaaattaaaaattagctgggcctggtggcatatgcctgtaatcccagctactccggaggctgaggcaagagaattgcagaaacccgaawggcagaggttgcagtgagccgagatcatacctgtgagagagagggagactctgtctcaaaaaaaaaaaaaaaaagccaattttattttaaatatttgattaagaaattataattcgtatggccattattattgatactggcattaatagcagaagtgctaattaggaaaattcagtcaaaattgggtcgaatctacaaaagaatatgtagctatccagagctttgataaggctaagtacttttatgtgcctaatacaatccagccgtgagca

SEQ ID NO: 349407 - DNA, 594 bp, Homo sapiens
tctatcctattttaaaattgtgattattgagatagaaaatttaaaataattatttaagtaagcatgaaaatgtagtattgattgaaacatttaggagtcttaaccactttcaaagcaggactaattgcctccatgacaatgcctcctggattctcatargttcttattcgtcaagagtttgctgtgcaagtgatctgtcttataaactgtccataggtttttacatatccaccagacataatacatcctcaaaatatatagatttaaactgtattccagatctgaagatttctaatttcttactcctgaacataatttagggttataaatgtagccactaaatctttaggtaatttaccttacctcatatagtttttaagaataagtaaaatgtcaaatgaacatgagagaaattattgcttcatttcaattagtgtgcttgattatttgaaattagattccttctttccccagattgaagtataagtccactttccatcaagatggtttgaaaattgtcccaaaataatgaacatgtgggaaatgtaaagatcagcttctgctaccttcccaaattttcaatcatttggcata

SEQ ID NO: 349408 - DNA, 614 bp, Homo sapiens
ttagaagccaagtcaaaagatttccccgaagattcattctcttcagccattttgtattgttcatcacactttttaattttgaaattaaaatgtgttggtgttactgtgtttgctggtttttcctaattgttttgartactatctatctattgcttcacataccacctatttcttcttttatctttaactgtagttgttttccataggtctatgttcatcccacccattataagaactacatctcaatggatgatatcaaactgacttcaatctcccagactatatttgttatatagattcaaaatgtatgatgaatcatacactctacagtccaaatcagaaatcagtttccacttcatcactaaaaaacattttttctcctgaattatgatattcttctgaattctctatcttggttaatttggtcaccattatgctcccatttttctggtcaactatgttcaaatatattcaaaacccatagaatcatctttgcctccatgtgttgtatccaaaacttaatcagtattgcttccttattctgtcatctctaagccttttaagatttcattctgctttcaaagaaattcagacagaacctgtcttgacattgt

SEQ ID NO: 349409 - DNA, 481 bp, Homo sapiens
ctgcttcctgctggtcaaattttgggaatccaaaaacttttcgctttttaccaccttcatgtcttaattgtaaattcacagtgtttagtgaatgtaattgttttcaaatttcgtaggtcccagatgaataatactggggttcacttcattctcaaaacttatactcacaaatttcttcaagataagtcttctctacataggacttctactgtgacagcaaggacagtgcctttaagcttcttagaaaacctatcatttgtttgaaaggatccatgagatgattaattaaattcttgaatggatcttttgtttgaggcaagaccattgatatgtctgagatcctaacaacacattttacattcatgcctttggtttcatatttasacaatgattttcttacagtgaactgtatttgaccatttcttggaagccattgcttgatttttaacatgttttgctttttgggaagtctgataatttt

SEQ ID NO: 349410 - DNA, 571 bp, Homo sapiens
aactgcatactttcaattcccttgttttgttattctagtatatccagaagcaaaagaatctagtttggatcattctttaaatctattgtgtaaatgttgtttccgagaatcaaatgtaaataaatcatggttactgctctcaaggagtttacaattttacaggggtcagtgtgataaacattatgataggtatacatatcaggagttttgggaacaaaaggagcagagaagataggaaagaatttcagcatatatccctgaattgcttttttaaggaaggttatgcatgacttagatgattaaayaggagaaaaagtacttattcaattagataaacaaatatttattaattttttggggggagtacttgaatatttacatgcagggcagggtgtcatcagaagagacatcatttctactcccatcaagcctacagttcagcaggacaaaagagacagcctgtgaagaggcttcaggcacaagagagctttacccgaaaaacttcaagtatgactggaacagactatgaagctaccccaaggaaaagccagaggggcatatatccttgagg

SEQ ID NO: 349411 - DNA, 616 bp, Homo sapiens
gattaaacaggagaaaaagtacttattcaattagataaacaaatatttattaattttttggggggagtacttgaatatttacatgcagggcagggtgtcatcagaagagacatcatttctactcccatcaagcctacagttcagcaggacaaaagagacagcctgtgaagaggcttcaggcacaagagagctttacccgaaaaacttcaagtatgactggaacagactatgaagctaccccaaggaaaagccagaggggcatatatccttgaggtcctgttactgcttttagagaaagatctttaccctggaagctatggactttytaaaaaagacagcaagaaaatcagttagcaagcgaaatgcagtactacgcacagatggggactcaaactggccattatattccaaaatgcgtttcagaaacctacagattgatgtcctcatctccaacctctccagctgtctctatattgtcagttactttgtgctcccatttaccactctcctaaagctatctcctctttgaacatgtacctctgtatctgttttgcagagaaaatggagactgttaggaaggcaacttccatgtcagcttgctgttattgcagctaga

SEQ ID NO: 349412 - DNA, 581 bp, Homo sapiens
ttttttttttttttttgcaagaacattagaaattcagtggattcatcgagaattgaaatgtccattagtagtcacaggaatgctgaaagaatcttttattattatcatggccagatgttgtatcacttacatataaatcagcaggtactttaaggataacattatagttttcatttggaaacatgtttttttcttcaatcaattttgatgaaacatttaactaaaaagaaattgtaccagtgtggcagactcaactcaacctaggtcctagcatgaacactcttgggcatttctctccccttgggtakgggcttgaattatcaactcagtcacattaaatggaaccagacagacatatgggatatcacttcaggggttaggttatgaaaaatcctgggcatgcattctctctctcttcttaatggattacttgctttgaagaaagcctgctgccatgttatgcgaccgcctgtagagatgtccacatggtgaggaattgagggaggcctccaatcaacagccagcaagaaatcagtatctatagtccaatatcttaagggagcaaagcctgccaaaaatca

SEQ ID NO: 349413 - DNA, 591 bp, Homo sapiens
gatcgtgaaaattaagagaaataatccacaaagtatcctagcccatgatgagtactccataaatgtcaactattattttattattgctattattattgctatttcagattcaaagtaacctaagattatgagtgtctgccatctggttgaagatactatgtatgttgcctaatttaacttaaactacagctttctgaaataagagttattattctcattttacagataaggaaaccaaggttcagacattttaagtgatttctctgaagtattacagtgatgaagtgctacagccaagttcctgcccaggtctcctgacttcaagtttatagtagtttaacttstcaaaagctttctggctgggcacaatgactcatgcctgtaatcccagcattttgagaggcgaaggtgggaagattgcttgagaccagcctgggcaacatagcaagagcctgtctcataaaaaataaaaataaaaataaattataaaacaaaacaaaaaaacccaagtgctatccatttaggcttgtcagtatactgtgaagaatactagttaatactgttgggtatgagtttgaatcccagcacaac

SEQ ID NO: 349414 - DNA, 556 bp, Homo sapiens
tgagcctgtctccaaataagttcacgttctggtactggcagttaggagtgaacatatgaatttgggggtggggtggggaagggtacaactcaacccataacacctgacatcccaagagtataaatattgatctccttattgtctcatggttacaaacacagtcaggcatctaattcactgctttaagcaggaagacaaaaaaaaaaaaaaaaaaaaaaaaccgtttgctttasacaggaaggtaagaaagcagaaggtcaaagaagtacaaaaatcaaatctcacattttacagaaaattcttggaaggtctacccagtaagttccacctacacgtcactgccaaggactgggtcatattacaatgtattctgtgaagatgagaatttgttttctagactctaaattaaagaaagcgtaggaggagaggacttaaaagagttttggtgtattctatctttagtgtcctctacaaaattttaaattttttactgccaatttgggaaaaaatagcattacatatatagaaaattaagtcaatgaaagaatgatgacaa

SEQ ID NO: 349415 - DNA, 540 bp, Homo sapiens
ttaacttatatagcaaactactttcaacytgcatttagctttgagtatcttgaaaataattccctatagtatttcttatttatatttcttttagcatcagttactgattataaaacaaaacgaacacagcagccctcaggtaaagacagcattgaatgtgtccacagcatcagtgggtctctcagtctttcatgcagtttagcaagttttcttccctcacctatcttagtgagccactgctgtctgaagagatgtgaactggctatgcaagcagagtctctggtaaagctcaccagtaaataaatgaaaggccttgcaagtatacttcaaggatctttttaaagaaaactaagcattaagcacagagaacaaggtctttagtgacaaccaagggaaatattcttgccctgcgatcacagaaatagaagtaatagaaaaagtagaaattgaagttgaaaaaacattgaatctaaaacttcctacataaattaagggtgttatgataaagttaaatatgtagttccaaaacaactatgacac

SEQ ID NO: 349416 - DNA, 523 bp, Homo sapiens
atttgagtttgtaactctatgatagtagtttataactataatatatacaagattcctaaataatggtagtggcaatggaaaaaaaagagaaatgcgtatgatataatgatayaggattctgtcagcccgttcttgtgctgctataaagaaatacctgaggctgagtaatttgaaaagaaaagaggtttacttgtctcatggttcagcaggctgtaaaaaaaagaaagcgcagcactgcatctgctcctggtgagcgcctcaggaagcttttaatcatggtggaaagcaaaggaagaacaggcatgtcacatggtgagagcaggagcaagagagagagaggagtgggaggtccagactcttaaacaatcagatctcatgtgaactaactgactgagaactcacttatcaccaagagtatggtgtcaaatcattctttaaacacctacccccataattcaattacctcccaccaggctccacctttaacattgggaatcacatttcaacatgaaatatggagggc

SEQ ID NO: 349417 - DNA, 555 bp, Homo sapiens
gataggcttattttggccttatcctgtgttctttccttcagctcaatatcctacttgatatttggcatgctgtttaagaaacacaaaagatcatagaaacagccaaaggataatgcatatatataaaatccctttctcatattagaaattttatccccaattctgatggctttatctttgtccactttactttygccatgtaattgcaaatgtatcattaacagtaaatagaacagatattgatattttatttttattgatgggtatgtgagacaaataaagattaaaattttatacattaattcaataactaattgttgaacacttattgtaggttaaacactgtgaaagatgctagaaatacaaagtcaaataaaatgtgatgtagatcctgaagggccttaaatttcattaacacaaaattccattaaagtgtagcaggtaatgtgaaagtattctatgcagggcacagtttgcacaaaatgtaggttagaattaggaggtggtatagtatttaaggcaaaaaaaaactgtgagcttggacagtcaaagtca

SEQ ID NO: 349418 - DNA, 555 bp, Homo sapiens
gataggcttattttggccttatcctgtgttctttccttcagctcaatatcctacttgatatttggcatgctgtttaagaaacacaaaagatcatagaaacagccaaaggataatgcatatatataaaatccctttctcatattagaaattttatccccaattctgatggctttatctttgtccactttactttcgccatgtaattgcaaatgtatcattaacagtaaatagaacagatattgatattttatttttattgaygggtatgtgagacaaataaagattaaaattttatacattaattcaataactaattgttgaacacttattgtaggttaaacactgtgaaagatgctagaaatacaaagtcaaataaaatgtgatgtagatcctgaagggccttaaatttcattaacacaaaattccattaaagtgtagcaggtaatgtgaaagtattctatgcagggcacagtttgcacaaaatgtaggttagaattaggaggtggtatagtatttaaggcaaaaaaaaactgtgagcttggacagtcaaagtca

SEQ ID NO: 349419 - DNA, 508 bp, Homo sapiens
tatttctagtttaaattactctaatattaattttaattaactcttagtaaccttaatttctagtgaaaattagtaagcattttgaagtgcatcatgttagtattttgcagatgaacaccatctcataaaataatttttatgcctttaattaacaggcccaaatatgtttagcttttccataacatgtgaaaccaagatgccaaattacgtatattttaaacttctgttaagcaattgatatttcagtattttccttagaaatgactcaaatattaaatcagtaaagtgttacttaatttaaataacatgattttaagatttcaagtcacactaaattatttttgaaattctgacaactttattataaaccttttgtcaatktatattcacctaattcacttgttcttaacaattgtgcttcagttcctccttaaacacaactatgagtggatttatagctttaagacattcattatacatctcagtaatagcaagcttgtttcaccag

SEQ ID NO: 349420 - DNA, 508 bp, Homo sapiens
tatttctagtttaaattactctaatattaattttaattaactcttagtaaccttaatttctagtgaaaattagtaagcattttgaagtgcatcatgttagtattttgcagatgaacaccatctcataaaataatttttatgcctttaattaacaggcccaaatatgtttagcttttccataacatgtgaaaccaagatgccaaattacgtatattttaaacttctgttaagcaattgatatttcagtattttccttagaaatgactcaaatattaaatcagtaaagtgttacttaatttaaataacatgattttaagatttcaagtcacactaaattatttttgaaattctgacaactttattataaaccttttgtcaatttatattcacctaattcacttgttcttaacaattgtgcttcagttcctccttaaacacaackatgagtggatttatagctttaagacattcattatacatctcagtaatagcaagcttgtttcaccag

SEQ ID NO: 349421 - DNA, 424 bp, Homo sapiens
cacaaaatggcaggaaaaagaaggatggaaggaggaacttgccraacagttgtaaaaccattagatctcgagagagaactcactcactatcatgagaacagcttgggagaaaccacctccatgattcaattacctccacctggtctctcccttgacatgtggggattatggggtttacaattcaccatgagattttgagtggggacacagccaaaccctatcaactcctaaatcttaatacactttattactagctgatatgatttggatctgtgtcccttaccaaatctcatgctgaattgtaatccccaatgttggaggtggggtcttgtgggaggtgactggatcatgggggcagatttccccctttgatgctgtatcatgatagcatcctcatgagatatggttggtgaaagtgtgtggc

SEQ ID NO: 349422 - DNA, 424 bp, Homo sapiens
cacaaaatggcaggaaaaagaaggatggaaggaggaacttgccgaacagttgtaaawccattagatctcgagagagaactcactcactatcatgagaacagcttgggagaaaccacctccatgattcaattacctccacctggtctctcccttgacatgtggggattatggggtttacaattcaccatgagattttgagtggggacacagccaaaccctatcaactcctaaatcttaatacactttattactagctgatatgatttggatctgtgtcccttaccaaatctcatgctgaattgtaatccccaatgttggaggtggggtcttgtgggaggtgactggatcatgggggcagatttccccctttgatgctgtatcatgatagcatcctcatgagatatggttggtgaaagtgtgtggc

SEQ ID NO: 349423 - DNA, 424 bp, Homo sapiens
cacaaaatggcaggaaaaagaaggatggaaggaggaacttgccgaacagttgtaaaaccattagatctcgagagagaactcactcactatcatgagaacagcttgggagaaaccacctccatgattcaattacctccacctggtctctcccttgacatgtggggattatgggrtttacaattcaccatgagattttgagtggggacacagccaaaccctatcaactcctaaatcttaatacactttattactagctgatatgatttggatctgtgtcccttaccaaatctcatgctgaattgtaatccccaatgttggaggtggggtcttgtgggaggtgactggatcatgggggcagatttccccctttgatgctgtatcatgatagcatcctcatgagatatggttggtgaaagtgtgtggc

SEQ ID NO: 349424 - DNA, 424 bp, Homo sapiens
cacaaaatggcaggaaaaagaaggatggaaggaggaacttgccgaacagttgtaaaaccattagatctcgagagagaactcactcactatcatgagaacagcttgggagaaaccacctccatgattcaattacctccacctggtctctcccttgacatgtggggattatggggtttacaattcaccatgagattttgagtggggacacagccaaaccmtatcaactcctaaatcttaatacactttattactagctgatatgatttggatctgtgtcccttaccaaatctcatgctgaattgtaatccccaatgttggaggtggggtcttgtgggaggtgactggatcatgggggcagatttccccctttgatgctgtatcatgatagcatcctcatgagatatggttggtgaaagtgtgtggc

SEQ ID NO: 349425 - DNA, 535 bp, Homo sapiens
tgtaaatgacgagttaatggctgcagcacaccaacatggcacatgtatacatatgtaacaaacctgcacattgtgcacatgtaccctagaacttaaagtataataaaaataaataaataataattggcatatccagaagccctttgctrtcttctgctacatttgcacaaattcacagctatttgaataccagtcattgtcaatcctggtcagctttgaaaatactgttccttagttttgctctctgcctgatttacttggatttaggggaaacccaggaatcagttgatttgagtatgtagccaatgttgtaaagaactaattgctttaacttctaatagaaaaatatcactatttttttaaaaagttacataattcatgtgtaggaacataatccttttagcctagaagtaaaaaatgatatagtcttgccctatagcactgatcatggccatatataatttataataaccaaaataatgacaatattttggtaaagcatgctcgattaatttgaatgctcacgagttaacac

SEQ ID NO: 349426 - DNA, 535 bp, Homo sapiens
tgtaaatgacgagttaatggctgcagcacaccaacatggcacatgtatacatatgtaacaaacctgcacattgtgcacatgtaccctagaacttaaagtataataaaaataaataaataataattggcatatccagaagccctttgctatcttctgctacatttgcacaaattcacagctatttgaataccagtcattgtcaatcctggtcagctttgaaaatactgttccttagttttgctctctgcctratttacttggatttaggggaaacccaggaatcagttgatttgagtatgtagccaatgttgtaaagaactaattgctttaacttctaatagaaaaatatcactatttttttaaaaagttacataattcatgtgtaggaacataatccttttagcctagaagtaaaaaatgatatagtcttgccctatagcactgatcatggccatatataatttataataaccaaaataatgacaatattttggtaaagcatgctcgattaatttgaatgctcacgagttaacac

SEQ ID NO: 349427 - DNA, 535 bp, Homo sapiens
tgtaaatgacgagttaatggctgcagcacaccaacatggcacatgtatacatatgtaacaaacctgcacattgtgcacatgtaccctagaacttaaagtataataaaaataaataaataataattggcatatccagaagccctttgctatcttctgctacatttgcacaaattcacagctatttgaataccagtcattgtcaatcctggtcagctttgaaaatactgttccttagttttgctctctgcctgatttacttggattkaggggaaacccaggaatcagttgatttgagtatgtagccaatgttgtaaagaactaattgctttaacttctaatagaaaaatatcactatttttttaaaaagttacataattcatgtgtaggaacataatccttttagcctagaagtaaaaaatgatatagtcttgccctatagcactgatcatggccatatataatttataataaccaaaataatgacaatattttggtaaagcatgctcgattaatttgaatgctcacgagttaacac

SEQ ID NO: 349428 - DNA, 535 bp, Homo sapiens
tgtaaatgacgagttaatggctgcagcacaccaacatggcacatgtatacatatgtaacaaacctgcacattgtgcacatgtaccctagaacttaaagtataataaaaataaataaataataattggcatatccagaagccctttgctatcttctgctacatttgcacaaattcacagctatttgaataccagtcattgtcaatcctggtcagctttgaaaatactgttccttagttttgctctctgcctgatttacttggatttaggggaaacccaggaatcagttgatttgagtaygtagccaatgttgtaaagaactaattgctttaacttctaatagaaaaatatcactatttttttaaaaagttacataattcatgtgtaggaacataatccttttagcctagaagtaaaaaatgatatagtcttgccctatagcactgatcatggccatatataatttataataaccaaaataatgacaatattttggtaaagcatgctcgattaatttgaatgctcacgagttaacac

SEQ ID NO: 349429 - DNA, 440 bp, Homo sapiens
caatgttgtaaagaactaattgctttaacttctaatagaaaaatatcactatttttttaaaaagttacataattcatgtgtaggaacataatccttttagcctagaagtaaaaaatgatatagtcttgccctatagcactgatcatggccatatataatttataataaccaaaataatgacaatattttggtaaagcatgctckattaatttgaatgctcacgagttaacacataattgaatgtgatatgtattaggttatagaaaaccatgaagtaaaaatcataggctgcattgaactttctactttcccaactttgcctcattatagggagggatgcagccctagagttcaagaattccataaagaccaacctgaaattctggtgcctggcatcttgtcacacctccttccaatacacaaacatcaaggagtgtaga

SEQ ID NO: 349430 - DNA, 440 bp, Homo sapiens
caatgttgtaaagaactaattgctttaacttctaatagaaaaatatcactatttttttaaaaagttacataattcatgtgtaggaacataatccttttagcctagaagtaaaaaatgatatagtcttgccctatagcactgatcatggccatatataatttataataaccaaaataatgacaatattttggtaaagcatgctcgattaatttgaatgctcacgagttaacacataattgaatgtgatatgtattaggttatagaaaaccatgargtaaaaatcataggctgcattgaactttctactttcccaactttgcctcattatagggagggatgcagccctagagttcaagaattccataaagaccaacctgaaattctggtgcctggcatcttgtcacacctccttccaatacacaaacatcaaggagtgtaga

SEQ ID NO: 349431 - DNA, 552 bp, Homo sapiens
ttatagaaaaccatgaagtaaaaatcataggctgcattgaactttctactttcccaactttgcctcattatagggagggatgcagccctagagttcaagaattccataaagaccaacctgaaattctggtgcctggcatcttgtcacacctccttccaatacacaaacatcaaggagtgtagaagttgaacatggtctgttgtcactgcctcawagaatccacttctagcttgttcacactagggtgtgaacatttaaagagggtagggaagaaccacctgggtggattttcactggggatcttataataaactctcaaaatcccagattgagacaagggaagggatgctcagtcttatgtaattaggaaaaagagaggaattttgaacccacccctgcatcatctaagtcaaatagagccagtgtaactgttgggaccgttgcaggtagggtgtgctaggtaccaagccgcagttaggtaaccaatgacttttacaagcttattttcatctcagtacaccacatgcttcatgtgccacttgcatgtatgta

SEQ ID NO: 349432 - DNA, 552 bp, Homo sapiens
ttatagaaaaccatgaagtaaaaatcataggctgcattgaactttctactttcccaactttgcctcattatagggagggatgcagccctagagttcaagaattccataaagaccaacctgaaattctggtgcctggcatcttgtcacacctccttccaatacacaaacatcaaggagtgtagaagttgaacatggtctgttgtcactgcctcatagaatccacttctagcttgttcacactagggtgtgaacatttaaagagggtagggaagaaccacctgggtggattttcactggggatcttataataaactctcaaaatcccagattgagacaagggaagggatgctcagtcktatgtaattaggaaaaagagaggaattttgaacccacccctgcatcatctaagtcaaatagagccagtgtaactgttgggaccgttgcaggtagggtgtgctaggtaccaagccgcagttaggtaaccaatgacttttacaagcttattttcatctcagtacaccacatgcttcatgtgccacttgcatgtatgta

SEQ ID NO: 349433 - DNA, 552 bp, Homo sapiens
ttatagaaaaccatgaagtaaaaatcataggctgcattgaactttctactttcccaactttgcctcattatagggagggatgcagccctagagttcaagaattccataaagaccaacctgaaattctggtgcctggcatcttgtcacacctccttccaatacacaaacatcaaggagtgtagaagttgaacatggtctgttgtcactgcctcatagaatccacttctagcttgttcacactagggtgtgaacatttaaagagggtagggaagaaccacctgggtggattttcactggggatcttataataaactctcaaaatcccagattgagacaagggaagggatgctcagtcttatgtaattaggaaaaagagaggrattttgaacccacccctgcatcatctaagtcaaatagagccagtgtaactgttgggaccgttgcaggtagggtgtgctaggtaccaagccgcagttaggtaaccaatgacttttacaagcttattttcatctcagtacaccacatgcttcatgtgccacttgcatgtatgta

SEQ ID NO: 349434 - DNA, 627 bp, Homo sapiens
ttgtgtgtgcaaagacgacttctgaaattaataccaacaagagatttcttctttgcatattttcaagcagaaagtggactaaattatatcattggagcatgacgtctcaaaaaatatttattgccaaataattctctactgctaaaaattatttattgcatgaaatagaaaagatctgagactgaaacttccatttaaaaacatgaattatttaaaaaaatagagtaattacataacaattatgaaactcagatgccagagtcagaaatcaagaaattaactatgtcaagcaattacaatatgattacaaaggcccttatatattcatacaagctttttgcattttttgagctaattttatgaaaaacatcaaaagccagaaaactaatgcttaatgtatattttaaggccaagaacaatatagaaaaattaattttctccttaaagttttttaagatatttaaagtaaacattttaaaaattatttaatctgtgacccaatttgaatcactttgctcttcagattccgatgtctccacaaaaattccgatgtctccttgaaattagctgatacattataagaaatgaatractgtcctgtcctatttgggacacacataaaagtta

SEQ ID NO: 349435 - DNA, 573 bp, Homo sapiens
cttactttaccaagtaacaaatttagcattatgaaatctgtagttagtttacttctgcaatgaacataacattaaaattgttgtaataatatgtttctccaattttttatataatgcataaaggacaaaagatcaagccacttctatatcttgcctgttaatcagaaaatatcttggatttatagctatgtactaatcacaaagtctttcttagaaaagtattaaaagtgattttatactatataatattatttattaaatcctatgtgatgttctcctcacaactagtgtcttcatagtttaatttttttctctatttttttaaaagtcagaattgtcaarggttatgtcatattagtatcaagatagttgaccataattttagatattaggctgagacatatcaggacagctaacatttcaatgtaagtcaatgaaatatatagatggttatataattaggaattaaggaaagaagcatgagaaaggctgcataaaggaaacttctctcggataatccttataagcatggaaaatatactttttcacaaaacttaagacacaatgcaaaat

SEQ ID NO: 349436 - DNA, 533 bp, Homo sapiens
cctgcttttttcaggcactgttttggacaacatttccctactgagcattaaatcactttttcttaaataygtactaaagatttccatggctgaaaagctagttccacatacattaataatccttgaagaattaaatcagatacaacctctacatcagcacaatatttcaaggtggtaagggagtgctactgctgggtttgtcttcacttaataactttattaatgatgtggatgagtgaacaaatatgaaaagaaaatttataggtattacatatgtagattctgcagaaacaaataggctggaaggtaatgactgtagaatgacctagagaggttaaaaaaagaaaatagtagtccaatattattccacttttaagtaaatgagaccattaagctctttaaaataaccagtagataaaaactcaaagcaatgatagctacatcaaaaagtgagggaagaggggaaattatatgttgcaatgttacagagtacattaaagcattcagtatatttcctgaaaatttcgtaagca

SEQ ID NO: 349437 - DNA, 533 bp, Homo sapiens
cctgcttttttcaggcactgttttggacaacatttccctactgagcattaaatcactttttcttaaatatgtactaaagatttccatggctgaaaagctagttccacatacattaataatccttgaagaattaaatcagatacaacctctacatcagcacaatatttcaaggtggtaagggagtgctactgctgggttygtcttcacttaataactttattaatgatgtggatgagtgaacaaatatgaaaagaaaatttataggtattacatatgtagattctgcagaaacaaataggctggaaggtaatgactgtagaatgacctagagaggttaaaaaaagaaaatagtagtccaatattattccacttttaagtaaatgagaccattaagctctttaaaataaccagtagataaaaactcaaagcaatgatagctacatcaaaaagtgagggaagaggggaaattatatgttgcaatgttacagagtacattaaagcattcagtatatttcctgaaaatttcgtaagca

SEQ ID NO: 349438 - DNA, 533 bp, Homo sapiens
cctgcttttttcaggcactgttttggacaacatttccctactgagcattaaatcactttttcttaaatatgtactaaagatttccatggctgaaaagctagttccacatacattaataatccttgaagaattaaatcagatacaacctctacatcagcacaatatttcaaggtggtaagggagtgctactgctgggtttgtcttcacttaataactttattaatgatgtggatgagtgaacaaatatgaaaagaaaatttataggtattacatatgtagattctgcagaaacaaataggctggaaggtaatgactgtagaatgacctagagaggttaaaaaaagaaaatagtagtccaatattattccacttttaagtaaatgagaccattaagctctttaaaataaccagtarataaaaactcaaagcaatgatagctacatcaaaaagtgagggaagaggggaaattatatgttgcaatgttacagagtacattaaagcattcagtatatttcctgaaaatttcgtaagca

SEQ ID NO: 349439 - DNA, 209 bp, Homo sapiens
atctaggcttctgtagacaatgtggaaacatttttaaaatgatgacgccctccttttccttmgtagctaaatcagtacacaaaattctaattatttccttagttttaataataataaagcaatataagattcaccctctgtattcaattctttgttaccaattctgctataattagaatttttgaaattcttagttataacctttattt

SEQ ID NO: 349440 - DNA, 575 bp, Homo sapiens
gcctttacataatataaggtctacatattctctctacatctgtgcgccgtaagactggattttgaaaagctraggcatagactgatagctctttaccacacttgttttttcttctttctggatacatagcttggctatatttccatgcaactgtgtcccggttaatgtgtaccacttttagagggtggtacatataaatgtttcttccagttctttcaacatgtgtcatttgaaaaaggagaactctgaagccctctaggaagttggagctataatactggaggccagtttcctgaattactccctggtaaaagccacccagacaagaaatgcctttatttgaatgttattaatgagaaacacattttaaactttcagccactttaactttgaggattgtttgttaaaacagctggtgttacccaaactgttataggagtctactaaatgtcatttcatttttttcccttctcaaactcagaatgaattgggagatagccgtgggcgttaaaactgtttcaagaagtgcaacttagcgttcagggctgacctcatgagcttccagagacattaga

SEQ ID NO: 349441 - DNA, 575 bp, Homo sapiens
gcctttacataatataaggtctacatattctctctacatctgtgcgccgtaagactggattttgaaaagctaaggcatagactgatagctctttaccacacttgttttttcttctttctggatacatagcttggctatatttccatgcaactgtgtcccggttaatgtgtaccacttttagagggtggtacatataaatgtttcttccagttctttcaacatgtgtcatttgaaaaaggagaactctgaagccctctaggaagttggagctayaatactggaggccagtttcctgaattactccctggtaaaagccacccagacaagaaatgcctttatttgaatgttattaatgagaaacacattttaaactttcagccactttaactttgaggattgtttgttaaaacagctggtgttacccaaactgttataggagtctactaaatgtcatttcatttttttcccttctcaaactcagaatgaattgggagatagccgtgggcgttaaaactgtttcaagaagtgcaacttagcgttcagggctgacctcatgagcttccagagacattaga

SEQ ID NO: 349442 - DNA, 575 bp, Homo sapiens
gcctttacataatataaggtctacatattctctctacatctgtgcgccgtaagactggattttgaaaagctaaggcatagactgatagctctttaccacacttgttttttcttctttctggatacatagcttggctatatttccatgcaactgtgtcccggttaatgtgtaccacttttagagggtggtacatataaatgtttcttccagttctttcaacatgtgtcatttgaaaaaggagaactctgaagccctctaggaagttggagctataatactggaggccagtttcctgaattactccctggtaaaagccacccagacaagaaatgcctttatttgaatgttattaatgagaaacacattttaaactttcagccactttaactttgaggattgtttgttaaaacagctggtgttacccaaactgttataggagtctactaaatrtcatttcatttttttcccttctcaaactcagaatgaattgggagatagccgtgggcgttaaaactgtttcaagaagtgcaacttagcgttcagggctgacctcatgagcttccagagacattaga

SEQ ID NO: 349443 - DNA, 575 bp, Homo sapiens
gcctttacataatataaggtctacatattctctctacatctgtgcgccgtaagactggattttgaaaagctaaggcatagactgatagctctttaccacacttgttttttcttctttctggatacatagcttggctatatttccatgcaactgtgtcccggttaatgtgtaccacttttagagggtggtacatataaatgtttcttccagttctttcaacatgtgtcatttgaaaaaggagaactctgaagccctctaggaagttggagctataatactggaggccagtttcctgaattactccctggtaaaagccacccagacaagaaatgcctttatttgaatgttattaatgagaaacacattttaaactttcagccactttaactttgaggattgtttgttaaaacagctggtgttacccaaactgttataggagtctactaaatgtcatttcatttttttcccttctcaaactcagaatgaattgggagatagccgtgggcrttaaaactgtttcaagaagtgcaacttagcgttcagggctgacctcatgagcttccagagacattaga

SEQ ID NO: 349444 - DNA, 491 bp, Homo sapiens
tctgttctagttctaagcatgcaaataaattttaagcaggatttcttagcctgcaggagctgaggatgattaataagtcctgctgttatgcataaatgcactgacctatactgtgcccttcagtcaaattgtatattgtttaatygtgataaatgaagtgcaccaggcacagataagctagtccctggaatatgtccagatacacctgaaagaagaatgactcaagctgggtgtgtaaagctacactttggaggatagagcttcccacaggtgcaatggaactctcacttctcacttgctcagaaattatgatctgcagtgtgagtctcccctggtaaggaaacatgtccagctccttgaaacatgttctagagaatagcattcattaccctcccatgaacttaaacatgcttcttggctcctgtgcattttaggtaagtaagctttgatttccccaggtggtgtcggtgtctagtcttttcataaacttg

SEQ ID NO: 349445 - DNA, 551 bp, Homo sapiens
atttttggtattctaatttgtctatttttctttttcttgaaatggaataaataagcttcacacacacacacacacacacacacacacacacacacaaccctaaacaaaaaaaaaatcacacagcaccagcaaactactaggatttactgtaggataaaagctctacatggccctscatacaaactttctgcatacttctgcaaatttttatgcattactcaatccattaaaaatcaccttggaagaaattgcaaacacaatagaaactaaatgagatagtcacagagaacaacaaaaatagtaatttaagctcccatacaacatcaagggtgttcagtctatttttggttcttcgggttctctttaaaattgaattgagtttgtatatgcatatgtatgtaggagtggaggatggaattaattatcccaaacatcctacactcactcctctaatatttattttgttaacatgcaaatctgttctcttcattacggtgatactgcatttaaattacaacacaattagagatcattaactttctcctttataa

SEQ ID NO: 349446 - DNA, 466 bp, Homo sapiens
tactcactgtcaattcctagtttcacagtctcccattttccaacggagtcttactctttctttgtttccagttcaaatatattattgaagaatcctggttcttaatttagcttcgggacctattgaatcagtctgtggaagctggaayaatatgattagggcagcagaaatgaagaatgcttctttagaccaatcactatgtccatgaggcagactaaggactacgtgaccctaataaattctaatttctagagcttcttatctggatcctgaagcagtttcggcctttatactatgggagactgaatacactaacagacaatggtggttccacacacagaaaatcaactctgacctctgcagcaaccagtctgcagcgatcggtccaaatgctcaggaattggtgggtaactgccagcttccctaagtgtttccctccagcttccaatttagaaccaaccagaga

SEQ ID NO: 349447 - DNA, 466 bp, Homo sapiens
tactcactgtcaattcctagtttcacagtctcccattttccaacggagtcttactctttctttgtttccagttcaaatatattattgaagaatcctggttcttaatttagcttcgggacctattgaatcagtctgtggaagctggaacaatatgattagggcagcagaaatgaagaatgcttctttagaccaatcactatgtccatgaggcagactaaggactacgtgaccctaataaattctaatttctagagcttcttatctggatcctgaagcagtttcggcctttatactatgggagactgaatacactaacagacaatggtggttccacacacagaaaatcaactctgacctctgcagcaaccagtctgcagcgatcggtccaaatgctcaggaattggtgggtaactkccagcttccctaagtgtttccctccagcttccaatttagaaccaaccagaga

SEQ ID NO: 349448 - DNA, 513 bp, Homo sapiens
gttcttcattattaagttcataaaataccagccagaggccaggcgcagtggctcacgcctataatcacagcattttgggaggctgaggcagatggatcacttgaggccaggagttcaagaccaacctagacaacatggtaaaatcctgtctctactaaaaatacaaaaaaattacaaaaaattagccaggcatggtagtgcctgcctgtagtcccagctacttgggtggctggggcatgagaattgcctgaacccagaagtcagaggttgcagtgagccgrgatcatgtcactgcactccagcctggatgatagagagagaagctctcaaaaaaataaaaataaaaatacagccagagatcgatttaactgttaactattgtttgatgtaattagctacatacctatcatataattaaaattcagtattgagatggttgtcatagggacacttcaaaccagattaagtttattttaaaagtgaattgagagattttactttacaaaaaaaaaa

SEQ ID NO: 349449 - DNA, 513 bp, Homo sapiens
gttcttcattattaagttcataaaataccagccagaggccaggcgcagtggctcacgcctataatcacagcattttgggaggctgaggcagatggatcacttgaggccaggagttcaagaccaacctagacaacatggtaaaatcctgtctctactaaaaatacaaaaaaattacaaaaaattagccaggcatggtagtgcctgcctgtagtcccagctacttgggtggctggggcatgagaattgcctgaacccagaagtcagaggttgcagtgagccgggatcatgtcactgcactccagcctggatgayagagagagaagctctcaaaaaaataaaaataaaaatacagccagagatcgatttaactgttaactattgtttgatgtaattagctacatacctatcatataattaaaattcagtattgagatggttgtcatagggacacttcaaaccagattaagtttattttaaaagtgaattgagagattttactttacaaaaaaaaaa

SEQ ID NO: 349450 - DNA, 513 bp, Homo sapiens
gttcttcattattaagttcataaaataccagccagaggccaggcgcagtggctcacgcctataatcacagcattttgggaggctgaggcagatggatcacttgaggccaggagttcaagaccaacctagacaacatggtaaaatcctgtctctactaaaaatacaaaaaaattacaaaaaattagccaggcatggtagtgcctgcctgtagtcccagctacttgggtggctggggcatgagaattgcctgaacccagaagtcagaggttgcagtgagccgggatcatgtcactgcactccagcctggatgatagagagagaagctctcaaaaaaataaaaataaaaatacagccagagatcgatttaactgttaactattrtttgatgtaattagctacatacctatcatataattaaaattcagtattgagatggttgtcatagggacacttcaaaccagattaagtttattttaaaagtgaattgagagattttactttacaaaaaaaaaa

SEQ ID NO: 349451 - DNA, 611 bp, Homo sapiens
atgctatttaaactatacggcaaaagttgttactaataatctttattataaaacaactgagtgtctatatatatgcatattttgcatgaatcttactttatagctaaaatgtaatcaaccattttctgtccccaattccattaaacaatatgcgagatgaatatattctcattcttgagattttccaccatctctaggcagggctgaatctttggatgggtgactagtacagttccacagcgcccaactcttagaagggccagcacttaagagtttaatgatcttcattgcaagcttttaattcttttttttttttttctgaaacagagtcttgctctgtttccacgcgggagtgcaatggcatgatctcggyttattttaacctctgcctcccagcttcaagtgattcccctgcctcagcctcccaagtagctgagactacaggcacacaccaccacacccggctaattttttgtattttagtagagacagagtttcaccatgttggccaggatggcctcaatctcctgacctcgtgatctgcccgccttggcctcccaaagtgctgggattacaggcgtgagccaccaagcctggcctaattcttaatg

SEQ ID NO: 349452 - DNA, 611 bp, Homo sapiens
atgctatttaaactatacggcaaaagttgttactaataatctttattataaaacaactgagtgtctatatatatgcatattttgcatgaatcttactttatagctaaaatgtaatcaaccattttctgtccccaattccattaaacaatatgcgagatgaatatattctcattcttgagattttccaccatctctaggcagggctgaatctttggatgggtgactagtacagttccacagcgcccaactcttagaagggccagcacttaagagtttaatgatcttcattgcaagcttttaattcttttttttttttttctgaaacagagtcttgctctgtttccacgcgggagtgcaatggcatgatctcggtttattttaacctctgcctcccagcttcaagtgattcccctgcctcagcctcccaagtagctgagactacaggcacacaccaccacacccggctaattttttgtattttagtagagacagagtttcaccatgttggccaggatggcctcaatctcctgacctygtgatctgcccgccttggcctcccaaagtgctgggattacaggcgtgagccaccaagcctggcctaattcttaatg

SEQ ID NO: 349453 - DNA, 626 bp, Homo sapiens
ttgtcacagcaatagaaaattagtacatctcttcaccctctgttctgtctctctagctctgtacatataaatatgctcatatatgcacattgtacatatattaaaatatagaaaacatgtaaaatttttttgagatggagtctagctctgtcacccaggctggagtgcagtggtgcgatcttagctcactgaaacctcctcctcctgggttcaagggattctactgcctcagcctcctgagtagctgggactacaggtgcacactaccctgcctggctaatttttatatttttagtagagagtggtttcaccgtgttggccaggctggtcttcaactcctaacctccggtgatctgcccgctttggcctcccaaagtgctgggattacaggtgtgagccaccgctcccagccatgtaatttttatgtrtagtaaacagatacattagctacattagctacctgttatttgtactacatattagcatgccttttaatattctgattcagataattctaaatagtaactctactcatatatgaacacatgcttcctttcaacctgtacttcttcagttttatattttagagaagaaaagcctgagttggttccatgaaatgaggaata

SEQ ID NO: 349454 - DNA, 547 bp, Homo sapiens
atattactctttatctgtgaattagtcagggttctgtagagggacacagctaatatatctagaaggacagaactatatatgtgtatatatatatgtgtgtgtgtatatatacacatatataaatatatatatatgtgtatatataatagtaagtattaactcatatgatcacaaagtcccacaataggcagtctgcaggttaaggagcaaggagagccagtccgagttccaaaactgaagaatttgagtccaatgtttgagggcagaaagcatccagcatcgcagaaagatataggctgggaggctaggccagtctctcttttcacatttttctgcccgtttaaattctagccatgctggcagcagattagatggtgcccacccagattaagggtgggtctacctttcccagccactgactcaaatgttaatatcctgtggcaacaccctcacagacacacccaggatcaatactttgcayccttcaatccaatcaagttgacactcagtattaatcataacgatctaatatcagaatgaacttagc

SEQ ID NO: 349455 - DNA, 534 bp, Homo sapiens
attaagttggaacaagagtaggctttatcattcaaatgttctgaaatcagtagcatttttttgyttatttgtcagtctagctaagagatgcatttgttctagggtgggttattttgtttgttttcaaatctcatttaaatattataaatgtaatataaacacgacttattgaatataactacatcatttaatattgaaggaattttaagttatttttatatgcttcagaaaggtggacgattttcttgttggaaaatattatggttgattcagttttcatttccaaagtggagaaaggtatatctactatctaaaagttatcatcctctctacctgaaattttaatctaagttttcaacaaaaaaggatagatttgttgggctgattttttcaaaatgtcatggcactcgtgaaatgctttaatatatattttttcttattaaaaccatcattgttttaaaatagcaacatacttcaactaattgtaacttaacaagatatgactaaataaaaggaatataagaaaaatataat

SEQ ID NO: 349456 - DNA, 658 bp, Homo sapiens
ggagtctcgctctgtcgcccaggctggcgtgcagtggcgcgatctcgacttactgcaagctccgcctcccagggtcacgccattctcctgcctcagccttccgagtagctgggactacaggcgcccgccaccacatccggctaattttttgtatttttrgtagagacggggtttcaccgtgttagccagggtggtctcgatttcctgacctcgtgatccgcccgcctcggcctcccaaagtgctgggattacaggcgtgagccaccgcgcctggccataagttttaactatatgtaatttactaaagccttttactgaatcatctgaatttaaaaaaatagctttatctacattaaagtcttatgaaaaatgttatagtcaaattcggacatcatagaatttagctagcatagtagatgaagtaaataataaaatctaataacaataaaatctacctataattaatcccttgcaatgcgatagacctcttagtaaatcgaagcattttttttcccctttggattctttgtcagaccagtgctaaacaccagtgtatattttggtgttaactttggttattacaattgttgcctctgctgcatttctttatagcaagcttgaattaaaagtgcttgaacattgaaaaattttaactgat

SEQ ID NO: 349457 - DNA, 658 bp, Homo sapiens
ggagtctcgctctgtcgcccaggctggcgtgcagtggcgcgatctcgacttactgcaagctccgcctcccagggtcacgccattctcctgcctcagccttccgagtagctgggactacaggcgcccgccaccacatccggctaattttttgtatttttggtagagacggggtttcaccgtgttagccagggtggtctcgatttcctgacctcgtgatccgcccgcctcggcctcccaaagtgctgggattacaggcgtgagccaccgcgcctggccataagttttaactatatgtaatttactaaagccttttactgaatcatctgaatttaaaaaaatagctttatctacattaaagtcttatgaaaaatgttatagtcaaattcggacatcatagaatttagctagcatagtagatgaagtaaataataaaatctaataacaataaaatctacctataattaatcccttgcaatgcgatagacctcttagtaaatcgaagcattttttttccyctttggattctttgtcagaccagtgctaaacaccagtgtatattttggtgttaactttggttattacaattgttgcctctgctgcatttctttatagcaagcttgaattaaaagtgcttgaacattgaaaaattttaactgat

SEQ ID NO: 349458 - DNA, 555 bp, Homo sapiens
atcatcactgttaatttcatatttccaaaagtcaactttttagctcctccttatgtcataactgcacttggatattcagcttaacacgataaatatcaaaatcatttacatattttaaaaatcacattgccgtgaccctattatcttaatgatccaactaaagttcatggggagaaattctgaccagatccctattttagtaccagtttttctacaaattttactcttaaaatttccttcagaccatgtttcctaggtcctgtttctccattctatggtttctttttcaaattatttgtgtaaatgcattcgtgtttacataaatttgtttatctttcaagacacaataggagttctctctttctggaagctatgtcggaattctaaattaatttatgttaccacatttgtactttgctagttccttttgcatgtctttatcacagcaatcgccatattacattgacatacrgttttcaagtatgtcatcaccaatgtatgagttgtttagcagccaacagacaatctggagttcagtaaaattggatgaagtaa

SEQ ID NO: 349459 - DNA, 559 bp, Homo sapiens
aaataaagcaggagggacttccttttcatgctcgctaaactgtcctgtttagggatttggctatttcttctcttgattccttggaaggtcagataaacagcctcattttggcttgttggtgtggaactccattatgaggaactccattttgctttcgtctgcagggtctagtgcaggagctcagtccaaaccaagagcctcctgtaaatttaatttaacaattcttgtattttccaaaatgccttattcaccatcacagcatgccatcaataaagctttcatgactgaagtagtttgtcagtggctgactcacctggtattaagttactccataccatcttatgctgaggagstgacatcccacagcaatggaaatgttgctacgcaaacctctgctctaagacttgaccaaactttaacttggcttctagcagcctaaggctgtgtccctggggagactccttttgagtttctgtctagtaaagcttagggctgtgtaaacaactatttattctagctagcacttgatataggccctttttttagaaaatagaccatt

SEQ ID NO: 349460 - DNA, 612 bp, Homo sapiens
ataaatttagtaataaggatataagtgccatagatgatgtggtaggaagaacaatggccccccaaaggtgtcggtatcatagtcccaggaacctctgaatatgataggttacactgcaaagaggagtaaggtgaaagtttgctgatcagctaactttgagatgggaagattatcctggattttctgggtggactcaatgtaatcataagcctccttctaagtgggaaaaggagagaaamagaaataggcagagagggatttggagatgttgctctgctggttttgaagacaggaaggtgcaataagccaaggacttcaggcagcctctaatagctggaaaacataagaaaacagattttcctacaggcacagagagaattcagtcttgcatacaccctgatttttagcttagaaagatgcatttgagcttctgaatgccaaaactggaagacagtaaatttgtattgctttttggcacaaatgttgtggtagtttcttaaaacggttaatattagaactatgagaaatttgagtaccaagagtatatttattattttctctcctgttatgtgaaaaaccttatgaagtaaataagttctacttgattgatta

SEQ ID NO: 349461 - DNA, 587 bp, Homo sapiens
aaagtttaaaatttaaaccgaagtcagttaaacttcgggtgtcctcatagcctatccgctcttaaattttattaactgtgtcaattcaaagctttctggcttctgtgcccaatatctaccaaaaccactcccaccaagaccaccaatgacttcacagaacagtgtggaaatagggtggtctttggaatcctacaggcctgaatttatatcccagcaagttatttaacatctctaatcttcagtttcacctcatgcaattgttgagagatcaaatgagataacagatgtgaaacaactggtacattttcatttgaaatcataataatactaatgataattgacctttaagcaacatttratattaactactcctcctttcttgaaaccatctgcacctttggcttttaggaatctactttgctctggcattctcctaattttctagaaaattattggtctatttcataattttatcttcatttccttaaatcccaaatattgatatttcccaagggtttatttttgacacttttcccttcttgcttgagatcaatgattcttaattaatgtgtgttgggaaagagggc

SEQ ID NO: 349462 - DNA, 587 bp, Homo sapiens
aaagtttaaaatttaaaccgaagtcagttaaacttcgggtgtcctcatagcctatccgctcttaaattttattaactgtgtcaattcaaagctttctggcttctgtgcccaatatctaccaaaaccactcccaccaagaccaccaatgacttcacagaacagtgtggaaatagggtggtctttggaatcctacaggcctgaatttatatcccagcaagttatttaacatctctaatcttcagtttcacctcatgcaattgttgagagatcaaatgagataacagatgtgaaacaactggtacattttcatttgaaatcataataatactaatgataattgacctttaagcaacatttaatattaactactcctcctttcttgaaaccatctgcacctttggcttttaggaatcyactttgctctggcattctcctaattttctagaaaattattggtctatttcataattttatcttcatttccttaaatcccaaatattgatatttcccaagggtttatttttgacacttttcccttcttgcttgagatcaatgattcttaattaatgtgtgttgggaaagagggc

SEQ ID NO: 349463 - DNA, 510 bp, Homo sapiens
tctaaagtttattttgctgtacaactccattttttggagttttactggctttcaaccrggaagacaagatttcctgtttccatgacgatgacgacgacgatggaaggcaggtaactcctttatggagtttgagctcgctcccagcagggaagatgagttttttcctacttctagaatggtagaaagcattcttcagcctgagacccatccctaggtaagcagccgcatgggagtttttgtcttgactaaagtttaacaaccagctggtcttaatttctccttaccgttagagcactcattgatcatattgttggagttttgttgttgttgttgttgttgttgttgttgttgtttgttctggtctttctcccatcagatttgatcaactctacctgacttggtcaaataagagtaagaattcaaaattataggtaacaaggtttctctaatctggcccaaattccttacagctgcaaaagagaattaaaaaaacaaaaaacaacaacaaaa

SEQ ID NO: 349464 - DNA, 510 bp, Homo sapiens
tctaaagtttattttgctgtacaactccattttttggagttttactggctttcaaccaggaagacaagatttcctgtttccatgacgatgacgacgacgatggaaggcaggtaactcctttatggagtttgagctcgctcccagcagggaagatgagttttttcctacttctagaatggtagaaagcattcttcagcctgagacccatccctaggtaagcagccgcatgggagtttttgtcttgactaaagtttaacaaccagctggtcttaatttctccttaccrttagagcactcattgatcatattgttggagttttgttgttgttgttgttgttgttgttgttgttgtttgttctggtctttctcccatcagatttgatcaactctacctgacttggtcaaataagagtaagaattcaaaattataggtaacaaggtttctctaatctggcccaaattccttacagctgcaaaagagaattaaaaaaacaaaaaacaacaacaaaa

SEQ ID NO: 349465 - DNA, 528 bp, Homo sapiens
acatcttgaatttaataagattatcataacttctaatcttgtggctttaggcggtctagtccacaggcagtaaagtttgttattgcctgtttttaaagctaaactataaattcctcccaaagttagttcagtctacaccaaggaatggacaaggatagcttgaaggttaaaagcaagatggagtcagctaagtcaaattttcttcgctgtctcagttataattttgcaatgacagatccataacttaaatgataactatcacagttttcataaacaytctaggtaaacatttaaataaaataattaggtaaatgtaataggataaatatttgtacacaaacttgttaaaatttagaatctaaagttatattaagttaaataatagatatgttattatttgggtattttccaataaaaatatatttgtaggaaaacattctttcaaaaaaaaaggtgtgtcctgtaaaaaaaaggtgagcaatttttgtctaattcaaagcttacttaaaggtcatgtataaaacaagg

SEQ ID NO: 349466 - DNA, 569 bp, Homo sapiens
tgtacaaatatgttactgctatgtgttccaaaatcatgggaaacttctatgtttctgatgtgactaagtgtacattatcagtaataattataatagtgtacattatcagtaataattataattgttatgttaaattattgtgtgccacagaggtaacaaatttccttatcaattgtgtttttgactatgactgccataaaactttttgtcatccatggacaattgttgtcttgttttgctcctccttagaatgtggttttataatcagctatagaactctaacaggtgtccttaaaagcaggtttctgataactttggagattgtgacattacaatggaggaaaaaactttcaatactctcatggagagctgaaatattcatgaatatcaaggagaacaggmgtaaactgcatgaactgaactaatagaagactaaagtaatctttttaactttttggttaaaatattgttgattctttattttgttttccagagtcaagaaaacttctaagctgtttacagcttttaataattgagtaaggtatactcctgtgaacaaaatttgaagc

SEQ ID NO: 349467 - DNA, 631 bp, Homo sapiens
tggggaggtgttcagattatacaatctatttttatctaagacctacagcaaagttgtactttcccttttaaatgaaaactatatttctctttcactaacctttgagttgggtttttccatagcaattttgttcagaaaaaaaaaaaagaagcgattatgttatgatgtaaaaactaactggtatcataagcttttagaatttactgagtactagaatttgactttyatttctctccttcaacttctaatttaataaacttaaatttgtatgtagctgttcatcacagtataacaaactaccccaaaacttaggcgactttaaaacaatagaaattgattgttctcacagtttctgtgggtcaaaacatttgggaacacattagttggacaattctggctttgggtctgtcatgaggttgcagtcaggaaagtgagtgccagtcatctgaaggcttgactgggctggaggttccacttcagaggtggctcactcgcatgattgccacgttgtggctggattttggcaggaggcctccctttatccccatgtgagcctctccacgggctgcttgagtgtcctcatgacatagcagatggctgactctccccagggcaaacaatacaagagaga

SEQ ID NO: 349468 - DNA, 631 bp, Homo sapiens
tggggaggtgttcagattatacaatctatttttatctaagacctacagcaaagttgtactttcccttttaaatgaaaactatatttctctttcactaacctttgagttgggtttttccatagcaattttgttcagaaaaaaaaaaaagaagcgattatgttatgatgtaaaaactaactggtatcataagcttttagaatttactgagtactagaatttgacttttatttctctccttcaacttctaatktaataaacttaaatttgtatgtagctgttcatcacagtataacaaactaccccaaaacttaggcgactttaaaacaatagaaattgattgttctcacagtttctgtgggtcaaaacatttgggaacacattagttggacaattctggctttgggtctgtcatgaggttgcagtcaggaaagtgagtgccagtcatctgaaggcttgactgggctggaggttccacttcagaggtggctcactcgcatgattgccacgttgtggctggattttggcaggaggcctccctttatccccatgtgagcctctccacgggctgcttgagtgtcctcatgacatagcagatggctgactctccccagggcaaacaatacaagagaga

SEQ ID NO: 349469 - DNA, 631 bp, Homo sapiens
tggggaggtgttcagattatacaatctatttttatctaagacctacagcaaagttgtactttcccttttaaatgaaaactatatttctctttcactaacctttgagttgggtttttccatagcaattttgttcagaaaaaaaaaaaagaagcgattatgttatgatgtaaaaactaactggtatcataagcttttagaatttactgagtactagaatttgacttttatttctctccttcaacttctaatttaataaacttaaatttgtatgtagctgttcatcacagtataacaaaytaccccaaaacttaggcgactttaaaacaatagaaattgattgttctcacagtttctgtgggtcaaaacatttgggaacacattagttggacaattctggctttgggtctgtcatgaggttgcagtcaggaaagtgagtgccagtcatctgaaggcttgactgggctggaggttccacttcagaggtggctcactcgcatgattgccacgttgtggctggattttggcaggaggcctccctttatccccatgtgagcctctccacgggctgcttgagtgtcctcatgacatagcagatggctgactctccccagggcaaacaatacaagagaga

SEQ ID NO: 349470 - DNA, 539 bp, Homo sapiens
tgagacctgagatttgttattgctgttgttgatcatttacctctacaggctcagagtctgcattgtgtctgttacttggtcagcactcaataaatgttgaataaatacatgaaacatctatattcctttgttttgttcattattccttsatctagcatttcccatcatattcataaaagaaaataaggcattttatgaaaatattataatgtgtgccctagaaagttgtggagatatatgataatttatatctatatatgataattatagatagctaaatggagagaatggaatatctgagaatatgattatgggacggttggtcatggcaatgtctaagaccatagaagtgggaagttggcatgaggtggaggacaagatcattgaaggagaaataaaataactgagaggccagatttctcataagtatactgtaagacagactccagaaaaccatttatacctagaattctctattcatccaaataattaatcagatatgagcaaaaatcaaagatctgttagcatgcaagaactta

SEQ ID NO: 349471 - DNA, 434 bp, Homo sapiens
ctacagggcaacctgggacaccattgctataacttgatctctcctgttagagtaaattattttcttgtcccactcctgattttttttaacattacaaaacttccaaaacctattaaaaggaataaataaattagattgggtttggttttatgctctgatctttaaattattttttcaaatcaaaattcacttcaataaaattaagggtagaaaatattctgattctattatttatataaatgccatgactagtatatctattttattgagcaacagatttttaaagcaaaaaaaaaagaataaaaggagatgctggaactkatgtatttttttaggtacaagtaatgatagaaacctttttttctagtgacaagaaaagggacatatatcttttttactaaagaggaaaatagtgttttagaaaatttttaaat

SEQ ID NO: 349472 - DNA, 606 bp, Homo sapiens
aattatcaaacatctccatcccactttttctgtcttaaaccctcaaacaactagtggagcattttcagttaacaacagtctttaatcagaggagagaaaattccaggttgctgattcagttatttctttttatttacctctatttttatattcacccggctcgtgtgaaaaacaaaaactgaagtactcacagatgaggcagtgtttagcatctaaacacaccatatgccaagggatagatgttgttgttgcagctgtccaaagttagccaggttawcactgacaaacagcttcccccagaacatgagaaaaccacggccgcctgctccttgttggctggtggagtgaaacagactttacagtacactggatcagctaaactgtgaattacaggtgaaccaaagccattctgtcagtcattcaaggaaaaatgacttcactcagctagaggacactcccttgacaaaaaaaaaaaaaaaaaggaaaaaggacttgagaaatcattgaatcaagaccttccttgctcagttcaattgatttgcctaaagtcataaaaacagtaacttagtcgcaaagatgtaataaggaaaaatcttcctacttgaa

SEQ ID NO: 349473 - DNA, 601 bp, Homo sapiens
ccaaattttatgtagatttcactagtttctccactgatgttcttctatcccagattcccatgcagaatatcatattgcatttagccgtcatgtctccttagtcttctcttctctgtgaaagtttctcagtattttcctatttctcatgaccttcacagttttaaggaatatctattttgtagaatgttagcaagttcaattttaaccaagaagataaaagttatacactaagaatgtttttctcatgattagactggagttatgggttttcatatcaggcaggggtatatagcatcaacataacttatcactggtgatgaraaccttgaccactaggttaaggttgtgcttttccactagaaagttgctatttttcctttcactattctttgggagagcatcactgagttcagcccacactcaaggtggaagggagaggagagaatatctgcatatgttatttgaaattttctggaaggaaaatttgccaattgtctcccatttatttatttgttcaatgatttctttgtaccagcacagactcgtgtggtgttttaaactttggattataattcactaccacattatttatttcactgcc

SEQ ID NO: 349474 - DNA, 558 bp, Homo sapiens
ggataaattaagcccccctaaagtcaagatctgatatagtcatattattaacactttcaactatgccattagcatttggaaaattaagatagcttaagcattaacatcgtattcactgcttcagatgcaaagagtgttgccttaaccaatagctaaaaatttccatttccaagggcttggaaagattccagtcaatgtctacctgttcacagaagctggatgaacaagmcattatgattcagctgactttatattcacagtgtgcaacagaattatagcttaaaattgaaagaagtttatatatatttgggaacaaacaatggattaaaaaagatatctgaaacattttttgtattcctgagtggcacaaagctaattgaaaaaaataaagtccatctacatagtaatcttaaagctatgtattgaataaaattagtttagaaggcaatatgctttaggattcatttagcttgataactgatctaatcctttgttatatttgcacttttcccgtttaggtgaattgaatttgggctccctaatagggactgctgaaga

SEQ ID NO: 349475 - DNA, 610 bp, Homo sapiens
agcactgttagtaacagtgctgagatttaaatctgatcaagaaccagtgtgcaccccacctttctattatatgataaatccagtttttgattgtgaaagcgaaatatggtcactataatgtttcgtaaattagtattagtatttaatgtgctagcaatgaaaatcccaagatgatactttctagaatttcacaaaatgattgtaatcagattgagggaacagtagtaagacagtagttatagacagaagaaattaatgcaaagaaataatatatatataatgtatagggtatactgtatatattattaaaaccagtataggatgaatggaacagaatcagaattccagtgatagatccaactgtttggaagagtttagtattgagcaaataagagggaaaagaacgaagtaactgagaagargaaataggaatatgaatttaaaataatgtaaatgaaatttaggtctcatcttctctagtatattggtttaagagtctctaattttttttgttttttttcttatctatattgatgacatcttttattataatttttaaaacctcaaagcagagattttaaaagcaaggcaacagattggaaaaatatta

SEQ ID NO: 349476 - DNA, 619 bp, Homo sapiens
cccattaaatcactcagctgtgttttttctttatatgctcaaatcacaagaagaaagtagcatttttagagctgtatatcatttgtgaacagcttgctatttcttctgaatgacaaatgtgagaaaaaaaaagttttaaatagctgtggctcaccacaagaagtgtagggcataaagttaattgtgtaaaatatagtatgcttttttttwaaaaaaaaggggaacaaacaaaaaagaaacccaatgaagtactacattttaatattttatcttccaagatttatattcttctcccagaagtctagttttgggcattcttacattttttttcaaatttgtttccatcttttttctaatgtgtcatttcctttaattgtaaaaatagatgcctgtgctatgaaacaggtttaatgagcaaaaaattaaggaagagataaaaatcacccacaaatgtcagcacccagaaataactaatctatgtcaatgtgttatatagacataaatagtactctattttcatactttaacatcatattatgcagtgttttacacatattattctaatttatacttgtatcatgatattgtcaaaccatttgtatatttttttggatattag

SEQ ID NO: 349477 - DNA, 620 bp, Homo sapiens
gttttttctttatatgctcaaatcacaagaagaaagtagcatttttagagctgtatatcatttgtgaacagcttgctatttcttctgaatgacaaatgtgagaaaaaaaaagttttaaatagctgtggctcaccacaagaagtgtagggcataaagttaattgtgtaaaatatagtatgctttttttttwaaaaaaaggggaacaaacaaaaaagaaacccaatgaagtactacattttaatattttatcttccaagatttatattcttctcccagaagtctagttttgggcattcttacattttttttcaaatttgtttccatcttttttctaatgtgtcatttcctttaattgtaaaaatagatgcctgtgctatgaaacaggtttaatgagcaaaaaattaaggaagagataaaaatcacccacaaatgtcagcacccagaaataactaatctatgtcaatgtgttatatagacataaatagtactctattttcatactttaacatcatattatgcagtgttttacacatattattctaatttatacttgtatcatgatattgtcaaaccatttgtatatttttttggatattagggtttttctttattttttgcta

SEQ ID NO: 349478 - DNA, 578 bp, Homo sapiens
ttttaccataagctttagaatattaatatagtccaaatttacaggaaagcatatacaagagcacacataatttatagttcattgacagcttaaagataattcatgtttatttctttaaaacacatgtcatttccaattttttttgcctttattaaccctttgttgggattttggttttaacatttttattcatagagtagatggttttaatgtaatcaccgtgtctctgtccattgtgaaaagagtgtttttgcaggaaaaaagaaatctgtttaaataatggtctccaaaataagaatgaaagttaaattgtattccaatacttaaaacaagttcacaaataactgcacttatataaagctaagactaaccagatatgctagacactggtgggctgggaatgagttataagcatgtggaggtatcgaccattcactcagctttttgggagtgtggggaatgaaggggctgtaaaaggcttggttgctttcagccttcagctgctttgtccatttatcccagtggactttacaaacattataatttctatrtatgccatcatatacaaatgaatggaa

SEQ ID NO: 349479 - DNA, 343 bp, Homo sapiens
gaaacatcccactggacacaaactaaaacttcatcagtaagaaattggttcataaaacagaatacaggcaagcactgaaaaactacaaagctattaaaaattataatttgggccrggcacagtggttcatgcctgtaatcccagcacttgggaggccaaggcagatggattgcttgagcccaggaattcgagaccagcctgggcaatatggcaaaacaccatctctgcaaaaaattagccaggtatggcagtgcatgcctgtagtcccagatactcaggaagctgaggtgggagcatcacctgagtccaaaagtttgaggttgtagtgagccatgatcatggt

SEQ ID NO: 349480 - DNA, 557 bp, Homo sapiens
tattaattcccttcttatcagcaatagataattaaacaaatagacggtcaagatttcagacatagaatactactatttgtttccaaaataagtcattcactatttaaaacccagaggatacccattgcaaatagcacaagtataatcaatcagttgccataaaacacaaaggctcacggatatgaaacaaacctgatatgcacaaaactccttgctacagcttgtatctttgggagagagtgccggtcttatgatgtttgaatggcactcctattgaaagagttatccagagatgacagcttcaaataaccctctcgaaagaagacaggtcaactctgtcacatcagatgggaactcatcataggaagctctctaaccaaatctaatttctgatattgacaacctgctggctagtcaccatagaagaaaagatcacagatggctctgcaatttctatcacccaagatgaattaatatggcattttaaaaygatcagccagaaaatagaaagattctttctccacgattcatgaattaccaaatgacccttgattcca

SEQ ID NO: 349481 - DNA, 557 bp, Homo sapiens
tattaattcccttcttatcagcaatagataattaaacaaatagacggtcaagatttcagacatagaatactactatttgtttccaaaataagtcattcactatttaaaacccagaggatacccattgcaaatagcacaagtataatcaatcagttgccataaaacacaaaggctcacggatatgaaacaaacctgatatgcacaaaactccttgctacagcttgtatctttgggagagagtgccggtcttatgatgtttgaatggcactcctattgaaagagttatccagagatgacagcttcaaataaccctctcgaaagaagacaggtcaactctgtcacatcagatgggaactcatcataggaagctctctaaccaaatctaatttctgatattgacaacctgctggctagtcaccatagaagaaaagatcacagatggctctgcaatttctatcacccaagatgaattaatatggcattttaaaacgatcagccagaaaatagaaagattctttctccaygattcatgaattaccaaatgacccttgattcca

SEQ ID NO: 349482 - DNA, 570 bp, Homo sapiens
caacattttgtttattcattcttcagtgatggcatccatgtttgatcatgaatgcttttacatttaatctttgcatttctattgtttttattttatattagagttttaagaagaattacttgaacaaagggtatgagttctttcaaggcttttaacagatattatcaaatattatcaattttatagaagaaaattagtattgccattgctgtttcatttgtattttttgattacttgagaagataaatttttttcgtatttttaacttaatattctgataatttcggtatatcctgccccattttattttctgatgccaatttttttattggttgcaaaagctcattatggaatgaagatctcaccttagtgcacatgctgccctgtctccatgtgcaaatcttgcgcaatcgtcacttcttwattgctacttctgccaactacccatccctgctctcttcagttctggttaagagcccctactctgtattgctttgcatctttatatagtaattgtataattgacattttttgcctattaggttgtgagcagaactggaatgtacccaa

SEQ ID NO: 349483 - DNA, 619 bp, Homo sapiens
attaattacttttaaaaaaactcttccttattttccagcatactttgcctctggtactctctaggcagaaatactaagtgacactcataactactccggacaagtatgctcaggcttgggcaatttctaaaattaagaattaggaagtatgttccaggctcccytgggttctcaagtatagcactgccttatctagaccctgcagaccaaaacgcctacccaggatctgactgtcctgagcagtatcaagcaggagtgactctatcaagtacagagtctagggaatgaaggtggccagaatcaggcacttctgaacaccaaagcagagacaagtaagaagggatgacgtgggtgcagagcaggaagcacaataggccagtgcccaaaaagtgactcatattccacaggcaaaattccgactttgagtcttaaaagaacagcatctttattatgcctccatcttttcttggtttggtttgatagcagcgtgaaaatctataatagtcagatggaaaatatttcacagttgaaaacaaattaaaatatttcttccagatgtaaatgtcctcatatcaaagaagctagatggttcacccagactagatacagctagatacag

SEQ ID NO: 349484 - DNA, 412 bp, Homo sapiens
tattttaaaatagctagaagaaagaaattgcaacgttgccaacacaaagaaaaatgttcgaggtgacggatattccagttaccctgatttgaacattacacattgtatacatgtatcaaatagcatatgtatccccaaaatatatacaactatgatatatccaaaaaagtaattaattacttttaaaaaaactcttccttattttccagcatactttgcctctggtactctctaggcagaaatactaagtgacactcataactactccggacaagtatgctcaggcttgggcaatttctaaaattaagaattaggaagtatgttccaggctcccttgggttstcaagtatagcactgccttatctagaccctgcagaccaaaacgcctacccaggatctgactgtcctgagc

SEQ ID NO: 349485 - DNA, 623 bp, Homo sapiens
gatatatccaaaaaagtaattaattacttttaaaaaaactcttccttattttccagcatactttgcctctggtactctctaggcagaaatactaagtgacactcataactactccggacaagtatgctcaggcttgggcaatttctaaaattaagaattaggaagtatgttccaggctcccttgggttctcaagtatagcactgccttatctagaccctgcagaccaaaacgcctacccaggatctgactgtcctgagcagtatcaagcaggagtgactctatcaagtacagagtctagggaatgaaggtggccagaatcaggcacttctgaacaccaaagcagagacaagtaagaagggatgacgtgggtgcagagcaggaagcacaataggccagtgcccaaaaagtgactcatattccacaggcaaaattccgactttgagtcttaaaagaacagcatctttattatgcctccatcttttcttggtttggtttgatagcagcgtgaaaatctataatagtcagatggaaaatatttcacagttgaaaacaaattaaaatatttcttccagatgtaaawgtcctcatatcaaagaagctagatggttcacccagactagat

SEQ ID NO: 349486 - DNA, 603 bp, Homo sapiens
ttgaattttaaaaagtgctgaactctacaagagtttgctagtgacaaagttgcattttatcactattaattattccccttttccaaactattcataatcttctcatctaggacatgctctgtattgggaagatacttggaatagtcaagtctaaacactaatgaattcatcttgccaataacgagactaaaaccgaacccatttttatcctccttctaccaccatccayactgttggttttataaagttacttcttaaagacactcagggaacacatactggggctcttcatcccgtttacattgcgtaatgatttaacaatattcccatcttaaaatcacagtcagaggttcctcaagccaaatttcgggaataaccaagaactctcggctatattaacattgccagtaaaacgtctccttccaaacagaagggagaatgagttgaagtgaaaacaatgcctttacctgctgcacactcgcgactctcatataggagtccaagacgatcaacagaggcacatggatatttttgccttgaaataacttggaggctggaaaacaagtgggtggggaaaagaagcaaagtcacaatccacagcac

SEQ ID NO: 349487 - DNA, 500 bp, Homo sapiens
gcgcgggaagaaactgactcagcggactccgctgagtccacaggcccggagccccgcagcggagagcgcagtgygcagcccggccggccaccctccgcgacccgccagccggggatcctgcggccccacggaaggtctgggaactgggagcaggaaaaatgaaagccgcctatctccagatctaagaatagaaatcagggcgctgggaaaagaggacaccgcccagatggccccttttaggaatacattgtctttagagttccacctatagggagatgagcaattttcccccaaaggatggaaagaggggttagccatcaaaactgcccccgctactcttttttatgattttttgtgactgttagtgggagaggaaataaacattgtttccctgtgagttatctgaagctctggtcaccaaaaggccactaaattaacttttggaaatttgagttgcactaggcaggatcctgatacttgggacacccgaaaagtaatca

SEQ ID NO: 349488 - DNA, 600 bp, Homo sapiens
ggaaatttgagttgcactaggcaggatcctgatacttgggacacccgaaaagtaatcagctctcagagctattagagctgagacaaaggacagggtacatgaaatgaaaggtgaaaagttgagagaagcaaacctaaatactcttctcttggtattcagaaatacttatgagtatgggtgtctataaccccaaagttttttggttttgtcttttgattgtttgtttgtttgttctgttaagtacctaagtaatgtgtttttaggaaaagaaacctagcaagaacattgtagacaaggctaggcaaagatgatctatccttcaggtgatgtgtctgtcctcaagatcacttacaaagaagaggattggactggaagttactacttcacaattttagttttgttttcacatctgttacttcaatmctgatgacaattctgaaatggatacaactactactatgtatccttctttcactagtgaggaaattgagatttggaattgagaagtgaagagctttgctggagtcacacaggtgggaagttgagagccaggacttcaacccagcaaatctcctaactccaggtagaaggttcttcatg

SEQ ID NO: 349489 - DNA, 575 bp, Homo sapiens
gcatgcctgtaatcacagctacttgggaggttgaggcaggagaattgcttgaacccaggaggtacaggttgcagtgagccaagatggcaccactgcactccaacctgggccacagggcgagaatatgtctaaaaatatatatattatatatatatgtgtacatatatgtacatatatatgtacmttatatatatgtacattatatatatgtacattatatatatggcaatatgtagaagaggaaaggccagtaaacttcatgaacctatccaaagatgctcaattacacaagtaatcaaggaaataaaaattaaagccataatgagataccatttcacaaccatctcattaaccacaaacttaaagttggataataccagtaactactggctgggatgtggaacaactagaatactttttgtagtactggtaagagtgtaaatcagagcaagcaccttggagagcacatggcaaaatctaggaaagctgatgtgtctatcctatgacctgacattttcactctaaggctgtttcttaaagaaattctcaaatgtacataaggacatttatgtaag

SEQ ID NO: 349490 - DNA, 569 bp, Homo sapiens
agtcttactttacagatgaaaaaactgaagtactgaatggttaaattactacttttcccaggtcaataaatttatgagtagtagggtcagtaaccaaaccctgatatggattagcagagcctgtggagtcaagtctggaccttagtttgctgtgagactttgggcaagttgcctaaggtctctgaacactgatattctcatcaatataaatgggaataatataatacctacatctcaggattgtcatgacttaacacatgaaaaataactggttagtgcttgatacgtagtaggggatcagwaagtgctagtttcttttcttagccacaccatgctgcccatggtatgccaaagggaaggtggtaaggatttgatctaacactgagtagtcggtagcaacctttgttagtcatagcatctagttgagtgggttttaatctctgtgtcctactgccctcttctggatattaaatatcagatctgcttgtgaattcagtttattggtcctatctaattgagcaaactctggacgtgactcagtaatgcctacttcagagaggcaaaggggg

SEQ ID NO: 349491 - DNA, 654 bp, Homo sapiens
gagaatttatctgaaattctgtgattagtttctctgtgtgtcagatactaaatttctgagtcagctgacctctacagcacttctctgcccacagacagcagtcatctcccagttaattcagtagtagtgagttttcaggcaaaaatgctattcaatatctgccttgggaacaacttggtgggaattaaaatatcaaatggagatgtgaatagataacccctaaggcttcttccaaacatggtctcctataattctaatgggagatggctcttttcttgctttcttattcaccctcttcttacttygtaagagctgctgaagcaatgatactcaattcctgaatacctgggatgttttgcaaatacaaaactagaaaagctcagctggactagtaaggtggatcctgaccctataaatcatccagggtatttggttagactatctccactctctgggcacctcctaagttctaaggctattcattacttcttactgattttgactcatatgtcctatcacattttccagctggggcctgttctctgtcacttgtatcggcatttccttgagcactgactctaccaccagtatttttttcttaacttttaagttcaggggtacatgtgcaggtttgttatataggtaactcatgtc

SEQ ID NO: 349492 - DNA, 589 bp, Homo sapiens
ataggtgcaatatgatcccaatctgtgaggggaggtgttatcttttgttgattaatccttgaaggtggtttggattttatctagattgttctcagtctcttcaaaggcataattatttaagcataaaatacattattttcttcatttcttttctaaatatcatccaaacccttgaagctgatctcccttccttgtgcatcttccacttactctgatttgtatcttctgaccttaaatcctgagccttaattccaagccttcatctaaaaatagactctctaacaaaggccactgtaaatattgataacacgttgtggctctcaaggctgctagattgttctagaaaagtgaggccttgttaagagagacttttaaaatcactttgtccttgtctgggaatggctttattatttagccaagttacctgataattaacacagatctaaccaattaggctaacataagcgtcacctgattcttgctctgagtcctggctttctgtttagtgcaaattagckcctactaattaaataaatttaagtgccaataaataaagcatggcaagaattgattcaaaaaatactatatt

SEQ ID NO: 349493 - DNA, 585 bp, Homo sapiens
cctcatagtttctcacttcatctttacaacaatcctctgaaaatgtaaaccattattcaacccagtttgcaggtgatgaagctgaggcttagaaaggcagcctggccaggcaccgggggagctgtaatttgcaggtagctttgtctgsgcccagggctgtacacttagagtctaattaatcactctgctaggctctgtttgaagaatttcttggctttatctcaattttgaaagaattttctccatggaaagccaaccatccaattatcagagccagaacactgcctgttactatgggttgaattgtgtctcctcaaaaaggtatgttgaagtcctaacccccagtacttcagaatgagaccttgtttggaaatagggtcttgacagggctaggcaagttaaaactaggtcatcagtgtgggtactaatctaactcggtgtccttagtaaaagcagaaatttggacacagaggaatcacaatgtgaagaaacacaggaagaagatggccatttacaagccagggctcctagaagggacagaggcctggaacagaccctcccccaaaaccttcagagggagcatgg

SEQ ID NO: 349494 - DNA, 585 bp, Homo sapiens
cctcatagtttctcacttcatctttacaacaatcctctgaaaatgtaaaccattattcaacccagtttgcaggtgatgaagctgaggcttagaaaggcagcctggccaggcaccgggggagctgtaatttgcaggtagctttgtctgcscccagggctgtacacttagagtctaattaatcactctgctaggctctgtttgaagaatttcttggctttatctcaattttgaaagaattttctccatggaaagccaaccatccaattatcagagccagaacactgcctgttactatgggttgaattgtgtctcctcaaaaaggtatgttgaagtcctaacccccagtacttcagaatgagaccttgtttggaaatagggtcttgacagggctaggcaagttaaaactaggtcatcagtgtgggtactaatctaactcggtgtccttagtaaaagcagaaatttggacacagaggaatcacaatgtgaagaaacacaggaagaagatggccatttacaagccagggctcctagaagggacagaggcctggaacagaccctcccccaaaaccttcagagggagcatgg

SEQ ID NO: 349495 - DNA, 496 bp, Homo sapiens
tcaaacaatccagcgtagactacagcccccatagaatgaccatcatagcttcctgactgctcctgctgcctggacatgtgccagacaatactaatgccttctgttattagcgtgctttaaaagttactaaggatgttcatgtctgttaaactcgttttatacccacaacaacctcttgttgggaaggcagacaccttgatcccaactttatatattagggaactatggggcacagaagtaaagtaatgtctcagttcacacatcagtggaccttactgatagaaatggaactcaagccaaagcctagttattactccctgcctactgttccactggaagatgtgtatatccagtgaaagatatataagatatatacatatatagacatatatgtagatatggatatatatataccttccaatggaagagtaggcagagtacagtagaaaagtggcacacacacacasacatagtacattctaattactcatggtat

SEQ ID NO: 349496 - DNA, 567 bp, Homo sapiens
tctttgttgagtgctgaattctgcccctcttagcatatgtctggttgggcccaagtgctatatgctcatctgtttttttgtctattactgtcttaatctgttttgtgcttttataacagaataccacagactgggtaacttataatgaacagaaatttattggctcataattccrgagcctgggaagtccaaatcaagtcatctggtgagtgtcttcttgctgtgtcattgcaaagtagaaggtatcacgtggcagaaggcatcatatggtggaagggaaaaaagagaatgaacccattcccttgagcctgtttttcagaggcattaatcaattcatgtgagccgagcccccatgattaaagacgttacttcaggccctacctccctacagtgttgcactgggggttaaattttaacatgacttttggaagagacaaacattcaaaccacagcagttattgaactatgcagattccagacacctaaactttcctgctggagtagacttcctccttgcacctgcagctagacagatgaagcctgccactcccacggttccctttgtgt

SEQ ID NO: 349497 - DNA, 559 bp, Homo sapiens
gatctctgagtggcttcagggcaggttgtgggtctggctgctctgtgcccattggagcatccctgcctcacagctcatctgctgatgtatgatgcagctgactcatcccaaacttgtggccttggcaagtaggaccctctcaatccctatccrcactttccacacagaggaagccagacagcattgtgtattgatggtttgtttccatctcactaatcaagaggctgaaagcaacaaactcttttttttcctctatctcaacttttattttaggttctgagggtacacatgcagatttgttagatgggtaaattgaatgttgctgaggtttggtgtaccaatggtcccatcaccagcgatggatatagtctggagggccagactccaggtttcttgtggctgaggaatacactcctgtcttgctgaagccctccctatggagtgagctctgtggaccagcagcttgggcatcgcacaggagcccattagacatgctgaacgtcaggcgtctagccccagggcttctgaatcacggtctgcattttaacaagatccccgg

SEQ ID NO: 349498 - DNA, 598 bp, Homo sapiens
ggacgtatcatcttggttctccaagaggataattagagtttaaggtttttacttagttctttttcctttccttgttctacctcctccaagttcatttgttctgttgacttatcttggtccttttcttttcctgagtgaatggtgtttgtggcagctcatttctatttatgcattctaggttgggttgttaagttgaagtaaatgggggactggggtccttctgcraatgagaaggtgtgactgtgagctctctggctgtggaagggggtgctgatgggtaaatcttgctttcttctgtgagagtgggagaagtcaaaccaattcaaggagacccctgctctaagatgttactcccatgttggaagcctcagccccttccagtcagcttttatttgctttttaaaaagattatttctcaagggtgcaagggtggtaagggataaaagactaaacactgggcacagtgtactgcttgggtgacaggtgcagcaaaatctcagaaattactactaaagaatctatccctgtaaccacctgttccccgaaaactattgaaataaaataaaaataaaaaaggattatttttccagcttttaag

SEQ ID NO: 349499 - DNA, 598 bp, Homo sapiens
ggacgtatcatcttggttctccaagaggataattagagtttaaggtttttacttagttctttttcctttccttgttctacctcctccaagttcatttgttctgttgacttatcttggtccttttcttttcctgagtgaatggtgtttgtggcagctcatttctatttatgcattctaggttgggttgttaagttgaagtaaatgggggactggggtccttctgcgaatgagaaggtgtgactgtgagctctctggctgtggaagggggtgctgatgggtaaaycttgctttcttctgtgagagtgggagaagtcaaaccaattcaaggagacccctgctctaagatgttactcccatgttggaagcctcagccccttccagtcagcttttatttgctttttaaaaagattatttctcaagggtgcaagggtggtaagggataaaagactaaacactgggcacagtgtactgcttgggtgacaggtgcagcaaaatctcagaaattactactaaagaatctatccctgtaaccacctgttccccgaaaactattgaaataaaataaaaataaaaaaggattatttttccagcttttaag

SEQ ID NO: 349500 - DNA, 598 bp, Homo sapiens
ggacgtatcatcttggttctccaagaggataattagagtttaaggtttttacttagttctttttcctttccttgttctacctcctccaagttcatttgttctgttgacttatcttggtccttttcttttcctgagtgaatggtgtttgtggcagctcatttctatttatgcattctaggttgggttgttaagttgaagtaaatgggggactggggtccttctgcgaatgagaaggtgtgactgtgagctctctggctgtggaagggggtgctgatgggtaaatcttgctttcttctgtgagagtgggagaagtcaaaccaattcaaggagacccctgctctaagatgttactcccatgttggaagcctcagccccttccagtcagcttttatttgctttttaaaaagattatytctcaagggtgcaagggtggtaagggataaaagactaaacactgggcacagtgtactgcttgggtgacaggtgcagcaaaatctcagaaattactactaaagaatctatccctgtaaccacctgttccccgaaaactattgaaataaaataaaaataaaaaaggattatttttccagcttttaag

SEQ ID NO: 349501 - DNA, 598 bp, Homo sapiens
ggacgtatcatcttggttctccaagaggataattagagtttaaggtttttacttagttctttttcctttccttgttctacctcctccaagttcatttgttctgttgacttatcttggtccttttcttttcctgagtgaatggtgtttgtggcagctcatttctatttatgcattctaggttgggttgttaagttgaagtaaatgggggactggggtccttctgcgaatgagaaggtgtgactgtgagctctctggctgtggaagggggtgctgatgggtaaatcttgctttcttctgtgagagtgggagaagtcaaaccaattcaaggagacccctgctctaagatgttactcccatgttggaagcctcagccccttccagtcagcttttatttgctttttaaaaagattatttctcaagggtgcaagggtggtaagggataaaagactaaacactgggcacagtgtactgcttgggtgacaggtgcagcaaaatctcagaaattactactaaagaatctatccctgtaaccacctgttccccraaaactattgaaataaaataaaaataaaaaaggattatttttccagcttttaag

SEQ ID NO: 349502 - DNA, 560 bp, Homo sapiens
ctctcaccatagacaaaaatcaacccaagatggatcaaagacttaaatctaagacccaaaaccataaaaattttagaagataacctcaaaagaactcttctagacattggcttaggcaaagaggtcatgaccaagaacccaaaagcaaatacaacaaaaacaaagataaatagatgggacttaattaaactaaaaagcttctgcacagcaaaagaaataatcagcagagtaaacagaccaccaacagattgggagaaaatcgttgcaatctacacatctgataaaggtctaatatccagaatctacaaggaactcaaacaaatcatcaagaaaaaaacaaataatcccatcaaaaagtaggctaaggacatgaatagacaattctcaaaagaagatatacaaatagccaacgaacatatgaaaaaatgctcaacaccactaattatcagggaaatrcaaatcaaaaccacaatgtgatactgcctactcttgcaagaatggctataataataaaaaaaaaaatagatgttggcgtggatgtggtgaagagaacactttat

SEQ ID NO: 349503 - DNA, 593 bp, Homo sapiens
ggaaaaaatgtaggctggaagactaggccagtctagccttttcacatttttctgcctgctttatattttctggcagctaattagatggtgcccactcagattaagggtgggtctgccttccccagtgcactgactcaaatgttaagccccttggcaacaccctcacagacacacccaggatgaatattttgcatccttcaatccaattaagttgacattcagtattaaccatcacaccacatatctgaaacacttctattttcaatatgcaaacacctctcaaaatttaacatttttaaaaaacccaaacaatccaattagaaaatggacaaaagcgtaaagagatatttcactgaagaggttataaagwtagcaaataagcacattaaaagatgtgcaacatcacttgccattagcaaaatgcaaattaagagcttaatgaaatatcactacatatctgctggccaggatgcagagaaactggatcacacatacattgctggtggaactataaaatggtgtgcaacaagtctggaaaacagtttagcagtttcttagaaaactaaacatgcaaatgctttataatatagcaa

SEQ ID NO: 349504 - DNA, 509 bp, Homo sapiens
aagggaaggaaatgtaaaatcagccgacatcaggatttcttattgacttgatgctgagtccttccactctgggaaaatcaaaatgtattccttctggttcatgtttctcaagctttaattattagaattacctttttgatttttgctatattttcacatattgcattgttacttaaacattatacttaaatacatttattttaattataatagcaatcacttacatggtactatgtgcyaggcactcttttaagcactttacatgcattaagacatttcatcctcatgacaaccccattagatgagatgctactccattcaatgatggagacgatgagtctctgagaagttaagtgacttgccatagttacataccagaataaagacctaaataagaattgaaatactattatggtaatagaagaaaatataggacaaaatagaaaaacaattgtacttaagggtgagaaaggagcctttaaactacattgagctagtataagccaaaa

SEQ ID NO: 349505 - DNA, 609 bp, Homo sapiens
gtagctttaaattaaacactgttggaatatttacacagggaaattggcaaatactacaaatcagggcttttttaaaagagatgattgtcaaatatttaccaggacctcactgtttatagtatgttcataaaatraaatattaagctattatcatattaacttctagaaaaacatttcataatataactatgtgtatgcaaaaaaaatgaccttggaccctcacctcacaccatgcacaaaaattaactgaaaacaaatcatagacttaaatgtaagagttgaaacaattaaacttttagaagtaaacatagaagtaaatctttaggactttgggccagacagatttcttttaaaaatgtgatttataaatgaaaaaattgataaaatagacctcatcaaaattgaaaaccttgcacttcaaaagataccattaagaaaatggaaggacaggaaaaacactgggagaaatatttgcaaaacacatttatgataaaaagctggtaccagaatttagagagtgcttgtataactcaattgtaaaaaaacaatcaaagatagatgcatgctctcacttataagtggaagctaaataataaaaacacatggaca

SEQ ID NO: 349506 - DNA, 454 bp, Homo sapiens
aaggtccagaatggctcgttctgtcctggcttttcctaccacgggaaagaaatttttgatgcttcttttggggttcttagctcacaggaaaaacagaggtgtgtgggaaaacccaaccaaacacaaatgtcttccaatctcccagattctcactgccacattacactgaagcagacacatttctggggggcgggaaaaaagagccaaaacaacaacaacacacgcagaagatagcttaggagtatgggaacatgggaggggaaaarcaaagaacctcagaaataggaaagggtcagcaatattttgcaggagagcataggtcaagccacaaccttgagcatgtgaacggaaacgattgccagagcagcagggagaagtgcaaagcttcctttaatgcacccaccttccttcccgggcaccagggccagaaatgtggggctccagccagacttgt

SEQ ID NO: 349507 - DNA, 538 bp, Homo sapiens
tggcagtaatggaggatatcacctttaagaaatgcaagttcataagttccttcatctagtcacrtgggccttcctgttattattttgaagagagagagctggtgttttccaaatggtgtggatcacaggctgagcagaactaatgagacagcctttggccaggagaggttaaaaacttcaattagtttggccattgagtttttattataccattggtgtgtttcaccagtccagaggattgggggttaaaagcacaattggaatataggccaaatgttgcaaatggattgaattacttgaccagtaaaatgtgtttcttggccgttctggagctcagatgaaactccccatgaaggaattatcttttctaataacaattttcttactacttggaccatggctcattggcacgggcaggtttcatcccaatgagaaaacacataaattagcaccagaacatatctataaccctgagacaggggcagctggataaagtccaattgccatatatcaaagggtcctaaaggtaaaggaaaat

SEQ ID NO: 349508 - DNA, 496 bp, Homo sapiens
tcccgtaacttaggaacttcttaaaaatgaccaaggcccaggatgtgtttgggtggaagtgtggtgcttacgagcactgctcctctaggtgtcacccaaaagtcatgagttgctctcttacgttgtctcagaatgcctctaaccaccaggtggcaccagagtgctaaaggtatgagcgatcagtcccgtattttatgcccatgcagatgatcgagtccctaaaaaaygttcttgtggtgaggaataccctacgagcgtcctttatatcctagacaacagccttgacacctctgcaaagtctgcagagactctgcaaactctgcaaagtctccagtcacctagagcactccaattggtcaaagtgagcaactgccctttctccatagcaagagaactcactctcatgcacttttcagtttagaactaataggaattggtcacagatgaaacatccaagtctgaatttcaaacaataggaagcagctgcaattttaaa

SEQ ID NO: 349509 - DNA, 496 bp, Homo sapiens
tcccgtaacttaggaacttcttaaaaatgaccaaggcccaggatgtgtttgggtggaagtgtggtgcttacgagcactgctcctctaggtgtcacccaaaagtcatgagttgctctcttacgttgtctcagaatgcctctaaccaccaggtggcaccagagtgctaaaggtatgagcgatcagtcccgtattttatgcccatgcagatgatcgagtccctaaaaaacgttcttgtggtgaggaataycctacgagcgtcctttatatcctagacaacagccttgacacctctgcaaagtctgcagagactctgcaaactctgcaaagtctccagtcacctagagcactccaattggtcaaagtgagcaactgccctttctccatagcaagagaactcactctcatgcacttttcagtttagaactaataggaattggtcacagatgaaacatccaagtctgaatttcaaacaataggaagcagctgcaattttaaa

SEQ ID NO: 349510 - DNA, 445 bp, Homo sapiens
ttctctgctcactctgagcctcttgagtcttggccctgggagctcagccttaagggaattgggggcaggtgaagctgagttgggtgaggtgggtggcagtgagatgttcccagaatgtttggagcaattgaagtgtgggatgtgtgtatgtgggatgggggcagggcatagagctcttgtggtcagcggcagacttcttttttttcttcttcttaaagattgtgaatggaaggatttaaactggaaccctgagtcctgttcctcaaaactaactgacatgggtgctcacagaggcagcagcttctctttggcacccyatgcccctcggcttctgggagctcattgtccctctgctctctgctccccaagtccctccccaccaaacctcagagagtggctttgccccaggaacctccagcatgaagggaatataggtctgttggtt

SEQ ID NO: 349511 - DNA, 621 bp, Homo sapiens
ctgtaaacacaggatgtctttcaatttatttgtgacttctttaatttctttcagcaatatttgtgatctgcaatatacaagtcttttacctccttggttaagtttatttctaagtatttcagcctttttgatgctattgtagatggaactgtgttcttaatttccttctcaggttgttcattgttagtgcatagaaattcaacgaattctggggtattggttttgtatcctgcaactttgctraatttatgtattagttctaacaggtgcttttggtggaatctttaggattttctgcatatatgatcatgtcatctgtgaacagagataattttacatcttcctttctgatttggttgccttttatttctttttcattccagttgctctggctaagacttccaatgttatattgaatagaagtggtgagagcaggcacccctgtctcattcctgatcttagagaaaaagatttcattctttcaccattgagtattatataagctgtgggttttctttcacatatgacctttattatactaaggtattttccttctattcctattttgttgagtgtcttttattatgaaagggtgttgaattttgtcagatgttgaataat

SEQ ID NO: 349512 - DNA, 621 bp, Homo sapiens
ctgtaaacacaggatgtctttcaatttatttgtgacttctttaatttctttcagcaatatttgtgatctgcaatatacaagtcttttacctccttggttaagtttatttctaagtatttcagcctttttgatgctattgtagatggaactgtgttcttaatttccttctcaggttgttcattgttagtgcatagaaattcaacgaattctggggtattggttttgtatcctgcaactttgctgaatttatgtattagttctaacaggtgcttttggtggaatctttaggattttctgcwtatatgatcatgtcatctgtgaacagagataattttacatcttcctttctgatttggttgccttttatttctttttcattccagttgctctggctaagacttccaatgttatattgaatagaagtggtgagagcaggcacccctgtctcattcctgatcttagagaaaaagatttcattctttcaccattgagtattatataagctgtgggttttctttcacatatgacctttattatactaaggtattttccttctattcctattttgttgagtgtcttttattatgaaagggtgttgaattttgtcagatgttgaataat

SEQ ID NO: 349513 - DNA, 210 bp, Homo sapiens
ataggcagccctgaaacccaaaccaaaaggttctatggtttatcatccygatcatgttgattttatagaaataacacatgaattaaagacactaccctcaaactgagcaaaacttaagtaatttttttaaagtttgacctgtttttaaatcactcttggagaaaaaggaaaataaatacaaataattaacggtgaatacaggctactata

SEQ ID NO: 349514 - DNA, 552 bp, Homo sapiens
aaaggtggggccttactggggatctgcccccttctgccttggaatcaatctgcctcccactgccattcatggtccctgggttcagccccaaaccccgctccaagatcagagcaggtgcctggactggaggtaggccagacagacaccagacacccccatgactgcagggttcaggggtccttcctggggctcccaagcatgcaggctrtagaaacacccagctcctgtacctggaagggcagccacagtggcacctgggaaggcagatcttacctgctcccggctctccctcaagagcacagggaagctcggatccacagatgcagtttgggtagctgtagctccgtccaagagggtggggctcctgcttgcttcctagagcaggaggcctgggtctgcagctgcggtttgggtggctgcagcagcacccagggagctcttgtcccaattcagaaggggcagggctcccattggctccatggagtgtgcagccccagctgtgcagccagcgtcatggcacactgtcatcatttctgcctctgaagaagtaca

SEQ ID NO: 349515 - DNA, 476 bp, Homo sapiens
tttttttataggagtttttgaagaattttgaatgaccagttttactaattctaacaggaatttaggatattcagtgtgttcttctgatttagtatagcaaagacagtgttttaagaacgaagacttttttttttcccctggtctcacctaacacttatgcaaaatatggaaatgctagacagagactgtgaatatatrtggtggttgaggttaattagccatgttagaaaaaactcaaaatgcaagagtatttatccagcttgaaagaagtgcttttgaggttggcttccaatcactataaaggtagtatcaattattttatcagatagattttgaatggttagtgcctgttccatgcatgacatatgggaaaagtaggagcaggagagatacgttaaactgtgacttctgcaggagagtgaaaggggttttgactcaatatatttcactaagggtttttcaaaagaaaatgttcc

SEQ ID NO: 349516 - DNA, 592 bp, Homo sapiens
agtcttcgattttttgctttattttacacctgttttatgttggccttctcctatgcttatgtgcctgttaagattcaaactgttctttttgagaattctagctttgttacatagggagtaaaatataaacaagcttaaactatttatcaagttctgaataggtaaatttacaatgcatactccattggccagtgtctctttaaagggtttttaacacactaaaatcctgttaactttgaaatggcagttctgatagagaaaagccactcccrgatcagatgatattatcagcatctaaatgagccaggcagtactgcaaggaattacagatgacattattatctacatgacaaaatcagaaggcctcaggcaaaccccatgggttctaataaaatcagatttgacaatatttattacgattttttgtttctgtcattcatctaattggaaaagtgaaacagaggcaacagatcagacaaggggttttagataacaaagagtttggccatattgaatgacagctttaaacaatactgacagctgctcccaagcagtcttggtcaattgcattatattagaaaagaggctccaa

SEQ ID NO: 349517 - DNA, 643 bp, Homo sapiens
cataagcattctttctgctaattctagcttagtacatagggattgtgctgactgcctaagcttttccctaaataaataccttaatgacaactaattaggctttcattaaaccatatttgtggaacatcaccttgagtacaaaacatatctattcaagtattgactttcatttggaaaacaaaaacagtctgtaagaatatggctctaaatagaaaatatttttacctgttcacataaatcatttagaagaataacctcctattcaccrggtatagtattctgagttgacagaagtgaacacaaatatgtcgctctgttgtcttctggcttgcatggtttatgacaagaagataagttcttatttacttttagataaagtgttttttaaactctctctggctgccttcaggattttttttttgtttggtttttactatttgaatatgatatgcctaagtgtgatttttttggggggggtgggaggggtagtcatcctgcttggtgttctctaatctccttggatctgtggcttgatgtcatgaatacaggaaaacctaagtcatcatttcctcaagtatttcttctgcctctttatctctttcttctccagttatacagtatgtacatcgtttgatattattcc

SEQ ID NO: 349518 - DNA, 560 bp, Homo sapiens
atttagaagaataacctcctattcaccgggtatagtattctgagttgacagaagtgaacacaaatatgtcgctctgttgtcttctggcttgcatggtttatgacaagaagataagttcttatttacttttagataaagtgttttttaaactctctctggctgccttcaggattttttttttgtttggtttttactatttgaatatgatatgcctaagtgtgatttttttggggggggtgggaggggtagtcatcctgctwggtgttctctaatctccttggatctgtggcttgatgtcatgaatacaggaaaacctaagtcatcatttcctcaagtatttcttctgcctctttatctctttcttctccagttatacagtatgtacatcgtttgatattattccacagtgtttggattctttatgctgttttcattcttttcctctctgtattttattttgggttatacatattgacctgtcttcaagttcactgattctaatatgtgtattacattgtggtttcattttgcatttacttaatgactaaatatattgagta

SEQ ID NO: 349519 - DNA, 680 bp, Homo sapiens
  misc_feature (1)...(680): n = A,T,C or G
tggatcctaacatagtgctaaagatgtctctggtttagaatgttctgctaagctctgcaaggcccactggatattgctacaaagcctgcctttataccctgcaagtgtagggtgtgggaaagggaaaatagtttataggccagtaamtacaagtcaaatgatttgaaattaccacaaattagataaagttaatttcttcttttcaacttttgaggaacataattgttatgttcagataaactgctggtgtaattatccttttctgccaaacttaacttcgtaatcacaaaagccaattttaacttgctagtaaccaacttctggttcccatcttctagtgcctttatgcgattttactaacataggcaggaatttaaagccattgtcttcaatcctgtctctgaatccagaaatggtcagtagtgatttgtttctaaatctcaaagttccacaattagctgtttaaaaatagagttttggaccagtagcttttntactctagtttatttctgccactgtagtangcataaatgaagcttcctcgtctaaggttatgtcctgggcaagtaaaagtcatggagtagaaaattgattttttttaatgattttgaatagtcataactgctgcttaatggaatcatcttgggtggacttagaggtagttagtaatgtgggaaccc

SEQ ID NO: 349520 - DNA, 519 bp, Homo sapiens
ccctttagttattctccattaatgcttcttagtttgtaataccatacctcacagtaggtagaagaatgaaaacttctgcaggtgtgtaattttgaaactagtcctctaaaaattccctattactcctatagcaatctaataaaaactacctacatagttactgttttctttccttctttgccaaatgttttataataaatctcttaattacatacatttttctacttaagattaaattggaaatactgtmttagcaaaagtcttgggactatctaaactcccacacatagataaatctgatttggagagagaaatttaaaatatttaattaaaggtgatacccacattttcaagtttttaaaagagggagatggctttgtatgcttttgtgtagtttagaacagatacacattagtaaaagataccaataatcattagagctcaaggaagttattaggtgcagcctctggagccatactcacgctgcagtgcataatgggaaaattaggagcattaata

SEQ ID NO: 349521 - DNA, 445 bp, Homo sapiens
taacagtcctgtgcagtagatgttattgtgctcattttgcagatgagggacctgaggcttaaagagggcaaacctctagcccagtgtcccacagctgctcagcagcagagcaaggtttcagagtcagatctgttaatactaaatccagccatgtcaaaccacatatagttgccatcaacttcctgtcttttttttttttttttgyctctgtgttttcacttaagttttcagagatatctcttcctcctttcttccatagcgaacacttgctgctctttgaaatctcaacgtaagcatcacttcctcaagaggagtatcttagacttccctgtcttctgcccagtatcattcaggaatcttagggttagagcagagagactgcatttaagcaaatacataagtccacatgtgcatttggcttcagtgataccaggatccaacgagg

SEQ ID NO: 349522 - DNA, 445 bp, Homo sapiens
taacagtcctgtgcagtagatgttattgtgctcattttgcagatgagggacctgaggcttaaagagggcaaacctctagcccagtgtcccacagctgctcagcagcagagcaaggtttcagagtcagatctgttaatactaaatccagccatgtcaaaccacatatagttgccatcaacttcctgtcttttttttttttttttgcctctgtgttttcwcttaagttttcagagatatctcttcctcctttcttccatagcgaacacttgctgctctttgaaatctcaacgtaagcatcacttcctcaagaggagtatcttagacttccctgtcttctgcccagtatcattcaggaatcttagggttagagcagagagactgcatttaagcaaatacataagtccacatgtgcatttggcttcagtgataccaggatccaacgagg

SEQ ID NO: 349523 - DNA, 552 bp, Homo sapiens
cccctcccccgcaatttgatttcttaaaaatattttttaagggcagcctcttcaatttaatcaaggttagaatattaatatgtagctgatgactaccttgtttaagtcatttattaatattataaactacaagtcatgcaaacagtttaatattaagagagagaaaaatcagaaaacagagcctttcacccatcaattccgatgcatggtgagtaactaagaaggatgaatagctaagatggttactgaaagggcttagtgttggctttagaacatgtgctggctgtgaaaggtgttttgtaattcaggcagaaggttcattttctcctcacactacttttcaggtgaaggaatcctttcctgaatcccacacctgaaggaagccgacatcttaaacctgggagtgacttcaaacttgtggaaagtagaactaagccctatagatacagagaactctgtttatctacaattagcaccagatgtgaaataacaccttctcaggtgagagygattgacagaagctggtgtgaaggttaagtaacaatcaagtta

SEQ ID NO: 349524 - DNA, 606 bp, Homo sapiens
aagaatgttctctcacttgatggttagggagttatttccctgggcagtggtggggaaggcgttctctcttttatttatctctccttcttaaagagaacttgaccctgatttccacgtgcaggccaacttttcccataacttttaaaagaggagaccttgcattaaattttgtggtatctgtccctcacccaaagttttggagctatttaagaaaaaggtgggcttgccctggtcattgtctggtcttcaagaaccacatttgcaaaggatcctctccagaggaaggaaaagattttggttgagatggctgtcatagggcactgtcatagaacacccaagatctcccagacgtaatggggggagagmgctaataagacactattgtactatatgaggacaaggaaagggagctgactccttaaaccggcctgcagtctccctggggatagatgtctgggaaaagcaaggcgatattttcatatccttagccgccaagtcctcctcgcccatcctggggtttcctggggtttgtggcatccaccgagatttcggagttaaatctgcatattcctctgggtcccaatctcccctaagcgaactgcagcc

SEQ ID NO: 349525 - DNA, 345 bp, Homo sapiens
gttaatgcatgtaaacacagttacatactcagtacctgtaagctacaattatttacttttcaaaagtgacatacagcagggaagaggttggtgtagtcatatattaatgaggttactaaaaacattttcaaaaccttytaccacaccgccacagacagtacaattgaagggtgatatcaatagcatcagagactcaagtaatggaactgatagggacagtattgtgagactatgaaaggaatctccacagacttcaagatgagaatttaaaaattttaaattccctccctagcatatatggatactatagccctatggcaaagtatcaaagtaatttatgcttgt

SEQ ID NO: 349526 - DNA, 577 bp, Homo sapiens
aaactcaattttgtaacacattttatcatttcatatataatgttttttcattttattaaaccttcttcagaaacattttttaaaggttgtaataatccactggaagggagaataaatctctttctaaccggttttcaagtccctgccaaaaaaaaagacacattgaacacttcactgccaagtaatgaccataagcaacagcgactgaccagctgagagggcttgagccatgctgaccctgtgcaggcatgatgctgtctgcttttgctcagcttsggacatctctctgcctttttccttggtccctcctccagctcatggctgccacaggaggtggggagcataaccagggaagaaatatgctcagcttgtcagaaaaaaaaaaatggtatctgttacccatatgtggggcaagcccaggaattcaaacctaattctctcctgaaatgcaggattgaaataaactctttattgtgcttttccaagcaaaatgaccttcataatttgtaataaatcccaccgttctgtggaacagcatgatgttggattccaccagcaaccaccctttagctacaaa

SEQ ID NO: 349527 - DNA, 636 bp, Homo sapiens
tgaaggtgggctctgacctggacacagagggtcctaaaatgaagcccttacacacacacacacacacacacacacacacacacacacacacggtcctaaaatgaagcccttacacacacacacacacacacacacacacacacacacacaccctctaccttcatttctatagtgttgagtaaaggaaaaaataattttaaaaaatccccacacagagaatgaggggatgactgccaaagatcttagtttatagatggaaagtagtagtttcttttcctatccttsaacttcaaggatagatataattctcttttctatactttttgttctctgcaaaagtggcttcagagcagcagcttttcctggaggatggccacagtgcagggacattgctgtggctcattctgccctttcactctgctcctcagacttccagccattaaccctgccattcacccatacgctacctcttgtttatctctttgctatgctttaatgttttccttactttcaaattatgaccccatttcatatcattttagttctttgaattcatatttttgatgggctcaagcaaggataatgaaaagaaacatttatttacactttgtacatatcgattccaacaaacaataa

SEQ ID NO: 349528 - DNA, 398 bp, Homo sapiens
actgttaaatatataaccagaatactaacattagatagatttaggataactctatgcttggactggcacgtgtaattgaaaaaatagccatctgcattgaaatttataaatcgattcatttgaccgaccactaacagactcctttaaaaaaaaattgtaagaaaacagtgcaaaaaagaaaccaaataaatctgatgcrttaccaatcaaataaatcaatggttaccttgtaatctgaccctggacatgagaaagtgttctgttctgcagctcctgtcttctgattgtgatcactaccctggatttttgtcatttcagcactatgatgtttgttgtgtaacaacagtgcctttgtatgtgttctattttctacttaaatagaagaaatgaaacactca

SEQ ID NO: 349529 - DNA, 560 bp, Homo sapiens
aatggcttgcattaggtcaaaacggtacatgcctatattatatatagcaaaacaaattaatagaagaatagtaaatgccatttaaaaggtaattactacatcaatgtgtcagcatataccatgatggctgctggaaaaataaaactatagtatctgctaaacatcaatattccctttaccctaaaacattcattctaatttcataatgtaaacaacaacactaaatatatatatatacacacacacacagtttatatatatatatataattttaaaaactattcattctgtgcctagagccaacagtacaatacctcaagtattatctctacttttcatcctaagacccagaaatgctaawatgtactcaatccttcacagagtcatgctggatcttaccatggtctgtttatatccagtttacagtctatatgaaattgcaaataagacaggcactaaacaactggccagtgcggaactcagtttgagtgctcaaagttgcaggcacctgaaatataaatgtcatggtacactacttcttgctctgatggcttccccat

SEQ ID NO: 349530 - DNA, 680 bp, Homo sapiens
ctgccgtattcactaatatgttatatagtaaagtaataataatgtcttttcattaaaaagaagaagaaactagaagagttctcaaatctcttaggtgcatctcctacccaggcttaagaaatcatggtgagttctgcaaacctcaaccaatggcttttgatacaatacttatcataaaagcaacacagagcatttacagcraccagagtacaaaactaaagtcagcagagctgctcttcaggcacctatttctaaactcttgacaacaacaatggtcattcttgtgctccttctgccttagtcttctctcaggtttgcatctatatcaggtttctaacttttatctacttcagccctggctttcctaggatccttggatgtcactaacaaaaatgtgagattcatccatcctctcttttattccctaagtaaaatcttaactcttgttcctccagatctaaaatctttatttattctcacaaccaccactttaattcattgtcttaaggctggactattataattgcctcctaggtagtttttctatttcctataatccagagtccatggacttataagaggaccatgcatttgcttcaaatttttctccacatcttccaaaactgtacccatacatggtgttctgaaagctctgaaaggttagagatctggaatactat

SEQ ID NO: 349531 - DNA, 680 bp, Homo sapiens
ctgccgtattcactaatatgttatatagtaaagtaataataatgtcttttcattaaaaagaagaagaaactagaagagttctcaaatctcttaggtgcatctcctacccaggcttaagaaatcatggtgagttctgcaaacctcaaccaatggcttttgatacaatacttatcataaaagcaacacagagcatttacagcgaccagagtacaaaactaaagtcagcagagctgctcttcaggcacctatttctaaactcttgacaacaacaatggtcattcttgtgctccttctgccttagtcttctctcaggtttgcatctatatsaggtttctaacttttatctacttcagccctggctttcctaggatccttggatgtcactaacaaaaatgtgagattcatccatcctctcttttattccctaagtaaaatcttaactcttgttcctccagatctaaaatctttatttattctcacaaccaccactttaattcattgtcttaaggctggactattataattgcctcctaggtagtttttctatttcctataatccagagtccatggacttataagaggaccatgcatttgcttcaaatttttctccacatcttccaaaactgtacccatacatggtgttctgaaagctctgaaaggttagagatctggaatactat

SEQ ID NO: 349532 - DNA, 580 bp, Homo sapiens
gagcatttttacttcaatttcatcacttgtcttcactgacaattttaaaattctcaagtgaagtctttaatatgagtggatatttcacctttcttaatcagcatcaaacgttcactctcatttttctcttctcatgaatacaaataaataacccaccctcacccatatgtagtaaaaggatctgggatcacatataactcatttcatgaaatacacrcacacacacacacacacacacgcacacacacacacacacaacgtttcttcaaagtaattcatacttcagtgaatttatcaacttctggcattaatcatgttttaaacaatgtctcttaaactaataggaatatttgaattaaaatatttttctctggcttgatttatagatgtagtaacttcctcaactaggagaaatagtaacctgtatatttgtattatcttaatatttgccacatgcattttcctgctattcacatttcttttcttgatgtcctcttctgtcacagtcttcactggcttactgtcttatatgggatacaactcaggctcctctgcaggtgatgaggacctcctgacctga

SEQ ID NO: 349533 - DNA, 536 bp, Homo sapiens
tgggttgttcttagagtgtttgatcagtaaagaggtctgtgtggccacaataaacagagggaaaggggtggaagagaagatgggaccctgcagatcttgaaggctaggtagggatggtgaattttattctgagtgggtgraaaatcactgaaagcctgtgaatcattcgtatattaaaaggatcactttagtggatgttgaaaatgtgttttagagttaagggtggaagcaaggaaaccagttagaagaactctgcaatggtccaagcagaggtatccacagcggtaaagagagggtgaagaatgggcaggttctagagatgcttggaaggcagagatcacagaatttacaaactggatacgaggtatgacaaaggaaaaaaaatggtagttgaacatcctttccctacctccttctggattccaaatttgttttcttagctattaccttctaccactctcctcctacccatctatagtaaataattgtcctcaaaataacattaaataagcatttactttccagccctagtgctg

SEQ ID NO: 349534 - DNA, 536 bp, Homo sapiens
tgggttgttcttagagtgtttgatcagtaaagaggtctgtgtggccacaataaacagagggaaaggggtggaagagaagatgggaccctgcagatcttgaaggctaggtagggatggtgaattttattctgagtgggtggaaaatcactgaaagcctgtgaatcattcgtatattaaaaggwtcactttagtggatgttgaaaatgtgttttagagttaagggtggaagcaaggaaaccagttagaagaactctgcaatggtccaagcagaggtatccacagcggtaaagagagggtgaagaatgggcaggttctagagatgcttggaaggcagagatcacagaatttacaaactggatacgaggtatgacaaaggaaaaaaaatggtagttgaacatcctttccctacctccttctggattccaaatttgttttcttagctattaccttctaccactctcctcctacccatctatagtaaataattgtcctcaaaataacattaaataagcatttactttccagccctagtgctg

SEQ ID NO: 349535 - DNA, 555 bp, Homo sapiens
aaagctaccatgtatgcaagggagaaagaccacagcatcaagccaagaaaatcatagcagtcagacagacaacataaccttaggctgacaactgtacatagggttaacttctatttattgatgagacttccgtagataatgtggaaatcaaatttaaccaagaaaaaaagattggaacaaatgctctcttacattttattatcctsgtgtacagaaaagattatataaaatttaaatccacatagatctattcataagctgaatgaaccattactaagagaatgcaacaggatacaaatggccactagaggtcattatttctttctttctttttttttttttttaatttcaagagcatttcactttaacattttggaaaagactaaggagaaacgtatatccctacaaacctcccctccaaacaccttctcacattcttttccacaattcacataacactactgcttttgtgccccttaaatgtagatatgtgctgaaagaaaaaaaaaacgcccaactcttgaagtccattgctgaaaactgcagccaggggtt

SEQ ID NO: 349536 - DNA, 551 bp, Homo sapiens
tttaggaaaatcaattgaccaactataggatgattctagactgaaggaagagccagtgaggccaggtcaattaaagaggctttccatgtatgcaggcaagaatgatggggaaaacatctgacatggaccttccagacattctcagggagagaggttttaagttcagagtccaagaccattgaaagtgggggactctatgtaaaacatgtggttaacatgtaaaatatattagcaatgggatccataatgcctccacccccttctcctcgaattgagggttgatttctctcaggaycgttagcttgaacgatttgctaggtcatcatcacagaagtggatttggggtatgttccatttgaggtatcagtgaaagagctagggtcaaagagcccacagctgggccaaaatatggacccaggctccaaaaataggactaagattagaggtctagggaataatcttttttgagacagggagagaaaaaggaatgagatgagaaccccagaggccatactacacaggtctcatggtcacaacagacagaagaggaa

SEQ ID NO: 349537 - DNA, 569 bp, Homo sapiens
atgccatcacccttcagacagtgcaaatatgcaacagtcataaaaaatgaaaaacactatagttgtcaattgccagattccaaggatccctgtggatttgatgctaggagctacattggtacaatttagttacaacttggcaagaattttattttctctgtgtatctaccaggttatgggcagaagagtacgttttgcagaacattcttcccatttcacaaaggtttgggagggcagacggatgcctttaatagagttggcctcagcttacccagtctctgtttaagtaggagccatgcaaattttttaaaagtgtcataaatgtgaaaacaaaaaactgagccatccagagctttcatcagattcctagagcattctgcaatytaaaaacatttctataacacctctggtctgataaggctgtgaaatgggaggaacatagactgtttcaaaggatatttcatcttgtctttgttagaatccagagaactgtcattcacttatttgatgtacattttaagtcagttagataaagggttcttccccttgatacattttttttttttttt

SEQ ID NO: 349538 - DNA, 515 bp, Homo sapiens
ctctcctcacagccttcaccagaagtctacaaagcgcctagaactggggtgttgagaaagggggaggagcatttttgaaccgggcgccaaagacgcactgcacaggcacggtaactgacggaacccgaggcgttcgaaagaacgcatcctactcccgcctttcggacactgacctgggagccaccgtggcgcccgctgaggtatccgtgcaagcagcacgctgaggccacggtggggaccgaaggggacggctgcccagccccagctccgacaaggtacccaggccgccacagctgccaagcgcgcaaccgccatcttcgtagttgtccccgcaccctgcagtgtcccactgagggacacgctacgcaacggaaccgaggctgcgcatgcgcttcaggctggaaggcggaacttgctaaagagctccccgcaagattttcmgcttgcgaagagcgcacatgcgcagagcgtcgtggctctttggtttagactgttggttctactagtagcggggt

SEQ ID NO: 349539 - DNA, 515 bp, Homo sapiens
ctctcctcacagccttcaccagaagtctacaaagcgcctagaactggggtgttgagaaagggggaggagcatttttgaaccgggcgccaaagacgcactgcacaggcacggtaactgacggaacccgaggcgttcgaaagaacgcatcctactcccgcctttcggacactgacctgggagccaccgtggcgcccgctgaggtatccgtgcaagcagcacgctgaggccacggtggggaccgaaggggacggctgcccagccccagctccgacaaggtacccaggccgccacagctgccaagcgcgcaaccgccatcttcgtagttgtccccgcaccctgcagtgtcccactgagggacacgctacgcaacggaaccgaggctgcgcatgcgcttcaggctggaaggcggaacttgctaaagagctccccgcaagattttccgcttgcgaagagcgcacatgcgcagagcgtcgtggctctttsgtttagactgttggttctactagtagcggggt

SEQ ID NO: 349540 - DNA, 577 bp, Homo sapiens
caggagttcaatccttctgccccttaccccgtgcttcctcctcccctccccagcctccctacacttcctagggctaaagtgaccttgaatggatcttagaggggaagctgtttcctatcactcacagcagttgcaaattctttttaattcagccatcatttatttagcatttccatgtgctgggccttgtgctaagaggaaatattctctctctctctttctcactctttctccctttctctccccctctacccactttgtccctcccttccttccctcaaatgtttattgagcttcaaagctaagccaggcactccctgcattaggggctgaggaatcaaaataaattaccatttattccttcagagagcccataaaggagacagagagaaattatgataaagcagggtrtatatgggccacagaaaagtaacacacaagggccatgagatccttttaatcttgctcttaagtatttgccagagtggacagaaggaatattctgagatacggttatttgctgctgatgaaatagatgttgttacctacatttaaaagttcacaggctctgaaccag

SEQ ID NO: 349541 - DNA, 422 bp, Homo sapiens
gcactccaaccttttgttaaacctttatctgggagcttggtgactatgccttccagatatgcattctgctcagtgtgacaagtgcttgtttccttcacatttgtgaattgacttgstgaggaaatcttacaaaagcataaaaatcaaatcacactcctggatgtatttaatgatctgccattactgggggaaatgatgtgaatggagacactgccagagaatttgggacctatggtcatggtgtcgttaatgtcccctttagcgaaaatgtgtatacccaaccatatgactgtgttccttctccactaggcctgcctgaggcaccaagagataccaactagtcagagcaggactgtcagattgactctgctctcacatgctctttgtcactggctgtcattagtggcccaaccaacaggatc

SEQ ID NO: 349542 - DNA, 559 bp, Homo sapiens
ttgcaatctatgtgagcaaagctcatcccatcataagactgatgcaatgttctcccaaagaattattgattcaaaactgtggaaccaggccgggcatggtggctcacgcctgtaatcccaacactttgggaggacaggcaggcggatcacggaggtcaggggttcaagaccaggctggccaacatggtgaaaccccatctgtactaaaaatacaaaaaatcagttgggcatggtggcacatggctgtagtcctggttactcgggagtctgaggcaggagaatctcttgagcccggaaggtggwggttgcagtgagctgagatcattgccacagcactctagcctaggcgacagagtgagtgagacaccgcctcaaaaaaaaaaaatgtggaaccagaatggatctttaactttatcctccagaaggcattcaatatctgtctcattaaaacaaaggtcagtaggatagtatttaccctaaactcatttaaaccacagtgagatttattcttgcccttcaacatagctttacttttcaactcagggcttttcaactcagg

SEQ ID NO: 349543 - DNA, 601 bp, Homo sapiens
ccaggcttgctaggattaggaaattccaggttggcgaattctagtcagaccagttctctgctcttgaaccctgtttcctgctaagatgtttatcaatgacaatgtgtgcccagcaggatgtggaccttcattagcaatgctagtttcaccctgaccttgtgatcttgctctgaccttctgccttgtgatattttattgcctttgaagcaygtgatctctgtggcccacaccctattcatacactacctcccctttgaaaatcgctaataaaaacttgctggttttgtggctgagggggcatcatggaacctgccgacatgtgatgtcttccccggacacccagctttaaaatttctctcttttgtactctttctctttatttctcagaccggccgacacttagggaaaatagaaaagaacctacattgaaatatcgggggctggttcccccaatagaaaccatttcactagggtttgtatacagtaatgtctagtttatctgatcttaattttgtgacttggtgcaaatcaagttattatacttatgtaaataatttgatatacttacataaatatgaatgcttaaatagtcatatttagg

SEQ ID NO: 349544 - DNA, 649 bp, Homo sapiens
ccttgaaccttatctgatgctcaatgtgtctccacacaaaaccccacaaggcagtaagtgctggccactggccaggccctgggctcacttggcctggcagggtgcacccccagaggtgcctggggaaaatacagataggttgagaccgagccccagatgaacaggacatgggagagcacagagcctgatccaggaaccctagctcacatgcccccagcatcacctgtgtacacaatggaaattcccccatgtcagaaaggactgtgagatggcaaaatgaccctggagagatggcagggctataggcagagatcaagagagagagctctggaaatgatcaaacagccccttccccagccctatggtcagcatgatgggtttaggatctaggcccagtggggctggcccaaggcaatgctgccctaactccactttggagccctgtgcacacccatcccatgttaggcctctcaaagtttggatatctgccctggcccaccttggtggcctgggcaaactcctaaccccatctctggcctgcgaaccccacacagaagcaacagtctaaatgaagcaagtcaccttggaagggtagtctggatggaggaagcagacctaatgytaagtgctctgaccaaatgctggagag

SEQ ID NO: 349545 - DNA, 527 bp, Homo sapiens
gtagagatgtgggaaagtgggccctgtttcctgagagcctctctacttgggacccctttaattagcctactgtgtttgggtgagttggggtaggggctggagccaagggctcctcatccactgaactccaccagctctttccttggagtgcccttgagtttgccccttggatcagaaagaggaacatccattgcagggtgatttcctcaggtcctcttgacctgctgtgctctgatgctctcctctgtgtccctggggcagcaggacaactcattctgactgaattcgccccagggcaactggcagtgcctcaggtcaggaagggtcatggagcatgaaacaatacaagggaaagggcaccagctkggggaaggagagacctaggtaccaatccttgctctgccttgctctgccttatatgtgtcacttcctctctttaaatttttttttttttttttttagccagagtctcactctgtctcccaggctggagtgcaatgacactgtcttggctcactgcaacctcc

SEQ ID NO: 349546 - DNA, 583 bp, Homo sapiens
gagaagtctaattccatcttgttccctctactttattctctttgcctttctgataagaaacagtttttatcagatttttcccactgtttctttttgcaaatttaagggaaaaatatatttgtttacctttcttttttatgtaaaaggtagcagactctaagtactcttctgtactttgcttttttccatgtaatcaatcttgaagatcaccctgtagcagaatatagaaatcctcctgattcctttttgcatctgcactgtgcctcaccatgtggatatgccatggtttatctatggacattgggctgtgtccagtcttttgctcttacaaaaagaagcacagtgaggaatctggaaaatgtggcattttgtaattttaccagtgtgtctgtgcgatagtttcctagaagtaggattgctgaagcaaaatggtaaatgtataagttgtttttctctgtgttgctaagactgagagccaaaggcagaagcaatartattcaggcatgagaggatgatcatggtggggtgcggggttttgcaggacagggaggtgggaaggggctgagtagtaagagtgatgaaa

SEQ ID NO: 349547 - DNA, 571 bp, Homo sapiens
gactacttggaacagcccactttggtagtgcactcactctgagccaggccccagaggcctcagggtatagtagggaatgaggacagagattgttcatccctttcttcctccaactgccatggacatgggggataactctgtaaacaagccgacatgttctagatgcatatggagcacacagccatcaggagtaagacccacaccatgtaagtgattctggtaacgtgtactgattattattcgatggcatgcagtgggggtgggtttaggcataagggatagaggtagcaacaccaactccccataccccaataaattagcttttccagagaccctgctttatcctcagagaaggctttgctccccagagcacatatcattttgagaatattgtttctttgtccattcattcaacaagcatttagcccctgctgtgtatcagagtctgcgcaggctctgagttcacagsggaaacacaacagtcagcaggttggatcccacagactgtatgagcacaacacagtctgaatatagcattgaatactgaaacagtgttgaccattggacttgt

SEQ ID NO: 349548 - DNA, 578 bp, Homo sapiens
ccccattgtcatctttattgtccagcagcagcttcaggatctggacctgtagttcttccaccactggaggtsaggtgaggaacatggccctcaggctccaggagatggggggcaggtttgggccagggctccaccaccagggttccccaagtcccacctagacatgggcacctccaagcaccctcatgtgcacacacacacctcccaccctaccccgtgcccaaggcgggctgaccttcgatgcgcttcctgagccgctgacagccccgttcgtaggctcgccgccgcagccgctcctctgcggtctcctccttcatctccgtgctctctttgccctaggcaggggtagcaggtggaatacagcagggtcacctgggacctagccaggcctccttcactcagaacacccacactccatctccagggcttcagggaccagggccagtgaaaaggcctcatgctagatgcccagtggccagatgcccaggccaggggccttgccatgacctctgcccatcccacttggggtgcactcacctccctactggagcagtggggccaccaggtggtgggaatga

SEQ ID NO: 349549 - DNA, 578 bp, Homo sapiens
ccccattgtcatctttattgtccagcagcagcttcaggatctggacctgtagttcttccaccactggaggtcaggtgaggaacatggccctcaggctccaggagatggggggcaggtttgggccagggctccaccaccagggttccccaagtcccacctagacatgggcacctccaagcaccctcatgtgcacacacacacctcccaccctaccccgtgcccaaggcgggctgaccttcgatgcgcttcctgagccgctgacagccccgttcgtaggctcgccgccgcagccgctcctctgcggtctcctccttcatctccgtgctctctttgccctaggcaggggtagcaggtggaatacagcagggtcacctgggacctagccaggcctccttcactcagaacacccacactccatctccagggcttcagggaccagggccagtgaaaaggcctcatgctagatgcccagtggccagatgcccaggccagrggccttgccatgacctctgcccatcccacttggggtgcactcacctccctactggagcagtggggccaccaggtggtgggaatga

SEQ ID NO: 349550 - DNA, 559 bp, Homo sapiens
agcctaggcaacagagtgagacccttatatatacatatacatatatgtatataaagaatcattgccactcaaagtgctgcttgggcctgatgtcaccagtaccactcaaagtgctgcttgggcctgatgtcaccagtaccactcaaagtgctgcttgggcctgatgtcaccagtaccaagactggagatgcaggggttttagaacattcaggttagtactttttcttcctgagtagtacccatgatcstggagtgactgcctgcttcagggctgtagatctagacacctgtcctgcagccaggtagtggccgggacttcaggaccctggggagccaaaatttgcagaggggaaagcaggtgactaggttggagagacttggctcttatattagtctgttcttgtggtgctataaagaaatacctgagactggtaatttatagagaaaagagttttaattggctcatggttctgcaggctatacagggaatatagtggcttctgcttctggggatgcctcaggaagcttccaatcatagtggaaagcaaagggagagctg

SEQ ID NO: 349551 - DNA, 617 bp, Homo sapiens
atgcattagatacatacatacatacatacatacatacataaagacagagcgatagatatataaagaatttatagaaatgtgtcttttttttgtactcactttatgtataaatgccaactacttaccaggcaagtaatcctagaggttacaaaacaaaaagscttaccaagaaattaagatgctcaaatcacttggctgattgaattcatttaaagcatatggctagaagcaaggggaaagaggacggaggatctccctccctgtaacctgtgttatgcactgttcctctattctcctcttctctctcccatcttcccttcctttcccttcccttgtctccaccctctcctgctctgtctcccactgatggtgtagcgaggaggaccacacttgagggtcctcagtctggaacagggcctaagcaggcagaaggtgcctgcagccagcacacacttgccttattggagaggtgcaagggcaagtgtgtagcttgcctgtaacctcctgagcagccacacatttatctgtgtgtctcaggcagagaatggatgttgccagtgagttaatttaaggatgagccaggagagagctatcatcaacctagagacaacaaggtc

SEQ ID NO: 349552 - DNA, 491 bp, Homo sapiens
ggtttccgtggtagtgagtggacctgcacacaaaaggatatacctgatttcaatgggtgccatggtgatgggggccacagattcacagaggcagctgctgtccaccaccaccatgaacaggttgctgcttgggatttgctggatgacaaaggacctgttggaacaagaggtagcgaggcagtcatttaccatccgtcaattaaagagccatgaggaagacttctctcctgggtggtagcaactaccatattttgtaaagcaaattttggagactattttactactaatgttaccttctttctccatgaggctcttcacttacaaatacctagcttcactaggaaaacaacaatagctatgaygacatgcggctcatacaactcaccttggaaagactgaagtgctgtatgtacaaaacacaagagtcagagttggctgaatcacctgttcccaaggtttaagaggtcagactttcaaagcctaatttcctt

SEQ ID NO: 349553 - DNA, 491 bp, Homo sapiens
ggtttccgtggtagtgagtggacctgcacacaaaaggatatacctgatttcaatgggtgccatggtgatgggggccacagattcacagaggcagctgctgtccaccaccaccatgaacaggttgctgcttgggatttgctggatgacaaaggacctgttggaacaagaggtagcgaggcagtcatttaccatccgtcaattaaagagccatgaggaagacttctctcctgggtggtagcaactaccatattttgtaaagcaaattttggagactattttactactaatgttaccttctttctccatgaggctcttcacttacaaatacctagcttcactaggaaaacaacaatagctatgacgacatgyggctcatacaactcaccttggaaagactgaagtgctgtatgtacaaaacacaagagtcagagttggctgaatcacctgttcccaaggtttaagaggtcagactttcaaagcctaatttcctt

SEQ ID NO: 349554 - DNA, 604 bp, Homo sapiens
ttggcaaacatgctgtcacatctcccagctcaggaaaaacaaaactgtctcttaaccctccctcctgcaaccaccccatttctctgtttttccttatagcacaactcctaaaaataattatctataatccttctctctctccctccaactctctctcttcacacatctccctccttcagaaattgtattccaacaaggctgtagtcctcatcactccaactgaatcagttattgccaaggacaccaatgacttcaccactttccttctgcctcttcttccttgcttgtttactgtctgcccctcataaaagactgtagtttccaaggcaacagggctgcacctgactgcctgaggttgtsagttatctctagcacctagggttgtgcctgggatagagcaacttctcagtaagtatttgttgagtcagtgacagaacttgaaatgataaaggcagaagaataaaaaattaaactgtgaagataaccaacagaatcaaactctggtttaaaagcttactgacataaattaactttggcactcatgatcaagaaattaagtcacaaagtatcattataacctgtaagatacgggagcattttcaac

SEQ ID NO: 349555 - DNA, 532 bp, Homo sapiens
ttcccttttgtgtgacacggtgtttctgtaatgtgtctaatatctagtctgaaagtcaagactttcatctttgtgccatttcaagtgttatctaagtcayagatgcaaccagcacctccaaacaagaccatagtttgacagaataaacaatgaaatcatacctgagaaagcccccagccctagctgacaatctcacaggcacccattcctgcacaggccaagacagccaaagtggcatggtggacagtcacagcagtgtgctcttctgaccacagcccacccaggctgcagtaaaatcagccagacatccatgtgaaattgagcagtaaccacaataagtaaatttgttgtgtattgcaaatgatctgctaaacgatgacctaatagcataaggagtgatcaacagtcacttaatagaagatcattttttggtctctgtgttcaatattttgagatgttcaatgaagttatctcagagtactaggaatctaatggttattgaaggcatgactcacaatctcttagatcactt

SEQ ID NO: 349556 - DNA, 574 bp, Homo sapiens
gaggctctatcacacctctctcccctgtgagccctccagctgcagtgaatcaaaaaagagcactctctcagatggaaccaggattagtctactggtcgagtccacatattaatattttgccattccagatctgagccacaatccactcctccgtgccatgctctggaagcaattcaggaagtaaaagaggattcacagagccattgcgatcaacccaacatggtttgttgaagaattgaaggacttggaaatcacagttcctttgcttcccctcttttatggttatatgctccttaggaacaacaccagagagtaggtgtcccccaggcataagttttcacccacacacatcaggataagcttctgttgcatccgcacttgagctaatctcaaaggagacaawttggggaatttcgatcatgctcgcctggtgtcacagccctcccagcagcaagcaatgcttggatccttatgggaaattcaagtgctcacaattccagctgtgcaatggatgtcattctcactttgtcttccactggtgtggggtagctgcggaaatgctacatctgtcatc

SEQ ID NO: 349557 - DNA, 589 bp, Homo sapiens
ttttctccctcaacattttttcttttacttggaaatcattaagataatgttttttcctcttgcatgttaattgggtaggttttgcatgccttgcattttctttctcaacgttttagattattaacactccttaaaaaaagtctatcacactattcttaatgctgtcatcaagagtaaaaaatttatcttagaaaaaagggtggtactgaaatgttactcaatatgatrtatgcagcaatggaagacgtgaatttctggaggtctcagtagcagagatcacttaattacccttgtggaaatttatccttgtgaaaaaaggaggaactatttagtaacttcatctgtttaatgggataacaagacctacctcataaattaactatgaggattaaatgagctaataatgtaaagactcaataaatagtccatgttgcctatttttggtatcattagccttagtaaagatactgaatgttgtacatggcagttggacttagcgaaaatttggcatggcctgaatcatgaaaagaagctgctatcttcttacctccagagagtcatcagcattcaccatccaacagtcagtcca

SEQ ID NO: 349558 - DNA, 589 bp, Homo sapiens
ttttctccctcaacattttttcttttacttggaaatcattaagataatgttttttcctcttgcatgttaattgggtaggttttgcatgccttgcattttctttctcaacgttttagattattaacactccttaaaaaaagtctatcacactattcttaatgctgtcatcaagagtaaaaaatttatcttagaaaaaagggtggtactgaaatgttactcaatatgatatatgcagcaatggaagacgtgaatttctggaggtctcagtagcagagatcacttaattacccttgtggaaatttatccttgtgaaaaaaggaggaactatttagtaacttcatctgtttaatgggataacaagacctacctcataaattaactatgaggattaaatgagctaataatgtaaagactcaataaatagtccaygttgcctatttttggtatcattagccttagtaaagatactgaatgttgtacatggcagttggacttagcgaaaatttggcatggcctgaatcatgaaaagaagctgctatcttcttacctccagagagtcatcagcattcaccatccaacagtcagtcca

SEQ ID NO: 349559 - DNA, 589 bp, Homo sapiens
ttttctccctcaacattttttcttttacttggaaatcattaagataatgttttttcctcttgcatgttaattgggtaggttttgcatgccttgcattttctttctcaacgttttagattattaacactccttaaaaaaagtctatcacactattcttaatgctgtcatcaagagtaaaaaatttatcttagaaaaaagggtggtactgaaatgttactcaatatgatatatgcagcaatggaagacgtgaatttctggaggtctcagtagcagagatcacttaattacccttgtggaaatttatccttgtgaaaaaaggaggaactatttagtaacttcatctgtttaatgggataacaagacctacctcataaattaactatgaggattaaatgagctaataatgtaaagactcaataaatagtccatgttgcctatttttggtatcwttagccttagtaaagatactgaatgttgtacatggcagttggacttagcgaaaatttggcatggcctgaatcatgaaaagaagctgctatcttcttacctccagagagtcatcagcattcaccatccaacagtcagtcca

SEQ ID NO: 349560 - DNA, 589 bp, Homo sapiens
ttttctccctcaacattttttcttttacttggaaatcattaagataatgttttttcctcttgcatgttaattgggtaggttttgcatgccttgcattttctttctcaacgttttagattattaacactccttaaaaaaagtctatcacactattcttaatgctgtcatcaagagtaaaaaatttatcttagaaaaaagggtggtactgaaatgttactcaatatgatatatgcagcaatggaagacgtgaatttctggaggtctcagtagcagagatcacttaattacccttgtggaaatttatccttgtgaaaaaaggaggaactatttagtaacttcatctgtttaatgggataacaagacctacctcataaattaactatgaggattaaatgagctaataatgtaaagactcaataaatagtccatgttgcctatttttggtatcattagccttagtaaagatactgaatgttgtacatggcagttggacttagcgaaaatttggcatggcctgaatcatgaaaagaagctgctrtcttcttacctccagagagtcatcagcattcaccatccaacagtcagtcca

SEQ ID NO: 349561 - DNA, 615 bp, Homo sapiens
tagggcaactcttacacggtttgacatcttgaagtctctaaatttatttctaaatttaaaaacataatatgggcattatttccttacaataatgggcaagcaccatgatattatgagtttttttttttccccgtcaactacaaccactacattgaagaatagaaatttaatttgaacactaggacatgggatatttgtccttcaggaatctgtagtttcataagttcagtgccaataaaggtttttgaggcagtcatgtagacgtgttgaaaaagattctgacastcaccataatatgagctggtgactataacccagccatctgagtgtctgttctggtgtccagggccaataccagctctgcagttctgtctttttttttcccacaggaatgtaagactcaaatgaggaaatgcaatgaaagcaatttgaaaagtgtacaacactgtgcagataatagaattgttatgaggcctctgttctgaaagccagagaagataacaccctaaagaaataatagaccatctcataaagaagtttcattgttttggactgatggtaagtatagttacatgccaccatctgttgggtaactgaatagctgatgtgcacatg

SEQ ID NO: 349562 - DNA, 529 bp, Homo sapiens
tttgcactgggtgaagtgagataagggctttgaaagttttatgtgagctataaaatttcataacatcagaagagctatagattcacacacatgcatagatatgtgccttaaacatacaagattatgtctaatcaggcatagatcatgccggaaactcacttcccttctctgggmctcagtcttcccaatttcaggctggatttccaggcttctagcataaatgcgttgtaattgtggttccctgctccagagccacgtcacctatgtctagctaattcaaacacagatgtggttatataagtgtcactggaaggtcatctatttaacagttctgatttggggccggtgtctttcctctttttttctttcacagtgaagcagagatggtttctgccatcaagcctcctcgtgaagagttcctcaacagccggatgctgatgccccaagacatcatggcctatcggggtcgtgaggtggtggagaacaacctgccactgaggagcgcccctgggtgtgagagcagagcctt

SEQ ID NO: 349563 - DNA, 529 bp, Homo sapiens
tttgcactgggtgaagtgagataagggctttgaaagttttatgtgagctataaaatttcataacatcagaagagctatagattcacacacatgcatagatatgtgccttaaacatacaagattatgtctaatcaggcatagatcatgccggaaactcacttcccttctctgggactcagtcttcccaatttcaggctggatttccaggcttctagcataaatgcgttgtaattgtggttccctgctccagagccacrtcacctatgtctagctaattcaaacacagatgtggttatataagtgtcactggaaggtcatctatttaacagttctgatttggggccggtgtctttcctctttttttctttcacagtgaagcagagatggtttctgccatcaagcctcctcgtgaagagttcctcaacagccggatgctgatgccccaagacatcatggcctatcggggtcgtgaggtggtggagaacaacctgccactgaggagcgcccctgggtgtgagagcagagcctt

SEQ ID NO: 349564 - DNA, 420 bp, Homo sapiens
gatcccaaaactagttaaggaagagagctaacatcagaaaccaccttcctcctgtgatggcgttactttattatatgcactgttgaacttgtttgtattttacctttttttatacgttaatgtaatttctaattgcaggaaaagttttaatgcagaaaatttgaatggaaaaactygtttttctattacagtaccatcgactttaactcttattttgatttccaggcagagtggagatttctgtgctcaagtccacagcttggtttcttttcatctctctccctcccacccctacactgcacatggtgcagtcaaatgaagaatattcctcttctatctctggacccttgtccctcggtgttgagagcccaagctgttaatccttgaactcagataactgatttttaaaaagcaaaaacc

SEQ ID NO: 349565 - DNA, 587 bp, Homo sapiens
tctggacagcaatgtcttagattatactagtactacaatgagttttaacctagtctacattgggtcataacagacaactctgtatccttgctgatctgaatgtcattgccagaagcatttgaaccagagcaattccatctttagaggctggagaaaatgaggctaagacctgttgggctgcattcccagaaagttaaggcattytaagtcacaggatgagatagtaggtcggcataagatacaacaagtcataaagaccttgctgatacaacaggttgcagtaaagaagccggctaaaacccaccaaaaccaaagtggcgatgagtgtgacctctggtcgtcttcactgctatactcccaccaatgccatgacagtatagaaatgtcacggcaatgtcaagaagttaccctattggtctaaaaaggggaggcatgaatcatccaccccttgtttagcctataattaaaaaaaaaaaaaacataaaaatgggcaaccagcagccctcaaggatgctctgcctacagtgtagccattcttgatccctttactttcctaataaacttgttttcactttataaacttgccc

SEQ ID NO: 349566 - DNA, 415 bp, Homo sapiens
tactgtatgttattaatagttataattgttatgtaagatttggatgccacagaagtaaccaaatttctttatcaattgtggctttaatagtggctgtcctaagactttttatcatccacagacaactgttgtcttgttttaatcttcttcaagagatggtttataatcaactwtagaactctgacagtgctattgaatgcagatttctgataatgttggagattgtgacattagaatagaggaagaaagtttcaggactctcacagagagctgaaatgttcatgacagaacaggagttctgttcaagcagaataggagtcaactgcatgaactgaactaataaaaaactgaagtaatatttttcttttacttttttgcttaaaacattgctgatcctttttgttttccagggcca

SEQ ID NO: 349567 - DNA, 415 bp, Homo sapiens
tactgtatgttattaatagttataattgttatgtaagatttggatgccacagaagtaaccaaatttctttatcaattgtggctttaatagtggctgtcctaagactttttatcatccacagacaactgttgtcttgttttaatcttcttcaagagatggtttataatcaactatagaactctgacagtgctattgaawgcagatttctgataatgttggagattgtgacattagaatagaggaagaaagtttcaggactctcacagagagctgaaatgttcatgacagaacaggagttctgttcaagcagaataggagtcaactgcatgaactgaactaataaaaaactgaagtaatatttttcttttacttttttgcttaaaacattgctgatcctttttgttttccagggcca

SEQ ID NO: 349568 - DNA, 508 bp, Homo sapiens
ataaggccacaaatcatcataacctctactcctagttaaaacttagtccctactccaacatctctaactaattagtactcttgctattagacctacatctttggtcaatatctttctgtttgcctaatactgtaaatattgagcaatgcaatacaggtacaaggcaaatagattataaagtcaattgaaaatcttgacaaagaggcaagatttcatgaagtccatgaaagtaacgttaaacagctccaatcrcacaggaagccattggcacattagaatctgtcagaggcagaaagatgaaaaaatacctgctacaaataaaacatgagctgtacttccaaagagaataatttcaacagcaaaggactaagaaaagtaccctaggaaaattgatcaaactctttactatattttaccctttttgtgggcattctgagaaaaatcaaaatataaagtgaaggatttcattattgtgctattttatcatcctatcagaacactaaactcc

SEQ ID NO: 349569 - DNA, 544 bp, Homo sapiens
atctttgcattaactaatgatcatatcaaaacactgtcttttgaaaaaatttattgcagaggggtcacctaggaaagatgcacttggtaggggtcacctgtgcccccttgtcctcctttgctattcaaatcgtcctcaaacctaccctctggctgaggtgggcagtccaacatgcaggcaggcgcctggctgcctggaggcagcccttctcgttgccctgtcataattcaagcaggtctttctgatgccagaggaaatgcctacaagccytagaaaagtcttagagatttttaataagggttattagcctctattcctttggaacaagaaagggtagagctgactttgatcatgaagttttcgattctctcgctgccgtcacacctcttccaatgcctcagtaggagacaccttctcaccttccaccgtctttgctaactcctggtactctcatcaggagatgagaagtgttgcacaggtgagtggaaaaggagaaagagactgaaagcagtgaggaaacactagcacctgcaggtcagactga

SEQ ID NO: 349570 - DNA, 547 bp, Homo sapiens
ggggtcacctgtgcccccttgtcctcctttgctattcaaatcgtcctcaaacctaccctctggctgaggtgggcagtccaacatgcaggcaggcgcctggctgcctggaggcagcccttctcgttgccctgtcataattcaagcaggtctttctgatgccagaggaaatgcctacaagccttagaaaagtcttagagatttttaataagggttattagcctctattcctttggaacaagaaagggtagagctgactttgatcatgaagttttcgattctctcgctgccgtcacacctcttccaatgcctcagtaggagacaccttctcaccttccaccgtctttgctaactcctggtactctcatcaggagatgagaagtgttgcacaggtgagtggaaaaggagaaagagaytgaaagcagtgaggaaacactagcacctgcaggtcagactgagatcagaggtgaacgtggccctccttcctcccttctgtcctgaatgctaactgtgttttccttgaccacaatgaccctttgccactttggtg

SEQ ID NO: 349571 - DNA, 300 bp, Homo sapiens
tatttaaaacagtgtcaattggttgcctggaaccaaaatttaagagtcaaagaggacaacggatgacagcttcaaagtacaaactcaggatatttgagcatcagatcaagttcagaaatcagggcaacttcaaggcttaattttcaaagcatgtggacctttaaatgacatttgaataggggtttatcccaatggttgctaaaagaacattgttagyagtgagcaagaggtcgtagcctgtgcttactatgcccaggggaaactgtcacttgcccaaagtgtatataccattgctgtctg

SEQ ID NO: 349572 - DNA, 300 bp, Homo sapiens
tatttaaaacagtgtcaattggttgcctggaaccaaaatttaagagtcaaagaggacaacggatgacagcttcaaagtacaaactcaggatatttgagcatcagatcaagttcagaaatcagggcaacttcaaggcttaattttcaaagcatgtggacctttaaatgacatttgaataggggtttatcccaatggttgctaaaagaacattgttagcagtgagcaagaggtcgtagcctgtgcttactatgcccaggggaaaytgtcacttgcccaaagtgtatataccattgctgtctg

SEQ ID NO: 349573 - DNA, 620 bp, Homo sapiens
ttttgcttggtacataaggcactgtgaaccttacatgatttgcagtatgagctgagaagaagttaccatggctaacaaaatccttagaacaatttaataycttcacttttcaaaatgtgacactgagtttagaattgtcaggtctaacttctttctaggtactgttgttctactactactagtgaacacgtgataatgggttagagtagcaagcattttctatgtactgccgccttaattctcaattctctgaattgctatgcccaacttcagagttgagataaatgagagggtaagcctgttgtccaagatcatacaatgaggaagaggagaaccctggaaatggtccctaattctcttgcttacaaagtcctaagctcttggccctgcctcaagaaatttctgaagaggtgtccacagacagacattctcaaaagcagtgtgggaaagaatttccagtgcttgtttcatgtttataattcctgaacagaagaatacatcttccatctgggaagtcttcacactattatccagacatctgaaaattcctgggactattaaattgtaaatgtagcttctgaaagttcttgcttaacagaaatatatttcttcttgggggt

SEQ ID NO: 349574 - DNA, 548 bp, Homo sapiens
cattgacaatgtgttccataaggaaggaactatgtgtgcaaatcccagtaatgaagatagaaatcatgggcacagagaacatgagaggaaaccacagagtctgacacagggatggggctgcaggtggcaaaagggaaactggggaagcaggcaggacctgctggtgtagggtccatagggctgtgctagcagtttggacctcatccaaagggtaatgaggagctatgaaaggtttaaaggggaaggggactcacacttaattgtgttctctccggcagtattccctggttataacatagatgtaatagcttccccatccctctctacatcttgaccttctgggaagaagagcacccagccgaggaggaatggtgggtaggagattcargtggccttaaggttacaagcaaggaaggaagctctaatttgggcctccagagtttgctcgtggcaattgaaaatatttcctgtgaaaggcaaaagacaagctgaactgacagatgatcccccttcttaacggactctgcacccagtcaatgtcactgcct

SEQ ID NO: 349575 - DNA, 548 bp, Homo sapiens
cattgacaatgtgttccataaggaaggaactatgtgtgcaaatcccagtaatgaagatagaaatcatgggcacagagaacatgagaggaaaccacagagtctgacacagggatggggctgcaggtggcaaaagggaaactggggaagcaggcaggacctgctggtgtagggtccatagggctgtgctagcagtttggacctcatccaaagggtaatgaggagctatgaaaggtttaaaggggaaggggactcacacttaattgtgttctctccggcagtattccctggttataacatagatgtaatagcttccccatccctctctacatcttgaccttctgggaagaagagcacccagccgaggaggaatggtgggtaggagattcaggtggccttaargttacaagcaaggaaggaagctctaatttgggcctccagagtttgctcgtggcaattgaaaatatttcctgtgaaaggcaaaagacaagctgaactgacagatgatcccccttcttaacggactctgcacccagtcaatgtcactgcct

SEQ ID NO: 349576 - DNA, 530 bp, Homo sapiens
atttttaatgatcagtattttaaatgtgctatgcctttgctttcttatgcaaactcataatttcggcacttctgatgtgactctccctttaatggcatatggctttccaaatcccagcacaaaggttcattttgaactcagaacttgaaggccttcatattacctagagtttgctgaaatccaagcttgtttccatgaccaacaagtcccagctgggtttcacagcccctgtattctgcatctttatmctcatcacacgctttgccccttgctcactctgctgcagccacactggtcttctttattccttgctaagccctttctggcctctagacttccatcttgtttgttccttctctctcattgcaacctctgcctcctgtgttcaagtggttctcctgcctcagcctcctgagtagctgggactgtaggcatgcaccaccacacctagctaatttttgtatttttattagaatcggagtttcaccatattggccaggatggtctccctctcctgaccttgtgatcca

SEQ ID NO: 349577 - DNA, 581 bp, Homo sapiens
gctttttttaaattaaagagtaactataaacatataaaaaatgcaggtaaacatgttatttactataggcagcagcaatagtaatagttatttcatgggttaaaaacacagtagaactagaaggttagaaaatattatatgaaagagatgtgaggtaatccaacttaacaaaatstaagtttttgtttgttctggaggagagaggagatcctcaccaattgaaacatcgtaaaaaggcaaagggcaactactaaaggaatagtgtgtactttacatagagtatggaaaaaaaaaaaggaatagaaaaacccaatcaatccaatggaagggaaagaaacgaagaaaaggagagagaggaaggaaggagggaaggaaggaggaagggagggagggagggaaggaaagaaagaaggaaaaaaggaaggaaggaaggaaggaaagaaagaaagaaggaaggaaagaaagaaagaaggaaggaagaaaggaacaaagaaaaaacatgaggaataagagcatataaaatgatggtagaaatactccaaacttgttggtaagcaccataaattttaaaagattaaact

SEQ ID NO: 349578 - DNA, 511 bp, Homo sapiens
catttgtttctgctcattgtgattttttatgtactacgtttatataaatatatctttataactctacatttcttcatggtttttgtgttggctcctatgctgaaaaaggctttctccatcccaaaggcagagggtagcttttattgcttccaattttaaaaatatttccttttttacattttatactaattcacctggatcttaattttgtcatttatatttttaaagagtaataatggcaagatatcttataatttataaaactaktgatcaagaaaggtaagatagtgttcaactctccctttctctggcagcaaaaagacaaactatcatgatacaaatgcaaaagaggccagaccgaatacggcttctgtattgcactaagatgatgtgcccttaatgaattaactgttaattcattgtcatgctaaaaatcacctcagcaatggggattgacacaatttgatccattagcaagaaagagtgtccctatgaacatgaagagccgaga

SEQ ID NO: 349579 - DNA, 521 bp, Homo sapiens
tttactcaatgtttagacaggttttactactcatttctgaacctcaattttctgtaaaatagggaaactatatgaagagtttcctttaaaaatttcagctagyattacttaatcaaaaaatgaaaagggtatttattgatttagctaatagaacagtccaggtatagtcttcaggagtggcttaatcagggaatttaaatgatatcaacaagacctgtgctaaccatcttcaggttctgtgtcatctctgctggtttcatgtcctgactccatgtgatggcaaagtaaacaaacagcagctccctacctacatctttttggctttaattccaggaactactcggattatattgggtcatatgcccgtctgcaagccaatccctgtggactgtggtcagggggatagaatatcctgattagccaggcctggatcctaagtttcattcctggagccatgatgaaggccaacccaaaactcataacctgagtgtcaaggaattgtgtttctccaaaggaaatgt

SEQ ID NO: 349580 - DNA, 538 bp, Homo sapiens
tcaatatatatttctaaagtgcttaataaaattcagcacctattcattattaaaaactcttagtaatctaggaatagaatgtaattactgtcatcaaagtatctacataaaacatataagatatattatcatcaatggcaaaatggtaaaagctttccttctgcaatgggaaaagagacaggaagacccattagtaccacttgattctacmttgtcctaagtatcatagtcagcacaaagatgaaagataaataattacaatttaaatgagtaaaaagtagaagtattattatttacaggtaaaatagatatacatgtatagaatccaaaagaatctacagacaaactattagaatgaatttatcaagactgctagatgcaaggataatatgaaaggaatttcttgcttttctatcaacaattgacagttacccaacataatttaaaactttgccatttataatagaatttaaagcatcaaatacctagggggtaaaaaaaaaatcaaacaaatcatgtataagacatccatacagaa

SEQ ID NO: 349581 - DNA, 546 bp, Homo sapiens
tcttagtaatctaggaatagaatgtaattactgtcatcaaagtatctacataaaacatataagatatattatcatcaatggcaaaatggtaaaagctttccttctgcaatgggaaaagagacaggaagacccattagtaccacttgattctacattgtcctaagtatcatagtcagcacaaagatgaaagataaataattacaatttaaatgagtaaaaagtagaagtattattatttacaggtaaaatagatatacatgtatagaatccaaaagaatctacagacaaactattagaatgaatttatcaagactgctagatgcaaggataatatgaaaggaatttcttgcttttctatcaacaattgacagttacccaacataatttaaaactttgccrtttataatagaatttaaagcatcaaatacctagggggtaaaaaaaaaatcaaacaaatcatgtataagacatccatacagaaaaccataaaacaatgggagttaaattaaatgagatctaaataacttgaggactacacaaacgtgt

SEQ ID NO: 349582 - DNA, 595 bp, Homo sapiens
tattagtccaggtctcatagtttaaagctgcacacttaaactgcttcccaaacatgaattcccaagggatatcttgctccttagggatctcatgggcctctgatgaggcctcatcgaagaatctggaaaattggatgtaaactcactctcaattcctaaggcatacacattggcatttgtttaaaacagtgattctcaacgytggctgccctttggaatcacctggggaacttcaaataaattttctttccttttcttttctcttttgagatggggtattgttctgtcacccaggcttcagtgcagtggcacatagctcactgtagccttcaactcctcagttcaagcgatcctcctgcctcagcctcctggatagctaggactacaggtgcatgtcaccatatctagttaatttttttctttttttttgggtgggggtgggtagagatgaggtttcacgtgctggatgtggttgcccaagctggtctcgaactcctgagctcaagcacttcccccacctaggcctcccaaagtgctgggattacaggcatcagtcactgagccgggccaaagtaattttatatacatgatgata

SEQ ID NO: 349583 - DNA, 554 bp, Homo sapiens
tttttccctctaataggagtttacttttccgtgtccatattatgttgacttcaggcttcttctacaagcctccagaattaaaaaaaaaatgaagctctgctgttactttcaactaaaagacccatctcccaaatccttatttaattccctgtgttgacattttccaaggaatattaatcataatacttgctttgatttgaaggatgtgttgtgaccctgccctgtggccctaaaacaaaatatctctgccttagtccatcttgagttaatcagccttaggtaacatttcactttggataataattcaactcatgttccacagtcaaattcaattcaatacaaataatacatttttatacgtatatatgtacatttgtcaaaatgcttactgacaaaarcattattttttgcaattaagcaacatagttttcagaaacaatacccaaataaaatgaccagccacatgactaaatttcttagtatgaagtatctgcattcaggttacatcattcaggtcttctccataagcagaaaaataaaacgaaacacacatt

SEQ ID NO: 349584 - DNA, 540 bp, Homo sapiens
ttaatccagaactgtttaatccctaaatcttctgtggtagtgyttagactctttttacttgtgtatttattttatctcacctagaaagcatctcctctcataggtgaagatcaagaggaggaaagcaaagatgatatgaaagacagcagtgagaaatcacctgctctcagtgtacacatgaaagccaagccccttagctcaaatttatctctcaaactagcaccaggaaagaaactaaaggcagagttgcataagaggatgcatagctctaactttcacaagccttgcctgccatacatcactgccgtacatttacaggactggtgacatttagccaggtcctcccagaagcttattttgcatttctctgagcctcaatttcctcagcaccaaatggtcctaaaatgttcttgaagtgaaggactttctgcagatgagtgccatcctcaacaacgttgaataatttttcaaaaataaccccctagagaaatgtggaaaatataaaatgtttcaaggctgattcaaccctttttcaaagat

SEQ ID NO: 349585 - DNA, 540 bp, Homo sapiens
ttaatccagaactgtttaatccctaaatcttctgtggtagtgtttagactctttttacttgtgtatttattttatctcacctagaaagcatctcctctcataggtgaagatcaagaggaggaaagcaaagatgatatgaaagacagcagtgagaaatcacctgctctcagtgtacacatgaaagccaagccccttagctcaaatttatcyctcaaactagcaccaggaaagaaactaaaggcagagttgcataagaggatgcatagctctaactttcacaagccttgcctgccatacatcactgccgtacatttacaggactggtgacatttagccaggtcctcccagaagcttattttgcatttctctgagcctcaatttcctcagcaccaaatggtcctaaaatgttcttgaagtgaaggactttctgcagatgagtgccatcctcaacaacgttgaataatttttcaaaaataaccccctagagaaatgtggaaaatataaaatgtttcaaggctgattcaaccctttttcaaagat

SEQ ID NO: 349586 - DNA, 561 bp, Homo sapiens
gtactgtcagacactgatatatactggcagaggttgccttgtattcctcgtattttctgaataagacatacytaattaactacactaacaaatactaaaaatatcaggtgatggctttaatgactatctaacttctctacttctatttctccgccattgcttaaggtttttttttgtttgtttgtttgtttgttttttttctcatggctcacagcagcctcgacctccctggactcaggtgatcctcccacattagattcctaagtagctgagactacaggcacacaccaccactcctggctaatttttgtattttttttttttttttttagagatggagtttttccacattgtccagtctggtcttgaacttctgggctcaagcaatccacctgccttggcctcccaaagtgctaactaaccactgcgcccagccttattgcttagcttttaattatgcctatgtctcattgtttacatattggaattatgaggttggtgcaaaaataattgcgttttttgtcacaaactaacaatctaatacttgtgggcttttaaaaa

SEQ ID NO: 349587 - DNA, 542 bp, Homo sapiens
ttcagaagacattttcagcataaacaaaatagattttaaagtacattattttagctattttactccagtttaactttctgctaccatgctctttttttttagtaaaagagaaaatagctaagaaattgaaaacttagcataccaactatagaaataaagttttaactgaattatttcaacatgtcaaataattttgcaagtgaattatagaaactctttaatcttcaataattgtggaagagtagaactcaggagagacattttaaggagagtatttaaaagcttcacacacatcgattttcttctttttgccttcctataagaaaaccaatctgcaggtggactgtatctgtaacctgttcaccactggttaggtggaaactaaggtggtcttgaggagttgcaggaggaaaccagagtcgaaaagttacggaaacactatggttctttaaggaaatagacakaatttattttctttcttgagccagatagctgatgttcagttgctagatgcaactctggtagaaagaaggcatgggtag

SEQ ID NO: 349588 - DNA, 582 bp, Homo sapiens
acactgcatatattaactcaattaatgctcacaccaactctacaagataggtattcttagtattctgatttaagttggaaaactttggctcagagaatttaattttctgcagtcccaaatctagtatatggcaaaatcaggattcaaacactggtatctagttctagaatccagctcctaaccactatgcctactataatatgaattatgaatgaaactcttatatgaaaatgttaaggcctttcccaagaaatttaacacctgaattatattttttttatactttaagttctagggtacatgtgtacaacgtgcaggtttgttacatagatatatacgtgtgccatgttggtttgctacacccatcaactcatcatttacattaggtatttctcctaatgctatccctcccccaggtttcctccygctgacaggcctgagtgtgtgatgttccctgccctgtgtcctcattgatcagttgccacatatgagtgagaacatgtggtgtttggttttctgtccttgcgatagtttgctgagaatgatggtttccagcttcatccatgtccctgataaggacat

SEQ ID NO: 349589 - DNA, 594 bp, Homo sapiens
cctatatattaagggtgtagtaattttaatacttactaaagtatttgcttatcagttagctttccacaattttggcatcaagaaagggaaaatgacaatgttcttcctgaagagaggagaatatgatgttggtgaatactgtaatagaatttgtaatctaccttctaatgtttcaaagccccagartgaggaggaagttccttgcacatgtagatataaaactaaggcagagggcctgcagccttgctcagcatttggttctccagtaggaaagtgatgttcagagcttgtctggccaacctgcagcagcagaccagcacaattaagagagcaactggtttggtctgatggagagcagatctcatttacaactgcatgtttctttcaattccagagtacatggacattggacatggacattagtttaaggacattggtatggtgggaacaacctgagaataaagatgagatggaaggtgtggcatagactcagggtctgcagaagcagggagcggagaggaagatgcattggcttggaagggtaaggggatggaccaagctaagaaattttggatcacagggtatgaccacaca

SEQ ID NO: 349590 - DNA, 508 bp, Homo sapiens
tcagtgaccttggaaaattgcttaatctttctgagactatttctcccttctttaaacagcaatgatactgcctccatctccactgggctgttggggattttttcttatacttgagtgtacccattatgaccaacttagtgccagacatgtgatagatattcagtaaatacttatttagtaaaatatagaattaaaaatcaaatgaaataagtatgtaaaagyattgtggattactatacaaatacaagcattattattgtcaaagaacaaaatttcaataaattgagttttaaagctctaattggcttttattagcaattcatgaaccaggcagtatttttcagtccacaaagtagaagcagctctgccaggagtggcagaaggattggcttttgtaaggcagatttagtagaaaacaaacaaacaaacaaacaaacaaacagaaaagggtggaaagtggattggttgccctcaggtactttccttgtatgggttaaagccgagagga

SEQ ID NO: 349591 - DNA, 604 bp, Homo sapiens
gtttgctgtttcatagtcagcataccattaagtggcttgtgttcattgcaaagctgatagatcaactctttcaatacacaatcaggatctccatttttagcttcatgtgatgtttttctactttttattaacttytgttcatcaacttcagcacagaacttcagcaatttatccttctgtttcttcaggtgatttaggttggtcattccgacattatgctcttctgtaatatgtttcacacttacaccagtgtctagtttctccaacagcttgactttctgtgcttcctctttttcttatcactgttacccataggggtatctacaggtctttttgaaattttcagtaatacttttacaccacagaacagcgaacaagcaaagaaacatagtattttgtgttctattttgtgagtattgctgtaggttatggcctcatctggggtaccctggggaagctgctgttggcacatcccacctgcacatgtgccattttatcaccctttgtgggtgtgcttgtgtaggggaatctgtgcatgcacaaaaaagatgtatcacagatgaagagggctgggatggtcttttctcccttagggacgctgaac

SEQ ID NO: 349592 - DNA, 465 bp, Homo sapiens
aacagtgaactattttctttaccctaaggaaaataaaagtacaactagttgaactgagggaaataattgaatttgatgtgactgggatttagatgctgatggaatcctgaaagtggccattgccacatgtccctgagcagttgaaagttattctcatagatctgtaagtactagctttggtttttgtttttattatgtgccttaaaaaaaccactattatcaaaacaacaacaaaaaaaatcactcaaaattctacccaataatatatatttcaatgcttattctactagtcattttgtccatgcatgttcatttctgtctgtttctatgtctgtagctgtatccatatttttayctacacctgaaattctattttgcatctgtagctacatctgtagctatagctgtacttatatctgtattgaaaagtagtatgtcctaggaaattctaggaatatagtgaca

SEQ ID NO: 349593 - DNA, 656 bp, Homo sapiens
tattactcacctaaggaaayttttcagagccttgttctaaacactagcacttgctcccaataaaatgtcaataccacagatatattgaatgtccctatatgtatggtggtctgttgaagagctacaaacctctgtaatatctacagctttttcatcctctaacaaacaatttttatctgtttgtggcaatatgacccccactgagaatgcctgacattgtagtactagcatgcctagatcttgtcaagtaacttcatttccctagggtcaattttggcaaactttttgtgccagagtggcctcacattgttttcccttccttgatttcagctattttttaaaatctgattatggcttaaagattgcaactaactggcatttggggttatacctctgcatttagtaggctgagttacttctgcaagtaagagaaaagtaaaaacagtggtttccacaagtttgttgctcactctgggagtatgactcctctgttcagtgctgtctggaaggatcccagactactttcagttacactgctttgccaactctaggaagtggcccttgtccaagttggcttctacagcctacatagcaggaggaaggaacatagaagtagggagatgatcatgtgacagctgcctcttaagggaggtatc

SEQ ID NO: 349594 - DNA, 583 bp, Homo sapiens
aaaccaaatttgacttgaatccttacacatttctacaaatgtcaaagttttaaattgcataactctgtatagaatttatgaaatcttgagtttctcttggattctgctttgagcaacaaaacataccatgcttaaaattgagttcatctggagaacacaaagtaatgtcaaaaaatactactcagcatatcacttcctcagaaatatctcagtatactcaacatacctatctataaaacagcaaacttctaagctgtggaagtgaataaaattgatattagtcagtgacttccctgtgggaagaagggtggcagtgtaaatgcagagtaaaggctgaatgaagtctatatatgtttgggggtattttcagcagcggttctttcaaaagtcatttcatttatggcttttttggtgattttgcacaaaataacctagatacatttaatytttacattttcagaagaaacctgctcagtttggagcatgttcacttcttttgaaatgttgatgttgaaagctgcatatagatcttttgagaggccacatgcttgagattctatttttaaattttcatgacagcttt

SEQ ID NO: 349595 - DNA, 652 bp, Homo sapiens
agatgttctaggtctgcttgtagtatctacatttaatagctgttttcagtcatctcctgccctcgaataattctttggcttgcatattgtgcctacccataaagcaaatggtaacagcaggtttgycaacattattccttcattctatttccaggaagagatcatagaatttttaaggtgaaggatcacagatgattatctttacagtttaccttggttacattcacatgtaaccctaatttgcttttatggcataaagttataatccacccccaaagtacttttagaaatatactcaaagttaatgggtaactaactaactttaattcattgtagtaatactacaatgaattgtaaagggagaaactatccaagtctaaatgtattttaaatgaagaaaataatacagattaatttctttgttgacagtggaattaaattggaaataattaaaaataaaataactaggaatcctccaaatatgtggaaattaaaatacccaggaatcctccaaatatttgaaaattaaaatacacaagaaacccccaaatatttgaaaattaaaatacctaatatcaacaacatgtgtgatagcttaatcagcactggctgatgtgccaggagttctgaaggattttaggagcattccata

SEQ ID NO: 349596 - DNA, 566 bp, Homo sapiens
tctctgtgaattgtttctttttaacactgggtacttgggattatgtataggtgaagtatggttttatacaagcatcttaagtcaaaagagaagtatttcaatggactcaaaataagtccaataaaatatttaggactgtgtattatatgtttgaataatctataagcattttctctgttaaacgttttcttgaggtccctgtcaatataaatattttaagtgccattaattagatgaacatttcaaaatgtcttgatgatatagatttggagamaagatgaatgactagacatggaaaggaagagcttctcccatggaaggaccggaccatcaagaagactggtgcaatacaaacagatctttggaaagaaggcattgagagtgagtagagaggggacacagaccccacattgaaaagagaggaagctagaaaccctccacaaagttgctgagcatcaggactcactcctggccagtttctggggaaggaatgagtgaaagaggtgtggagtagcccactctcatcatggacctctggaatcctagctgcaggagaccccatgacc

SEQ ID NO: 349597 - DNA, 661 bp, Homo sapiens
aaactttatttacacaaactggcagtggattggattggcctgatggttgtagtttgctgatccctggtctaagtaattacatgagtagtaacaatagagtttaataattagggcgagtacagagtgctatgaaacamagatcacttttgttagaagggtgatcagagaggagacacctgaggaagcttaaaaaaaacacaaaatgtcttgatgatagatttttaaaagggatgaagttttatggttaagtgaattggcaatttatttggttagactgagtgaaataggtttcctgacagcataatttttcaaaaagtctaaaatgcaaatatattattatatttctaaaagactgtatagcaaactgcattttctagtaatttaaacatcacatctttttctcttggtgcttcttgttggactatacatttggaacatatctgtgtctccttgtactacttttatttctatttaagtgtgaaatgaatttaatacatatgtatgccataaacatttatttttttctcatcattgaatgtatagtaatttaaataattagtggttaaaatagaaactatatacacagagtaaaagcagaataagttaacttttattataaatctaaattatcagaatggttactgtactaagcaaatgttgt

SEQ ID NO: 349598 - DNA, 567 bp, Homo sapiens
ggtgtttttgcaatgctgtcagaattacagtttttgaaatagaaatgctaggatatacactacttggatgtatgtgtttgagaccagaggagagtttctactgcttttcctttcattgtagtgtggtggtttcccaggagattaaatgacaacacaagagcatatagtattagaggagatgctgcattttactttaaaatttttattttattgyttaatttaattttacttttactgtgcataggccactctgggaagtagtatttggtcaaagccatgatgttatgttcactcctgtgaactttgttctatgagctcaattataatgatagcagtccagtgattacagcttcagagtttctagaaagctgtatttgtggggcatgttgcatgacagcatccagaatatataaatatgatctggtttcctttaagtgctctgctaattttgcttgatgatgctcaaagctaagaccactataattatagaattttagatccactagaatgataggacttttatacctgggaaaaatttgaaaatatttacatcaaaattgttcaatt

SEQ ID NO: 349599 - DNA, 595 bp, Homo sapiens
tccccccactcccgctctccacagaaggccattgctgatggagccttggcaggcacaaaaccaccaagccttgccccaccagctaacaccgtgcagagaacaggggatcctcccactctctgagctatcattccagcttgcagagcacagagaaggcacccagacctgtaccgtccagcactctacccgaagccaacaccactctagtgcaacaacacatgtagtctccagcaggggccccttgctcaccaacccccagctgccttgccacccccactttggtgcatgccttcaaggagacaggcagccctgtatctgctagcatactgttgaagctgccgcatatcagctcccccagcgcagggaaccctaaaccttgaggagccagagaacaaagttggggcccaataaaaatctcccagagttacagcacacagtcaaggagttgggaactaagtgttggccctctaaaatctcccagaaacaaagccagttggctgaatccaccttataccacaatcaaaccytcaaggtcatcaaataggataaaagaaaaaaacgcccatctaaaggtcagcagtctcaaagattaaaa

SEQ ID NO: 349600 - DNA, 601 bp, Homo sapiens
caaacattcacctgggcagcaggataactcctccaagaggcagtcgtcttctctgcttgctgtctggaagaacaactttagaacctgctgtcatggcaatttttccttaggaaatcaggtcgtggtcccaattcaacagtgagtcttttacaaggatttrggaccagtgctcccaggttttacaaataatgagaatatatatttttcctttagggtaatcaatgaaaataacagctgtaaaaaattaaactgctttctctttgagatttggagaaaatgaatttacaaaactttagcatatagtatcacattctttgaagaaaatgaatacaagactgattaccatacctgtttctcattgtctaaattccaaacaccttggtttggtatgcaaggcttccaagctctagccccaatattattcttagtcttaagtccaccttcttctatatgtatgttatgcaagaccaaaatggattatacattgattcctggatatttgctatattttcagttcttcaactctgcttgtagaaatcctacttattcttctaagatgcaacttcctttatgaagtactgattgatgactccaaataaag

SEQ ID NO: 349601 - DNA, 603 bp, Homo sapiens
tttaattcagatttagcacatcactatgaaaatgtgacagttaaaatataaaatatctctattttttataccttaaattctgggcatatatttcaaggttcacagataatttaattgctttctagaactrttaaaaggagaagggagttacttctattaatggtagaaaaaaagccaacaagtagaattaactttttttttttttttttttagatggagttttgctctgttgcctaggctggagtgcagtggcaccatctcagctcactgcaacctccacctactgggttcaagcgattcttctgcctcagcctcctgagtagctgggattacaggcatgtgccaccacgcccggctgatttttgtatttttagtagagatggggtttcaccgtgttggccaggctggtcttaaactcctgacctcagatgatccacccacctcagcctcccaaagtgctgggattacaggcttgagccaccactactggcctagaattaacttttaaccatacataaatatttctagcccagtcaagtgagaacaatcactagtatagtgatttaatcttcatataattttctctttggggattgtgaagtc

SEQ ID NO: 349602 - DNA, 603 bp, Homo sapiens
tttaattcagatttagcacatcactatgaaaatgtgacagttaaaatataaaatatctctattttttataccttaaattctgggcatatatttcaaggttcacagataatttaattgctttctagaactattaaaaggagaagggagttacttctattaatggtagaaaaaaagccaacaagtagaattaactttttttttttttttttttagatggagttttgctctgttgcctaggctggagtgcagtggcaccatctcrgctcactgcaacctccacctactgggttcaagcgattcttctgcctcagcctcctgagtagctgggattacaggcatgtgccaccacgcccggctgatttttgtatttttagtagagatggggtttcaccgtgttggccaggctggtcttaaactcctgacctcagatgatccacccacctcagcctcccaaagtgctgggattacaggcttgagccaccactactggcctagaattaacttttaaccatacataaatatttctagcccagtcaagtgagaacaatcactagtatagtgatttaatcttcatataattttctctttggggattgtgaagtc

SEQ ID NO: 349603 - DNA, 629 bp, Homo sapiens
atatcttagcagctgaactacagtctggaatatctgacagttcagggatgttgactttcacttgctccctctcagcctgttctttgtcccctcactggatttgtaacacataatagcagtcactgaactaacttcccgggatatttttgaatggaaagaatctattctttaaaagaattctgccaccagtttacttttttgctttatttaattgtgaaaatttaagtcagtcttgatctggcaatygaagccttaggcaattgctgtttatcacacaccagataacctttcctgtcttatgagctctttctgaatgtacaattgaggcaattgagataaaccgaagtagctttgatgggtgtttccagatctaatctagaaggagggtaattcttctcaaagtgcttttgaaaagcatttgttctccacgtcacaaaacaaacttaaacaaaattaagagcaatgaaggagggacatctatttctccctggtttgaggagatgggattttttcaaatgttttccatcccctagatcacgctctggtccttttatgactagtcacttacaagagattgggtgttgttaatgacctacagaaggaaaatgtgcttttatctctgcagagca

SEQ ID NO: 349604 - DNA, 629 bp, Homo sapiens
atatcttagcagctgaactacagtctggaatatctgacagttcagggatgttgactttcacttgctccctctcagcctgttctttgtcccctcactggatttgtaacacataatagcagtcactgaactaacttcccgggatatttttgaatggaaagaatctattctttaaaagaattctgccaccagtttacttttttgctttatttaattgtgaaaatttaagtcagtcttgatctggcaattgaagccttaggcaattgctgtttatcacacaccagataacctttcctgtcttatgagctctttctgaatgtacaattgaggcaattgagataaaccgaagtagctttgatgggtgtttccagatctaatctagaaggagggtaattcttctcaaagtgcttttgaaaagcatttgttctccaygtcacaaaacaaacttaaacaaaattaagagcaatgaaggagggacatctatttctccctggtttgaggagatgggattttttcaaatgttttccatcccctagatcacgctctggtccttttatgactagtcacttacaagagattgggtgttgttaatgacctacagaaggaaaatgtgcttttatctctgcagagca

SEQ ID NO: 349605 - DNA, 573 bp, Homo sapiens
aagccatctttacagggttttacctactaaactaacctggctctccagtccttggataagtgggacaatatataagacttggagaacaaagacttggatgtaagtcccaagtyggctatcatgctgtttgaccctcagcaagtcacatgaattctctcagccctagcatcctcattaatgaaaaaaggtattaatccgcactctgcaaaattattaaggaaataaataagagagagtgtgcaaagcactctttttttttgagacacagtctcgctctgttgctaggctggagtgcagtggtgagatctcagctcactgcaacctccacctcccgagttcaagcgactctcctgcctctgcctcccaagtagctgagactactacaggcgcatgccaccacgcccagctaatttttgtatttttagtagagacggggtttcaccatgttggccaggatggtctcgatctcttgacctcatgatccacccgcctcggcctcccaaagtgctgggattacaggtgtgagccaccatgcttggggcgaagcactcattttaacaacaagttattcta

SEQ ID NO: 349606 - DNA, 549 bp, Homo sapiens
gaggatcccttgagcccaaaagttggaggctgcagtgatccatgatcacacgactgtactccagcctggtcaacaaagtaagaccttatctcaaaaaaaataataaaataaaataaatttgtattactgattggagaccacattgctatcttrggaaagtatattacatagtatactatttggtaaaaggtaaaggaaaagaaaaatagaaaaaagtgaaaaggtataaaccatgcttatgagaataaattagttacatgcatgcttggaaaggtcaaaataggctaactgacataataaacaaacagactcaaatttagtggcttaactgtaccagctgtaggttttgctaatgcgcaggccaactaggtattcctggttccatggctcttctgggcatttctcctacaagtggcaactcggagccaggctcctgccctcttggggttcttccaaatcctagggcccaggcgtctctctggacatgctgcactcagccagcagatgatgggagagaaagaactggaggacagagaagtgacatatata

SEQ ID NO: 349607 - DNA, 549 bp, Homo sapiens
gaggatcccttgagcccaaaagttggaggctgcagtgatccatgatcacacgactgtactccagcctggtcaacaaagtaagaccttatctcaaaaaaaataataaaataaaataaatttgtattactgattggagaccacattgctatcttgggaaagtatattacatagtatactatttggtaaaaggtaaaggaaaagaaaaatagaaaaaagtgaaaaggtataaaccatgcttatgagaataaattagttacatgcatgcttggaaaggtcaaaataggctaactgacataataaacaaacagactcaaatttagtggcttaactgtaccagctgtaggttttgctaatgcgcaggccaactaggtattcctggttccatggctcttctgggcatttctcctacaagtggcaactyggagccaggctcctgccctcttggggttcttccaaatcctagggcccaggcgtctctctggacatgctgcactcagccagcagatgatgggagagaaagaactggaggacagagaagtgacatatata

SEQ ID NO: 349608 - DNA, 547 bp, Homo sapiens
tgggccaagcagtgggctaggtcctggtagtcctaagtgggtcggatgtggtttctgttcctcatggagcttgcagtctagggagcaaattgatgttaggcaataatgctagaaaaaaaagataaaaatcacagctagtagattgcaaaggaataagtggtctggcttgtaattattgctcaattatttcctcgtttcccattcctctcatgccaccactgtcatatttcaaccacagttttgtgtgtgtgtgtgtgtgtgtrtgtgtgtgtgtgtgtgttgagacaggatcttactctgtcacccaggctcaagtgtagcggtgtgatcttggctcactgcaacctccacctcctaggctcaagcaatcccctcacctcagcctcccaagtaactggaaacacaggtgtgcaccaccacgcccagctaatttatcttgtatctttggtggagacgcagttccaacatgttgctcaggctgctataccacgattttactgacaggcatatcccagttggtattctaccagctcgttttccacacttg

SEQ ID NO: 349609 - DNA, 620 bp, Homo sapiens
tttgaaagaagttctactatgggtaaaatgctatcaaacaacattgcatgatacagaagaaatattttgtgagagtccatagatgtggcaaacttcactgttgtcttattttaagatattgctacaaccacccaaaccttcagcaaccgccagccttatcagtgagcagccatcaacatcaaggtaagaccctccaccartgaaaagcttatgacttgctgatggctgagatgatcattagcatttttcagcaataaagtatttttacattaaggtatgtgccttatttttttagacataatgctattgcacacttaatggattacagtagagtgtaagcataacttttatatacagtggaaaaccaaaaagttcatataactcactttattgtgttattaactttattgtggcgacctggatccagaccagcaatatcgctgaggtatgcctgtactcaattcaaaactgaagaagactgaaaaatctgacttgtgggttaaaaacaaaagcacatcagtgatcatgcattatttgtgttttacactatagcaatatagctagctacagccacaaagaaagttgttcttctgtgtatctgagttttctagaaaactgaa

SEQ ID NO: 349610 - DNA, 522 bp, Homo sapiens
tttgtttcaaattgtgttgtatgaaattaaactttgtgaaattgccaacatttgactatttttgacctaccaaaaaaaggtaatttatatggttcaacctaatacaatagttatgccaaatggggaaaatgtttttcaagagaaactgaaatacaggtttgttttgagattagtaataaacatgcattgtgttcctgctttctgccagaccctgagctctcaaggaaggtcattttctctcttcatcctcctaagtcttgcatgtgtttgggtttcccagagcttggccatagggcrcctcttctccacactccccaaaaactctaatccaaatgtgctcataactcctaaatgtatctctaacccagacctacactctgaactctgaccttatttatctaactactttcttaactctccaagtggatgtctcatgggcacctcagatttacctatccaaagcaaaattcatgatcccctatctcacccctctctgcttttgttccagccttctccatctta

SEQ ID NO: 349611 - DNA, 574 bp, Homo sapiens
tcaataaactcttcctgtttaatatttattgggcattctcaatgtgctaagtaacccacagaatacagattaggtcacagttctcaccttcaaaaaataagacataagcacctcataaagtctgtgtggaatgaggcaacttgccaaaccaaaaaaataaaaaataaaatttgaaaagtaatgaccactattttactctatcttttctaccttgattctttcttgctcagtctgaaggaataaatctgagacagagyggatggggcacatccagcctgtgttcagttaccaggccattgaagtagacccatcgatctgcaaagcgctgtactgaattgcctttgtggaagaaaagtttgatttgtgctttaagaggaaaaaatccatcagtttttaaaagctgtgatgcaaagttcaaagaaaagttactctagaatttcagctgtatttaattaaggcagtgacttgagtcaggaaaaactattcctttcagagttttaaaaacaattaagtttctaaataatcaattagaaattaaggccatgttaaatagggtggtcttctatggtgagaa

SEQ ID NO: 349612 - DNA, 582 bp, Homo sapiens
agttactgaaattttttgtttattttttcagaaaggagaaaatactgaaggttttgtggtaaaacattcggatcacagaagtgtatgagaaatagagagcaaagggctctcattttggcagaggagagagtacagtrtgactcattattaagtatataaaaataaattctatgagttgcagattcaccctatttccctttgtgtactcaggctgtatataggaataactggccactgctcgtttgattcaagaatgtaaccttgaaaatggggcccaatgcatggatcccaaaattcaagggccctttgaatctagagttaaggcaaagacaaatttgactttttatatgttcccaaatggccaaaagggactcctgagttgaacttcagcaaaatgcagtactttgctttttctgctgaaccatataacaaccagaaaaaaaaagtgatcaatttagcagaaaggagtgtgggtagtagtgtgtaatgcagcagttctcaagctttagtgtgcaaaggaatcacctagagggcttgttaaacacaggttactgggcaaactcccagagagtctaatttatt

SEQ ID NO: 349613 - DNA, 537 bp, Homo sapiens
gtacatctggttacaaatcacagaggtataattattaatcctgtcagatgttatcttatggacaggaaaaggcaaaagctaggatcattggacttatcttttctaaaaatgcagtgatttaggcaagagatgtgggaatctgtgctcggttctgcttctcatcctcaaggcattcttccggagggctgtgcttgtcactgagtcaggggcttctgaaggtaggctgacaggcagaatgagcaacattgctttttcacagcaagggctatgtggctggccagaagcagacatttgttactttatctcacaccctgcatcccttgaaagcttcaacatttgaatagctgtcaccagggccagctacataatttgtgggacctgttgcaaaatgaaaatatagagccccttttcaaaagagtgccattaaaggtattaacatataaaaccattcccttcttttgtctctctttctttactatcagggtggtatctyttatttgctgctaagtgccgtgctctaccctggtgcaggaaggt

SEQ ID NO: 349614 - DNA, 568 bp, Homo sapiens
cagttatttagtgtccagtgctaagctacaattgttttaatattgcttatctcaaggccagtacttgtttagctgctagagaaaaataaaaaccttgtggcagttagaacacagtttatttttctttaagtgcaggggtgagtgacttaacccttgcgtggaatggccttaggacctgtttataatttgatatcttattgccacagagtctgctctgtcagtcttaaaatctctattttgccatactttcaggtcagttgtgtcgaaaccataaaagggaggggcatagaatgaggcttttctgaccccctgttccatcatggacatgaactcaattttaaggactttctggggtccctttttccacagggagttmtttcagtcaggaaggggcttagcattttatttttagtttagtgcccacgtgtgtgcaggagcacatggccacaggctgctgcgatctccctcctgctagccactggctcaacactgctgtgcctggccagggatggggacatcaatctccccaaccctcagcagatgggtgaacaccaacagatggcaccct

SEQ ID NO: 349615 - DNA, 605 bp, Homo sapiens
ggtctataatctctaagtttttgtacctacatattgcttaaatgcagaaataacattcaggcaaattcgcatggtattttgaatattatcaacggaaaaaacttttgagcattgagagtagatagaattttttaatactccaaarttatctgtaattatataagatagagattcaaatagagtaacagaatttttagaaattttagaatttttgtaatttctgtaatgttcttattaaatttattcttttatactttattttttatcactgctatgaatataacatttagtgttttcatgaagtaaagagatttttgtgaatgtgtgtgatttatatatagtctctaaaagaacttcaaaaagaggttttctcatgaatatagacccttctagattaccttgagaagaaatatgaataaattgttctggcattttcatgtataaaaatttttttcataattctatagtcatgcctcataatacttagggaacataaatttttttactatgaggaatatttgaaaaactgggtttgtataatttaaaaatataaataaaggctaattttctaagcatcaaatattagcataaataacagttgtgag

SEQ ID NO: 349616 - DNA, 605 bp, Homo sapiens
ggtctataatctctaagtttttgtacctacatattgcttaaatgcagaaataacattcaggcaaattcgcatggtattttgaatattatcaacggaaaaaacttttgagcattgagagtagatagaattttttaatactccaaagttatctgtaattatataagatagagattcaaatagagtaacagaatttttagaaattttagaatttttgtaatttctgtaatgttcttattaaatttattcttttatactttattttttatcactgctatgaatataacatttagtgttttcatgaagtaaagagatttttgtgaatgtgtgtgatttatatatagtctctaaaagaacttcaaaaagagrttttctcatgaatatagacccttctagattaccttgagaagaaatatgaataaattgttctggcattttcatgtataaaaatttttttcataattctatagtcatgcctcataatacttagggaacataaatttttttactatgaggaatatttgaaaaactgggtttgtataatttaaaaatataaataaaggctaattttctaagcatcaaatattagcataaataacagttgtgag

SEQ ID NO: 349617 - DNA, 512 bp, Homo sapiens
atcccatccgttttccacactgacaccagaatgtcttttcaccaccaacacacraacacattcttcccacttacaacacataaataacttctcactgcacataggataacaactaaaattcttaagcctaaatatccatgcccctatactgaaaaagaaatccaatagttatacagagttgaggggttttggacgttgtacatgtgcactaattactgtaacagtaactgcatatacagaaaatccccactctcttagtgaattgacataataatttagttttccttcatgcaaagtatcaagcacatgatcctaattgaaagactattctactccttttggtgattcagagttttagactccttcatcttgtcactcaagcattttccacacaggtcttcctgaaatgtttgtgttctcatctgggttaagctggagaaagaatgttcacagagggttcaagatatgaggtgcttattcactagaaatgtaagtgatgtatgccactacca

SEQ ID NO: 349618 - DNA, 512 bp, Homo sapiens
atcccatccgttttccacactgacaccagaatgtcttttcaccaccaacacacaaacacattcttcccacttacaacacataaataacttctcactgcacataggataacaactaaaattcttaagcctaaatatccatgcccctatactgaaaaagaaatccaatagttatacagagttgaggggttttggacgttgtacatgtgcactaattactgtaacagtaactgcatatacagaaaatccccactctcttagtgaattgacataataatttagttttccttcatgcaaagtatcaagcacatgatcctaattgaaagactattctactccwtttggtgattcagagttttagactccttcatcttgtcactcaagcattttccacacaggtcttcctgaaatgtttgtgttctcatctgggttaagctggagaaagaatgttcacagagggttcaagatatgaggtgcttattcactagaaatgtaagtgatgtatgccactacca

SEQ ID NO: 349619 - DNA, 512 bp, Homo sapiens
atcccatccgttttccacactgacaccagaatgtcttttcaccaccaacacacaaacacattcttcccacttacaacacataaataacttctcactgcacataggataacaactaaaattcttaagcctaaatatccatgcccctatactgaaaaagaaatccaatagttatacagagttgaggggttttggacgttgtacatgtgcactaattactgtaacagtaactgcatatacagaaaatccccactctcttagtgaattgacataataatttagttttccttcatgcaaagtatcaagcacatgatcctaattgaaagactattctactccttttggtgattcagagttttagactccttcatcttgtcactcaagcattttccacacaggtcttcctgaaatgtttgtgttctcatctgggtyaagctggagaaagaatgttcacagagggttcaagatatgaggtgcttattcactagaaatgtaagtgatgtatgccactacca

SEQ ID NO: 349620 - DNA, 512 bp, Homo sapiens
atcccatccgttttccacactgacaccagaatgtcttttcaccaccaacacacaaacacattcttcccacttacaacacataaataacttctcactgcacataggataacaactaaaattcttaagcctaaatatccatgcccctatactgaaaaagaaatccaatagttatacagagttgaggggttttggacgttgtacatgtgcactaattactgtaacagtaactgcatatacagaaaatccccactctcttagtgaattgacataataatttagttttccttcatgcaaagtatcaagcacatgatcctaattgaaagactattctactccttttggtgattcagagttttagactccttcatcttgtcactcaagcattttccacacaggtcttcctgaaatgtttgtgttctcatctgggttaagctggagaaagaatgttcacagagggttcaagatatgaggtgcttattcacyagaaatgtaagtgatgtatgccactacca

SEQ ID NO: 349621 - DNA, 599 bp, Homo sapiens
aacttactttaatgggttagcagggaagccacttattctcttcacttttcctcattctgttcggggcctcccagtttgttgagcctttcatatctgaaacctcaatttccttcttaatctttggcagtgattctcaaactatggccttaggacccatttacactcttaaaaactaatgaggacactagagagcttttgttgctgtgggtcgtgtctatcattattagccatattagatgttaaaatagaatttgaaaatatgtattaattcacttaaaactargaataatcaattcattacaagttaacatggtaacattgtatgaagcataattattttttctaaaacaaaaacatttagtaggaagagtggcatttttaaacatttttgcaaatatttaatgtctacctttatagagggcagctggattcttatctctgtttcttcattcagtctattgcaataggttttggttgaaatacagggagaaatctgacctcatcagatacatagtttgaaaagggagtagtattttaatagtctttccagataattgtggatagcctcccttcacattacaccaaaactcagcaagtga

SEQ ID NO: 349622 - DNA, 595 bp, Homo sapiens
catttgtgtgtttgtttaaaatccttattttgtccgctaagctccatattactgcacaatgaaaaaaaaataagttctatgttttatatcttaaaaaaccaataagagaagacattaaaaattttttagctgggcgtggtggctcatgcctgtaatcccagcattttgggaggccaaggggggcagatcacctgaggttgggattttgagaccagcctaatcaacatggagaaaccccctctctactaaaaatacaaaattagcccaggtggtggtgcatgcctgtaatcccagctactcaggaggctgaggcaggagaatcacttgaacccaggaggcggaggttgcagtgagccgagatcgtgccactgcactccagcctgggggacaagagcaaaactccatctcaaaaaaaaaaaaattcaaattaatgaggttagcacmtaagtgggaatattagttcatgattccttcacttcctgccagtgaaatcttgaacagagtaagacattggcatactgaaaatgtcagtatggcacaggaaagccacagtgtcttctttgtgcctcttggcataattctgcactctgaacag

SEQ ID NO: 349623 - DNA, 635 bp, Homo sapiens
tatagctattatttagcctagcactgcaattgtattacatttctgattttgacaaaaccagatgtttaaaaagggacaaatatacaaatgaacagaataaatctacactgttctcttcaaccaatactcagcttcttcaggcttttctgtttttttcatatactttgaagtataacattcaatatgtcgaatgcttcccctgggcatattcatttccctgttttgaatcaaatgcatcactgaatacatttggcaatctagtctaggagaatgggtctctatcacacccccacacttggcattcctctggaggagcataaatgcacatttgttagccaatsaaatgtaacttttgttaatggctagcaatacaggcattgtattcttcaataatgtacatctaacactgaaaaagaaaatatgtttactgcttaagggaattattagagtatttggaatgagctcctaggagttttgccagttttcttctcttgagattggtggcttgtgaagtctgtgaagagaggactgtttccattagcttcatttctcctcgggagcaacaagatttctgtttggttcttactccaagaagaatcaaatcacagtttacctgaaaattatgagagtgaaga

SEQ ID NO: 349624 - DNA, 635 bp, Homo sapiens
tatagctattatttagcctagcactgcaattgtattacatttctgattttgacaaaaccagatgtttaaaaagggacaaatatacaaatgaacagaataaatctacactgttctcttcaaccaatactcagcttcttcaggcttttctgtttttttcatatactttgaagtataacattcaatatgtcgaatgcttcccctgggcatattcatttccctgttttgaatcaaatgcatcactgaatacatttggcaatctagtctaggagaatgggtctctatcacacccccacacttggcattcctctggaggagcataaatgcacatttgttagccaatcaaatgtaacttttgttaatggctagcaatacaggcattgtattcttcaataatgtacatctaacactgaaaaagaaaatatgtttactgcttaagggaattattagagtatttggaatgagctcctaggagttttgccagttttcttctcttgagattggtggcttgtgaagtctgtgaagagaggactgtttccattagcttcatttctcctcrggagcaacaagatttctgtttggttcttactccaagaagaatcaaatcacagtttacctgaaaattatgagagtgaaga

SEQ ID NO: 349625 - DNA, 573 bp, Homo sapiens
cttcctgctggtagtgatggcctatgaccgctatgtagccatatgcaatcccttgctttatccagtggtgatgtccaatagcctctgtactcagtttataggtatttcatattttattggttttctgcattcagcgattcatgtgggtttgttatttagattaactttctgcaggtccaatattatacattatttctactgtgaaattttacagctgttcaaaatttcttgcaccaatcctacagttaatatacttctgattttcatcttttcagcatttatacaagtcttcacttttatgactcttatcgtctcttactcctatattctctctgccatcctgaaaaagaagtctgagaagggtagaagcaaagccttctctacttgcagtgcccatctgctctctgtctctttgttctayggcaccctcttcttcatgtatgtgagttctaggtctggatcagctgcagatcaggccaaaatgtattctttattttacacaataataattcctttactaaatccttttatttacagcctaaggaacaaagaggttatagatgccctgagaag

SEQ ID NO: 349626 - DNA, 609 bp, Homo sapiens
gacagtttgtgatgcttggtacccttatataatcttccttttattagaatataatactatacagacggccatggacaaacatgttagcaagctgctactcttgsatcttgatgatagaagaaaggtatgtaatatttagagagaaagaaatgattaaaaatggtctagctacatggaattattttggtggctaatgaaagtagtatgaaaaggaaataaactgatgaaggtgctgtataaaatatggtgttgaattgttactggctaggaggtggaaaactcttggtactttggacaaccacacttgcctcactgaacaaactcgtcaagtttgttctgtttactcctgtttgggatatgtcaaagagtattgagaaaataaagtgggtaagcaaggtgcagaggatacctctgttaaggcaatagatttttaaaaagttaaaatctacttgcaaaagttcagcagagaaatctaaagatgtacacttggtctaacttgaatagctttggggtggtgaacagaatttccagggattaccagaagctggaacacaatatatagagataccagcaagaggcagagagtgcaacaataaggaccaaggtaaa

SEQ ID NO: 349627 - DNA, 609 bp, Homo sapiens
gacagtttgtgatgcttggtacccttatataatcttccttttattagaatataatactatacagacggccatggacaaacatgttagcaagctgctactcttgcatcttgatgatagaagaaaggtatgtaatatttagagagaaagaaatgattaaaaatggtctagctacatggaattattttggtggctaatgaaagtagtatgaaaaggaaataaactgatgaaggtgctgtrtaaaatatggtgttgaattgttactggctaggaggtggaaaactcttggtactttggacaaccacacttgcctcactgaacaaactcgtcaagtttgttctgtttactcctgtttgggatatgtcaaagagtattgagaaaataaagtgggtaagcaaggtgcagaggatacctctgttaaggcaatagatttttaaaaagttaaaatctacttgcaaaagttcagcagagaaatctaaagatgtacacttggtctaacttgaatagctttggggtggtgaacagaatttccagggattaccagaagctggaacacaatatatagagataccagcaagaggcagagagtgcaacaataaggaccaaggtaaa

SEQ ID NO: 349628 - DNA, 609 bp, Homo sapiens
gacagtttgtgatgcttggtacccttatataatcttccttttattagaatataatactatacagacggccatggacaaacatgttagcaagctgctactcttgcatcttgatgatagaagaaaggtatgtaatatttagagagaaagaaatgattaaaaatggtctagctacatggaattattttggtggctaatgaaagtagtatgaaaaggaaataaactgatgaaggtgctgtataaaatatggtgttgaattgttactggctaggaggtggaaaactcttggtactttggacaaccacacttgcctcactgaacaaactcgtcaagtttgttctgtttactcctgtttgggatatgtcaaagagtattgagaaaataaagtgggtaagcaaggtgcagaggatacctctgttaaggcaatagatttttaaaaagttaaaatctacttgcaaaakttcagcagagaaatctaaagatgtacacttggtctaacttgaatagctttggggtggtgaacagaatttccagggattaccagaagctggaacacaatatatagagataccagcaagaggcagagagtgcaacaataaggaccaaggtaaa

SEQ ID NO: 349629 - DNA, 569 bp, Homo sapiens
tctgatgatctctgtgccatraatggcaaaagtcattcaagaagtatagcaaactaaaggtgactggctgctatagagctggccaaggatttttattttcattccaatttcagaagaaagtaaaacaatttgcttcttttggtaaagcctgcaatacatatttaagataattactttttccagtatagacatgtaccttggttaggtaagatctagacttgattcctataagagaaaattagtttattacattgataatattatgataatttatctctcagaggaactaagaaattaaagacttaagaactgtggtgacacatatgactaacccaaagtggctaatcaacctcattaaactatagggccttgaacaatctgtaaaactttagggaataattttgactggaatcacaatagacattctaaacacaacggaataaattgctgtctttgcagccctgatggataagaagaggactatctgcatgttggtgagtgcatttattgcacttgaaccttttatgaagccccatattgagttactcaaaagaaatctgagtttcaat

SEQ ID NO: 349630 - DNA, 569 bp, Homo sapiens
tctgatgatctctgtgccatgaatggcaaaagtcattcaagaagtatagcaaactaaaggtgactggctgctatagagctggccaaggatttttattttcattccaatttcagaagaaagtaaaacaatttgcttcttttggtaaagcctgcaatacatatttaagataattactttttccagtatagacatgtaccttggttaggtaagatctagacttgattcctataagagaaaattagtttattacattgataatattatgataatttatctctcagaggaactaagaaattaaagacttaagaactgtggtgacacatatgactaacccaaagtggctaatcaacctcattaaactatagggccttgaacaatctgtaaaactttagggaataattttgactggaatcacaatagacattctaaacacaacggaataaattgctgtctttgcagccctgatggataagaagaggactatctgcatgttggtgagtgcatttattkcacttgaaccttttatgaagccccatattgagttactcaaaagaaatctgagtttcaat

SEQ ID NO: 349631 - DNA, 498 bp, Homo sapiens
aaatggaagtataagacatcgctttttgtcacttatctctgactaaaatcttctaatacttctttttggctatgcagagtctgcatttctgagtgtagcataaggattcataaaggaaccaagcaaattcttcatccctgcattaaatatgtaatttactagtttctataacttggctcctattcttcctttcttcatcaaggaaaatgcttyatctttataattttctaaattgtgtccattacaattacaatacagcatgaattctatctcttctaagaccatcccaaaagtgatcagttgcctctttgaacttaattttgttatttatgttaatttgttaatttagttaatcattcatgcaattactgaagaaaagttatgatacatttaaccacaatttttattttcaaggaattcagcctaggggaggaaatagatttataaaaatagtgactgtaacagagattaaaaatgctggaaaagaactaagtacag

SEQ ID NO: 349632 - DNA, 498 bp, Homo sapiens
aaatggaagtataagacatcgctttttgtcacttatctctgactaaaatcttctaatacttctttttggctatgcagagtctgcatttctgagtgtagcataaggattcataaaggaaccaagcaaattcttcatccctgcattaaatatgtaatttactagtttctataacttggctcctattcttcctttcttcatcaaggaaaatgctttatctttataattttctaaattgtgtccattacaattacaatacagcatgaattctatctcttctaagaccatcccaaaagtgatcagttgcctctttgarcttaattttgttatttatgttaatttgttaatttagttaatcattcatgcaattactgaagaaaagttatgatacatttaaccacaatttttattttcaaggaattcagcctaggggaggaaatagatttataaaaatagtgactgtaacagagattaaaaatgctggaaaagaactaagtacag

SEQ ID NO: 349633 - DNA, 500 bp, Homo sapiens
cattcttacacctgtgcatcctcatagcttagttctcacttataaataagaatatatgatgttttgccttccmttcctgagttacctcacttagaataatggtttccaacttccaattcaggttgctgaaaatgccatcattttttcccctttttgtggttgagtagtattcaatagtatacattttctttattccttgattgatgggcatttgggctggtttcatatttttacgattgctaattgtgctgctataaacgtgtgtgcaagtgtcttttttatataatgacttctttccctctgggtagatatgcagcagtgaggttgctggatcaaatggtagattgacttttagttctttaaggaatctccatactgttttccatagtgattgtaccagtttacaatcccaccagcagtgcataagtgttcccttttcaccacatccatgccaacatctaattttttttatttttaaattacggccattcttgcaggag

SEQ ID NO: 349634 - DNA, 500 bp, Homo sapiens
cattcttacacctgtgcatcctcatagcttagttctcacttataaataagaatatatgatgttttgccttccattcctgagttacytcacttagaataatggtttccaacttccaattcaggttgctgaaaatgccatcattttttcccctttttgtggttgagtagtattcaatagtatacattttctttattccttgattgatgggcatttgggctggtttcatatttttacgattgctaattgtgctgctataaacgtgtgtgcaagtgtcttttttatataatgacttctttccctctgggtagatatgcagcagtgaggttgctggatcaaatggtagattgacttttagttctttaaggaatctccatactgttttccatagtgattgtaccagtttacaatcccaccagcagtgcataagtgttcccttttcaccacatccatgccaacatctaattttttttatttttaaattacggccattcttgcaggag

SEQ ID NO: 349635 - DNA, 500 bp, Homo sapiens
cattcttacacctgtgcatcctcatagcttagttctcacttataaataagaatatatgatgttttgccttccattcctgagttacctcacttagaataatggtttccaacttccaattcaggttgctgaaaatgccatcattttttcccctttttgtggttgagtagtattcaatagtatacattttctttattccttgattgatgggcatttgggctggtttcatatttttaygattgctaattgtgctgctataaacgtgtgtgcaagtgtcttttttatataatgacttctttccctctgggtagatatgcagcagtgaggttgctggatcaaatggtagattgacttttagttctttaaggaatctccatactgttttccatagtgattgtaccagtttacaatcccaccagcagtgcataagtgttcccttttcaccacatccatgccaacatctaattttttttatttttaaattacggccattcttgcaggag

SEQ ID NO: 349636 - DNA, 476 bp, Homo sapiens
tcttttacatacttggttaggtatattcctaagtattttattttatttttctgcagctattgtgaaaggggttgagttcttgatttgattctcagcttggtcactgttggtgtatagcagagctactgatttgtgtacattaattttgtatcctgaaactttgcttaatgcatttaccagttctaggagctttttggatgagtctttaaggttttcttggtgtatgattgtatcatcagcaaacagcaatggtttgacttcttgtttactaatttggatgccctttatttctttctcttgtgtgattgctctggctaggacttccagtactacrttgaatagaagtggtgaaagtgggcatccttgtcttgttccaattctcagggggaatgctttcaacttttccccattcattataatgttggctgtgggtttgtcatagatggcttttattatgttaaggtatgtcccttcta

SEQ ID NO: 349637 - DNA, 516 bp, Homo sapiens
tctgtcttctagttatactaaaggtgttttggagggatatgtttgttcttgttcatcaataaagtttttgctttttgttttttttaatttaaggatgtgtggagagatttggattttgccaatttccattatcttatggaaaccatatggatacaaatgattaatttgattttaagagccaccattatttactttttaataaaatagggtacaaaaataaatatctactgagtccatcattttaaaatctctggattagaagcatagtatgcaggtgagtcaaatccatttaaaaagcttgggatagaaatgactattttmttccaaaaggtaataatggttgtaataattttgacctacagagaccttcatattttaataaagattctttacagcaatatagggaccataaagacctccttacctccttgattatctggacagaaatggtgttaagtcctggatttttttttttaatcatttctcacatctttgtcaactatgatagatgttatt

SEQ ID NO: 349638 - DNA, 468 bp, Homo sapiens
ggctgataatgagagactatgccaagatttcagttatacagcattttgtttaattcatatgaagaagcctttcgacacttattaatcctaattcaaatcaggttcttgtcagctggagattatcagtttcttctttcttcctgaactccattagtgtcaggactcctcactcaattgtgatgtcaacgtcagaatctctcacccaattgtgatgtgaattgatggyattagtccactaactcccaaaatatatttggaaatgaccagttcccaatctgtaatattcatactttcaagtttcttcttattattattggtttcagaaaccatctcaatcctttgagtcaccagtgtgactttctccaaagtttcaaaaatgaaccacttgagaaatacttccaagaaataagaaagtcaaacaatgtttaaaatcagtatagctgcaatttgctctgtcaagtttaagaa

SEQ ID NO: 349639 - DNA, 457 bp, Homo sapiens
gaaatcatgacaggtttattagtctttctgcaactttcaacaaaagaacagagagaaraaaaataacataataaaaatatattacacatattctagaccattgcacattaaaaaaatccctatgatgttgctttacttgatcttgatacattttgttcactccctaatattttacacacgtctcatatttttcataaatcttctctaagatatataggagggaaaggcataatatttattctaaactcttctcatctcatgctcagatgagtggttacctaattttttttgcaaaacatcccacatccagcatcccacatccaataaattgagaaaaatttatttaacaaaacagagaaacttggtaagaacaatggaatacaatgtcatttgagctggctacttcatgcatcccctcatacacatttgtgttgcagaagacctattccaacgggct

SEQ ID NO: 349640 - DNA, 349 bp, Homo sapiens
acattaaaaaaatccctatgatgttgctttacttgatcttgatacattttgttcactccctaatattttacacacgtctcatatttttcataaatcttctctaagatatataggagggaaaggcataatatttattctaaactcttctcatctcatgctcagatgagtggttacctaattttttttgcaaaacatcccacatccagcatcccacatccaataaattgagaaaaatttatttaacaaaacagagaaacttggtaagaayaatggaatacaatgtcatttgagctggctacttcatgcatcccctcatacacatttgtgttgcagaagacctattccaacg

SEQ ID NO: 349641 - DNA, 594 bp, Homo sapiens
tagagaagacaaatttctcacaaagtttcataaataatatagtttaatagaagaaggaagtaaatgggaaaacattataataaaaatgataacacagctttgaaatttattttatcatatagagagtttagagctgagayacaagatatgcagattgttatctacatgatttgtggttttgcagaatgtaaataattgtagcctttgagttagtggctgtctataatacctagatttttaaatatcatggaatcatgagattaaaagctaaagtcaataaatacagctagcattgtctcctttactccaacttgaaggtatttctttcatcttactcttaaggaaaaaattcccaaaccttactacttcttggcttcattatactgaattcatgaaatgagactagaaatatctattatttggtgacttggattgcaaagaaagtgaagccattttatttaggacaaaatctccactttggggagaaaattatatttccttaatataacctattttcagcaaatatactccagtgaaactgttaggtttggtgtattataacagggatccttatgggtgtttagttttttaaac

SEQ ID NO: 349642 - DNA, 592 bp, Homo sapiens
agtgtatgaaaaaactatgaaaacaactatacrtggatctatcttacataatttccagatatttttgactatttcaaaaaatcattcctgctctcaatagttgtctattaccaaatatttaaatgcaaattatcatgaaacataaaagatcattaatagatattttctaagaaaaatttacaggttatttattactaattttacattagaactatcaatgccaaatattccttactaaaggtaaaaatagcattttattattcttatttctattaacatgcaggtaatcatcattttgtacacatttaccccaaaacatttgggaagctctacgctggaaattctttcaaagatagtttataagttatagaaaaaaattaatctttatctatgttcatatcatatttatatttatacgcaaaaaattaaaaatataaatggaactatgtaatttacatttctttctattttgatttttttacttaataatgcattgagaaaatgctccgatttttaacaggtacagctcaaatccattttctttatatctgaagactattccacagtcagactgtaccataatttattcagt

SEQ ID NO: 349643 - DNA, 592 bp, Homo sapiens
agtgtatgaaaaaactatgaaaacaactatacgtggatctatcttacataatttccagatatttttgactatttcaaaaaatcattcctgctctcaatagttgtctattaccaaatatttaaatgcaaattatcatgaaacataaaagatcattaatagatattttctaagaaaaatttacaggttatttattactaattttacattagaactatcaatgccaaatattccttactaaaggtaaaaatagcattttattattcttatttctattaacatgcaggtaatcatcattttgtacacatttaccccaaaacatttgggaagctctacgctgraaattctttcaaagatagtttataagttatagaaaaaaattaatctttatctatgttcatatcatatttatatttatacgcaaaaaattaaaaatataaatggaactatgtaatttacatttctttctattttgatttttttacttaataatgcattgagaaaatgctccgatttttaacaggtacagctcaaatccattttctttatatctgaagactattccacagtcagactgtaccataatttattcagt

SEQ ID NO: 349644 - DNA, 536 bp, Homo sapiens
gaaaatttggctttaaacttccttgtagtcaatgggagaggtaaacctgaacaaaatgtgtgtgtggatgtcaccacaaatggtgcttttaattagcgcagttaatattaccaacgtgagtttatataatttcaataggaagcaaagaaacatcagttggttacttttttgcagattcatcatgcacaaattatggtacttgtgagactttaaaattgtaaaactagcttatggatgctgttttctttctcctttgaatccccagctgtctccatctcaggtcaaaatccaatgayctagtacatactctgaatcttttcattcagttaaatgtttttttcatttgttatagctaataaatggtttattggttcttttatgccattattagtcatgtattgaagactttccctcttgcagaaacgccacaatacaatatattgtggagacagatctttagaggccatcccacaaaagataaccactattcatccctgaactgcgggtttggaagttaaaggggatctttgagtcaa

SEQ ID NO: 349645 - DNA, 536 bp, Homo sapiens
gaaaatttggctttaaacttccttgtagtcaatgggagaggtaaacctgaacaaaatgtgtgtgtggatgtcaccacaaatggtgcttttaattagcgcagttaatattaccaacgtgagtttatataatttcaataggaagcaaagaaacatcagttggttacttttttgcagattcatcatgcacaaattatggtacttgtgagactttaaaattgtaaaactagcttatggatgctgttttctttctcctttgaatccccagctgtctccatctcaggtcaaaatccaatgacctagtacatactctgaatcttttcattcagttaaatgtttttttcatttgttatagctaataaatggtttattggttcttttatgccrttattagtcatgtattgaagactttccctcttgcagaaacgccacaatacaatatattgtggagacagatctttagaggccatcccacaaaagataaccactattcatccctgaactgcgggtttggaagttaaaggggatctttgagtcaa

SEQ ID NO: 349646 - DNA, 581 bp, Homo sapiens
cacattacacaggcagtgagttcagataatgagacataaagttttgtggagaacgttatctattatccatccttgagtatctttctctgatcacgtgtaaaacaatacatagagttcatgtttaagcatctacacctaaggctttaaatcctaggccaaatgacccacttagccactttttttcattttactgatgacaaaatggaagcccaaagggggaactgctttatccagcattgtttcactgagtggcagagcccgggctggagccagaactctgaatgctagaccaatgttttctcatctgagtgcgttctctctctttgctacaatgtttcagtaagaggagatttttctgttgaaatttcattgaagggaagagataatcctgggccaatagaaattyactccttcaatgaaatattttattttaaaagttacctgaaagtctgtggttattctcttatccctcctgcccttgtttaagttatatattgatgaataacagagcaccccaaaacttagtggcttaaaaagataataatttattattattcacagtacttacattaggaatgcta

SEQ ID NO: 349647 - DNA, 602 bp, Homo sapiens
cctggcctcaactgatctgcccacctcagcctcccaaactgggagcattacaggcatgagcyaccacgccccgccaaattaagggataattaatagaaagataatgctactttctggctaaatgggaggtttagaagcactattctagctctcaacagagagaagagaactttgaagggacattaaactaagaaaaggttccacattggtctcatccattgttcaaagattaggcataatggtatgtttaaaagactttaaaatttgatatgacatccagtcaaagaggagagaattactcttattattatgtatgtgtctggctgaaaagaaggacgggttaagtgtattattctgataaaaaccaatgcactgggcaatgaaattatttattttcaagtccagtctatgacttgatacttcctatcacatgctgtgatgcagaagaagacacaggattaattttaaattacatgcacctgcaatatggtataatggtttagctcatggacacaggagtcatatcgtccaaataccagatctcctagtcacccggaacaagtgtcttaatctctctaagcccagactgctcacttgtcaaa

SEQ ID NO: 349648 - DNA, 488 bp, Homo sapiens
gaaaaaaccaacgcacttggctgctggatgatcactgtggagggtttgcctgtagaatggtgaagactaaggccagggatcaaaaatactgcagagaacgaatgggagtctgggggttccaaagacataagtgtaagcagctggtttgtttacacatagaatcatttattcattcaacaaaatgaatgagtcaaaggaaaaaagaacttgggagatggcagaatcaagtgaagctgttgcaagtgacaagagacctgtgcatatctacagcaaaagaaaaccctgagagggtaaccagagatgctgaaggcataaggcacacttgaggagacacaaggggaatgaatgtagccgtgggtagatgcggagggagctagcatctgatacagtcataacctaacccaggcgttgcaaackcaaattttaggcaggtaaagtaaacttgggaggtgggctggccaggtgacatttaacagggcatggtgggg

SEQ ID NO: 349649 - DNA, 611 bp, Homo sapiens
catctactatactaaatatttatttgcttgtctccctccaccacaatgctggcttcccgagggcaagaacttttattgttcttttctgyacccttagcacccaggagagtgcctgggaaatatcatttaaataaatgaatgaataaatggctttcctgaccttctaaactaggttaggtatttccaccttacattcctagtgcacacaccttcttcatttcattctttgcatcattagtcatacttgttatttgataatggttcagaagtataaattccttaaagtcggagatcaattctatcttgtttaccaatgattaactagctgttaacagaactagttaaacacaatgtgagtgtgcaataaatactgaataattttaaagactttttcttggacagttggtgatgatgacaccactgaccggggcagaaactgaaggaagtgcatgtttgacaagaggaagatgaagcctggagacaggcataccacaatgctgacccagagcctaagaaatatcatggccctggagagataggggtttaatgtcatgtaacactgctgatatgtaaagatttgggaaagtctgagggtttacagggaggatata

SEQ ID NO: 349650 - DNA, 563 bp, Homo sapiens
ctgcttagcctgagtaacctttcaccctcgaggaagtaagaatgtgtacttcctaggggcaagctctctccaaagagagccaaaaaaggggtagagctatgtgcactcatacttcttctttaacaatctctttagttaaataattcatgatttcttcctatggaaaaagtaagagaggtggtgtagggaataacagaggctttttctcaatacttcctattttgcaggatacaaaggaatttggatacaggaaggaaattgttcccttctataatatacaaccccatgtattaatatattaataaatgtactaaaaygataaacagagcttacaggcagacatgatgaaatcctctaattctttgctacctactgaaacttttggctatgactcaagcctggcacataataaagaggtggtagaaaccattgtgtcatgctgccttttgctttcaagctgatacttacttatcaaattttccctgataatcattgtcatcatggtactgtaccttcagtaatgttgtaggcatagtcatgcttagtgttcaggggcaaagcag

SEQ ID NO: 349651 - DNA, 600 bp, Homo sapiens
tatgagatatattaaaagactcactatacatcctgagaagagtattggttttatattttcaaaattactagccctctagagaaaattctcagtgtcttaaagatactgtgtccttttccatctgacctaagaccctctactaatactcgaagctcctgrcagctgggatattcctctcattaattataaaagaatacctaatctattaggaaatcatttcaaaaatattatttgcttcctacgtttagaaaaaataaaagtttaggggtattccaagtttgcccccagttatttttgtcttactgaattttacttatttgtgggtgataatatttagttatgttctttcttccaaagacatacacacattttatatgtttgtgtgtataggaaagtttaatcagaggcaaggaaaccagattcaaagtacttggaattttacgaaaaaattctaaatgaagatacaaatcctgtgtttcacaatgtactctactgatgaaatttattatattcccagaatagatatttatggtagacaataagtaaagactggtaatttatgggactataacttggcttctgattagttatttttattct

SEQ ID NO: 349652 - DNA, 574 bp, Homo sapiens
gttatgtatatgtttgctggtattattgagaaaaattaaattacaggtaaaactctaaatttctgaaagatcaaaactatggaaccatggaaacagtttactggaatagctccttcaaagaggacttgctgccttacagtcaccacacacgatatgcaccattcctcagtcatgctccaagtcatgtcaaacatttacaccattcatttggtccctgcaggcgtttgagctttcagaaccctggtcaagcactcaagttcagagtctattactaacagaacatgtgcttatatgtaatgctgaggagtttaaacattttcataaggacaatagagagctataaaaatgattgtagttcagggaataacaccattttatctatgttacgttaatackaggtttaaccatatgaacttgtctctttttttactagtcaaaaacagccaaatatcagcaattttctttggttgtaactaatgcaagcatcattttagttacatgtagtaaatgtactagaaaagagaaatgaggaaaaattgaaggtagaaaaactagataagaataaattataatg

SEQ ID NO: 349653 - DNA, 621 bp, Homo sapiens
ttttctttggttgtaactaatgcaagcatcattttagttacatgtagtaaatgtactagaaaagagaaatgaggaaaaattgaaggtagaaaaactagataagaataaattataatgactgatacaaaataacgacagcccagatttggctaacgtgagataatggcagtggaaatgaagcaacaccataattcccttagacagctttcctactacctagaatttcrtacatcatattacataaaattatctgaagaacagtcaaagtctagaggagaagataagttttgccttcatccttgtagctactgaaaagtacaaataacagcaataaatcacattattttaaaaactgaattcaaatgacacttttcccaaggatgtccagatatttataagccattagctcataaatcagagggcatcttacatacattagctatttgcctactctctgcctcatttttcttatctggaagagaaataatagcagctacttaaaaatatattgtaaggaatgaatgaattaataaataaaaagtggttcaaacattgcttagcatatagcaaacacccaataaaagttgaccttatgattattaccattatttttagcaattt

SEQ ID NO: 349654 - DNA, 621 bp, Homo sapiens
ttttctttggttgtaactaatgcaagcatcattttagttacatgtagtaaatgtactagaaaagagaaatgaggaaaaattgaaggtagaaaaactagataagaataaattataatgactgatacaaaataacgacagcccagatttggctaacgtgagataatggcagtggaaatgaagcaacaccataattcccttagacagctttcctactacctagaatttcatacatcatattacataaaattatctgaagaacagtcaaagtctagaggagaagataagttttgccttcatccttgtagctactgaaaagtacaaataacagcaataaatcacattattttaaaaactgaattcaaatgacacttttcccaaggatgtccagatatttataagccattagctcataaatsagagggcatcttacatacattagctatttgcctactctctgcctcatttttcttatctggaagagaaataatagcagctacttaaaaatatattgtaaggaatgaatgaattaataaataaaaagtggttcaaacattgcttagcatatagcaaacacccaataaaagttgaccttatgattattaccattatttttagcaattt

SEQ ID NO: 349655 - DNA, 621 bp, Homo sapiens
ttttctttggttgtaactaatgcaagcatcattttagttacatgtagtaaatgtactagaaaagagaaatgaggaaaaattgaaggtagaaaaactagataagaataaattataatgactgatacaaaataacgacagcccagatttggctaacgtgagataatggcagtggaaatgaagcaacaccataattcccttagacagctttcctactacctagaatttcatacatcatattacataaaattatctgaagaacagtcaaagtctagaggagaagataagttttgccttcatccttgtagctactgaaaagtacaaataacagcaataaatcacattattttaaaaactgaattcaaatgacacttttcccaaggatgtccagatatttataagccattagctcataaatcagagggcatcttacatacattagctatttgccyactctctgcctcatttttcttatctggaagagaaataatagcagctacttaaaaatatattgtaaggaatgaatgaattaataaataaaaagtggttcaaacattgcttagcatatagcaaacacccaataaaagttgaccttatgattattaccattatttttagcaattt

SEQ ID NO: 349656 - DNA, 609 bp, Homo sapiens
acaggtctaattggcttggcattttgcataagcctattgctgaaataaccagttaccaattagacattatttggattggctgagcttcactgatattccttccttaggctgactgagtcatttgaatgtacgctctattagggctagcacagagattctagaatcatacctgacagttaagaagtgctcagtatataactgttaaaagtttgcagttccggctatggcagataatcttgtatcagaccaattcaactaccaaggaaaactatgaggactggaaaaatattgattgaaaatttaatattttcacacatacgcacacaccccagagagttttctaagcatcttcagtggccaagatyccatagagaagagaaagacaaagaggtaagacctatatttgacatcatttttttcaagttatttgccaattcacaagtagaagttaataggccaagaaattaaggtaatctttcagaagtcttataaaactgggaagacagatgttggagttcaaaatctactatggtgaagaaacccagtaaacacctcagactttcagttgatacccctgaatagctacaccttaaaataggtgtacagtag

SEQ ID NO: 349657 - DNA, 537 bp, Homo sapiens
gactcacagttccagagggctgtggaggcctcgggaaacttataatcatggtggactgggaagcaaacacatctttcttcacatggcaggacaaaggagaagtgccaagcaaagaaggaaaagccccttataaaccatcagatctcgtgagaactcactatcaggaggacagcatgggggtagccgcccccatgattcaattacctcccactgggtgcctcctaygacatgtggggattataggaactacaattcaagatgatatttgggtaaggacacagagtcaaaccacatcacggagtaactagcctaatacgttctttaaagttattaatacagtatttaaggttctgttttgaagatgccctgccgctatattccctatgttcaaaattgtgtaagtctctctcggctaaggatgagaatagaaacctagggaagaagaaattggccaagttaccattagcatcaaccagcattatctgcacactcagagagggcatggccctggactgttgaagaagcaatttaaagcag

SEQ ID NO: 349658 - DNA, 550 bp, Homo sapiens
taccctcttccaaaacctttacctctactctttatggtaaaggtcttttggagttccctgggaatctttctaaggtgaatcaggcattttaagggattattaaaagttctgaagccttcctccagagccaaatgtacactttttctctgaaccacatctggcccttgtgtcagttccaggagaaatgatcaggaaaattagagatgataatgacatattagcttatctcttccgttcccctggtttgctatggagaaaggatgacattggaaaggaactcctgcccccctgttcctcctgtggctctcactattaaactctggaatgtgcctcttatttctcttcaaaaatgatttctgaaatataagtgttayaaaaaacacatttagaaggaaggggaaaaaatacctgagaaggagggggaaaaaagaagcagcaagaaggaaggaccaaccaaagggggagtcaagaaaatgcaacacttggggcattgtaacaaacagtctcacattattttattgaatcctttttttgaacttttattctaggg

SEQ ID NO: 349659 - DNA, 553 bp, Homo sapiens
tttgtaagggcactgggtctatcagcttttaatatttaactttaccactcagtcagtgctaaaacagttgttacagaggcctgcattagtgcgacatgacctgctacactcattttttttcatagaattgttacaagaagtgacaaatacrtaaatcacgaagcatttattaagtaatcaaaaccattgactagtattactgtttaaaaaggttgtacttctaaggctgtaagagagaaatttatctcctttatcttcatttcttcacctaatttttatttaactttcagttctcagctcagctatcatttcctctgcaatgtgcatcacctaatatcctttaagattttttttttttcttttgagatggagtctcgctctgtcgcccaggctggagtgcagtggtgcaatctcagctcactgaaagcttcgcctcctgggttcacgccaattctcctgcctcagcctcctgagtagctgggactacaggcacccgccaccacgcctggctaatttttttttttttgtatttttagtagagatggggtttcac

SEQ ID NO: 349660 - DNA, 553 bp, Homo sapiens
tttgtaagggcactgggtctatcagcttttaatatttaactttaccactcagtcagtgctaaaacagttgttacagaggcctgcattagtgcgacatgacctgctacactcattttttttcatagaattgttacaagaagtgacaaatacgtaaatcacgaagcatttattaagtaatcaaaaccattgactagtattactgtttaaaaaggttgtacttctaaggctgtaagagagaaatttatctcctttatcttcatttcttcacctaatttttatttaactttcagttctcagctcagctatcatttcctctgcaatgtgcatcacctaatatcctttaagattttttttttttcttttgagatggagtctcgctctgtcgcccaggctggagtgcagtggtgcaatctcagctcactgmaagcttcgcctcctgggttcacgccaattctcctgcctcagcctcctgagtagctgggactacaggcacccgccaccacgcctggctaatttttttttttttgtatttttagtagagatggggtttcac

SEQ ID NO: 349661 - DNA, 537 bp, Homo sapiens
aagttgaaataacttgcaaaatcgggggacagagtactgggccaaagacaatagacaatgtatgtatttcctaatcaggcatgcagtagagataggacatgctataaagatggcccataacactgcctgattacatgcacccaccactcatgttaattgtagagcaatctatatcaccactatcagggttagtggggcagcaatagccctactacgaggccagactttctcaagcatgtgcagaactcagtgtgaactggaattctgacttgtatttttctcttttcttttggaaaagacagtcacraagcagtttctatgacttttgtcattcccatatcctactcaaaaggatttaatagactggttatgcaaatactaaacattggattaaaatatatgagaagtgcttttcagtcatttctataacattcattgttggtgttttaaaattcttctctctgaagaattcaagccacattgcaggcattacctaattcaacctgccagtgctgagggagatatcaggttagtatc

SEQ ID NO: 349662 - DNA, 667 bp, Homo sapiens
gttcaatcagtggtccaagaaaatagaaatgttcacatggcaatttcaactactatttggtctaagtattactgtgtgtctgagtggagatgtcattttcttggtcactaaaatctataggacaccagggtttagatttactggtatgaaaaacaaaatttgaaagtgattgattcttagacctgtataatttggctatggaagaaacagcaccataagtgggtcactggttcaaagtraagacagctgttttttcgtttttttgttttttgatttgttttgtttgagacggagtctcgctctgtcgcccaggctggagtgcagtggtgcgatctcggctcactgcaagctccgcctcccaggttcacgccattctcctgcctcagcctcccgagtagccgggactacaggcgcccgcccaccacgcccgggttaattttttgtattttcagtagagatgggggttcaccgtgttagccaggatggtctcgatctcctgacctcatgatccgcctgcctcggcctcccaaagtgctgggattacaggtgtgagccaccgcacccggccgacagctgtgtttttagatgataggctacctaataattccagtgagccccaaaggacatcagcttatttcctccccactttcactgtgaagtgataccc

SEQ ID NO: 349663 - DNA, 667 bp, Homo sapiens
gttcaatcagtggtccaagaaaatagaaatgttcacatggcaatttcaactactatttggtctaagtattactgtgtgtctgagtggagatgtcattttcttggtcactaaaatctataggacaccagggtttagatttactggtatgaaaaacaaaatttgaaagtgattgattcttagacctgtataatttggctatggaagaaacagcaccataagtgggtcactggttcaaagtaaagacagctgttttttcgtttttttgttttttgatttgttttgtttgagacggagtctcgctctgtcgcycaggctggagtgcagtggtgcgatctcggctcactgcaagctccgcctcccaggttcacgccattctcctgcctcagcctcccgagtagccgggactacaggcgcccgcccaccacgcccgggttaattttttgtattttcagtagagatgggggttcaccgtgttagccaggatggtctcgatctcctgacctcatgatccgcctgcctcggcctcccaaagtgctgggattacaggtgtgagccaccgcacccggccgacagctgtgtttttagatgataggctacctaataattccagtgagccccaaaggacatcagcttatttcctccccactttcactgtgaagtgataccc

SEQ ID NO: 349664 - DNA, 667 bp, Homo sapiens
gttcaatcagtggtccaagaaaatagaaatgttcacatggcaatttcaactactatttggtctaagtattactgtgtgtctgagtggagatgtcattttcttggtcactaaaatctataggacaccagggtttagatttactggtatgaaaaacaaaatttgaaagtgattgattcttagacctgtataatttggctatggaagaaacagcaccataagtgggtcactggttcaaagtaaagacagctgttttttcgtttttttgttttttgatttgttttgtttgagacggagtctcgctctgtcgcccaggctggagtgcagtggygcgatctcggctcactgcaagctccgcctcccaggttcacgccattctcctgcctcagcctcccgagtagccgggactacaggcgcccgcccaccacgcccgggttaattttttgtattttcagtagagatgggggttcaccgtgttagccaggatggtctcgatctcctgacctcatgatccgcctgcctcggcctcccaaagtgctgggattacaggtgtgagccaccgcacccggccgacagctgtgtttttagatgataggctacctaataattccagtgagccccaaaggacatcagcttatttcctccccactttcactgtgaagtgataccc

SEQ ID NO: 349665 - DNA, 667 bp, Homo sapiens
gttcaatcagtggtccaagaaaatagaaatgttcacatggcaatttcaactactatttggtctaagtattactgtgtgtctgagtggagatgtcattttcttggtcactaaaatctataggacaccagggtttagatttactggtatgaaaaacaaaatttgaaagtgattgattcttagacctgtataatttggctatggaagaaacagcaccataagtgggtcactggttcaaagtaaagacagctgttttttcgtttttttgttttttgatttgttttgtttgagacggagtctcgctctgtcgcccaggctggagtgcagtggtgygatctcggctcactgcaagctccgcctcccaggttcacgccattctcctgcctcagcctcccgagtagccgggactacaggcgcccgcccaccacgcccgggttaattttttgtattttcagtagagatgggggttcaccgtgttagccaggatggtctcgatctcctgacctcatgatccgcctgcctcggcctcccaaagtgctgggattacaggtgtgagccaccgcacccggccgacagctgtgtttttagatgataggctacctaataattccagtgagccccaaaggacatcagcttatttcctccccactttcactgtgaagtgataccc

SEQ ID NO: 349666 - DNA, 567 bp, Homo sapiens
gtccaataattcaaacttattgtgtttttcaaatattcagtatcttcactattttttggttgtttattcaattgagagagttgtattggaactttccattttaatgatggatttgtccattcttccttcatcaaaatttatttgcataatttgagatttattatatgaattgggttaatgttatcatatcttcttagagaattgaaccatctacttttatgtagtaatttgttcaactcataaaagcatttttaaaatcttttttgtctgttaatattatattattgtgctttttgtttagagttgtctggtgtctttttccatgtttacattttcaattatttttgttcttatgttcttggtacttctcttaaacagcataaagtgttttttttttttaatttaaattctgcagtctggttcttttatatgacatctgtagttcatttgtatttattatgagtattcacttattttaatttattcccagcatctttctttttattttctggcctttgtttttttaccattgattgagttttgttgtsattattgtttgtttttctg

SEQ ID NO: 349667 - DNA, 547 bp, Homo sapiens
acttctcaagtcttctaaggaaacaaagtatttaagagatggattgtgagtgtatgatagcatataaagtgttaagaatagttcagtcaaatctttagattccttactgtccttacccaaatttctattactcaataaatgccaaaagcttcaaagccaatatagatggattaactagctattctgattgtaactaagggaaataagatgtccaaatatatttttgtccactgattcacctgggatcgagtgcgasatgaaaaatgtgcaaagtctgcatatcaagcataagtgtaaagatactatccttgaaacacagaggtagaaaacctgaataagaaccccaaatagcattttcacgaagacaacaaaaatgctgccgtatgaggaggaggaattcaaactgaaatgagctggcagaggagctatgcaatggaaactcctcatctgcttcctggaagagatcttcagaagccctaaaaaggaagaaaaagcatcttctgtataaatatgatttaaaaaagagggagaaaaaatttagaagcta

SEQ ID NO: 349668 - DNA, 565 bp, Homo sapiens
gttactctattttatcaccagtaaacaatccagccctaattttttgaagtggtagaaagaaccttagctctatatttgtaccactgttctgattactctgtcggtggcctatgtatttcatcttttaaaccacctcaggcacaggaggttcattcttggtgttgggcattctgaaagactgggagtccaaggctgtctgccatagagaggagtgttaatatttcgggcctaacaattagcaaggtgaggtaaacataactgaacactgctttgaagattcagagtcctgcagtgccctagggtcaacatgctaatgaattgataatccctcgcactaagagctgaaagtgaatgcgacaaaaaccctggaccatacctccaaagctgatttctttacaatggaatccttatatgtttttatatttaatgttttgcctctttttcttaamggaataaattctggtttatcaagtgatccagaaaaaagaattctaggtatttcaaattttaagaatggactttgaatgaatcttagcatttaacgtgaaaatttttgatatgtaga

SEQ ID NO: 349669 - DNA, 569 bp, Homo sapiens
tgggctgtggggagggagaactgggaatggagaggtggacttcagaaaagagcaggagatagttgaggggttgggggaagctgaatgtagatcaaggcaaggggatccagatggcaggcaaatcgtgcctaccattatttcctgagttgccttagtgtctggggtgatacccatgaattcaagcctccaggaggctatgaaacctcagttaattaagcaaattgtattcctcagaagcaacctggaattactgttatatttttttatctaggttttattgcctcaactttcaccttttatatgcaaaagcatctgcttaaaagcctgggaggttgtctataattacttttgtatctgtgagctgcttatttacttatttttaaaaaatatatttatgtaaaactgacacaataatttttcraatagctggaagagaggattttgaaggttataacacaaaggaatgataaaggtttgaggtgaccagtatgctaattaccctaatttaattattacacattgtatacaaatatccaaatgtcacactgtaacccataaatatgtgaact

SEQ ID NO: 349670 - DNA, 620 bp, Homo sapiens
agaaattctgactacaatacactgttattaactatagtcctcaacattgtacattagatcttttcacttgtgacttgttcatcttacatagtggctactttatatcctttgactttacatctcctcatttcctctcttccccttgaccctggtaacccctgttttattctctgtttctatacttttgactttttaaaaaatataccacatataagtgagatcatgccatatttttccttctgtgtctggcttatttcacttaacrtaatatcctccaggttctccatgttgtggcaaatggcaggatctcctcctttttaaaggataaataatattatatcatatatatgccacagtttcttaaaccatgcatccattgattgagacctaggttgtttcaatgtcttggctatcctatataatactgcaatgaacataggagtgcagatatatttatgaggtcatatttcctttccttttggtttattgccagaagaaagattgttgggtcatatggtagttttattttcaatttctttagaaacttccacactgttttccataatggctctataagtctaccatattagtcagttctcatcctgctataaagaactgca

SEQ ID NO: 349671 - DNA, 585 bp, Homo sapiens
aattaacttactaaataaatatgtattgggytattaccatatgcaagtcagagagctagtgtcagggataaaagaataaaccagagacagtgcccactctcaagaagcttaaagtctagattggaatgcagataaataattaagaaattgtaattcattataaaagagcagtattagggaaagtatggagaatccatagcaagggcatttttccagactgaggggctgagggaagctgggacctaagggattattgtgaattaggcaagcagattgtgataggtttaggagctaccttaatgaaaatgatatgattgatatttatattttgataataataaaattggatatgtctcttactaagtaccactcactgtattagagtcagggttctctggagaaacagaaccaaagggttctgtgtgtgtctgcacatgtgtgtgtatgtgtatgtgaagagagagagagatttataataaggaagtggctcatgcaattatgaagactgccaagttcaaatccacagtgtgggctggcaggctcaaaacccaagagaaccaatgggacagttccagtctgaaggcc

SEQ ID NO: 349672 - DNA, 608 bp, Homo sapiens
attagggaaagtatggagaatccatagcaagggcatttttccagactgaggggctgagggaagctgggacctaagggattattgtgaattaggcaagcagattgtgataggtttaggagctaccttaatgaaaatgatatgattgatatttatattttgataataataaaattggatatgtctcttactaagtaccactcactgtattagagtcagggttctctggagaaacagaaccaaagggttctgtgtgtgtctgcacatgtgtgtgtatgtgtatgtgaagagagagagagatttataataaggaagtggctcatgcaattatgaagactgmcaagttcaaatccacagtgtgggctggcaggctcaaaacccaagagaaccaatgggacagttccagtctgaaggccagcatgaagacacctagaaaagccaacagtgcagatgaattctgaaggttgtctactggagaattatttattatatgggggaagattgatcatttagttctatttaagacttcaattaattgggtgaagcccactctcattatgaagggtgatctgatttactctactgattcaaatgttaatccaatctaatgt

SEQ ID NO: 349673 - DNA, 431 bp, Homo sapiens
agaggtataaaacagtaattcagaatgactatagtctaaatgtagtgttggtaacagtataaggaacaggaaggaaagaaaaggatgaagctgaactttcttctcctcacctagagagctcctctcccaggtggccagtgttctaacttgtttygggcgttccatcaaagttcctctacatggagagacctcccctgaccacctggatttaggctgaacattacctttattcaccatcttctttcctatttcatatttaacaaccatattactagttgatgaactgtatggttttcttacttaatatcttgctttgtctctctctctcaactagaatataagctcattgaaggcaaggatttctgtctgttggaatctgtctggtgctactttcccagcactgagaatacagcctggaacataggaggcat

SEQ ID NO: 349674 - DNA, 528 bp, Homo sapiens
tcacaacatcaacagcgcatttggcccaggaactgctaatgaacgtacagtgcagtggtgttcaagaagttttgcaaaggagatgagagccttgaagatgaggagcatagcggctggccatcggaagttgacaatagccaattgagaacaattatcaaagctgctcctcttacaactacacgagaagttggtgaagaactcaaygtcgaccattctgtggtcattcagcatttgaagcaaattggaaaggtgagaaatctcagtaaatgggtgcctcatgagttgagtaaaaaaaaaaaaaaattgttgttttaaagtgttgtcttctcttattctacacaacaacaaggacccatttctcgattggatgtgacatgcaatgaaaagtggattttctacaacaaccgacaatgaatagctcagttattggactgagaagaagctccaaagcatttcccgaagccaaacttgcaccaaaaaaggtcatggtcactgtttggtggtctgctgtcgctctgatccactaca

SEQ ID NO: 349675 - DNA, 319 bp, Homo sapiens
cctgaagcccaggaataaacaaacatttctcattgataaaaaatgtgttgattgtaatggttcctattttgataaataaagatgtgtttagttataatgatttaaaattcacagtccaaaactgcaattacgtttgcaccaacctaatatgataaggaactggtggcttgagagcattttaatgagggagctaacatagtctgaagcttcaagaacagcttctctgagaagctgatcagaaactagacatgaagagtgattatgtttataagggaaaagttgttcttgtccccatttyacacctgagggacaaaacaaa

SEQ ID NO: 349676 - DNA, 434 bp, Homo sapiens
tgattttaacactgtagttgtcaggtatggctacaatgctgcatgacaaacaccctccctcatcctaataccttatagcaactaatatttatttttctcactcataaatcagtgggttwtatggagttttgctgatcctggctgaattaggaaggacttgactccaggctgcacgtcaggtctgggtctgctccacatagctccatctggcattgaatcaggagcaaagaagactgggacaggctcctcttataccagattataaaagctcaagagaaagagtggaaacacagaatgcctcttaagccctcagctaggaactggttcaatgtcaattcctcccctgtccttttatgagagaaattcacttggccaggcccaaaatcagttgatcaggtaaatgtactctgaccatagtgggaagccttacacag

SEQ ID NO: 349677 - DNA, 612 bp, Homo sapiens
ttatttaataaacaagtaggaattggtatataatgtttaattttgggaaaaacacaatttgacctgtgctgaaatacttctaatactgtataaaacatgtactagggagagtctatgggcacagtgatgagttagaaggctcttgtggttatgtgggtaagagatgagagataatatgttagcaatccattgctggacaacagaccagttcaaaatttagtggtttgaaacagcaaagctttatttttttatttccataggtttgtggaaaacaggtgtatttggttacatgaataagttttttagtggtgatttgtgagattttggtgcacccatcacccaagmagtatacactgaacctaatttgtagccttttatccctcagtatgttcccaccctttccgcccatgtcccctaggtccattgtatcattcttacgactttgcatcctcatagcttagctcccacttataagtgagaagatacaatatttggttttccattcctgagtaacttcacttagaataatagccttcaatcccatccaggttcctgcaaatgccattaattcattactttttatggctgagtagtattccattgcgtgtatat

SEQ ID NO: 349678 - DNA, 648 bp, Homo sapiens
attagtgatgttgagcatttttttcatgtgtttgttggccatttgtatatcctcttttgagaattgtctattcatgaacttagcctattttttgatggaattgtttgttttttttcttgctaatttgagttccttatagattctgaatattagtactttgttggatatatagattgtggagattttcttcctctctgggttatctgtttactctgctgactgttccttttgctgtgcagaagctcatcagattaattaagtcccatcaatttatctttgttttgttgtatttgttttttggatcttggtcatgaaatctttgccaaagtcgatgtctggaagggtttttctgacgttatcttctagaatgtttatagtttcaggtcttagatttaagtctttcatacatcctgagttgatttttgtataaggtgagagatgagaatccagttttaatctcttacttgtggcttaccagttatctcagcaccatttgttgaatagggtgccctttccctactttatgtttttgtytgctttgtcaaagatcagttggctgtaagtatttggctttatttctgggttctcttctgtttcattggtctatgtgcctatttttatacaagtaccatgctgttttagtgacta

SEQ ID NO: 349679 - DNA, 597 bp, Homo sapiens
ggcctatgtgtctacttttatgccactaccatactattttggttgctataggcttgtagtattatttgaagtcaaccaatgtttgactcctccagatttgttttattgtttgttcatttgttttgttttgtttttgtttttgagtcagagtctcactctgttccctgggttggagtgcagtggcacaatcttggctcactgcagtctccaccttctgggttcaactgattctccaggctcagcctcctgagtatctgacattacaggtgcccaccagctggctaatttttgtaattttagtagagatggggtttcaccatgttgaccaggggttcaaactcctgacctcatgtgatctgcctgcctctgcctctcaaagtgctgggattacaggcatgagccagtgtgcctsgcccagattcgttctttttgattaggattgctttggctattgaggttttttttttttttctgttacaaatgaatgttaggatttttttttctaactcagtgaaaaatgatgttgatattttgataggaattgcattgaaatctgtagatttctttggacagcatggtcattttcatatggattct

SEQ ID NO: 349680 - DNA, 597 bp, Homo sapiens
ggcctatgtgtctacttttatgccactaccatactattttggttgctataggcttgtagtattatttgaagtcaaccaatgtttgactcctccagatttgttttattgtttgttcatttgttttgttttgtttttgtttttgagtcagagtctcactctgttccctgggttggagtgcagtggcacaatcttggctcactgcagtctccaccttctgggttcaactgattctccaggctcagcctcctgagtatctgacattacaggtgcccaccagctggctaatttttgtaattttagtagagatggggtttcaccatgttgaccaggggttcaaactcctgacctcatgtgatctgcctgcctctgcctctcaaagtgctgggattacaggcatgagccagtgtgcctcgcccagattcgttctttttgattaggattgytttggctattgaggttttttttttttttctgttacaaatgaatgttaggatttttttttctaactcagtgaaaaatgatgttgatattttgataggaattgcattgaaatctgtagatttctttggacagcatggtcattttcatatggattct

SEQ ID NO: 349681 - DNA, 580 bp, Homo sapiens
ggttggtgttggtgtatagtgctgctactgatttgtgtacattgattttgtaacatgagactttattgaattcatttatcaaatgtaggattcctttggaggagtctttagggttttctaggcataccatcatgttattgccaaacagagatagtttaaccttctcttttccaatctgtatgctctttatttctttctcttgcctgattggttgggctagaacttcagtaatatgtagaatagaaatggtggaaatgggcatccttgtcttgttccagttctaagggggaatgctttcaactttttcccattctgtattatgttggctgtgggtttgttagggcttttattattttaaagtatgttccttctatgcctagtttgttgagagtttttatcayaaagcaaagatgaaatttatcaaatgccctttctgcatctattgagatgatcccatggcttttgtttttaattctgtttatgtgatgaatcacatttattgacttgtgtctgttgaatcatccctgcatccctgggattaaaaccacttgataatggtaaatattttttgatatgctat

SEQ ID NO: 349682 - DNA, 275 bp, Homo sapiens
ttcaagttaggaaaattacatgtttccagaaatttatcaatttcttttacattttctagtttgtgtgcatagaggtgttcacagcagtctcaagtgatcttttgtattcctgtggtgttggttgtaatgttttcattttcaattattattgagcttatttgaatcttctacctccttttttggtgaatctagctaatggtctattgattttgtttagcttttcaaatgatgaacatttcattttatgsatcctttgtatttttttggtttcaatt

SEQ ID NO: 349683 - DNA, 576 bp, Homo sapiens
tcatgccctatagaacccttcaggccttgtgtttgggctggacctgctgatatagtttagctgtgtccccacccaaatctcacctttaattgtaataacccccacatgtcaagggtggggccaggtggtgataattgaatcatgggggtggtttcccccatactgttctcgtggtagtgaatgaatctcatgatgtctgattgttttataaatgggagttctcctgcacaagctctgtctttcctggtgccacataagacatgtcttgctaccccttcactttcttccatgattttgaggtctccccagccatgtggaattgtgagtcaattaaacctctttcctttataaattacccagtcccaggtatgtctttatgaacaaggtragaacagactaatacacctgcatattagtttgccaggctgcagtaccaaagtaccatagaatggataatttaaacaaaaaaattaattttctcagtcctgaaggcttgagatctgagatcaaagtgttggcaaggttaatttcttctgagacctctcttcttcggttattaatacccatcttcttgtg

SEQ ID NO: 349684 - DNA, 585 bp, Homo sapiens
attcggccatcttggctcctcccccaaagtgttctttcttaatgaggtattctttagttgtcctatttaaaacagtgacccatactctctttccctcttcctgaactcatttatctccttagaattatattttctataatttactaatttattttgtatattggccatctcttgtcaccaaaatataggctttgtgagagcacggatttttatctgttttgctcactactggatctttaatacatagaccaatctatggcatatagaaatcactctagaagtatttgttgagtaaatgaataaatggtcctcaaattcccactgactcttcaatctgatatccctttcattcagcactstccaatgtccacttagcttataacttaggcttttttacataaattttagttagaataatactgacaaatctttcttatctcaggttacttcctctaagtagttttccctgtccctccaatctaaattagggaagtctgttattctatagaaccctgttttttccttcatagcacttgtgcataagacatctctatttctttagtttccataagcttaggctctctg

SEQ ID NO: 349685 - DNA, 591 bp, Homo sapiens
atgaggaagcagctatcttttaggctaaattcaaaagtatttctttctaaattagtactttcagtggcacttacatggagagacgttagggaaaaaatccttcagctacttttaaaatcctgggtcaagtggaaaagaccatcattcttccctaaactgtagcgctgctgctgttgttgaaactgagtgatgaattcctgcaaggagaatcatttggctatttccaatctatttccacacatgtaaaagtttttctggaaagtcttggaagtgaactacaatcatttacagaaagaatggctcctgaatctgaatatcagtgtgtaggcacctgggtagaaactcacatcaggagctgaggaaccatttatcacatcaggattctctctgaaccctcacaaggcgttctgcatgagtttctataaatctttcatcatggccatgaattctttatcagctctagatttttctctcttgccatgcacagctttttcttcaccttttyctctctaacagattgatcatgtctccttagtatattttttctttcgtttgccttttgctaatgctgtctgtcttttaggttattgc

SEQ ID NO: 349686 - DNA, 603 bp, Homo sapiens
tcaagtgagcagggtattaatctgttctcttctcacaagctgtgtgacctttgataagttatttgaaatctgyctctatactttcctgatctacaaagtggagccaaacaagcttacctcacgaggacttgactgatgatgacagccatgctccagtgagtgccagcttatgtcagacaccatgtaaagtgctttacccagatttttccatcttcaaaacagctctccagggtaggctatcatatcaccatcttatgtattaggaaactgagacccataaaagtttctctagctattgaagtcagacaggctttgaacccagatgtctgtggccacaaagggatggtctcttggaatatgacagtgcttcccagtaggtttcaaatattgcctgtaatctacctctctagttgatgacaatgtaaaccatttatgaatttccttcacctattggactctgtcttttggaccacctatttctctttacagctctagctttaaagccaagttgccaagttatcctatcatttggtccaggcttttcataccttccatggtagtagttaagagcatagactttagaactagaatgcccaggttcag

SEQ ID NO: 349687 - DNA, 558 bp, Homo sapiens
attaaaaaaaagaggtgtagggaaataaagtgaccgaatccaagttatataagtaaaattgtgatatctttttctttcttttcgttgtcactgcccatcccctactcaatatgtttaggttataaattacttagccttaactggattattagtaattaaggctaagtaacttaaaagactccaagaagcatttctaaccttgattttcaatgaatttagcaaacatcaagcatctattatttgycaaatactgttagatcctagctatagagtgctgtataagccagatatatccctactctcaccaatttttaagaaggtagaaaatacagacattgaacgaagaactcccatcatgatgaaaattgcgaaaggggaaatatagagtattatagcactcatatcctgaggatctaatatggaagttagaaattctttgcactatcatcatttttttaagacttatattctcagtaagagttagccaaatcacaatggaaagaatgataatctggggtcagagttcaaaaggactaaacattaaagaacaaaggtgag

SEQ ID NO: 349688 - DNA, 545 bp, Homo sapiens
atttgctgtatgaagtaattgaggcttttcatgttctaccaaaacagaaaaaggatattctctcaaaattctcatttatattcatttgtagatcaaagctgttaagtaacaatatggggaataatggaaagagatggcctttcaatcaataccacctgagtacttagcctggattcagattataacctggctacctctgggtaagttccataatgtctcagagtctgagttttctcatatggaaaattgggaagatgacatttagtcatacggtgattatgacaattaagtacataaagtacagaaagyatttggggcacaatatcgagcacatagtaagcactacagaaatgttaaccaatatcaaaatgcccagagcagtacctggcacaggggaggagctgaataaatggtagtttattcccacatagatttacttatatgggtgcactgaagacaaaaaatgttgtcttttaaaaatgtgcatcagactgggggaaataagatattttctctgcaaagaaaatataaactggtgatgaatg

SEQ ID NO: 349689 - DNA, 601 bp, Homo sapiens
atatgctacaaacatgacttcatccttcccaatctgtcctctaggcatctttctccttctcctccttcaggcttcagggcatttcatttatcaggtccctccaactctgtgctgtctttgtactccagtcatcacttttacaaactttatcctaattttaactatttttcttcagtatctgattcccctactagggtgaaaagagcaggagccatacctctcttgytcgttgctgtattaccattatttagcacaacacatgccacaaaaggggagctcactgtacattctcaggccacatgaaattttcaagttattcatggtaaatcgtggttggttactctaagggaggaagaacttaagaaattaaaaagttaccttctaacttatcttaagatccataaacaattgaaaaataattcctggtctttacgaaatgaaaaaaaggggggaaaaagcattacatagatgattaataggatgaacaaaaagttctctgtagatttgaggctctgtctatgctgaacttggacttctaaagttcaaaatgaggaactgtttgctgaaatgtgtcatctgatttcaattgctgtggaaaggg

SEQ ID NO: 349690 - DNA, 584 bp, Homo sapiens
tttcttgtaaatataggaaagtaatttttgaactcttaaaaagtccatttagtattagaatatttttaaacatttattatggtgatatcaattttatatcatttgtattttggactttacaattctactagtgcttgtcagtacagagagtataacaygaacatcatttttagtaattcaattattttagaacaaattgaggacatttattttctaattagagaggtaatagatgccatactgcagataaattgggaaacatataaagaagaaaatatcaaaaccattcataatttaccttctattttgccacccccaataataaataatattaacacttagttatatttccttcatatatattttttcccctatgggtgatggatgtgcccaggcagagatgagatcagagatcacactgcactcatggtcttcccttgttttttcactgaagaaaaaataccaagtgaattactaggtagatcatactacaaatattttagaggagtctaaatatatattcaatattcagtaggtaccagaagatacattcttataagtttgaacattaaaaatgtcttgac

SEQ ID NO: 349691 - DNA, 604 bp, Homo sapiens
catatatatgtgcatacatatgtatactaaaagtatttacaggcacaggaataataatctctaactttagaatagtgtccaactctgatatggtgaaacaggagaaagatcatcatgaggaaattaaaaaattgactttctttttgatctgtgatactcattatattattctctatttgcatgtctgacatacctcataataaaaaagaaataatcactgatctaccacagatagagtgggagaatacatgtcttcctgtatgtaatggacctcattattaatcaaagatactaaaattttatcatggtaacaacctctgttaattaataaaaattataagaatgtctaagcttcaaaacaataaaattctgcaacatataaacgattgagagacactgaatttcaaaataatgcttccatgtataagcaacataaggtaacaaaataatctgacattgttttcattaactataacattgaatccattttyatatgttaggcaaaataaaagctaaaattaaatataatgtgctcagaagaggctttaacatgtgaatcacataccgtcaaaactgtcaattcttagaagtcacatcttatttt

SEQ ID NO: 349692 - DNA, 583 bp, Homo sapiens
ttggcacatagcaagcattatttatatatacatatgtatgtttattgaaatggaatagttctaaggaattcaccgtaagagttcttcatcctttaaaatcatagaattttgggccagaaggaactctgtacattagcttaaaggtcccgacctattttgattatgagaaaccctgtacttctaatacacatgcaattggacttttagtaattgttggttgaaattatgtataatgacagaaaactactrtgcttttaaatgattttgtattttatttttacagtatctatttatatttgagaaatggagcagaaatgttttagactacagacagtgcttggagtatgtgcattcaggcaactcttctactgactccttagcctgtaggttagaaataactggtttagattaggttagttccttcttgaactgtcacaactctttgaacatatgtatgtgaaacttatattcagccacaattctaagggaacgtgtaattttaaaaaaatcctccagtgtcattacttccaaaatctttcttccaagtttaaaaattaattttcttcagaaagtgtctttatac

SEQ ID NO: 349693 - DNA, 426 bp, Homo sapiens
gcaaacaaattttgcatatgttttaatttgtgcccaggaatctcagggtttgttttttgtgtttttttgttgttgttgttttgttttgttttgctattgtaaatgtgtgttttaaaaaaaaaagttttggtttccatttgtttgttgccagtatatagaaaaacagttgattcttatgcttgtatcctgtgacattgmtaaaatcatgtagtagttttaggagttcttttttggattctttggggttttctacatagacaacaatgttggttgtgaaaaggggccgttttatttcttcttttccagcctgtatggtttttccccccttcctagccttattacaccaatgtattgaacaggactggtgactgcagacatccttcccttgttcctaattttattgggaaagcagtcagtcattcatta

SEQ ID NO: 349694 - DNA, 622 bp, Homo sapiens
tgctgcttcttgggttccggggacgaggctctgttttgcattccctcctcctccgccccgccccgggagaccctcccggcccaacctcctccctctcgggatattgacggcagcaaggatgatgccacagtcgtcccgtgtcaactatcagatcagcgttcacctggtcccgaaccccgcctagcgaggggtcgtgagggagagcgagctgggggtacaggagtatcatttcctgcggagattcgtgttcttcaacattttttttttctgaacttggaaaacttttaaggacgaattagagaacttctttctctttcctatgagtaactcgaactttggtaatacagttgtggatcatagattacatggattaattccagggttatgaaattcaagggtggacactcatttgttcctattggacatgctacccaagttgcattttaaaaatgtattttaaaaacccaataartatttaaagaagaaataatatcaattcttcacaaactcttccaaaaaatagaagagtaaggatgatctcccaactcatgctatgaggccagtatcaccctgataacaaaaccagataaagacatcacgagactacagatcaatatttctt

SEQ ID NO: 349695 - DNA, 609 bp, Homo sapiens
ttataatttggcatttgccttatttgaacacagtttgaacaactgaccaccttagatatgctgaaactctgtgattggcacaagagtaggtttcagtcttttcagcatccagttaggttacagttcactacatgctgagaaacttttaggccaaatttaaaatacgtaaggaagcagctttaggataaacttaattctttaaatgggtgaactgtatagtatgtagagtatatataagtaaagctattttaaaaaggtaaaatatgaaatttgtgtagatgagtaaagacatgaatgtctgacttttgtttcttgcttccaagtttctgaagagagaagaggggctcagttcctatctttcatgcaatggcyaacacctctgtgctagaccacattgtggatcaggaaagtaatataaattattaataattaaaacctatttttaaaataaaggtttttatttagcaacataccatatgttgaaatgacttacatgttttgaattttcattaaattaaaaatggcaaatttacttaaatataatcaagcatgtagtaagcataggtttctgcaggagaactttctcagaatgcaaacctgaggaagaca

SEQ ID NO: 349696 - DNA, 582 bp, Homo sapiens
gctagaagaatgaaagtttatgaaaggatcaaagcatttatttctcaattttcttgagctatagtgtgaatcccttcacattggtgaatctattcatagaaacttaygtgtttgtcagagaaaatcacccagtatcccatcagtgaaacactcatttattttatctctctctgtgtgtagtgtatatcagagtgtgataaagtattatttccacaaactcatattttctttgggctggctataggatattattcagcaagctattttgaattcaatgtggatataattttcctttgggctctttagcaactatattttgtaattttacttcaagaactgtaactattgaagatatcttaagacagctccttaagatatttgttataacaaatgaaaacaaccttcctggctctcagctttcatcttcatgaagttcttttctcaatgatagttgcagacacatttgtatttcttatgtgtttctacctttattttacataataagagagcttccctgtaaagtgtgtataggtacatatggagctggttttggttgacacaaattaataggaattggaaatt

SEQ ID NO: 349697 - DNA, 582 bp, Homo sapiens
gctagaagaatgaaagtttatgaaaggatcaaagcatttatttctcaattttcttgagctatagtgtgaatcccttcacattggtgaatctattcatagaaacttatgtgtttgtcagagaaaatcrcccagtatcccatcagtgaaacactcatttattttatctctctctgtgtgtagtgtatatcagagtgtgataaagtattatttccacaaactcatattttctttgggctggctataggatattattcagcaagctattttgaattcaatgtggatataattttcctttgggctctttagcaactatattttgtaattttacttcaagaactgtaactattgaagatatcttaagacagctccttaagatatttgttataacaaatgaaaacaaccttcctggctctcagctttcatcttcatgaagttcttttctcaatgatagttgcagacacatttgtatttcttatgtgtttctacctttattttacataataagagagcttccctgtaaagtgtgtataggtacatatggagctggttttggttgacacaaattaataggaattggaaatt

SEQ ID NO: 349698 - DNA, 510 bp, Homo sapiens
taactattgaagatatcttaagacagctccttaagatatttrttataacaaatgaaaacaaccttcctggctctcagctttcatcttcatgaagttcttttctcaatgatagttgcagacacatttgtatttcttatgtgtttctacctttattttacataataagagagcttccctgtaaagtgtgtataggtacatatggagctggttttggttgacacaaattaataggaattggaaattattacataactcttccattcttcactgggagctgcagttacaatgctggcactggctaattaacaggctcaaccctgtcttttcagtgagactagtaagtgaaggatttgatactttctttcctgaaacaaacaaaaacagctttggaactgtcagaaacaacagcggctcttgaaggctaatcattaccagcttttgtcatgtggttgtaattgttgcatgaattctgcttcaatcagggaaaaatacgcttaagtgccagcaaaa

SEQ ID NO: 349699 - DNA, 600 bp, Homo sapiens
gagtctttgaatctgcacaaaagtccgagcattctcatttacagacaagaaattgcaccttgttcctcaaagcaatatcaagttaaatggcaaggacagagctaaagatgctttggagatgtttgatgactcagagygatcttacagaaaccctagcaccagtgttgaaataggcatagtagcttggtttgtggtttggaagtgctttcttgcttgaacacttttagtgttttgaatttctgttatttttctcaagcagtctaaatgatatttcaaaaataatcaccataccaaaataataaaagtcatgttttgagcaaaatctccccaagttttattctggtataactctcacatataggaaatacttctgaggtgagagcacgtggtttacatgcctaggagtgggagatttgagtttaaactctggctgaactctgacctcatgtactggatcctcactactttaagtgtggcccacgaatcagcaacaagagaatctcctggcagcttgtaagaaatacacactcttaggctctgtcctagacctactagcggaatcagcagcctcacaagattcccaggtgaagtgtattgaat

SEQ ID NO: 349700 - DNA, 582 bp, Homo sapiens
ttcaaatttaatttggagtcataacttttctggaaggcattgaatacggagagggaaaataagggggagcaatactgggttctctcatctaaagagcgggttctgggctctcatcagaaaaatatactttttgatgcaagtttttgatattcttaagtaaaaaaaaatctagataagcacagggtgtggattgcatcctttacattattgcttctaacaacatctggatatggctgttactattagaagttataaaaataacatatacgttaaatatgaattctgaatttctcttcaaakaattaatatgtcagtatgttcaattctttgccttctacttttaaacttaacttcctcgtaaagtaacctttttctattacctactccaccctgattcattccgattacctactccaccctgactcattccaatcacctgctccacccagactcattccaatcacctgctccaccctgactcattattctccaccctgcataaccatttttttcctgccaaagcactcaccccatcactctctttaaattagctaatcggaattagtttagcctgtgcagtct

SEQ ID NO: 349701 - DNA, 596 bp, Homo sapiens
ttggttttttccctcctgccctagattcactttctgtccacagagatccctggggatatcagtctctcatcactaacttgaccccttacccttacatccctgagtccaaagtcacccagaagccaattatatatgtgtatttttggcacactgatgctattttaattgttatttaatgatttttctgtactataattctttgcttctgagataaagccatgcaattatattttctatgctgtttcttcttctgaaaacaaatgcatggcacatgtgtttctggaacaaattgtcttcctcaatggagatacacctaagatgtcgtttccaaagrgattacagaaacaaaatgttttggactttccttgtaatttattgtatctggtgagtgctataattaaagattagaaaccacaggaaattatttcaaagcataaagttccctggaaagagattatctatttaattaccaagaaggctccttattgtaaaattcaaatctttcaaataacagaaactcaagcaataattttaaaaacattttcattgtgaaatatgacacagatatagaagagtacacaaaataagcatacatt

SEQ ID NO: 349702 - DNA, 578 bp, Homo sapiens
cttgggctgcatttcctggtgcatttccctctttgctcaaactttctactgtgtgctatgaacagactcattcaagggcttgccctgatgaagctgctcatgtgctaagtgtattgagaaatgaattatggaaagggaggaaaggaaatgaagtgaaggaaaagaagggaaagaatttgcaagataataatgaaaaaagactaattcaaagagaacaaatatagataaaactgaaggaaaaaagaatataggtaaagggattatgagtgattcaggaaaagtctggggacagggaagaagagagtgcaatagaaacattttcctgtagctttcstcttctaaagcagggttttcttaggggaaaaaaatcttaggggtccatgagttggcatttgaaaaaattgcatccttactttctctcaaaatttgtcatctccctcaactataaatataggctacaaacttctgtattattagcaacatccatgactaggtctctaatagaaacaaaaaatattttcatattacaatgtaatggttgcaaataccttgaaaattacttatacttacaattactt

SEQ ID NO: 349703 - DNA, 578 bp, Homo sapiens
cttgggctgcatttcctggtgcatttccctctttgctcaaactttctactgtgtgctatgaacagactcattcaagggcttgccctgatgaagctgctcatgtgctaagtgtattgagaaatgaattatggaaagggaggaaaggaaatgaagtgaaggaaaagaagggaaagaatttgcaagataataatgaaaaaagactaattcaaagagaacaaatatagataaaactgaaggaaaaaagaatataggtaaagggattatgagtgattcaggaaaagtctggggacagggaagaagagagtgcaatagaaacattttcctgtagctttcctcttctaaagcagggttttcttaggggaaaaaaatcttaggggtccatgagttggcatttgaaaaaattgcatccttactttctctcaaaatttgtcatctccctcaactataaatataggctacaaacttctgtattattagcaacatccatgactaggtctctaatagaaacaaaaaatattttcrtattacaatgtaatggttgcaaataccttgaaaattacttatacttacaattactt

SEQ ID NO: 349704 - DNA, 590 bp, Homo sapiens
caaactttgcagtagaagtctttaaagaaaatggaataattttctctttaaactgtaatgagtgacagtagtccaatgacgatacagaaagtgtcacactcagatgagcagtactgagtgtagaacaagatcactaactggacatcaatgacatatcctgtttcttggtattcaggagactgaaaatcatttggttttctttatctgggccacagctgtcttgggcctcattccartcagtttgatctggtgaggattcctcttggcaacataaatgcagttaagggggggctataatgacatggcagtgacagctgaaatacatttcctcattttgatctaggtgaatgttctcagtagtattgcttgatgaccatatgcttatctgtctcacacttataggagatttttaaaagggattaaaaggtattttttcctccattaaacttcggacaaagagcaattgtgagccaatgttggttaatccatcgtattatgatgtatgaaaatcaatgaagagaaaaatgcaaagtacccctatgtatctacccctctatctacacaaaatttattcatcaggagaggcagca

SEQ ID NO: 349705 - DNA, 553 bp, Homo sapiens
cttggtattcaggagactgaaaatcatttggttttctttatctgggccacagctgtcttgggcctcattccagtcagtttgatctggtgaggattcctcttggcaacataaatgcagttaagggggggctataatgacatggcagtgacagctgaaatacatttcctcattttgatctaggtgaatgttctcagtagtattgcttgatgaccatatgcttatctgtctcacacttataggagatttttaaaagggattaaaaggtattttttcctccattaaacttcggacaaagagcaattgtgagccaatgttggttaatccatcgtattatgatgtatgaaaatcaatgaagagaaaaatgcaaagtacccctatgtrtctacccctctatctacacaaaatttattcatcaggagaggcagcatcacagcagatttgttagcctaattatgatgtatttccttttaaacaatttgcgcacaataattgatcaaaagtcttcatagagcttcccagagcaattcattagttcaataaaacaatgtgagca

SEQ ID NO: 349706 - DNA, 554 bp, Homo sapiens
cagctcttctgtaatcacttgccaatattctcaagtcttttgaacattctctttccgtaacatctatggagcaaaaaatgaactttgtttttactatttaattccaatatttaatttgggatataacatggcatgttaatcttatgtgttattttttaatctgctaagagttgatattttattaatttttaggttattttacctatttattatgtgttagaattttcttagccctatttgatgtaaaatatgatgggatacttgaaaatgtggtgtakagaagaagtcttgctgggatgtcagacaagtatgatagttcatagccagactgcaagtctggctgaggattctgagctatgtacttcccttgctctcaacatgtgggaaagtagcagatttttaactatacattcataatcttttataaatgaagcaggaaaatgcaaggattgggtgggagtcagctgcacgggaagttttctgcattgtttccctacactcactcctgcgaagccttcatgatagatgcgcccatttagggccacgccaaatgt

SEQ ID NO: 349707 - DNA, 593 bp, Homo sapiens
cacatgcccacacttgaggaatgaaagaaaaaaattactgaaacacagattccactttctaaaataatatactgatattattatttaaaatatgttatcagagaaaagagagtgagtccatttctaccaatggcaggcaggtgtttatttagtaaaagcagtcaaaacaaggcaatgtgttaaaagtccacaaaaagctattaaacatataaaaagtagactaagtgtttttaagaaccctaaaatattacaagtagaattgaatctctctttttaaaaaaaccgacaggtcaatcacattaagatagtaaaaaagtctcacaagcaaagatatttcacaagtagttattgagtgtacattaccaccatcatgtgtcagatacagttctatatgctgggaacacatcaatgagcaaacaagtaaaatycttgccatgaagcttatattctagtaaaagaaaatgtttatctgttgcctggctaactcctaagcattatgaaaaaacaaacaaacaaacaaacaaacaaaaacactgtataactctgttacaaaacttttgttccaacattttttaaagtttcaaaaggggaaa

SEQ ID NO: 349708 - DNA, 618 bp, Homo sapiens
acaccctaatctagtataattaacttgattacatctacaaaggtcttatttccatataaggctatattctgaggttctaggtgagtatgaatttggtagggacataattccatcctgtwcaggagctattgtgatagcctagtcagaagatgagaatggaataaaactgagatagtgacaggggaaacaaattaactcaaaataatttgaaaaagtgtaatcaattgggtttaaaggacttactggatatgtagcatagcaactagttgcactgatggctccaattattggtcgtcctatacccactccctttgacctataattttattggtttattttcccctgatatagatcatgcagcttcctttggccaatagggctttagaaggtttggcataagcagagacttttaaagactttgtaatgtttccatttcctcttctggaaccctgccacctccatgagagtaagcccacactagctcgctggaggatgagagagcacacacaaaacagagcctgcttttcccatctgaaactatcccagaccaacttatagcaaaccaatctacaaacgtctaagagagcccagctaagatcagctgacccaaagctgaca

SEQ ID NO: 349709 - DNA, 618 bp, Homo sapiens
acaccctaatctagtataattaacttgattacatctacaaaggtcttatttccatataaggctatattctgaggttctaggtgagtatgaatttggtagggacataattccatcctgttcaggagctattgtgatagcctagtcagaagatgagaatggaataaaactgagatagtgacaggkgaaacaaattaactcaaaataatttgaaaaagtgtaatcaattgggtttaaaggacttactggatatgtagcatagcaactagttgcactgatggctccaattattggtcgtcctatacccactccctttgacctataattttattggtttattttcccctgatatagatcatgcagcttcctttggccaatagggctttagaaggtttggcataagcagagacttttaaagactttgtaatgtttccatttcctcttctggaaccctgccacctccatgagagtaagcccacactagctcgctggaggatgagagagcacacacaaaacagagcctgcttttcccatctgaaactatcccagaccaacttatagcaaaccaatctacaaacgtctaagagagcccagctaagatcagctgacccaaagctgaca

SEQ ID NO: 349710 - DNA, 618 bp, Homo sapiens
acaccctaatctagtataattaacttgattacatctacaaaggtcttatttccatataaggctatattctgaggttctaggtgagtatgaatttggtagggacataattccatcctgttcaggagctattgtgatagcctagtcagaagatgagaatggaataaaactgagatagtgacagggkaaacaaattaactcaaaataatttgaaaaagtgtaatcaattgggtttaaaggacttactggatatgtagcatagcaactagttgcactgatggctccaattattggtcgtcctatacccactccctttgacctataattttattggtttattttcccctgatatagatcatgcagcttcctttggccaatagggctttagaaggtttggcataagcagagacttttaaagactttgtaatgtttccatttcctcttctggaaccctgccacctccatgagagtaagcccacactagctcgctggaggatgagagagcacacacaaaacagagcctgcttttcccatctgaaactatcccagaccaacttatagcaaaccaatctacaaacgtctaagagagcccagctaagatcagctgacccaaagctgaca

SEQ ID NO: 349711 - DNA, 537 bp, Homo sapiens
ctgttttctagttgtgtgaactaacatctctgtgcttcagtttaatcatcagtaaaatgtggatagtaatagcacctaactcaatgtgaatgaggattaaatgaggtaaagcaaatagaactgtcactaagaaatccttttgataagataggaatctatcttactcaatacactttatcaaaatttatatccctgctttaagtagttttacaaggatatagagaaagagatgaatacaacaaaaacaaaccaaccaacaaacaaaaaccaacaaacaaaataaacagtattgttgaacattctttactggggcatgtttataatgtttatagcctcactagtataactgtgttttacagttctgtgtattataatgaaagcctacttctcgagtgatttatttcaattgtccatataataaactgttagaaawgaatatgtagagtgagtaaacaactactttatccctcttattttctacctcttacagatataacctcttaaaaaactaagttataaacttcacagatcattaat

SEQ ID NO: 349712 - DNA, 572 bp, Homo sapiens
aacttacactcattggcattaaatgacagaaatcacagttagtaattctggttggagtcttttgttaatacctcatatttatcaaaaaattccctgttctatgttataatgtatactgcagttgaaaaacacaaatggtaccagagagcatacggttttttaatttccttaaaaataaaaagctagggaattaaatgcttgctaatgaagtgttacatttcttagtttctccaactcattttaattgaaaaaaatcccttaaagtgtctcccattttcctattctcagaagagaaataagaatgatctataaaagaacatgcagtacaatgactaaaaaactgaaacaaaaacggcattctttagaaaaaaatcttgcattccttttgtgtatgtgagaagtggcgcagagttcagatgttcaaggattcattcttaacagatttttcaaacattcagatagatatttcagtggaataatctcagtagtttatgcggktgataaatgaacattttaggctcacctgaccccaggcaacactgagctaaattaccttttctccaaatggagcc

SEQ ID NO: 349713 - DNA, 520 bp, Homo sapiens
gtgaaggagttggagtaattcatcattcgcttttcaggattcttggttgaaccacaaagaataatttccttggtaccgcctgtctacctggagctgataacttggcttttcccagttctacaggaaagagccctcaggtacagagaggcagatcttagcaaggggagtacactgagcacactaaaaggtcccagcaattatgtgccagcgggacactgtctggtcagctacagatacatggaggactttatgtgctttgccaattctcaaccttgtcgtctataataaagacatatctctctctcccaccacaccatagaatgacaggtgtttattaggaacacaaattcagagctaagtttcaaaaatatgctttctcttataatgtgcttatcttcaattgcccttctctccacaatgttggctaactagaagttgtcaccagccccttgctttctctgtccttaycttagcatgtctttatacttcctcacttcatttaacctctcatccttgactc

SEQ ID NO: 349714 - DNA, 623 bp, Homo sapiens
ttcttttcactttagtacagaattaattactctttttcctttaacaaaacagatcctcataccttataactttccttaccaaaagcacatcttattttccttgtatactttgcactcagagttgtttcccttattatttctagtagttttaattatatatgttaatccaaatttttaactcgaagtaactttaatttctagaaacatgtgcttcctcatagtataattttttaatgtgacacatgtttaacagacccaaatatcttcagcttctctatactatatgaaaacaaaatgccaaaagtatacaaacttaaacttatgcttagtaattagtgcatcagtattttatcttatttggaaatgatctagatattgaataagtatctattttttaacttaacttagcaaaacttaagggtgtaagttaccaaagagatttacaaaactgtttttaagtagatatattataaaacrtaattattgtttgaaagcatattcataaattcttaccccacttacacctatttaattcacttattcttcacaattgtgcttggattacccgtgaaattttcagggacctcagacaaagctaagcatcatttcaagttatttctcca

SEQ ID NO: 349715 - DNA, 584 bp, Homo sapiens
acacaatgttggcactcttggttctggtgactgtggccctggcatctgctcatcatggtggtgagcactttgaagggtaagtaagccatctttaaggagcaagtccttcttccttgctagcccccaaatttggacacattactcatttccaattctctgtgcttctattatctcattattcagcgagaaggtgttccgtgttaacgttgaagatgaaaatcacattaacataatccgcgagttggccagcacgacccaggtaagtaacaattttgatttacttcacatctaatttaaaatcttagatcgcactgtgattccgacaatggaaaaaaaaacatgaaatattaactatagcattttggtagcaagaaataaaaacttggaaaacatttrgtgccataatgtcttctttttctgcctaaattagattgccataagccctgtagtattataaatccatggtaacttttaaaagagctgacagtgtgacaactggatgagttgcaactgtcacgaaggtcacagaacatctaatgtacagtcactttccttctaaggcaaaagagaaaaatgatcaactt

SEQ ID NO: 349716 - DNA, 558 bp, Homo sapiens
tgctggattctgatttttcatgttaatttgatatcgcagttaaatgaaatgtaccttcaagaggtcagatgtgctggttgaatgtgctgggtgaccgatgtacacaaggctaaaagctgatgaaaagaagagtccaacagacatgcacttaatcattcattcaacaaatatttttgagcacttggcactgttaaaattgttacgtatatacagcacttaggaaatattaaaaaacaaaaaacaaaaaactttgccatcgtggaaattacattctagaaggaagaaaaagaaaatgaacaggatggataagtaaaataagtagaatataagtaaacatataaaatacatagaataaaatctctcagcatttgcttgtctataaaggattttatttctccttcacttatgaagcttagtttggctggatatgaaattctgggttgaaaattcttgtctttaagaatgttgaatattggcccccactctcttctggcttgtagagtttctgctgagagatccactgttagtctgaygggcgtccctttgtgggtaacccaa

SEQ ID NO: 349717 - DNA, 518 bp, Homo sapiens
atactcctatcaaaatgcataatctgaatcaaaccataagaaaatatcaaagatacaaaaagtaaggaacattcaagaaaataactggtctgtcatctttaaaagtcgcaacatgaaagtcaaggaagactgaggaacattccaagctgagggagacggcagagacatgacagctacaggtgatgtatgatcctttgctagatccttttctctaaaggacatgattgagacaattggccaaactgaaattgagcctgatgagatgatagtaatttatcagtgttgacttcctagtttagatgttggagaatttccttgtctgtaagaattacacactgaaatagttggaagtgacagggatttacatcagctacttaytcttaagtgtgtcaagggaaaaaaaaagctttttatgctactctgcagtctttctcctggtttgaaattatttcatattaaaaaataaaactcatgtaccaaacagtagtgcagacacagttgagtgaattatttggaac

SEQ ID NO: 349718 - DNA, 518 bp, Homo sapiens
atactcctatcaaaatgcataatctgaatcaaaccataagaaaatatcaaagatacaaaaagtaaggaacattcaagaaaataactggtctgtcatctttaaaagtcgcaacatgaaagtcaaggaagactgaggaacattccaagctgagggagacggcagagacatgacagctacaggtgatgtatgatcctttgctagatccttttctctaaaggacatgattgagacaattggccaaactgaaattgagcctgatgagatgatagtaatttatcagtgttgacttcctagtttagatgttggagaatttccttgtctgtaagaattacacactgaaatagttggaagtgacagggatttacatcagctacttattcttaagtgtgtcaagggaaaaaaaaagytttttatgctactctgcagtctttctcctggtttgaaattatttcatattaaaaaataaaactcatgtaccaaacagtagtgcagacacagttgagtgaattatttggaac

SEQ ID NO: 349719 - DNA, 588 bp, Homo sapiens
ctcacaactaccatgaacttttcaagataaagagatgacactgaatctatttttaaaatgtgagatcaacttctcaaaacttcaataacagattcccagagatacttgtacatagtgaagtgaaagagaactttaaatgttttacagatccaaatattaaaaatttaacagaagttattaaagtaaaagagcaaayaaagaagaaatgagtaaaaacaaaatatgtaactaaaaaataaagagagctgtcatagaaccggcttgctgctctgggtggccctggatgggcagcgttagcatcaactgggagtttacgaacaagacagcctcaggccccaccccagaccgagatagaatctgcatttcaagcagattccccagatgacttgggtgttcattagagtttgagaagcactagtctagaggcacatggagtttccctctcatgtagactaaaaagccatccaatcgctgagctcactgaagtgtggctccccatggacagaacctgagaacagcacaggcaagttgaggtggctgcagattgttttcatggggagcctctggagtacaaaggaagcaaagccc

SEQ ID NO: 349720 - DNA, 588 bp, Homo sapiens
ctcacaactaccatgaacttttcaagataaagagatgacactgaatctatttttaaaatgtgagatcaacttctcaaaacttcaataacagattcccagagatacttgtacatagtgaagtgaaagagaactttaaatgttttacagatccaaatattaaaaatttaacagaagttattaaagtaaaagagcaaacaaagaagaaatgagtaaaaacaaaatatgtaactaaaaaataaagagagctgtcatagaaccggcttgctgctctgggtggccctggatgggcagcgttagcatcaactgggagtttacgaacaagacagcctcaggccccaccccagaccgagayagaatctgcatttcaagcagattccccagatgacttgggtgttcattagagtttgagaagcactagtctagaggcacatggagtttccctctcatgtagactaaaaagccatccaatcgctgagctcactgaagtgtggctccccatggacagaacctgagaacagcacaggcaagttgaggtggctgcagattgttttcatggggagcctctggagtacaaaggaagcaaagccc

SEQ ID NO: 349721 - DNA, 602 bp, Homo sapiens
tttaaaatgtgagatcaacttctcaaaacttcaataacagattcccagagatacttgtacatagtgaagtgaaagagaactttaaatgttttacagatccaaatattaaaaatttaacagaagttattaaagtaaaagagcaaacaaagaagaaatgagtaaaaacaaaatatgtaactaaaaaataaagagagctgtcatagaaccggcttgctgctctgggtggccctggatgggcagcgttagcatcaactgggagtttacgaacaagacagcctcaggccccaccccagaccgagatagaatctgcatttcaagcagattccccagrtgacttgggtgttcattagagtttgagaagcactagtctagaggcacatggagtttccctctcatgtagactaaaaagccatccaatcgctgagctcactgaagtgtggctccccatggacagaacctgagaacagcacaggcaagttgaggtggctgcagattgttttcatggggagcctctggagtacaaaggaagcaaagccccagtgaggcaaaactgtgtacaaaaatatatgtttcatataatacagagatctagcagctctgtt

SEQ ID NO: 349722 - DNA, 588 bp, Homo sapiens
ctcacaactaccatgaacttttcaagataaagagatgacactgaatctatttttaaaatgtgagatcaacttctcaaaacttcaataacagattcccagagatacttgtacatagtgaagtgaaagagaactttaaatgttttacagatccaaatattaaaaatttaacagaagttattaaagtaaaagagcaaacaaagaagaaatgagtaaaaacaaaatatgtaactaaaaaataaagagagctgtcatagaaccggcttgctgctctgggtggccctggatgggcagcgttagcatcaactgggagtttacgaacaagacagcctcaggccccaccccagaccgagatagaatctgcatttcaagcagattccccagatgacttgggtgttcattagagtttgagaagcactagtctagaggcacatggagtttccctctcatgtagactaaawagccatccaatcgctgagctcactgaagtgtggctccccatggacagaacctgagaacagcacaggcaagttgaggtggctgcagattgttttcatggggagcctctggagtacaaaggaagcaaagccc

SEQ ID NO: 349723 - DNA, 595 bp, Homo sapiens
ttttatcagaaattgcattattttcaaagccctttaggccacagcattgagctactattgtttttctcagataaaggaagctgyatttttttctcattctactcatgattatttcttatttcttactctgggggatgtctctaatggaggctggtgaggcagctacccgtttgggggagacatgacatcacagatgcttgtcttttccttggctcccatctattggaaatagtaactaagtcctctgcctaagctggtaggagaggagctgtagaaaatcaaattaacaggagagaaactattagtcttcattttcttgttttcaacctgcgaacacagattgttaaatatgcctattccctaatcctcattaggaaatcttaaagaatagcaggacatgaaaaaagcatggggattatgagaaaatgctaccattgaaaaataacacaaagtgaggatagttttctctcatccagattatctgtacatttttagagttagcctatttgaaattttccattaaataattttattcctacttacatgtggatggatgatacacacacaatcccaaatatataattttatttagaat

SEQ ID NO: 349724 - DNA, 595 bp, Homo sapiens
ttttatcagaaattgcattattttcaaagccctttaggccacagcattgagctactattgtttttctcagataaaggaagctgcatttttttctcattctactcatgattatttcttatttcttactctgggggatgtctctaatggaggctggtgaggcagctacccgtttgggggagacatgacatcacagatgcttgtcttttccttggctcccatctattggaaatagtaactaagtcctctgcctaagctggtaggagaggagctgtagaaaatcaaattaacaggagagaaactattagtcttcattttcttgttttcaacctgcgaacacagattgttaaatatgcctattccctaatcctcattaggaaatcttaaagaatagcaggacatgaaaaaagcatggggattatgagaaaatgctaccattraaaaataacacaaagtgaggatagttttctctcatccagattatctgtacatttttagagttagcctatttgaaattttccattaaataattttattcctacttacatgtggatggatgatacacacacaatcccaaatatataattttatttagaat

SEQ ID NO: 349725 - DNA, 595 bp, Homo sapiens
ttttatcagaaattgcattattttcaaagccctttaggccacagcattgagctactattgtttttctcagataaaggaagctgcatttttttctcattctactcatgattatttcttatttcttactctgggggatgtctctaatggaggctggtgaggcagctacccgtttgggggagacatgacatcacagatgcttgtcttttccttggctcccatctattggaaatagtaactaagtcctctgcctaagctggtaggagaggagctgtagaaaatcaaattaacaggagagaaactattagtcttcattttcttgttttcaacctgcgaacacagattgttaaatatgcctattccctaatcctcattaggaaatcttaaagaatagcaggacatgaaaaaagcatggggattatgagaaaatgctaccattgaaaaataacacaaagtgaggatagttttctctcatycagattatctgtacatttttagagttagcctatttgaaattttccattaaataattttattcctacttacatgtggatggatgatacacacacaatcccaaatatataattttatttagaat

SEQ ID NO: 349726 - DNA, 589 bp, Homo sapiens
tgcgacatttcattaataaagttaactaaaactaattatacatattgagtaaaacttgcctgtgaaatgaatttttctatttagcttaagggttcttaattgttagactgaattgctgaggaagattgcagaattactttctcttgggagacatacatatatatatatatatattccccccctccaaccaatatggattgatggatggtgataccatagaaaccaaaaaagaaaaaaaatgattaaatatgaaagttaaagatactgaagcattgtcctaagaaaataaaactgcaaaataggtcacacagatctctttaagatgttaaattaggcctgttgtatttgtcacattatcttaaggggtttgaaattcaaattttcaaatgtatccacatttattgttttattcatagtgtagatttttccttcacttaattggtgaatattgtatttctcactctttcagagagtatgttttgtctaattcatccatctatttaaatctaaattcyagcagaagtccagggggcgcctcctactacctcagttgccccaaactcagctgatacattgtgagccagtattt

SEQ ID NO: 349727 - DNA, 588 bp, Homo sapiens
  misc_feature (1)...(588): n = A,T,C or G
aaggcaatgtaggatcctagattgtaacctagaatggaaaaaggacattagtggataaacttgtgaaatctgaataaagtctacagyttagtttatagtattgtatccatgctaatttattcactttaataattataccatggttgtgtaagatggtaacattcaggaagctggatgacgggtatgtgggaactacttttgcaattcttctgtacgtctaaaattatttcaaatttaaaagttgaaaacattgaagtgctttaaatatataataatattattattnataatataatttttgtgtgaagcacttccgtacatatttgttatgtagtcttggtttctagacattatgtatcagattggcatcacttagcttcactatgtagctcaccatctgcctttcagaagaggataactggatgttagaattaaattttactatttttccaatttgtagaccattaaaagaacatgattgcatagctcctccaacccaaaaagcacatgctttatcatgtaatattgtaattaatttatatatataattacaaacagtatataaaaactgttcacacatagaagtct

SEQ ID NO: 349728 - DNA, 591 bp, Homo sapiens
acatgatagaggcatttggaatataaatatgacttaaaatatactgagcaccaatcataaaagatatagaagctaaagaaaataccacaagcctcctcatgatttgtttttccctttgagaattattctctgtgaaatttagtaagctaagagctctgtttgttttttcctaagctgtgtttatgaaatgctgtgtttaacagatatttttctaagtttgataaattctgtacaagttcatgaatttacaygcaaaacatttggccctcatttcatttcagtcttcttctaatcaacttaaatgtaccatcagcctccatctcacatatttcaatattcattccactccttcaaccacctcttcccctcaaataaccttcagagaaatagcaattatttgagaaaatgaaatcaagtaaataagctgtattaaactagaaaccaagtagccagccgtattaaagatatccaaggtttgtatgtctgggtgaaacaacaataaatatttattttgatgcttctttttatgagcatttcaaggcccagctgtggtattaatggcttatcaagcaaacctatgcattaagagaa

SEQ ID NO: 349729 - DNA, 563 bp, Homo sapiens
ataagtaaatgaaactcggaagtgtctggagcctactgagctctacctagcaacactgtgtgttccttggcacacaagacagaaactcaaggcagacccatcacttcctcagataccatcttgtcccattttccttaagataaggtgtcctggtccatgggcctattatttggggtcaatcctcagcaggagaatggttaggtgttacagggagaggaaggtgacacatgtggtttggatttttcacccaaacccttttcaatgagccttagagaaatacaggagcctgttgaaacattacttactgcctgttgaatattggtcttcacttgctcactcaacatgccttcaaagacaaaggagtcgccaaacttctcagcctataaggaaggtaggaaataraaatccagaaaaggttgtagtaatgtgttgcatgtgtgcccttttctctccacactattaaagtgattcctcttgtccaattgaacttgagtctttcttatgacttcccagaggactcagaaatgacctaaaagtctctggcttcctcttaaattaatgtc

SEQ ID NO: 349730 - DNA, 586 bp, Homo sapiens
  misc_feature (1)...(586): n = A,T,C or G
tccctgcgctctgtgggcgcccggccctgacggggatcgacagaccaaaccttgtcacggccaggagccacatggcgcggccacacaggggcccctggccaagcccaggcaggaggctagctccaaaccggtgcctgccccgggtggcgggggcttcagcaggagcgccacccctacgcccaccggcatcgcccgggctggcgcgcagccctcggcsaatagcaagcctgtggagaagtttggggtccccccagcgggggctggctttgcccccacaaataagcacagtgccccggactccctgaaagccaaattcagtgctcagcctcagggtccacctcctgcaaagggcgaagggggcgctcctcctctacctccccgcgagcccccctcgaaggcagcccaggagctgaggactctggccacctgtgctgcggggtccaggggcgacgcggccttgcaggcccagcccggcgtggctggngcgccccccgttctacacttcatcaaacaggagccagtggccgaagggcatgagaagcgcctggacatcctcaacatctttaagacgtacattccaaaggac

SEQ ID NO: 349731 - DNA, 225 bp, Homo sapiens
cttcccttctccctctgccttagtattgctatctgatagtaacactgagaagcagttgctagctttcctcctgctcctccggcaygcgcactgcatgcggtgccccgttctggaacataattgaaggtcactctcacttaacgtccagaacacaaacctaagttctgttaaaaatcaaaacaaaacagagtctctcagttcattgcctgggaagtcctaaccgtt

SEQ ID NO: 349732 - DNA, 532 bp, Homo sapiens
ttcagtttccagtggttggrtgtgtgttttttctttacaattttgttcagttttgtacttgttttctgtattagtgaatcacttgacctcttacattgcaattaccaaaataagaactcaaccaaatgtaattaggatcacaacaagaatggaatttcttaggatcctgattctcaacaagccaattacagaaaaatgttcatgagataattaaggacatgtaaatgctgactgagtatttgataatattaaggaattatttttaggttttttttgagatttgataataccattatagttttgtttttattattatttttttaaaagagtgtttagcttttacagtcacatactgaagtgctttttttgtgtgttttgagacagggtcttactctgttacccagggtagagtgcagtggcgtgatcatgactcactgcagcctcaatttcctggactcaagcaatcctaccacctcagcttcctgagtagctgggaccacagacacatgcaccattttaaatttttgggtaa

SEQ ID NO: 349733 - DNA, 404 bp, Homo sapiens
cagtgtggctttatgaacaacatgacaccttatcagcactttggaagtagttctggttgaaccaccttgacaccaaaacaattcattcattcattcacaaacgtttgtcaasaatctagtacatgctaagtggtgggaagttgagtccctgagctcataattcattcaaccaatgttttcgagcatctactgttacattctggagaaatcaggacgcaaagcaattttcattctcaaagaattcatggtctcataagggaaaaaccaaaacaaaatttgaatgacagagtctatgtactaggtctacctagtacctatgtatatctagtacgtagagtctcatatgtatacctagtacagagtctctcacaggtatacctagtacatatgtatacctagtacac

SEQ ID NO: 349734 - DNA, 486 bp, Homo sapiens
aagcaagcttcatgaaacaggaagggagatgagaattccaatgcgaaaccacgatcagaacacaggagaaaatgggaaggcaggacacaggcagccgtgggatgcagttttctgggcccagcctgtctcaggactcagaagctttacctgtagcagactcctcctatagattcatgccattatgcagatacctctattccagactcgctcattcagggttacaaagtctcattttcttagcatctagcagctggctttagtgtttcactttacattgaatgatattcactgacatctttatgggttgaagttatttaccaggtgawcttatttcaatgtaataatgactctgtgtgtgtttctatgtgtgtactttttgtagtacttcaaatactgaactgttgcttaaccagaatatttattccctgctatcgaacttgtaatgaaaaccttctaaaaaatttaaacttgaggtaaattgaaagg

SEQ ID NO: 349735 - DNA, 518 bp, Homo sapiens
taagcatacataaataatgaaaatgattgcaattagtatttcttttttcagggccaaaccaaatttaaaccatttayttattttaatgtggctagatttctaatagtttcattattatcatacttttccattctcttcagaaaagtagaaactgcccatgctttaggtttataaagtatctaaaaggtttttaaaattatttttcagatgatctgattttgtcaagaatatttacagataattcttaaaacaataagcataatgtaatggaaatatttcacctatttctaatttattgcaactttatacacttaggtggggaatcatctgatattaaaatatatcctaaatccttgcaacagacctcaagtttatatttgatttatttccctggagggagagaagtatcaaatagaagtaaatttaaattaaaatatcttagtgagcaatacaaatataggcattttggaaatgggatttccattatgttaagataaatctaaaatgaaagcagattt

SEQ ID NO: 349736 - DNA, 518 bp, Homo sapiens
taagcatacataaataatgaaaatgattgcaattagtatttcttttttcagggccaaaccaaatttaaaccatttacttattttaatgtggctagatttctaatagtttcattattatcatacttttccattctcttcagaaaagtagaaactgcccatgctttaggtttataaagtatctaaaaggtttttaaaattatttttcagatgatctgattttgtcaagaatatttacagataattcttaaaacaataagcataatgtaatggaaatatttcacctatttctaatttattgcaactttatacacttaggtggggaatcatctgatattaaaatatatcctaaatccttgcaacagacctcaagtttatatttgatttatttccctggagggagagaagtatcaaatagaagtaaatttaaattaaaatatcttagtgagcaatacaaatatwggcattttggaaatgggatttccattatgttaagataaatctaaaatgaaagcagattt

SEQ ID NO: 349737 - DNA, 554 bp, Homo sapiens
agaatgttctaggtaacatgcaaactctctctcacatttttttttaaatatttatctctccaaaaattgctgccaattttatttaacaaatctactcattctggtctttgttcccatttctcaaatggtaccaatgacttgaygcttattaatccaatgttaatttttatctcactcaagctgccttgatactgttaactattcattagccactgagtgaatgaaatgagtaattttcctgcatcactcagtactacatccttggtcctttgcttctgaccctaagtctagttgctcaagtttgtacatgttcataatttaaattgccatttgcatgctaacaactacaatattcaaaacaacctatatcatttttcatcacattaagctcttgtatcctaaacaattgatatgctgcacagttacctatctctgtgccagttcagctgtgtagggaagctaatttgcagggacaaggggaaccactgaaatacgttccattcccacattctctttaaattaaccttttatgaaatgttattttctggccatga

SEQ ID NO: 349738 - DNA, 554 bp, Homo sapiens
agaatgttctaggtaacatgcaaactctctctcacatttttttttaaatatttatctctccaaaaattgctgccaattttatttaacaaatctactcattctggtctttgttcccatttctcaaatggtaccaatgacttgacgcttattaatccaatgttaatttttatctcactcaagctgccttgatactgttaactattcattagccactgagtgaatgaaatgagtaattttcctgcatcactcagtactacatccttggtcctttgcttctgacyctaagtctagttgctcaagtttgtacatgttcataatttaaattgccatttgcatgctaacaactacaatattcaaaacaacctatatcatttttcatcacattaagctcttgtatcctaaacaattgatatgctgcacagttacctatctctgtgccagttcagctgtgtagggaagctaatttgcagggacaaggggaaccactgaaatacgttccattcccacattctctttaaattaaccttttatgaaatgttattttctggccatga

SEQ ID NO: 349739 - DNA, 554 bp, Homo sapiens
agaatgttctaggtaacatgcaaactctctctcacatttttttttaaatatttatctctccaaaaattgctgccaattttatttaacaaatctactcattctggtctttgttcccatttctcaaatggtaccaatgacttgacgcttattaatccaatgttaatttttatctcactcaagctgccttgatactgttaactattcattagccactgagtgaatgaaatgagtaattttcctgcatcactcagtactacatccttggtcctttgcttctgaccctaagtctagttgctcaagtttgtacatgttcataatttaaattgccatttgcatgctaacaactacaatattcaaaacaacctatatcatttttcatcacattaagctcttgtatcctaaacaattgatatgctgcacagttacctatctctgtgccagttcagctgtgtagggaagctaatttgcagggacaaggggaaccactgaaatacrttccattcccacattctctttaaattaaccttttatgaaatgttattttctggccatga

SEQ ID NO: 349740 - DNA, 517 bp, Homo sapiens
aacctactcttcggtcatgaagtccttacaaaccaatgctttcatctatagagtcttgaggctaatttatgtatttgtttctttagaagttatataataacatgcagaaaagtaaagttagctttacatgttgttcactcttttgaaatagtagctttaggtctaatttacttctaatatcattagcaaatattttctgcaaagattttacccttctttacatggctttctcagacaattggaagaaatgccttgtacttattgtgttgttttgttgtttttccgttccagactgaccactgatatcatggattctctatttaacatagaatgtattactaactgaaccatgagaaaataaaataaactaatagaagcagaaaatataataatgaaaraaatccaagataaagtgtgcattaggccattcttgcattgcgattttctgttttagtctgtttttgcactgctataaaaaaaatacctgagactgggtaatttataagaaaagaggttt

SEQ ID NO: 349741 - DNA, 621 bp, Homo sapiens
ttggtattagggtaattctggcctcatagaatacattagaaactattccrtgtgcctctatcctttgaaaaagattgtagagaattgtcagaatttcttaagtgtttggtagaactcaccaaggaattcatctaggcctggtgctttctgttttggaaggttattaactgttgattcaatttccttaatagataggaggctattcagataatctgtttcttcttgtgtgagttttggcagactgtgtctttcaagaaattggtccatttcctctaggttatcaaatttgtgggcacagaattcttcacagtattcctttgctatccttttgatgtttatgtgatctgtagtgaggtcttcactttaatttctgatgttaataatttgtgtcttctgttcatttttcttggcctgactataggcttatcaattttcttgatcatttcaaagagtcatcttttgattttgttgattttctctattgatttcctatctttgatttcattgatttccgtgctaatttttattctttcttttcttttgtgtacttgggagttaatttgctcttctttttctggttttctaaaaccttctaattgtctacttacaaggtctagacac

SEQ ID NO: 349742 - DNA, 621 bp, Homo sapiens
ttggtattagggtaattctggcctcatagaatacattagaaactattccgtrtgcctctatcctttgaaaaagattgtagagaattgtcagaatttcttaagtgtttggtagaactcaccaaggaattcatctaggcctggtgctttctgttttggaaggttattaactgttgattcaatttccttaatagataggaggctattcagataatctgtttcttcttgtgtgagttttggcagactgtgtctttcaagaaattggtccatttcctctaggttatcaaatttgtgggcacagaattcttcacagtattcctttgctatccttttgatgtttatgtgatctgtagtgaggtcttcactttaatttctgatgttaataatttgtgtcttctgttcatttttcttggcctgactataggcttatcaattttcttgatcatttcaaagagtcatcttttgattttgttgattttctctattgatttcctatctttgatttcattgatttccgtgctaatttttattctttcttttcttttgtgtacttgggagttaatttgctcttctttttctggttttctaaaaccttctaattgtctacttacaaggtctagacac

SEQ ID NO: 349743 - DNA, 573 bp, Homo sapiens
ggaactgttgtttgcttgtctcttccacacctgagcaattctattcataaatgaatgcataaatgcaaagtccatgtaaaccattccacagacttctctcggaatcctgatgacagaagaatgtggtttacaaataagcggcatccttcatcatgccaggctagggctcttagcatctaactggcaagcagttagaccatcaaacttttgaaaactgcttgcaaaagagcttatctttccctggagataattacctggcactgaaccaaagccacttatataaaagttaagaaagttcagttaactttctgatagcttgtatgcttcagcttttgattttttaagagacaggggtctatgctatgtcayccaggctggagttgaacttttgggctcaagtgatcttcccacctcagcctcccaagtagctgggactacaggcgtgcaccaccacacctggcttgcttcagcttttagacagagaccaacaccaattttgctaacctcagaagagcaaatcttctcatagtgcagatgacctagaaaaacaactgagattttgcccctcatgaa

SEQ ID NO: 349744 - DNA, 559 bp, Homo sapiens
gtttgttgcataacaaagaaactctcttctaggtaggtaagtggacagataccaactcaggtaggacttaagaggtgtaagatattggaagggtgcgcattaaagtaagtatgaagggaaaatgcctttgagattctgataaaaattatgaacttggtttcttaaaaagatgattatatgtacaatttggcaaatgtgcagaagattttttagttcatgaaactcatctataggattgtaacagtttatagacctcatactaagaatcccagaataaaggcattttcctctagtaaaaagcaaatgtctctaatatccagaatctacaaggaactgaaacaaatttacaagaaaaaaacaaacaaccctatcaaaaagtgggcaaaggataygaacagaaacttctcaaaagaagacatacgtgtggccagcaaacatatgaaaaaaagctcatcatcactggtcattagagaaacaccaatcaaaaccacaatgagataccatctcatgccagttagaatggcaattattaaaaagtcaggaaactacagatgctgga

SEQ ID NO: 349745 - DNA, 583 bp, Homo sapiens
actcataagtgggagttgaacaatgagaacacatggacacagggagggaaacatcacacactggggcccgttggtgggtggggggcaaggggagggatagcattagaagaaatacytaatgcatgtgaggcttaaaacctagatgatacgttgataggggcaccaaaccaccatggcacatgtataccaatgtagcaaacctgcacgttctgcacgtgtaccccagaacttaaagtaaaattaaaataaaaaagcaaatgccactgaatgaaacaacttcaaattgtttgaatcatctgtacatattgattgtctttcaatgaattcttattaagcacctaccctcacataaagcactgtacaaaatgctgtacacccttaggctgtctcagtggaacctcaacatccaaaagcaggcttggataagaggcagtgtattgctttacagtaatggaattattgtaaccaaaggattttgttgttgtttgttcttgttgttgttatgctcaagtttaatttttatacttattttttaaagaaagaattcttcaagcccagaaagcacgttaacttttcattatga

SEQ ID NO: 349746 - DNA, 395 bp, Homo sapiens
caacataccttttaaataaagccccacctaggagaactgcaaaaaagagaaaaaaaaaagtacctgtaagaagactgcatgcggtggctcatgccagtaatctcagcagtttggraggccaaggtgagaagatcacttgagctgaggaggttgaggctgccgtgagccctgttcactccactgcgcttcagcctgggtgacagagtgagaatttgtctcaaagaagaaaaaaagagtacctgtaaggaaaacaaacaaacaagcaaacataaaagcaatagagcaagtgctgttgtttaaaagcattcccagcaccattagcatctgggtacctccattagcatgtctttttctttttattccccatatctaggccttatcacaagcctgttatt

SEQ ID NO: 349747 - DNA, 570 bp, Homo sapiens
gtttgcttgctatttatttttgcacaacacagttataaaggattttaagaaattaatatcagtacaccaacagctgaatgactatgtccactcagtttgaccataaggaaaataaaacagctataggacctaaaatccagcaattattttaccgaatttgacaaytttttatactctgtgagaaatcatgtaagtgaaatttaaactttgtgtatatcatagtcctttctttgtccacatcatctagcaattatttgtcacttctgtaaaccagaaagcatgtttatgaaagccaataatatacatatttagttaaatttttcttgagtctcaggcattctctcaaggcctgagagcctagaatcttcatgtggttaatttaataggctggatttgggtagtccctcattcccactctacctcctaaacattttctttcacagaccgtagctttctctctctctctctctctttcttggtctctctctctctcatttctctatcatacaagtttttttttaaaatcatttccccgaggttacaaataatgagctcagtaagataagaaat

SEQ ID NO: 349748 - DNA, 570 bp, Homo sapiens
gtttgcttgctatttatttttgcacaacacagttataaaggattttaagaaattaatatcagtacaccaacagctgaatgactatgtccactcagtttgaccataaggaaaataaaacagctataggacctaaaatccagcaattattttaccgaatttgacaactttttatactctgtgagaaatcatgtaagtgaaatttaaactttgtgtatatcatastcctttctttgtccacatcatctagcaattatttgtcacttctgtaaaccagaaagcatgtttatgaaagccaataatatacatatttagttaaatttttcttgagtctcaggcattctctcaaggcctgagagcctagaatcttcatgtggttaatttaataggctggatttgggtagtccctcattcccactctacctcctaaacattttctttcacagaccgtagctttctctctctctctctctctttcttggtctctctctctctcatttctctatcatacaagtttttttttaaaatcatttccccgaggttacaaataatgagctcagtaagataagaaat

SEQ ID NO: 349749 - DNA, 518 bp, Homo sapiens
ttattttaccgaatttgacaactttttatactctgtgagaaatcatgtaagtgaaatttaaactttgtgtatatcatagtcctttctttgtccacatcatctagcaattatttgtcacttctgtaaaccagaaagcatgtttatgaaagccaataatatacatatttagttaaatttttcttgagtctcaggcattctctcaaggcctgagagcctagaatcttcatgtggttaatttaataggctggatttgggtagtccctcattcccactctacctcctaaacattttctttcacagaccgtagctttctctctctctctctctctttcttggtctctctctctctcatttctctatcatacaagtttttttttwaaatcatttccccgaggttacaaataatgagctcagtaagataagaaatactcgtgtgcagcacttttaaaaccaaaatgatttcatgtaatgaaataactcaaatgcttctagctacattaagtgactctctaggggcc

SEQ ID NO: 349750 - DNA, 618 bp, Homo sapiens
gtagggaggatatcaggagagtatcagaataatttggggacctttgagaaaaaattatacacatctccccaaaattcttctatcctccatccccttttgagaaccactgttaatgatgatgatgtatatctgctagttcactcatgctgtgcagaaaaaatattaataatttctgacctagagagttatttcatcagttggaagaactagttcaatgtgaagtgcattatttttgaacttctgtttttaaactgtttgctctattaaatatattttacaaatgacatctccaaattcaaaggaaatatgttacataaatgaggaagaacatatttgttcattcataatgtarcaataaataacagataggagagtaaaatcactccttttctttggctaagggagctgctagttttactcatcgtccccaaagacagtactagttggaattgcagttggttgaattgaatcagtaagaatttaagaactgtgagataagctattgaggagagttacggatttgctttcatttctataacagctctggtttaggagaaatctttcttagacatgagggatggtgaggtccctgcgtgagcagtcagaaaatctaggtgc

SEQ ID NO: 349751 - DNA, 618 bp, Homo sapiens
gtagggaggatatcaggagagtatcagaataatttggggacctttgagaaaaaattatacacatctccccaaaattcttctatcctccatccccttttgagaaccactgttaatgatgatgatgtatatctgctagttcactcatgctgtgcagaaaaaatattaataatttctgacctagagagttatttcatcagttggaagaactagttcaatgtgaagtgcattatttttgaacttctgtttttaaactgtttgctctattaaatatattttacaaatgacatctccaaattcaaaggaaatatgttacataaatgaggaagaacatatttgttcattcataatgtaacaataaataacagataggagagtaaaatcactcctyttctttggctaagggagctgctagttttactcatcgtccccaaagacagtactagttggaattgcagttggttgaattgaatcagtaagaatttaagaactgtgagataagctattgaggagagttacggatttgctttcatttctataacagctctggtttaggagaaatctttcttagacatgagggatggtgaggtccctgcgtgagcagtcagaaaatctaggtgc

SEQ ID NO: 349752 - DNA, 622 bp, Homo sapiens
agtgggttctaggacctagcacagtatgcacattctggtaattcagggaataatgcattacatttttttcttgtctttctaaaatgattgaaatcctttgtgaaaagggcatggacacagcatgcagacaaacatgagaagtaattggcacccagtagtgtaggacttggtgatgctgacataaaatattgtgggactatgaaagattttagaacaaattctccagtcgaatttttaggcgattaaaaaatttgtattggtggcatscaagacactgtaggcaatgtaaaagcaaatatagtgcattgctcaccttggcattaatattatatagactgtgactttaaattcacctaatccattctgtggtcttagtgcatattgttttgcattcgtttgtgcttcacatcacagtgtattaagttcagtatgagttaagggcaataatgtgtcaaattccatttgcatcctttgactttattttaagtaactgagtaataaaaatccacaccaatgttcaggagatgactctggggcatggttctccatagtatgtcctaaggtgcacacggagtctgaaacctagtgatattggattcagaggatttgaggctgtgggcct

SEQ ID NO: 349753 - DNA, 622 bp, Homo sapiens
agtgggttctaggacctagcacagtatgcacattctggtaattcagggaataatgcattacatttttttcttgtctttctaaaatgattgaaatcctttgtgaaaagggcatggacacagcatgcagacaaacatgagaagtaattggcacccagtagtgtaggacttggtgatgctgacataaaatattgtgggactatgaaagattttagaacaaattctccagtcgaatttttaggcgattaaaaaatttgtattggtggcatgcaagacactgtaggcaatgtaaaagcaaatatagtgcattgctcaccttggcattaatattatatagactgtgactttaaattcacctaatccattctgtggtcttagtgcatattgttttgcattcgtttgtgcttcacatcacagtgtattaagttcagtatgagttaagggcaataatgtgtcaaattccatttgcatcctttgactttattttaagtaactgagtaataaaaatccacaccaatgttcaggagatgactctggggcatggttctccatagtatgtcctaaggtgcacayggagtctgaaacctagtgatattggattcagaggatttgaggctgtgggcct

SEQ ID NO: 349754 - DNA, 569 bp, Homo sapiens
taaagccaaaaaatttataaatctccagtctaatcacayttctagaaacaaaacatgtgtcagtagtaaatcttatgcagaataaaattttacccgtgagctgagtcacccaccagacaggatgcaccaaaccctaccttgtgtcctctttaactttagagtatacaacagcacctcctaccttggtgtgtacccaagcacacaatgccttaaaaataatttgcagatacaaggctggttttttttttccccaaaaatgtactcatatttcctcttttattatataaataccagttcaaccttttatggtagtaagaaataaacattttaagaagatctttgttattatttatacaaattcacaaacaggacgattaattgatgaatttctctgggtttctttaactccatggtcttgtatgttgctgtggaggattctaaaaaaaaccacaaaaaatacaacaaaaatatacattctactcaaaagtgatttctttaaagccacaactagttgtccctcacaccattctgtgcagggcagtgaggtgaattgccacatcccagcaaga

SEQ ID NO: 349755 - DNA, 548 bp, Homo sapiens
ctcccaactattcaagtcatattatttctatttcttttgcaaagaataaaaagtccaccacaatctcccttgaaaaataatcttcaaaattattttcttctcactttcaccacaagcaaacaaatgaaacaatatagaaactttccagaatggtgcagctactacagaaagcaataggaaggttcctcagattaaaaatagaactacctattatattatccagcagtcccacttctgagtatttacccraaagaattgaaatcaagatctcaaggagatatttgcactcccatgttcattgctatttataatagccaagacatggaaacaacctaaacgcacattaacagatgaaaataagagaaaacgtggcatatgcatccaatgggaatattattcagcaataaggaagaaggaaatcttgaaatatgcacactcatagatgtattttgaggacatcatgctacgtgagataagccagtcatagaaggaaaatactgcaggatcctatttatcagaggtatctaaaatagtgaagcttatagaag

SEQ ID NO: 349756 - DNA, 588 bp, Homo sapiens
tttagagtaataggaattcaggatctttctaacttttttttttctcctaagttttgttttacctatgtttaacacaatagaaattgttattcttaatttttaaaatcaactcatctttatcatattttttaaaacactcatgtttcaatgttttttcatatttacattgcatcatttataaatttaaattgtgtaattatgataaagtagggtaggtatgcaaacaaatacagcagatttttattatcagtcctttaaggagcagaagtgcttctcagttctgagactctaaggactcttggtcgtttcagagtgaatgaggaatgttgattaatggggtaaaacatacatactaacagagcataaacaagaaaaagagtttaataatctaacattttagataagttatttgcaagtggaagttgatygtgatatagttttcaagtcctttgcaaaatccagtggcattttgtctacacagattttcctgaggcactttctgcacaaatgcacacaagtacgcacctcctgccccgcaactttccatatcatcttttagatctggcaaaatactctctaaggctagac

SEQ ID NO: 349757 - DNA, 555 bp, Homo sapiens
gagatagcgaaattcttgtttgtttgagatctgccttgtactcccacttagactcatgtccaatgacttaacggcattttatattgatcacacacatagttgaggggcttggtgcagatattatttactagcatgaatttttgtgtgtgaatattatatagtaagaagtaatattgttcagtatatacattttcttcgtgacatgaaataagacaatgagttgtttttttccgtaatccactcacaatggacagaaagagtattaactaaaatgtttgagggtgaagaataagttaagagtacatgggggaaaattacctgttctactaagtaagaatacttagtattgtctgttaatgcagagggctgggccagagaaggtgagtaaatgttaatataagagattaacacactatggttgggtgcagagtctgaagcagatcgtttgatattgttgttttatgctctactacatctaattaggtagatgacaacttyaagaaaaccctttcttcctttactaatgccaaggaggatcagctcaagagccatttg

SEQ ID NO: 349758 - DNA, 523 bp, Homo sapiens
aacagaacatgagcatggtctaagcaaatattacagaagagaagaagtgaattggcaccaaatagtcaatatgtctttttggcttaatgcaacctagcactgcagagagggaggactgrcagtgacaaagtaatccctttatcactgtgtcttggagtttaagtatttgcttttccattaggaattaaagaaggctaaatttatattttatagcttacaacttttagaaaggaaactctccttgagcacaagcaactatgccttttattatttttttctaggactagagttccttgtacttatggtttgttgacatgtgcctggcctcttggagtacgtgcagttagtaatatgcggtttagaagtaacagaaactagctgtgaatcagcttacacaactggaggaaaaacaatcagtcatgacagcaataattagaattcatcaaattatattcatattctctcctgtaacttctttattctgataatctccaatgcacattaagagctaattagagaagaa

SEQ ID NO: 349759 - DNA, 523 bp, Homo sapiens
aacagaacatgagcatggtctaagcaaatattacagaagagaagaagtgaattggcaccaaatagtcaatatgtctttttggcttaatgcaacctagcactgcagagagggaggactgacagtgacaaagtaatccctttatcactgtgtcttggagtttaagtatttgcttttccattaggaattaaagaaggctaaatttatattttatagcttacaacttttagaaaggaaactctccttgagcacaagcaactatgccttttattatttttttctaggactagagttccttgtacttatggtttgttgacatgtgcctggcctcttggagtacgtgcagttagtaatatgcrgtttagaagtaacagaaactagctgtgaatcagcttacacaactggaggaaaaacaatcagtcatgacagcaataattagaattcatcaaattatattcatattctctcctgtaacttctttattctgataatctccaatgcacattaagagctaattagagaagaa

SEQ ID NO: 349760 - DNA, 558 bp, Homo sapiens
tcttggagtacgtgcagttagtaatatgcggtttagaagtaacagaaactagctgtgaatcagcttacacaactggaggaaaaacaatcagtcatgacagcaataattagaattcatcaaattatattcatattctctcctgtaacttctttattctgataatctccaatgcacattaagagmtaattagagaagaattgttccatccaactgacatttagttactcataagccattgaactgctagaggctggactatgttgtcttctacagtagttcataattaagatgttataatgcacatagacattgtgtatgtatctttaaacatgcataggagttcatactatatatttcattatgcctagaaatttttcatattaacctacctttttcccattagttttaaacaaggaaaaaagaaaagcaggaaagcagtgcaaatagacgcccggttttaccctgtgagttttggagaatttagtcttcaccaattgccagatagaagagtagaagttgattttccctggtagatttatttagaatcagcctggaagc

SEQ ID NO: 349761 - DNA, 622 bp, Homo sapiens
gcttgttgatcgttctctttcatacctatttctctctttatctttcttcttctttttatgtttcccaggggatggtgagagagacaattttcttttaggacaccgagactttttaggagatcttgttccactcctgcttcttcgttgttgtctctctgtttgtacttctataatgtctagccgtgctgtaactttctgggggtgtttttgaatgtttcttttgtcttctttctttctgtctctcgtttttgatgtgctccttgaccttctgcctctctctctggaatgagatcttctctgtcttgggcttttgaatcatcaacgactcctagactgacaatgtaatcactctcttgatctgctccttgactgtgtctagaagatgagagtcctcctcctcctagaatgtgatcttgaatgccttcttttttctttctctggttctatagcagccgaaattaggcagtgtgcttcttgtactcttttcayagcttcctctatttttttttgagccaagagttttgtgctcgttgcccaggctggagtgcaatggcacaatctcggctcactgcaacctccacctccagggttcaggcgattctcctgcctcagcctcctaagt

SEQ ID NO: 349762 - DNA, 622 bp, Homo sapiens
gcttgttgatcgttctctttcatacctatttctctctttatctttcttcttctttttatgtttcccaggggatggtgagagagacaattttcttttaggacaccgagactttttaggagatcttgttccactcctgcttcttcgttgttgtctctctgtttgtacttctataatgtctagccgtgctgtaactttctgggggtgtttttgaatgtttcttttgtcttctttctttctgtctctcgtttttgatgtgctccttgaccttctgcctctctctctggaatgagatcttctctgtcttgggcttttgaatcatcaacgactcctagactgacaatgtaatcactctcttgatctgctccttgactgtgtctagaagatgagagtcctcctcctcctagaatgtgatcttgaatgccttcttttttctttctctggttctatagcagccgaaattaggcagtgtgcttcttgtactcttttcacagcttcctctatttttttttgagccaagagttttgtgctcgttgcccaggctggagtgcaatggcacaatctcggctcactgcaacctccrcctccagggttcaggcgattctcctgcctcagcctcctaagt

SEQ ID NO: 349763 - DNA, 596 bp, Homo sapiens
gatgctgaacttagtgtggacacctgatcggcatagtgcacaaaagcccacaactcctggactcaagtgatctttctgcctcagtctacctggtagctgggactatatagccttgcgccactgtgccagctactttagtagcttttaaatgtctgtttcaaatctatctctggagaaattggaccagctctgaactcagaaaaaataggatattctaactcatgaggtaaaatgctcctgaatcatttggggagggggaaaagagatgagtagtgagcagagccaagatggtcattcatataattcatccttagaaaaaattaattctccatactccctttaaaaataacaagtgattaagcagtggcttaattgctctcttaaaagtttatataataatctagaggctggatgcggtgactcactctgggaggctgaggtgggtggatcacctgagttcaggagttcgagaccagcctggccaacatggtgaaaccccgtctctacyaaaaatgcaaaaattagctgggtgcggtggtgtgcgcctgtagtctcactcactcaggaggctgagacaggagaatcagttgaacccg

SEQ ID NO: 349764 - DNA, 574 bp, Homo sapiens
aggtcaatagcaatatcctgattacaagttttgtctgcctccaaggaactaaaaaactgtgtatcaaatctgttttcagtgtcttttgggtatctagaaggtttgaatggagaaagtttagttgtggacaattaagggacctatttaagatcataaagaaaggtcagtttaaaccatatgaaaatttggttcttttgagaaatgaaaacatttaaaatgttagaaactgtaatctcattcttccagactttatgtttgaactttccactgcttctgccagtcatccctggactcctaagattttgagcatttcattttgccatgagagaaactaaacccgtggtttggggttcattgtatttaagacttgtgcaagagcctttaacacttcactacttctgctctaaataaakattcctctcttctaggaatttagaaaatatgacttccgcttcagtgatttgctaataataaaaaaggacagaaaaaatgaaagttttgttttctttttggtcaaacttattttttctttgaaatattgcaaatagcatatcaaggtataaacacttgtctg

SEQ ID NO: 349765 - DNA, 580 bp, Homo sapiens
aaattgcgttaaactccaagattttcccaatcaaaactaatttggaggcatttttctaaatttagagtaagttggaagccttatgtgttggagtggattgtaaatatttaacaacaatttcagtcaaccactggtctaccaggtgcgaaaccttctataggtctccaaattatgattctgggactaagtgacccatcactcagatccctctctaacaaaatgtaagcaagtttttctcatatttactttgaaatagcagttaaataaatgaacaaataatttgttctattaatacttactgataaccstctatgtgcaaagcacaacattggtcctttagggataaaaatatgcatcaaacttcgcactcaaagagcttagagtttaagggggaaaattagacatgttcacaaaatacataaggccctaacagaggagcagataaagggccttgcctgggacttcagaatttatcatttatatgctgaatccccaaaaatatttgacatgaccaaattaaaagtgattagccatagagtttgaaacccaacaaaaaagaaacaaatacaaaccccctatg

SEQ ID NO: 349766 - DNA, 547 bp, Homo sapiens
gattgtaagtttcctgaggcctccccagccatgctgaactattagtcaattaaacctctttcctttataaatgacccagtcttgggcagttctttatagcagtatgaaaacagattaataaagtggtgttcactagctcctaattaatgtgtgaagtgcaagaagttatttattggaagtgcttaataaatatatgtatatgtgcttaaaaataaaaataaataaatagctcaaccagagttggaggttggggaattctgaaccatctttgttctggaatgctgcccagtacaaaaacctttgtcttgctcaaataaactttgttaaaaaaaaacaaaaaacaaaaaaaccggcttgatgatttggaccttaaattgggatagctggctaatgtcatttcctaagactgatgggggaataaaatagtagagattgcacaacagcaggctgggtctacagagaggagagaatccawaaagaataaacaggaggcataatggaagaaaactgcaggaaattagaatggtcaacattttggctcaagcca

SEQ ID NO: 349767 - DNA, 551 bp, Homo sapiens
tgtatttttttaaaaaataaaggcagtcaaaactaatagatccaaagatgagaaaaagcctgataaagaacaaaaatgattaagcataattgtgtgatttaaaagaaaaaagtaaaagcaaaaatcttgagatggaaggtaaacacacagaaaaaattgagtagcatagtagagcaataagctaaaataatgctgagatatagagatatttttcaaaagacaaagtataacttgagtaaaataggaatcaattgaccaaccagctggaagccagcaagtggcagaaatcctcagcaaaattctatgggttggaaacaatattttgtagagtgagggtcaatttaatagagtccctaatgggtagagatcagagagagaaagagaagtctgtgctcatagactcctgcccatcagcacaccttcggcaccagagcccacatcaggatttctcagcaattaggagcatgaggtcagggccctggggcagactgcctcagctgtrtgtgtggtcctgggccctgtaaactccactccgaatttaggtggtgcag

SEQ ID NO: 349768 - DNA, 555 bp, Homo sapiens
ggctgacatagagtaggtgatgagtaatttttggctgaatgagtgaatgaatgaatgaaccttttcttgaaacaagtatgttgattcatcgaaatggtttgatcaagaaataattatagaggttttctgagtgcaaataattctttttagcgtgatagagaggtaaaagcaagaataaaacaatattacagacttcaaactatttataatccagttggggatagcagatatatagaaatgatataatctgaacatgacataaaaagaaggtaatacaggtaatcacaagaycatgaacaattaatggccaaatatattatttaaacaataagtgctatgaaggcaacacaaggaagtgtcactgaattcttagtaatacagaaaacaaaaaaaaaattaagaaagagtatgagctgggcatattactggttgttcaatgactgccttttttgttaaaaaggaggagaaagagagaaagtggaaatgtatagttatcaagaagagagataagcagaacctcacttgttcccttaaccaggctatgagtatctctag

SEQ ID NO: 349769 - DNA, 489 bp, Homo sapiens
atgatactggtgatgtaaccattactaatgatggtgcaaccatcctgaagttactggaggtagaacatcctgcagctaatkttctttgtgagctggctgatctgcaagacaaagaagttagagatggaactacctcagtggttattattgcagcagaactcctaaaaaatgcagattaattagttaaacagaaaattcatcccacatcagttattagtggctaacgacttgcttgcaaggaagcagtgcattttatcaatgaaaacctaattgttaacaaagatgaactgggaagagattgcctgattaatgctgctaagacaatccatgtcttccaaaatcattggaataaatggtgatttctttgctaacatggtagtagatgctgtacttgctattaaatacacagatataagaggccagccacattatccagtgaattctgttaatattttgaaagcccgtgggagaagtcaaacagagagcatg

SEQ ID NO: 349770 - DNA, 586 bp, Homo sapiens
tggtggaatactatgcagctataaagaggaatgagattatgtcctttgcagggacatggatgaagctggaagccattatcctcagcaaactaacacaagaacagaaaactaaacaccacatgttctcactcctaagtgggagttgaacattaagaacacatggacacagagaggggaacaacacacaccaggacctgttgtgggtgggggatgaggggagagagcttagagggtgggtcaataggtgcagcaaaccaccacggcacatgtacacctatgtaacaaacgtgcacgttctgcacatgtagcctgtttttggtttttttgttttttttagaataaagaaaaaaaaagaattgtcactaraaaaaaaaaatgtacgtggaagcgggggcggtggggctggtggctggagagaagcagaaagggttattaaatgattgctgctttcaagtcatgagctgtctaatgaaaatgttccctcagtaaatgtggctctcattatcctgtttcctatcattactgacttctgaagtgtccccttcccttcctaggcactttatctaacacagagaggagaagctgg

SEQ ID NO: 349771 - DNA, 448 bp, Homo sapiens
catgttctcactcctaagtgggagttgaacattaagaacacatggacacagagaggggaacaacacacaccaggacctgttgtgggtgggggatgaggggagagagcttagagggtgggtcaataggtgcagcaaaccaccacggcacatgtacacctatgtaacaaacgtgcacgttctgcacatgtagcctgtttttggtttttttgttttttttagaataaagaaaaaaaaagaattgtcactaaaaaaaaaaaatgtacgtggaagcgggggcggtggggctggtggctggakagaagcagaaagggttattaaatgattgctgctttcaagtcatgagctgtctaatgaaaatgttccctcagtaaatgtggctctcattatcctgtttcctatcattactgacttctgaagtgtccccttcccttcctaggcactttatcta

SEQ ID NO: 349772 - DNA, 604 bp, Homo sapiens
ttaggggactttttcttaaattgtattttgaaaaattgatagttggatttggtttccagctaagctctcattttttggcactcctgtgaaatttgaaacctaatttaaatagcagttttctttkctgtaacctaatgactaatacatgttctcaaatcattgtttattctaaaaagagaggatacaaatattaacagatctaggggcaagacttcctattcttagctacttaagagcctgagatgggctagttgcttgatcccagggtactctgcagatcgaatgttggcctcaaatatttgacatcaatatgattgtccctgagaatggagatagattgagtttccattaagattagtgtaaaattgatattttggtagtttagtagccatatttttctcaaaataaagtactagaaattgaatatgcaattcagagagaaatagtgaaaaatatgaggggacttcaaaaattcatggaaaatggatattgtgataaaactatgcatggatttaataaatttttttacaccaaaataagcctgtatgaatgtgttatagcaagtctgaacaggacctagtttgaggcactaagaaggataaga

SEQ ID NO: 349773 - DNA, 568 bp, Homo sapiens
attagacaaagggacctggtgtaacatagtaggccacaaacagctactaaagagacaagggttataatcaaaggagatttatcagcagaggaccataagtcacatggaggattggcaaggatttggatttatcacaaatgcccttgagaaagctgattttcccatgaagtagtttcacttactgtgatgcagggcttatactaaggacccaccacaacaattaaaagcactaagctgggatcttagcgggctcccattgtccagaggtgatgcagtgaatgactacagaaatgaatatgaaagaaaatgagatgtgatatgaacttaagttcacatcacaaaacaagtttgacttagcttatattactgtttagattttgaatgaaacgttctcttataaaggtttttgcaaaacagctgctactgaactctaaacctggttaaccttyaacaactgctgctgtggcagagatcggtcattgctatccactgcccattctttttttcttgctcaactttattcagggaaggaatgcaccctgcaaaagtactacatttcctggcttcc

SEQ ID NO: 349774 - DNA, 544 bp, Homo sapiens
tgtaaatggtgcaggtgctatggaaaacagtttagctcaaaaagttggacacaaaattgccatatgacctagcaattcaactcccaggtatatatacccaaataattaaaaacaggtattcaaacaaatacttgtacatacatgttcacagcaatactattcataatagccaaaaggtggaaagaacccacatgtccaatcaacaaatgaatggaaaaacaaaacgtagcatttacaaatgatggaatattattcagccataaaaaggaatgatgtactgatacatgctacaacatgaatcacaaaaccattatgctaagtgaaaaaagctagacacaaaagatcacatattgtagaatttcatttataagaaatgccccaaatagtaaatccatagagacagaaagcagattratctttggaactggatagaggtgatggttgcattccattgtgaatgaatgtattaaataccaatgtactgtacattttaaaacggttacttttacacgatatgaattttaccacaattgaaaaataacta

SEQ ID NO: 349775 - DNA, 579 bp, Homo sapiens
ctatcggtgatatgtataccatgctttgggaaaaaccaaattaaacctgtacaaagaaaaagtgartaatttaaatataacaaaacaaacaagtatggctgtggattgaaagtcccagatttcccagataagttactggtgttctaaagtattggtatatgatctcacaacgaaaacaactatataaacattcctagagtaccctacttattttactctaatactttttaaaaaaacaaaaacattttaacagctgaaattaagaaacagctgaaattaagaggcttctttcatatctgatggattttatgatcactgtccaccaggtggcaattatgatattgttttcattacccatgtatgcttgaataacagaggtagagagtgtgttaatgtcttggcaaccctagagacaacagcagagcacacatttccacttaggagccacgggttgtagcgggaggcactcagcaacattttggatacagggatcaaaattaggctaggcctgcctaactgcaaagctatctggagggtatcaggtttgatgtcacacaacaatgaaaaaaaaaaaaaaaa

SEQ ID NO: 349776 - DNA, 494 bp, Homo sapiens
attggtgactttggtaattcagtcacatctgctaagtctttgtcacagttgggatcacgtggaataatcgcttgaacccaggaggtgaaggttgcagtgagctgaggygacggccactgccctccagcctgggagacagagcgagattccatcttaaatttaaacatggggcagctatcaaccaaagtcaaaagagaaacaaaaatataaggcatctgttaaaacattactttcaagtaaatgtaagcaggttttgaaaaattaattggctgcgtgtggtggcccacgcctgtaatcccaacactcagaggccgaggcgggctgatcacctgaggccaggagttcaagaccagtctggccaacatggtgatatctcatctctgcttaaaatacaaaaattagccaggcatggtggcgggtgcctgtaatcccagctactccggaggcggagacacaagaattgcttgaacccaggaggcagacagggcaaaacc

SEQ ID NO: 349777 - DNA, 494 bp, Homo sapiens
attggtgactttggtaattcagtcacatctgctaagtctttgtcacagttgggatcacgtggaataatcgcttgaacccaggaggtgaaggttgcagtgagctgaggcgayggccactgccctccagcctgggagacagagcgagattccatcttaaatttaaacatggggcagctatcaaccaaagtcaaaagagaaacaaaaatataaggcatctgttaaaacattactttcaagtaaatgtaagcaggttttgaaaaattaattggctgcgtgtggtggcccacgcctgtaatcccaacactcagaggccgaggcgggctgatcacctgaggccaggagttcaagaccagtctggccaacatggtgatatctcatctctgcttaaaatacaaaaattagccaggcatggtggcgggtgcctgtaatcccagctactccggaggcggagacacaagaattgcttgaacccaggaggcagacagggcaaaacc

SEQ ID NO: 349778 - DNA, 532 bp, Homo sapiens
agtttttggtctctactaaaaatacaaaaattagctgggcatggtggcggctgcctataattccaggtactagggaggctgaggcaggagaatcacttgaacctgggaggcagaagttgcagtgagctgagattrcgcactgcactccagcctgggtgactaagtgagactccgtttaaaaaaaaaaaaaagcttttacttttatttactatgtgccaggacattattctaagaatttttacatgtaacaattaacttttacagtttttatactcctttgtcttcttttctcgaaattttaataatttctgtgtatcattcttgggtcacctcttgctgtgaggctacagagaggggtggaaagggttattaactttgaagacacgtgcatatacattacttagtctcgcagaatagagtatcacattctatgtgtatttctcttccttccattctcctttcttttctctctttgttggtcccttttacttttgttttcttctttcctacactgttcctgccttatttcttt

SEQ ID NO: 349779 - DNA, 589 bp, Homo sapiens
tgtattcttgcaagaaggaaacagttacttacaaagctaagcaagcatttgatccatgattttaaatattcattttttcagagcatttcctgtagctagtttcccacttaagttctctttagtgtatacaaaaatggcatgttaagctgcctgagcttttcaacatggatgagttctaaagaacctcaacatctagaaggatccttgtttgtgaggtttaatatcatatggttawatttgctaactttcagataatttcaaataagaatagcgtacaatccattgtcaatattaattctttaaaataaccatcctctccatactttagtctctaatagattattctgatgatgaacagaattcacaattcaaatttgtgatggactaggaatattttcccaaactttgcactccatttgtattgataaagggcaataatacgaccaaatgagtatgtgattaaagtaagacatgactgatatcagtgttgagaaggcaaggacagatttggaaaccatcagcagtgatgaaataactctgaacatctttgccccaccagcaagtagaccagcaatagtatcaaaagaaa

SEQ ID NO: 349780 - DNA, 589 bp, Homo sapiens
tgtattcttgcaagaaggaaacagttacttacaaagctaagcaagcatttgatccatgattttaaatattcattttttcagagcatttcctgtagctagtttcccacttaagttctctttagtgtatacaaaaatggcatgttaagctgcctgagcttttcaacatggatgagttctaaagaacctcaacatctagaaggatccttgtttgtgaggtttaatatcatatggttaaatttgctaactttcagataatttcaaataagaatagcgtacaatccattgtcaatattaattctttaaaataaccatcctctccatactttagtctctaatagattattctgatgatgaacagaattcacaattcaaatttgtgatggactaggaatattttcccaaactttgcactccatttgtattgataaagggcaataatasgaccaaatgagtatgtgattaaagtaagacatgactgatatcagtgttgagaaggcaaggacagatttggaaaccatcagcagtgatgaaataactctgaacatctttgccccaccagcaagtagaccagcaatagtatcaaaagaaa

SEQ ID NO: 349781 - DNA, 568 bp, Homo sapiens
tggtgaattatattaatctttctatctcctctgtaggacagtcatggaaaaaaagtaatttttaatagaaagcatacaaaggaataaatttgtaataagacctccaccatggcatgttagaattgtgagtgagggtgtattaatcattattttttttcttttttaagtaacagatatattgatatataattcccttactataaatttcatccttttaaagtattttaagtaacaaacttgttgatataattcccttaccataaaattcaycgttttaaaatataattcaatggtttttagtatattcagcattgtgcaaccatcaacattatctaatttcagtaaactatcatcaccaaaaaaaaccttgtaccattactagtcactcctaaattctcccctctacccaagcattgacaaccactaacctatagatttgcctattctgagcacttcacttaactggaattatagaagattcagccttttgtgactggtttcttttaccctgtacaatttttcaagtctgatctatatataagtacttcattcctttttattgctgaaa

SEQ ID NO: 349782 - DNA, 615 bp, Homo sapiens
ctcaaattgtgaactttcttatcgtaataacctcgccatttccggttgatttccaacagctgtttttgttattgttctcgatgttttcatttcctgcaccccatttacagagagttggtttcagaataaatctttccttcagcaaattaatttgtcctgctttaattctcaccaaacggttcatcaaaatgtataaggtggactctgtggcagtggttcccaaactttgctgatgttgaaatcatctagggatcttacactattcgaatcctgcttctacctccccagaaattctgatttagttggtaygggctgtgaactggaatgccaggtgttttaaagctcctcagattattctaatgtacagcaaaatttggttaccactgtcctagtaattgtttagacttctcttggactgaatctccaaaactccccagctcctgctatcagactatattactcaccatccctgcttattccagtcatctgaggacctccaagaccttcctcctattctttgaagatgttagcagtggtaactccagagcgattactgccataattcttggcgatttccatgtccaggcacataatcctttcaacattttatccttt

SEQ ID NO: 349783 - DNA, 574 bp, Homo sapiens
ttgtgttcccaaattacatcttaaaagcatcatcctagtgctcctgaaagaagtcattatgggaaaatagcaargcctctccttttcctagtgtcacagaaaatgcaggaaatgttcaaagactgcaatgagttccccaaacacaaaatgtttctgcactcaacactttactagcatttgcagccacatacatttagacatttgtgattcattactagaccactattctcataagaacataaaataagaattaagaaaatgatcatcattcttaacaacagaaaatctgctcttcaaaattgctgacagaaagccaaattaataaatagtattagtcaaactaattgaatttatttattatctaaagatgctcttccacacagacagtcttggaaaataaggctacacttcttgtatttactctgaaagtaaaaatcttgtctgtatagaccttgaattatcactttgtacttttctaaaaacaaaagtgcactcaatttacaatatgtgtttctaaatgaaaataaacgactttcattcagatgtttgtgaaaccaaacacagacactgtcat

SEQ ID NO: 349784 - DNA, 626 bp, Homo sapiens
tctaatgattcacaagaatgtgtgtggagaacttaatatatggcatatgctcagaaagtggtagcttttatcattgttagttactaattaatccaaagggcatcgcgtggaaagaaggaatgggtcagtggcagtgatctccaaagactgagactgcatgtctaaaggcctgggtaatccattctattactgcatgccagaatggacttccccatattgtcatcccggaactaaaccactttccagggttcttcgaattgtgttatagcccaaataattagtgactgtacacaagagataattattgttgacattaaagtataacccaactggtttacaatggcctctcttaatttaattactcgataaacaattttaccctacttaaacttaaggtttcatgaaaatgatgacgctgatatattagctacactcaagttagtacagcccatagaaaacccagccatattggccattgmttaaaaatatgtaaataaatgataatttaaataaggaaaaaaggggaggtgtctgtgatccctacatcttgtcactcaccaagataaacaaatgtcccagaataattcatgaaatatacatattccattgttttggcgtgtgccctg

SEQ ID NO: 349785 - DNA, 532 bp, Homo sapiens
tttttaaatttcatgcaccagaattactataatacaggttactgtattagtccatgtatttagattactagagagcsttatatttttgtatggcttaatattgctatctactgtccctttgtttcaacttgaaggattccttttggcatttcttacagagcatgtctagtggtaataaactccttcagctttttttttaatctggaaaagtctttatttctcctttatctttatatctgaagtatagttttgctgaaaacaatattcttccttaacaattttttttcttttagcatattgaatatatcatcacactccctcagacctgcaaggcttctgctgagaaatccactgatattcttattaaaatttcctagcttgcaataagtcacttttcttttgcttctttcaaaattatttatttttctttgattttagacagtttgattatgttgtgtcttgtgtcttgggatggttatcttgggtttatcctggttgtatttctttgagtttcttgaatttgtctgcccat

SEQ ID NO: 349786 - DNA, 526 bp, Homo sapiens
ggtctggtgactgggaacagccagaatacaccatctttcaagcatcttttaaataccaccaccacataagaaggtatgaccctttccctgagccactcttgcaagcgtgggtcttaggaccataagctgggtcttgaaaattaaggagaataaagtaagtggagaggcaagaggaagggggagggaggagaaaagtagaccatatgaaagacaaaacctttaggacctggagcaaaccagacagaaagattcaggaggctgagaccagatagttggggggcctaaaagccaattggctacaatgatgtgcattctatatatacagattcacatatgtgcatatatacatatatatggagacatttaggagtcagttggaataattayccaggcatgcagtgtgtgttgcctacacttaggaatgacggtagaaatataaaagaagggatggttgagaaaaaaaaattgaagaacaacagtggacagatatcaacaggaagaagaagagggaagaatgaagaatgac

SEQ ID NO: 349787 - DNA, 526 bp, Homo sapiens
ggtctggtgactgggaacagccagaatacaccatctttcaagcatcttttaaataccaccaccacataagaaggtatgaccctttccctgagccactcttgcaagcgtgggtcttaggaccataagctgggtcttgaaaattaaggagaataaagtaagtggagaggcaagaggaagggggagggaggagaaaagtagaccatatgaaagacaaaacctttaggacctggagcaaaccagacagaaagattcaggaggctgagaccagatagttggggggcctaaaagccaattggctacaatgatgtgcattctatatatacagattcacatatgtgcatatatacatatatatggagacatttaggagtcagttggaataattacccaggcatgcagtgtgtgttgcctacacttaggaatgacggtagaaatataaaagaagggatggttgagaaaaaaaaattgaagaacaacartggacagatatcaacaggaagaagaagagggaagaatgaagaatgac

SEQ ID NO: 349788 - DNA, 581 bp, Homo sapiens
tttacaatcaatgtatttagcattattcctattgctggagataataatggtaaaaattcaaagaccctgtcctcatggaacgtagattctaatgagagtagatagacaataaccatgtaaacaaataagcaaataagataatttcatacacttcggagtgctttgaggaaaataaaacaggacaatgggaaagagaagagccacagggctggagttaggaaccaagaaaggaagacttttccaaggaggtgatgtttgagttgaacctcaaatgatgggaaggagccaggtatcagagacctaccgacaagcatttcaggcagtcactggcagaaacaaagttgatgtattcccaagaataggaaaaaggctagtgtggttggagtacagtgaaggagcaggaaagtaatctcagatgaggtcagagtagacagggtacaaaatccagacatatagtctggataaggctatatatatagatgagagcctatatataaggttttatatatatatataggctatatatataaggctttgtcaccmatctgagtttgaatgtattgtaagtataataggaaggc

SEQ ID NO: 349789 - DNA, 600 bp, Homo sapiens
tggcctttcacttaataataactgataatgttgtataaacagtacatactttaatcattcttttagagaaagatgggaatgaaatagcattaagctactgcatcaaagttgcactgttgatatatacgaacgagttacttatttttttttagttgatatctttcttttatttatttatttttttagagatagagtcttgttctggagtccaggcaccattatggctcactgcagtctctaactcctgcgctcaagggatccttttgcctgagctgcctgaatagctggaactacaggtgtgcaccacccagcccagctaattttttatttaaaaatttttattttcgtagagacaaggtcttgcctttttgcctaggttagtcttgaacttctggtttcgagcaatccttccactgcagcctcccaaagtgctacgactgtagatatgagccaccrtgcttggcctagttaatgtcacttacactcactgtcacattgcagtattgtagatttacatttccaactataaaatatgaaaatatctcctttatagtacactcttcaattttgaatatgatttttaagttttgcaatttggta

SEQ ID NO: 349790 - DNA, 566 bp, Homo sapiens
tttcatttttttttatgaaggagtcactgaaataattaaaatataacatccacttctttttcttggaacttaggtagcamtgtgagtaagtgttcagtaaaacttcatttttttaataaagcctcaacttgtgttcttttccatttggaatgcagcagccaaaaactataaacaggaaacagcctggaagatatcacctggacagctatgagcaatcaacacggcgtctacgtcccgcagaaacagaggacattgcaataaaggttatttttatttcctggattcttacatgaatagaaacatttatgttactattttatggtgaagttctgtgaaagtgtcccaaattgtgcctttaaattgtttttacagttgtcattaaccctaataacatttaaaaaaaaattctgagttttaattgtcagttcttcctcatctcccaaccacaatttttgctccagcagcacatttcaataaccagagaatgtgactttcttctgaatctgctttagaagctagtgtcacatgtattttttctggtattcctatgtttatcaaccaaataa

SEQ ID NO: 349791 - DNA, 566 bp, Homo sapiens
tttcatttttttttatgaaggagtcactgaaataattaaaatataacatccacttctttttcttggaacttaggtagcactgtgagtaartgttcagtaaaacttcatttttttaataaagcctcaacttgtgttcttttccatttggaatgcagcagccaaaaactataaacaggaaacagcctggaagatatcacctggacagctatgagcaatcaacacggcgtctacgtcccgcagaaacagaggacattgcaataaaggttatttttatttcctggattcttacatgaatagaaacatttatgttactattttatggtgaagttctgtgaaagtgtcccaaattgtgcctttaaattgtttttacagttgtcattaaccctaataacatttaaaaaaaaattctgagttttaattgtcagttcttcctcatctcccaaccacaatttttgctccagcagcacatttcaataaccagagaatgtgactttcttctgaatctgctttagaagctagtgtcacatgtattttttctggtattcctatgtttatcaaccaaataa

SEQ ID NO: 349792 - DNA, 566 bp, Homo sapiens
  misc_feature (1)...(566): n = A,T,C or G
gttgttcctgctgatttgntcatgtcattttatctactgctgggtctgattactatattgtatgtcagactttgcattataaactgcatattttttcccanattcatgtgttgaaactgtaatccataatggatgataataaaaggtgggcctttgtgagggtaattaggtcataagaatggagccccaactgactgagataccctgtaaatgacttataaaactaactggaggcctaggatgaaattattttactccaggaaggacttacttttatttctggtagatgactagggttactagcaatgtaggattatattagttcaatttgaaatattgaaagtattgtaccagtaccatgcttgtttggttactgtaattctgtagtatagtttgaagtcaggtrgcatgatgcctccagttttgttctttttgcttaggattatcttgaccattcaagatcattttttgtttcatgtgaattttaaaatagttttcttctagttttgtaaagaacccaaatggtagtttaataggcatagcattgaatctataaattgttntgg

SEQ ID NO: 349793 - DNA, 592 bp, Homo sapiens
tttaaatttccaatccacttttaaaaattgttttygcaacatggaaaatacacatttgctgctgaagaactgaagtgaaatagaattgtttccaaattatctttagtggtatgtattaatttcctatattataaaattaaaacagcatttctcatttttgtaattaagtttccaaattatgttacttacaagtgtacttttctgagcctctgccaactttgtagcaataaagtactgaattggcgcaaggagcacaatgacagctgcaccgaccaatgcacttgatccaagtaaattatagagcagaatcacgcccattatgatctagagagaaaaacacatggaaaagagaagatgaatgggttgtgggagccattgcatgaaaggacataatttttagtgcaaatgtagtatttcttaattattatattgtttatttggaagtcaacggtattagggttctctagagggacagaattaaccatcaagtcaacccagctgtgacagttgggttttactctgatttatttggggaaggctaagtgctaggaatgtatttttagtatgataatctgtacaactgatgtcaaac

SEQ ID NO: 349794 - DNA, 596 bp, Homo sapiens
ttgaatcatggcaaggtggaaaaagaaaaggtctttctagagaacagcaagaggggtaagatttagcctgtataaaggaaataaatgacaggaggagggagactgatggattcagaagggagattagtgaatgtcaaagtgaggaatctgaatttaagaaggaaagagaacaccttggagttttttgaagaaaaaatatgatcgtagtttcacttctatgaaaatttcattgctagtatgttgaatgagtgggaaaaaagggttgaagatcagatcagagttcattgcaatagcccaggcagcaggtaatgagggcctggacaagaataaagatagtgtaaaaagagacagatgcacgggacattgtgctagaggaaatctgtgatatttggagactgatttattaagaaggccagggataatttaggggataagaaaaagcaactataattcaacactggttctcrccatcaaaagattacagatgagggggtgactcctagaaaatacacagaatttgttttttgctatgttgagcatgctctccagcagaatgtttacagtaggtattgagttagaggaataaatgtatgtgt

SEQ ID NO: 349795 - DNA, 600 bp, Homo sapiens
tctcattctcttaagaaacaaagcttgtcaagtgcctttagacaagtagagaaaatattaggttgatgcttttcctaattgtctgctgctttgattaccaaatgcaaatcagtgaagtttctgaaagtacccttgagagcaagggtgaaattcttccagttgttgactttgcctttgacatgacttgtagacttcaaactcttggatttcctgagccatattagacttaaaaatttggagggtcttcaaaatggcaatggaaacgagtcatgttagctgaacaaataatggttggtctatttgcttagtatgctgctttactagtgtcctcgtataaaccactttggaacatattgctttggaatcaacttaataaaattgttacataaactagtaatcaaaacagcatgttataaacttacttttttggrgttatcatggaatgggaatgacagtataactcttctcagttatttgttccagtgaattcggagaacatttctttttgagatatgtatctatttatgtgcagaaaagcatcactctgttttaaataaggtcaccccatttcttctttgcaagctcagctcctcatacttt

SEQ ID NO: 349796 - DNA, 585 bp, Homo sapiens
atatgtatctatttatgtgcagaaaagcatcactctgttttaaataaggtcaccccatttcttctttgcaagctcagctcctcatactttagcaagctcacaggtgtgaatcagaaaggtcaggaaaggaggcactcacaacaataactaccctttgatttgcatctaggtgagcaaaacaacatccctkctccaaggcattcttggggagaaagctgttagcaaacaagtaatacattacataattattaatagtggtaaaatatataaagaaaataaattgagataaggatcaaaagtaactagggccagagatgacagttttagatagggttcaaaaaagacctctttaaaacagtgacatttgaataaagaatcaactgtatgatcaacttgggaaagagtgcttcaggcagcccaagagcaagtgtaaaagctttgaggcaggaaatagtttgatgtgcttgaagaacaataagaaaatcagtatagcagatggataagaggaaaggcagaagaagagctgggaaaactgggaagtgccttcactgttctctccatttacccaatgaataaggattggga

SEQ ID NO: 349797 - DNA, 589 bp, Homo sapiens
atgaataggtttgattagtgcaattctaaagacatggaaaagaaagtgcatcttccagacatttgaatgattgcttccagcatgatgtttcttctagatatttgaatggtggtcaaagcacattgtggtaataaagtgattcagaaatatgttacataattggttaataaagagtaaattatacttatttagtttggcctacttagtagactcctcgtaagtagtttatggatacactggctacagctgatctaagaaattaggctatagaccagtggttctcaaacgggtgtgatttttgtccccggggacatttggcaatgtctggagacatttttggttttacactgaagcaytgggttgctactggcctggtggatagaggccagggatgctgctaacatcctacagtgcacaggacagctcccataccaagggattctcttgtcccaaatatcaattgtgctgaggttgggaaacccacagatgttctttcatatcattttgtatctactatcatgaattccaccgtggctgagtttgctgtttacatacacagacatctctcaagaatgagaagactatgggc

SEQ ID NO: 349798 - DNA, 553 bp, Homo sapiens
tgctggcccttgtccacaagcatctatttttgtgcctcttttagcctcctcacctaccctaggagagaaaatggaatcttcagcctctgaggctgtataatttctttgcatgccatttgtcatttaaccataatgacagccccagccacctctgccccagctagctctattcatcatttcctctgacatattttacggtttttttgatcttcagcctattctcactatagttctttacctacaaatgctttcattgacattcagtatattttacaaaactagttaaaaggcctctttttccaaaaagttttttgactcatcccagatgtaaatgattttctttatgagctgctgttgtacttagtgtctgtgtgtccccwctctttggtacttagcccataatgtcgtgtcttgtactcacttctttccatggtttacttactcaactgattgcaagcttcaagagagcagggaggatgcattatgccttctttgtaatctatgccagcctaacacagtccctcaaacagagtgaggatgatcagccatattt

SEQ ID NO: 349799 - DNA, 553 bp, Homo sapiens
tgctggcccttgtccacaagcatctatttttgtgcctcttttagcctcctcacctaccctaggagagaaaatggaatcttcagcctctgaggctgtataatttctttgcatgccatttgtcatttaaccataatgacagccccagccacctctgccccagctagctctattcatcatttcctctgacatattttacggtttttttgatcttcagcctattctcactatagttctttacctacaaatgctttcattgacattcagtatattttacaaaactagttaaaaggcctctttttccaaaaagttttttgactcatcccagatgtaaatgattttctttatgagctgctgttgtacttagtgtctgtgtgtcccctctctttggtactkagcccataatgtcgtgtcttgtactcacttctttccatggtttacttactcaactgattgcaagcttcaagagagcagggaggatgcattatgccttctttgtaatctatgccagcctaacacagtccctcaaacagagtgaggatgatcagccatattt

SEQ ID NO: 349800 - DNA, 578 bp, Homo sapiens
caaacaagtatgtaggtcaaacaaatacatatgtagtctgatgtctgccagtttagaaaacatcgctttactaaaaatctccagatccaaataaaaaatattctttcagaattaatgatatttttcccagcaggtatacacacatgacttattatagcaagaattttccaactagatgtaatcttatcaatagcttgttaatcatagtggtagtgatgctgaagatgtatagctttctcttgttacttggttgtagactttgaggtcatgttcacatttactctttcatagatttccacattgtagcaaaacatgcacttgggaaaaaaataagatgggctggaggtaatcctgaaactrtaaggtgggagcacatattttgattcagctgatctagatggggctagaaatcaggtaactctgatgcaggtgttcatcaacagtgctttatcaaacattgaattggcgaatgataatgagtgtctgatggcctgcccagatggttcagggtcaggaaacacagtataggaagctgaaggagaatgagggagcagaagctcaggaaaatgggacttacc

SEQ ID NO: 349801 - DNA, 621 bp, Homo sapiens
aaataattagtctgataattgcattaggtttctggcaaggagtttcaaatacctttggaattttctgagtgatagtagcatctctgttatgttaatgaagtgacctatctgtgcacctagatagcttcaggataggagctggtcagcaaaaagaccaattatgtgattagagggttggaactttcagcccccttaatctggactttgaattcaatcccatggctaataatttaatcaatcatgcctatgtactgagataccaataaaaactctggacactgaagctcagtggagcttcctggttagtgaatacacaatgcktcaggagggtagagcaccccaactgcatgcctaactgagggcatggaagctcagcacttgatgcccttctagatctcactgtattgtaatcataagtgtagcactttcctgaattctgtgtcatctttgtaaagtatcaaacttgcagggggttgtgggaattccctaattggtggcccacttggtcagaaatgcaagttctggaagacccctaggatttgtggctggcatctagcataagggtagtcctaccagggactattccctttagacagtagagtctgacactagctctgggtg

SEQ ID NO: 349802 - DNA, 520 bp, Homo sapiens
aaaaatataggcaaattttacagttttttaactggaaagcgtactttatttaaatttattttgattactgatatayttaaattcatttctaccatcttattttgaactttctatttttctactgctttttaaaaattgctctatttcaaacctatttctgaattctttttatttttttctagcagaaaaaagtaatacactctaattatcatagaaatattcaaatgcatatttaacctgacaaaatctatgattaattaatatgcttacttttctcctttacaaggatattacatggctttaactgcagttattcccctgtaattactatggattagtagtaagttttgtcttgcttattttatattcttccaaattggacattatcattaatgttacaaatatttgctttttgcctagaaattcatccacgtttgctatgtctgtttgcttctcaagtattctttacacagtcagttctcactattcataaattccatatttgtgaatttgctacgtg

SEQ ID NO: 349803 - DNA, 520 bp, Homo sapiens
aaaaatataggcaaattttacagttttttaactggaaagcgtactttatttaaatttattttgattactgatatatttaaattcatttctaccatcttattttgaactttctatttttctactgctttttaaaaattgctctatttcaaacctatttctgaattctttttatttttttctagcagaaaaaagtaatacactctaattatcatwgaaatattcaaatgcatatttaacctgacaaaatctatgattaattaatatgcttacttttctcctttacaaggatattacatggctttaactgcagttattcccctgtaattactatggattagtagtaagttttgtcttgcttattttatattcttccaaattggacattatcattaatgttacaaatatttgctttttgcctagaaattcatccacgtttgctatgtctgtttgcttctcaagtattctttacacagtcagttctcactattcataaattccatatttgtgaatttgctacgtg

SEQ ID NO: 349804 - DNA, 520 bp, Homo sapiens
aaaaatataggcaaattttacagttttttaactggaaagcgtactttatttaaatttattttgattactgatatatttaaattcatttctaccatcttattttgaactttctatttttctactgctttttaaaaattgctctatttcaaacctatttctgaattctttttatttttttctagcagaaaaaagtaatacactctaattatcatagaaatattcaaatgcatatttaacctgacaaaatctatgattaattaatatgcttacttttctcctttacaaggatattacatggctttaactgcagttattcccctgtaaktactatggattagtagtaagttttgtcttgcttattttatattcttccaaattggacattatcattaatgttacaaatatttgctttttgcctagaaattcatccacgtttgctatgtctgtttgcttctcaagtattctttacacagtcagttctcactattcataaattccatatttgtgaatttgctacgtg

SEQ ID NO: 349805 - DNA, 517 bp, Homo sapiens
gaaactttgggcacacttttagaaatgcaaaatgctctggaaagtctcagcaatagagttgaataagtagaagaaagaaattcagagcttgaagacaaggtcttcgaattgatccaatgcaacaaagacaaagagaaaagaataataaaataggaacaaagccaccaagaagtctgggatgatgttaaacaaccaaacctaagaataatcagcattcctgaggaaaaagacaattctaaacacttggaaaacatatttgggrgaataatcaaggaaaacttccctgccattgctagagacctagacatgcaaatacaagcagcacaaagaacaacctgggaaattcatcgcaaaaagatcttcacctaagcatattgtcatccggttatccagagttaacacgaaggaaagaatcttaacaggtatgagacagaagcaacaggtaacctacaaaggaaaacctatcagattaacagcaggtttctcagcagaaaccctacaaactagaagggattgg

SEQ ID NO: 349806 - DNA, 572 bp, Homo sapiens
tggctttgtggataatcttcttaaattcactatttgcttttgaaggagatactagtatttctctagtagattatgtcttctggttttcacttggccagtgatatctctctgactcccatgatagatggcaaatgtagacacatattttaggcaatttatacatttatcatcaactttcttaagaaatggagatttggtacttaagttttcaataaacatatgcacttattttggttcattgcttccaaaatagtttatttagaaataataatgagttggcaaaactgaagtaagtacttacagattaacaacaaataataaaagacaaaattactgtaaccaaaatgttcagaccactcaatgtgatgtgaaggattggtcaacatctatatcatgtacccatttcaaacatttaacctacaattttctatcttgctcatttgcccaactsactggtagctttgtgcatccttcaggctttgacaccagccacagtatgacttattggatattaaacagttgatggagtagcagcagataatacttctccttcggccattccagaactgaaa

SEQ ID NO: 349807 - DNA, 585 bp, Homo sapiens
ggtcaacatctatatcatgtacccatttcaaacatttaacctacaattttctatcttgctcatttgcccaactcactggtagctttgtgcatccttcaggctttgacaccagccacagtaygacttattggatattaaacagttgatggagtagcagcagataatacttctccttcggccattccagaactgaaaaggtcattatcttcagtttcttgcctctcagagcacttgttttgtcagcttgcacctgacaggctattctgatagaaagagttagtttcagatgtctgtaaagggtacagaaaccagagatgggcttttcaaggtcctcattcaggcttaaccatgcaatgggaattctgttcatagaacacatgtctcatactcatagctagatgaaatcatgctagaagctacaagcacaaaggaggggtccaccaatctttgggaatctgttcgtcaaactagcaaggtttcaaaatattaataatttgacctttgtgttctagaataaaatcatcctaaattttacaacaatcggtggcaggggatgctcaaccagactatcttaattttgttccc

SEQ ID NO: 349808 - DNA, 585 bp, Homo sapiens
ggtcaacatctatatcatgtacccatttcaaacatttaacctacaattttctatcttgctcatttgcccaactcactggtagctttgtgcatccttcaggctttgacaccagccacagtatgacttattggatattaaacagttgatggagtagcagcagataatacttctccttckgccattccagaactgaaaaggtcattatcttcagtttcttgcctctcagagcacttgttttgtcagcttgcacctgacaggctattctgatagaaagagttagtttcagatgtctgtaaagggtacagaaaccagagatgggcttttcaaggtcctcattcaggcttaaccatgcaatgggaattctgttcatagaacacatgtctcatactcatagctagatgaaatcatgctagaagctacaagcacaaaggaggggtccaccaatctttgggaatctgttcgtcaaactagcaaggtttcaaaatattaataatttgacctttgtgttctagaataaaatcatcctaaattttacaacaatcggtggcaggggatgctcaaccagactatcttaattttgttccc

SEQ ID NO: 349809 - DNA, 507 bp, Homo sapiens
ttaatttgtatgttacatacttagggtaaaaaagaaattctctgtcagaaagtgtgtgacattgcaccattttcatcaaattcaatatatccttagatgcaacttccaaaaggcttgcaaaggcttgcaaaacagtcagtgtcaaattagttyagaacaaagttagagtgacctcaactagatcaatgcgatagcataccccacattcataacagaactttatttgtttgaaatcacccttcacaaaatacagatattataaaggtaatttaaagatttttttgtctacataaaattaaagctggtcctaagtcctcacacagcagtgttgttaagacatactatgtgacttagtactggctcctacattcccattggcttgtaagagcatctcagggtttacgtgcccccatatggcaacagtcatgttaattattattttaaccactagtgccacaggtgaacatgaatcctctaaaatttgtggggcattgatgtgttcagatc

SEQ ID NO: 349810 - DNA, 604 bp, Homo sapiens
actatgcaattttacaggtattatttattttgaccctcctagccctgtcttgtaggtgatattacttctgatttatagctaagaagctgagatgaagactcattattatttttcatctagtcctaaaccctcaagtaaagatttctctcctttaattatataaagacagcattctgctgtctcrgattctgctgcactgagctccagtagcattttgctgttttctttgcattatcatattttcatagatttcactatacccatcctcaaagtatgattttgataattattaaaaccattggtggaagataattaaaatgcttaaaaactacaatttaatttttttaaaaaaacaaattatttttagctttggtagctaaggtgttaaaaggaaaaaaagtaaaaaaaaagttcctattgttttttagtatatttgataaacaaataagtctatattatgctgtttaagctaataaaattcatgtttttagtaaggaactggttacatattatggtactaatgactgatgttgacatctgccactcaaatttttctgggttatgctcttactcaggatgttgggtacttaaggtgatgtggact

SEQ ID NO: 349811 - DNA, 608 bp, Homo sapiens
ataaatttctcttgtttacaagccacccagtctacagtacttttttatagcagcccaaattgactaaggtgcctttccctctcttctctgtcaatagatcttttcctgccttcagtacattttctttcctcctgtatgcatttttaaattctttttatgtaaataaaattaaagcttggccatttccccattccttttctccacttacacatctcttatctgaactaagaaaggtccaggtgatccttaaawggaattttctttagcaggtagaaagagaggaagcctgagaggacttctatctttccattatagtatttgctttactatgtccctaaaagctcctaccagctatataatgatctaggttaaaattcctaaatgtacacttcaaaatatcaatctcttgatttccccttcccacatataaatgcatttttttttgacagagtctcactctgttgcccaggctggagcgcagtggtgcaatctcagttcactgcaacctccacctcctgggttcaggtgatcctcatgccttcagcctcccaagtagttgggattacaggcatgcagcaccacacaagctaattttgtatttttagtag

SEQ ID NO: 349812 - DNA, 608 bp, Homo sapiens
ataaatttctcttgtttacaagccacccagtctacagtacttttttatagcagcccaaattgactaaggtgcctttccctctcttctctgtcaatagatcttttcctgccttcagtacattttctttcctcctgtatgcatttttaaattctttttatgtaaataaaattaaagcttggccatttccccattccttttctccacttacacatctcttatctgaactaagaaaggtccaggtgatccttaaatggaattttctttagcaggtagaaagagaggaagcctgagaggacttctatctttccattatagtatttgctttactatgtccctaaaagctcctaccagctatataatgatctaggttaaaattcctaaatgtacacttcaaaatatcaatctcttgatttccccttcccacatataaatgcatttttttttgacagagtctcactctgttgcccaggctggagygcagtggtgcaatctcagttcactgcaacctccacctcctgggttcaggtgatcctcatgccttcagcctcccaagtagttgggattacaggcatgcagcaccacacaagctaattttgtatttttagtag

SEQ ID NO: 349813 - DNA, 608 bp, Homo sapiens
ataaatttctcttgtttacaagccacccagtctacagtacttttttatagcagcccaaattgactaaggtgcctttccctctcttctctgtcaatagatcttttcctgccttcagtacattttctttcctcctgtatgcatttttaaattctttttatgtaaataaaattaaagcttggccatttccccattccttttctccacttacacatctcttatctgaactaagaaaggtccaggtgatccttaaatggaattttctttagcaggtagaaagagaggaagcctgagaggacttctatctttccattatagtatttgctttactatgtccctaaaagctcctaccagctatataatgatctaggttaaaattcctaaatgtacacttcaaaatatcaatctcttgatttccccttcccacatataaatgcatttttttttgacagagtctcactctgttgcccaggctggagcgcagtggtgcaatctcagttcactgcaacctccacctcctgggttcaggtgatcctcatgccttcagcctcccaagtagttgggattacaggcaygcagcaccacacaagctaattttgtatttttagtag

SEQ ID NO: 349814 - DNA, 196 bp, Homo sapiens
atagggatggaaatagaaagaaaaaaaatcccactcacataaaatatttacaaaaatttcaagtgtyggcatctctagatgaaaagtaaccagtgcaagaattctggcatcataaaagcctgaatgtagtgacaccacaaaggatgacaatagctcttcagcaatggtccctaaccaaaatggaaactcaggaagg

SEQ ID NO: 349815 - DNA, 625 bp, Homo sapiens
ttggagcacacagattcaaaaacaaatacttatagatctaagaaaagacttaaaaagccacacaataacagttgggggctttgacaccccactgagagcaccagacagataatcaacgcagaaaattaacaaagaaattctgcaattaaatttgacacttgattaatttgaacaagtagacatctacagaataccccccacccctcatccacagaatatacagtcttctcatctgcacacagaacacaataaaagattgaacacatgcttggttataaagtaagtctcaataaattcaaaaaatcaaaataattcaagccatagttttggaccacagtaaaataaaagtagaaatcaatcccaaggagacctctcaaaamcctactattacatagaaattaaacaacttgcttctgaatgactgttgggtaaacaacaaaattatggcagtaatgaaaaaaattctatgaaataaatgaaaacaaagacacaacatacaaaaatatctggtatacagtgaaagcagtgttaagagaaagtttatagtgctaaatgtctacctcaagaagttagaaagaactcaagttaacaatctaacatgatacctagaggaactagaaaaaca

SEQ ID NO: 349816 - DNA, 625 bp, Homo sapiens
ttggagcacacagattcaaaaacaaatacttatagatctaagaaaagacttaaaaagccacacaataacagttgggggctttgacaccccactgagagcaccagacagataatcaacgcagaaaattaacaaagaaattctgcaattaaatttgacacttgattaatttgaacaagtagacatctacagaataccccccacccctcatccacagaatatacagtcttctcatctgcacacagaacacaataaaagattgaacacatgcttggttataaagtaagtctcaataaattcaaaaaatcaaaataattcaagccatagttttggaccacagtaaaataaaagtagaaatcaatcccaaggagacctctcaaaaccctactattamatagaaattaaacaacttgcttctgaatgactgttgggtaaacaacaaaattatggcagtaatgaaaaaaattctatgaaataaatgaaaacaaagacacaacatacaaaaatatctggtatacagtgaaagcagtgttaagagaaagtttatagtgctaaatgtctacctcaagaagttagaaagaactcaagttaacaatctaacatgatacctagaggaactagaaaaaca

SEQ ID NO: 349817 - DNA, 277 bp, Homo sapiens
tattggttaattatattaaattaaaagttatgtttaccataaagaaaacaataaaaatatagtttggagtagattattcaattattgttcacatacattggtatcagtcaaaggagaaagacattttgttgttttactcagctgtgaatgagaattttgaaaactgtatggatcattttaatttcaggcaatgcaaatgatacacatggataatggcytaaatcagatctggaaatgttaggatatgcttacttattcaaaatttggttttggttaa

SEQ ID NO: 349818 - DNA, 548 bp, Homo sapiens
accttttattttaacaaattacccagtctcagttacttctttatagaagcacaagaatggcctaatgcagaaaattggtactgaggagtggggcaaaaagatacctgaagatgtggaaattactttggacctaggtaacagacagagtttggaagagtttggagggcacagaagacaggaagatgagggaaattttggaatttcttcgagagtgtttagatggttgttacaaaaatgctgatagtgatgtggacaaggaagcccggactgacaaggcctcagtttgaaacatggaactttctggaaactgaagcaaaagtcacacatgttatgccttagcaaagaatttggctgcattctgttcaagccctagagatctattgaagtttgagcttcaaagtgaagatttagggtatctggtgggagaaatttctaagcagcaaagtgtttaagaagaggtgtgactgcttttaatagcctayctcagatgcaggagcaaagaaagaagttagaacttatatttaaaaagaaagaaaagtgtaaaagtt

SEQ ID NO: 349819 - DNA, 510 bp, Homo sapiens
gatgtatttcctgacatcctgtcaaatggttaaaagagtagttattgtgttaattacagatgaatgaatgtgctgtaccactttaggttacccaaatcacctgcaagggtcttttaytaaaatagagaaaaaatacacatttggattaagtgaagagttgtttcttcaacccttggttaagaatcacctgtcaaattagcctctttttgtcctttctttattcctatattttatttctttattgagctcctactttatggatggtgctgttttacttgttgtgaggtacagaaaaaaatataaaattctagtccctgtttacagcgattttcttcctactcccttggaatgttccctaacagagtgcgtagctgtgtgtatcaatttcttcctacaaagtctaaccctttttgtactaagttctcctccatgaattttcagcttaaccccattaatttgcatatatccttatttaggattatttctttttagcattccccaatttcttaa

SEQ ID NO: 349820 - DNA, 510 bp, Homo sapiens
gatgtatttcctgacatcctgtcaaatggttaaaagagtagttattgtgttaattacagatgaatgaatgtgctgtaccactttaggttacccaaatcacctgcaagggtcttttactaaaatagagaaaaaatacacatttggattaagtgaagagttgtttcttcaacccttggttaagaatcacctgtcaaatyagcctctttttgtcctttctttattcctatattttatttctttattgagctcctactttatggatggtgctgttttacttgttgtgaggtacagaaaaaaatataaaattctagtccctgtttacagcgattttcttcctactcccttggaatgttccctaacagagtgcgtagctgtgtgtatcaatttcttcctacaaagtctaaccctttttgtactaagttctcctccatgaattttcagcttaaccccattaatttgcatatatccttatttaggattatttctttttagcattccccaatttcttaa

SEQ ID NO: 349821 - DNA, 627 bp, Homo sapiens
tatgggatttttatgaagcacactatttagacagaggttgcagatcacacagcatggattttttttgttgttggttttaattatgaataatctcatactgatgcaggatattttcttgatccctctgtgggactcacaacaggaatgccttgtttactcagcctgccctgctcgaccccatgtgggaaggagtgtgtgagtcaacaagtgtgggaaccagtgcaagcaagtgtaggtgtggccagtggcctggcaagagcacactccattcactccagtctgccaggctccaccccttgyaggaggtagcccacaaatgaaggagtgcaggaaccagccagccacttcagcgcctgtgggagtaaactctaccaacaggaaaaaactccatgcagtcttggcagctgtgttacaatactctcttatctccaccatctgcagactgtagtgtgttatcagctcagtgggccctttgcctcatttcatggggtggctgccctctgccagtgagggcaaagcaccagtgtgacagcctttttcaaaaccggcacatggtgcatcctgaattcttgtctggtgcccagaggaatgaggtcaaacagattaattgaaggatggtgaatgtgg

SEQ ID NO: 349822 - DNA, 627 bp, Homo sapiens
tatgggatttttatgaagcacactatttagacagaggttgcagatcacacagcatggattttttttgttgttggttttaattatgaataatctcatactgatgcaggatattttcttgatccctctgtgggactcacaacaggaatgccttgtttactcagcctgccctgctcgaccccatgtgggaaggagtgtgtgagtcaacaagtgtgggaaccagtgcaagcaagtgtaggtgtggccagtggcctggcaagagcacactccattcactccagtctgccaggctccaccccttgtaggaggtagcccacaaatgaaggagtgcaggaaccagccagccacttcagcgcctgtgggagtaaactctaccaacaggaraaaactccatgcagtcttggcagctgtgttacaatactctcttatctccaccatctgcagactgtagtgtgttatcagctcagtgggccctttgcctcatttcatggggtggctgccctctgccagtgagggcaaagcaccagtgtgacagcctttttcaaaaccggcacatggtgcatcctgaattcttgtctggtgcccagaggaatgaggtcaaacagattaattgaaggatggtgaatgtgg

SEQ ID NO: 349823 - DNA, 640 bp, Homo sapiens
taaatgaaaaaaaaaatcctgagtgcttactatgagcctggcaaagttttagagatgtgactcatagtcaagcaggagatacagatgtagatgtgaaaaaattgaaaaatgtagagtactgcaagatgaaaaatagcttggagactttgcctattaaagaatagccactagaagtaggtattgaaggttctcatgaattgaactaagaaacacattttttaaaaaatgtacaaccagtttggtgggtttttawggactgctagccattcctttattttcagtattagactgaaaacaaaagtgtagctactttaatatccttttcctcttccctgcatagaaaatgtggttatataatctcaactgcagtgatgctgtgacctatttaatggaaactacatgcataagtgatttctctgagtcttttttcacttcaaccttgcatggacatttagcaagaaatatttatagaatatactgtatagctctttggtttatcaagtaaatacattttgtattctacaaatatgtttataatatgggcaaaaaactgattaattcagccacctctttctgcttcttttagttatcctgtgaaatttttattagtgcaaaacttttggtgaccaagacttcaaat

SEQ ID NO: 349824 - DNA, 640 bp, Homo sapiens
taaatgaaaaaaaaaatcctgagtgcttactatgagcctggcaaagttttagagatgtgactcatagtcaagcaggagatacagatgtagatgtgaaaaaattgaaaaatgtagagtactgcaagatgaaaaatagcttggagactttgcctattaaagaatagccactagaagtaggtattgaaggttctcatgaattgaactaagaaacacattttttaaaaaatgtacaaccagtttggtgggtttttatggactgctagccattcctttattttcagtattagactgaaaacaaaagtgtagctactttaatatccttttcctcttccstgcatagaaaatgtggttatataatctcaactgcagtgatgctgtgacctatttaatggaaactacatgcataagtgatttctctgagtcttttttcacttcaaccttgcatggacatttagcaagaaatatttatagaatatactgtatagctctttggtttatcaagtaaatacattttgtattctacaaatatgtttataatatgggcaaaaaactgattaattcagccacctctttctgcttcttttagttatcctgtgaaatttttattagtgcaaaacttttggtgaccaagacttcaaat

SEQ ID NO: 349825 - DNA, 648 bp, Homo sapiens
cagctttgaccccctatgatttcatcccccagccaaccaatcagcactcctgattcattggctccctacccaccaaattatccttagaaactctgatcctcaagtttttgaggagattgatttgagtaataataaaactcaggtctcccacacagctggctctgcgtgaattactctttcctcrtcgcaattcaactgtcttgaaaaatcagctctgtctagggagtgggcaagatgaacccattgggcagttacacgctcataatttctaggtgtgttcctccagaaatttgtctgtaaacctacaaataaatgtatatgtatacttttttcttttaaaactcaatagatttcaaaataacatttttaaaatgatgcaaggtatgattttccccttgaataaactcaggtttgctgttttaacaggaagtctattgatattttggggacttcaactcaatctttattcaaagatacatctttcctttcccaagttaagctgcagccagtggttttctgtctttcagaaagaagtgtggtgatttttgctttctctccccacacaatgcctcccctacttgataactattgttttgtgctttgacagcatctaagatggggaaagttgataagagagagaagacagga

SEQ ID NO: 349826 - DNA, 578 bp, Homo sapiens
ggacttcattgtccatatcactattggcattttggttgaagccattcaacaagtctctaggaagttccaaactttcccacatcttcctatcttcttctgagctctctcaacttttccagcctctctgtgttagccagttccaaagtcaattccacattctcaacactcctggtaccaatttactgtattagtcyattctcttgctgctatgaagaaatatccaagactgggcaatttataaagaaaagaggtttaattgactcacagttccacaaggtaggggaggcctcaggaaatgcagaatcatggtgacaggcacctcttgacagggtggcaagagggagaatgagtgcaagcaggggaaatgccagatgcttgtaaaaccataagatctcatgggaactcactcagcatcacaagaaaagcatgaggaaaactgcccccatgattcaattacctcccattgggtctctcttataacacatgcagattatggggattgcaattcaagatgagatttgagtggggacacagccaaactatatcaatatatgtacacttaaaattcttaaaaataa

SEQ ID NO: 349827 - DNA, 578 bp, Homo sapiens
ggacttcattgtccatatcactattggcattttggttgaagccattcaacaagtctctaggaagttccaaactttcccacatcttcctatcttcttctgagctctctcaacttttccagcctctctgtgttagccagttccaaagtcaattccacattctcaacactcctggtaccaatttactgtattagtccattctcttgctgctatgaagaaatatccaagactgggcaatttataaagaaaagaggtttaattgactcacagttccacaaggtaggggaggcctcaggaaatgcagaatcatggtgacaggcacctcttgacagggtggcaagagggagaatgagtgcaagcagrggaaatgccagatgcttgtaaaaccataagatctcatgggaactcactcagcatcacaagaaaagcatgaggaaaactgcccccatgattcaattacctcccattgggtctctcttataacacatgcagattatggggattgcaattcaagatgagatttgagtggggacacagccaaactatatcaatatatgtacacttaaaattcttaaaaataa

SEQ ID NO: 349828 - DNA, 548 bp, Homo sapiens
attttcattgccatctcatctagaaaatcataatgactttgataataataaactacattttttcaagcaggaaaacatgtcttacaaacactttattaacactttgtcaaacaggtagagaaagaaaaattaggagcaaaaatgaattgaaacaatttttggatggaaaattgatgtaatttttaaaaatatttttaacacagctgggtgtggtggctcatgcctgtatttccaamacttgtagaggctgaggtgggagaattttttgagtccaggagtttgagactagcctgagcaacatagtgagaaaccatctgtacaaaaatgaaaaaaaaaagaaaaaattagccgaacatggtgatgcacacctgtgatcccacccactcaggaggctgaggcaggtggattgctttagtccaggtcaaggttgcagtgagccataatcccaccactgcactccagtctggataccagcaaaataactaaaaaaactcaaaggataatgaatatataacatactaagaactgtgagacacagtcaaagtagt

SEQ ID NO: 349829 - DNA, 515 bp, Homo sapiens
aatttgaaaattcggaggaaatggacaaaawcttttaaaaatacaacttactaaaactgaccaaatagaaaatagaaaattaaaacatataaatatctaattgaatatattatttaaaacttttccaaaattattactgtagccccatatgttttaacccatgagtttttcctaacattcaaggaagagataatgccaatctaacataaatccttttaataataaagaaagaaaaataaaaagttcctcaacacatttgtaagaaagcacatcttgatttcacaacctgatagggaccaaagaaagtataattatagatgagtctctctcatgaacatagttgcaaaaattacaaataagatgttagtaaacataacttagcaatacatacctatatcatgatcaagtgaagtttactgaaagaatgaaagcttgataaatcaacttaaagaaaagataaataatgggaaatacattgtatatctgagttttgggattgaggtgtttaccacgta

SEQ ID NO: 349830 - DNA, 607 bp, Homo sapiens
ggaaggggtcccaaacaggttgccactgctagtttgggtattcgcctttyaaacgttttaagttgggagatacatgaggcgggaagcttgttacaggagtgagaaacaaaggcagtaaattgttttgtgatatgtcttagactttgaggaaaatcagaattgcaacttaggctttatctactttatgaccttgcagcggcatggcaaaagagacaggatcttacgggactttacaaagtatgtttacaaagaattggaattgggagtgtagataaggtctgctggtcacagaaaaatgggcagttaacattccctctactttagtttcaggggagggggaagggagagagggagagaggacacggggacactaacagcaaaatttttgctgtttatagctttcttggggaagaaaacacatgcacaaatcgtggtgttaggaatattttaagcatatatcttcaatattattcatccaggaccgaagtaagtccggatgcaggaaatgagtgagtttcacagctttctgagcccctacttggcccaggaagcccaactggtacctcctctcactttcccccttttcctgtggatgtggcttcctgtg

SEQ ID NO: 349831 - DNA, 591 bp, Homo sapiens
taattgcaggagtctttctagtctgagatgtttccttctgaaataggagacgcaggtcctttagtggctgacaggtgtatcaaggctggtctggctgaccttgtgactcctgagttgatcatgtaagttcctcagggggtgtccaaggtttaactcgagtgtggtgaatccaggattccacttctgccactttaactgcagtgggggtagagaggattaccgagtatggtccctcccatagggatccatagatggagaggtagaggggagaaacttgactaatactagatctcctggttgaaacaactctattcttttttccctgtcacaccttttgggtaaagttttgaagttttgttgatattttgccagagaagttatatctttgactaaattgrctgtttcctgattgagcaggaggtcatttgtgagaaaaggccatccatacagcatttcatatggactgagccccattctgtgaggggatttttgaattcttaataaggccatgggcaagagagtgggccatgggagatgagtttcttgcattagctttctcaaatgcttctagagtgtttcatttgtcttttc

SEQ ID NO: 349832 - DNA, 577 bp, Homo sapiens
gagtttcacagctttctgagcccctacttggcccaggaagcccaactggtacctcctctcactttcccccttttcctgtggatgtggcttcctgtgagctgaactgcagtgattgttgtctctcttctgggtctagccatccagtgagtctacctggctctgggttggtactggggktttctgtacagagtcctgttatgtgaatcatctatgggtctctcagtcgtggataccagtgcctgttttgtggaggtggcagagggtgcaatggactccatgagggttcttggctttggtggtttaatactgtatttttgtggtggttggcctcttgccagcaggtggcgctttccagaaaacatcagctatactagtatggggaggaaccagtggtgagggccctagaactcccaagattatatgtcctttgtcttccgctaccagggtggatagggaaggcccatcaggtgggggcaggactaggcgtgtttgagctctgactctccttgggcgggtcttgctgatgctgctgtggggatagggtgagattcccaggtcactggagttgtgtacctag

SEQ ID NO: 349833 - DNA, 414 bp, Homo sapiens
catttctgccaaagccactccagttcgtactaatgctctataagagaccattttcttcatatgctagcattctagggatattayaaacctctcaatccagtaaattacagtatttgtaatattagggtatgtttcaaatagtatagggcttgccatacagcagattctcaataaatggttattgaattaaaatgcacactttatttgcttgtacaacttcctctgttttttaaggagcattgctttattaaaataaaaataaatgcaatgaaattttttttaaaaaaagcagggggtgggggttcaagttgctgccactaggaagccttaacataccatctgccacgtggagtattctctaacaaggcagacccagtgcttacaaacaaccaaatgaagtcaaacagttcacag

SEQ ID NO: 349834 - DNA, 431 bp, Homo sapiens
tgggcaccataccggaaatttttacaactgatctcatttaatcctcatattaaccctgaaagaaagatcatcccatttttgcagatgaggaagttgaggttcaaaggggacacagaaatttaacaaataacacacaatttgaaaacgataargctaaaaatgaaatccagttaaatctgaactccaaactataccactctgctttggtctttgcagttatgaagacttttctatctttagcaatctattatactaaaacaaacacccttgaggggattgcacctcatgtttctttcagggagatgattccttcattttcactcagtgcttcaggaagactcccttgtctcctctatgctagaataaaaccccagaatggcattgtagcaggagaagagatcaagagcctagcataaagaaaagagggaggc

SEQ ID NO: 349835 - DNA, 574 bp, Homo sapiens
ttctcttattttcagttttatccagtgccagcctgggctatataatccttcttctctgatattttgttatagtggatttactagaaacagacacattcatgagctacataaacctacaaaatccctaggaaaaamaaaggtggaggggggtttccccttttgggatgctggtatacacaactcccaaagtccctggaaaataataggtgatgttatttctcacatgcttatatcttttatttcattgcttacaattaactttgagtatacactcctcaatgtattccccaagtgttttccttctgcataaaacgtgaaatggtcaagggtggaggattacacagttcactgcagcctccagaagtcattgatttctgcatttatttcttctagatttcaatttttatttcttctagtttttcatgctggttgtcatatggggttgacaggtgtcacaagatgcagctacatactgaaatgatgcataaccattatgtaaaatttttaaataatacattttaaattcttctctactcagataattgccaaaaatcaactttgatgagagtaatat

SEQ ID NO: 349836 - DNA, 548 bp, Homo sapiens
gccagcctgggctatataatccttcttctctgatattttgttatagtggatttactagaaacagacacattcatgagctacataaacctacaaaatccctaggaaaaaaaaaggtggagrggggtttccccttttgggatgctggtatacacaactcccaaagtccctggaaaataataggtgatgttatttctcacatgcttatatcttttatttcattgcttacaattaactttgagtatacactcctcaatgtattccccaagtgttttccttctgcataaaacgtgaaatggtcaagggtggaggattacacagttcactgcagcctccagaagtcattgatttctgcatttatttcttctagatttcaatttttatttcttctagtttttcatgctggttgtcatatggggttgacaggtgtcacaagatgcagctacatactgaaatgatgcataaccattatgtaaaatttttaaataatacattttaaattcttctctactcagataattgccaaaaatcaactttgatgagagtaatat

SEQ ID NO: 349837 - DNA, 598 bp, Homo sapiens
aaacactgagcaacagtatgattttttcttcagtaaatgtcatcatagaaaatttgagacttcttttaagactgcaactcaaagaaaaatttatcrcctgacatgaatacaaaaataatgatgaaaaatgttttatgctactactttataaaataagaagtgaagtcacagtaatataaaatagtatatatgtgaattatatatcattatatttaaatataggaaagatttatatgaaagtcttgagtatttttaaaatttttttcagtttttagtttttactattttttttttacagatggggtcttacttcatttcccaggctggagtatagtggcatgattctggctcactgcagcctcaaactcctgggttcaagcaaacctcctacctctctgcctcccaaagtactgggacaggcatgagctaccatgcctgtttctatttcagagatttaatgaaatataatttaattaaacttagtttaaaaccaaaaatgctaaatatatgccaaacagtatgttattagtataacaagataaacacaatatatcttacaatctatgaattccatctagtgaaaggaccaaagatgcta

SEQ ID NO: 349838 - DNA, 647 bp, Homo sapiens
gagaactcattaacagaaagaaggaaacaacagacactggggtcgacctcagggtggagagtgggatgagggagaggagcagaaaatataactattgggtactgagcttccttaatacctrgttgataaaataatctgtgcaacaatcccacatgacactagtttacctatacaagaaaccttcacatgtacctaaaataaaacctaaaataaaaaaaagaaaaagaaaatagctattgccgtacctgtaaatagatgactaaaagtgaaactcttctttgtgataacccacaatggaaaaggagcaaagtattatccatattttggcaagtttcagaatcaattctccatcaaatatcctccactccaacccaacacaataaacaacagaaggaaaaagactttgaaatgtaaaactgggactctttcagaggttctttatacatctggagagaaaggaaaacatttacagaagtcagttatagttaatttattttacaataggacgtcttcataaaagtatgtatttttatttaaatatatggtaactaaatacatgagaatctaaaaaaaatttaaatgaacttttaaatagattatgtatataatgtacagcaagacagaaacaaatatttatagtccaagag

SEQ ID NO: 349839 - DNA, 440 bp, Homo sapiens
atgtaatagagaaaaacaaacaaaacttataatctcagtatgcttatatgacttgcacattgccatttatcccatatatattagcaaaatatgttactatagagggacaatatgtctctggcacagctccaaatcatccttttttttttttttttgagataagatctcagtctgtcatctgggctgaagtgtaggggcatgaatatggctcactgcagcctctacctttaccttaagtgatcttcctgcctcagcatcccaagtagctagaactaccagtgtgtgccaccatgtttggctagtttatttatatatttattttttgtagagacagkgtcttgccatattgtccaggctggtcttgaacctttgggctcaggcaattctcctgtcttggcctcacaaaatgtcaggattacaggtgtgagccaccatgccca

SEQ ID NO: 349840 - DNA, 554 bp, Homo sapiens
taatgaaaacttcacctttaaattttaaatgtttagctttcaattttctctaaatattaattttaaatgttattctcctgtgcttaggaaccaatctgatagtgactctttgagaagaacctgtcctgggttttttgtttcttttcttaaattaattrttttttattttttgtggttatatagtaggcatatatatatttatgggacatgtgatattttgatacaggcatatactgaataagaaccacattagggtaaatggttaatcacctgaagcatttatcatttatttgcattctaaacatttcaattattctcttttagttatttttaactttacaataacttattatcaactgcaattactctgttgtgctatcaataaatagatcttatttattctatttaactataatttcgtactcattaaccatcctcacttctgcccagcctgcactacactccccagcctctggtaactatcattgtattatctgtctttatgagttaaattattttaacttttagctctctcaaataagtgaaaatatagg

SEQ ID NO: 349841 - DNA, 588 bp, Homo sapiens
caaccagcgggtatcccaagtccagcagagacaaaggagttagaaagagacagaataagagtttaaaaggtgggtccaggggacaggagagtcagaggcttgctcatgggccagagctcttccacttcrcctaatttattggtttacaagctctttgttcttagggcagatgggagaggtaagaagggatggaggaaaaggattaatcaatgaaggagaactggtgagtcattcaataagatgtatagcagtggcagtttctgtgaatttccttgagcaaaggcatgtgtctaaactacttaaaatctttaacttatcagggctgaaatgggtgggagtgggtttcaggagaagccaagatgtttgattatactccactgcttcaagggtgtgttatctccctgagcaacctgtggaacgccgcggagctgtcatgctctccaggcataaagacatgaaggcaataaagagacttttctcctcagaggccgctcatggctccccatggttgtctcacacaggacagaccaactcatctggcttcccagaaactctctttcccacaaccattctaagtgttacttattt

SEQ ID NO: 349842 - DNA, 582 bp, Homo sapiens
taagaattcgtttatttcttctagagtttccaatttattggcatatagttgctcatagtagccaccaatgagcctttgaatttctgcactatcagttgtaatgtgtgccttttcatttcgggatttatttatttagatattcaatctttctttcttagtctggcttaaggtttgtcaattttgtttaaattttcaaaaaacatcttttgattttatggattttttatttcaattttatttatttctgctctaatctttatcatttttttcctactaagtttgctcttgcttttctatttctaaagatgagttgttggattgtttatttgaagctcttctgttttttcgatgtaggtacttgtaactataaacttccctctgaatactgcttttgctctatcccataggttttgatatttttttcattatcatttatttcaataaattttttatcrgcttcttaatttctttattgacctactgctaatttaaaagcatatggtttaatttccttgcatttgtgtagtttcctaaatatttattgttactaatttttagtttcatttcatcatggtcaaggat

SEQ ID NO: 349843 - DNA, 560 bp, Homo sapiens
aagccatttttcctaacacaaactrtacaaaaaattaataattatgctcatttacacacttagcctatgatttgaaagtcaagttattttatttttattgaatacgacagttttttgaacttaaagttaattgttaaatagtgtagaataataacatatgtctgatttagaatttgtatataaaacttaagaaatgtttgaaatagaagagcaacatttttcatagaggtaagatttgaaataagaaagttccaactttgaaagtattatcaagttatactgctgggactgaagatacaaatattttaatgtttagaatgacaataggattaaagtggtatcaaacttcaaaaataatcaggaagtttaaatatgttaattttggaagaaaatgagtaagatggtaattgttgctcatataaatgtctagcacgactgcttttgggggttaatcctttaaaaagccctatgtgaaacaaacaatttcagaaaatgaataagataagaaataatttattattcagtctagcttgtcaaatacaatctaaaaataaataaaa

SEQ ID NO: 349844 - DNA, 560 bp, Homo sapiens
aagccatttttcctaacacaaactgtacaaaaaattaataattatgctcatttacacacttagcctatgatttgaaagtcaagttattttatttttattgaatacgacagttttttgaacttaaagttaattgttaaatagtgtagaataataacatatgtctgatttagaatttgtatataaaacttaagaaatgtttgaaatagaagagcaacatttttcatagaggtaagatttgaaataagaaagttccaactttgaaagtattatcaagttatactgctgggactgaagatacaaatattttaatgtttagaatgacaataggattaaagtggtatcaaacttcaaaaataatcaggaagtttaaatatgttaattttggaagaaaatgagtaagatggtaattgttgctcatataaatgtctagcamgactgcttttgggggttaatcctttaaaaagccctatgtgaaacaaacaatttcagaaaatgaataagataagaaataatttattattcagtctagcttgtcaaatacaatctaaaaataaataaaa

SEQ ID NO: 349845 - DNA, 561 bp, Homo sapiens
catcttaaaaattttaaaaagtattaaaattcaaattatatgccaaattttatcatatgaatactaccaaaactgttccttatataagcaggataacatactaacttgtggctttgaaataaaatgtgttttccatcatatcctatctttcaaattcttactaattcttccttacagcgttgtgctttatgatttaaatatatattaatattcacttacaaaaatcatataataattatataacttacccaygcatgcagccaactcctttaagcaccagacaaatgttaggcacatccagtcagggcatggctttaattgtagtttgtctatagtgttaagtaaacatattaagtatcaaatccacaatgatgcatactacatgttatagaaataaatctatttgattagtattttaatactataatattaacaatatatcctatgaaaataaataatgattcataaaaatttggtgtaaggtgatttagaatgaggttttctgcacattgcatccctttacttcattgtctgctactcttataccacattattgaaact

SEQ ID NO: 349846 - DNA, 631 bp, Homo sapiens
gtagttacaacaatttgggaggctgaggcgggaggatcagttgagctcaggacttcaaaactagcttgggcaacatggcaaaaccccatatctaccaaaaatacaaaaattagatggacgtggaggtgcgcacctgtggttccagctactcaggagtataaggtgggaggatcgcttgaatgtggaaagcagaagttgttgtgagccaagatcacgccactacactccattctggctgacagagagagaccccatcaaaaaacaaacaaacaaacaaaaaaccaaacaaacaaaaaaacaagtaaataagtatatagataataaataaatataaaaataatgaatggcaaagagatcagagagtttccaagggtctggatcttagaagtccttgtaagccatgctaagaacttacattaatttatatttgtttttgattttagataataatgtatatttactttgttttagaaaagaaagayaaaggtgcaaattttacaacttaaaaagtaagaggagagactttagggacaatttgccttctgagtacattatatttacctgaaaaaatatgcaatccctaacaaattaaactgtcatgcataaaaaaactcttgaactgtaattgtcc

SEQ ID NO: 349847 - DNA, 564 bp, Homo sapiens
tatattacaaagtataacaaggggcaatatagtatagttttaagtaacatggattttgaagctagaccctttggatcttccatttattagctatgtaaccttgggtaaattacttaaccwctctgtttttcaggtaccatatttctgaagtcggcattataatacaatttactttctcataggttttatttaatatatgtatatatatcaatgtaggcacttaaacaaaaattgccatgtagaaaactctttaaagtagcaaatctaaaataatatattggaacatttaaaaataaactattattaactcataaatgtcttaattaggcaattgtcaaagtgtgattacctttaaaatattttgtaaggctacatcttgagtatgttattggtaaaacatttactggcaataaggacattaatttagatgcttactgcaatttagctagtactcactcatgtcatttgttttatatcaatttctgtagataatgtgacaattactaatagttatatatctcaattttattgtattaagtagttgcttacaataattatttggtg

SEQ ID NO: 349848 - DNA, 564 bp, Homo sapiens
tatattacaaagtataacaaggggcaatatagtatagttttaagtaacatggattttgaagctagaccctttggatcttccatttattagctatgtaaccttgggtaaattacttaacctctctgtttttcaggtaccatatttctgaagtcggcattataatacaatttactttctcataggttttatttaatatatgtatatatatcaatgtaggcacttaaacaaaaattgscatgtagaaaactctttaaagtagcaaatctaaaataatatattggaacatttaaaaataaactattattaactcataaatgtcttaattaggcaattgtcaaagtgtgattacctttaaaatattttgtaaggctacatcttgagtatgttattggtaaaacatttactggcaataaggacattaatttagatgcttactgcaatttagctagtactcactcatgtcatttgttttatatcaatttctgtagataatgtgacaattactaatagttatatatctcaattttattgtattaagtagttgcttacaataattatttggtg

SEQ ID NO: 349849 - DNA, 619 bp, Homo sapiens
acgcttgtttggaattctttaaaaagggggaaatcagtgggttctagtattcattcaattttaaagaagcttgatagtggcatggaaattagctaatcctcaaggtcagtcttccttaatgtaatgtccctaatgatatcttagataggttttagaagagtgatttttwaatttttttaggggaatgattgcacacattttattagaaccttaaagaagtcgaacaaataataacataaaaacagttttacaaatttttctctaagttgtttaaatttgtaagttctttgccacatagtaaactaggggagattccatggaatacacatattttatccttccttaaaagatggtcaagcatttgcttataaaaatgtatgagaagcttaagatgataaggaaaaataagacaacaaccaactatatgtcaaatattgtagtacattttatatttgaaattgtattagcatcgtagagttttaattttgatttgtatgtgagaaggtcgcttttcaagtactatttctgccatgtaatatcagtgacaatccacattctctctgagtttcaaaatccacatctataaaattgtccagagaaagagcaaatatgatatatg

SEQ ID NO: 349850 - DNA, 614 bp, Homo sapiens
aaggaagggctggtatcaattataatgaaaytttgcagaaaaaattgaaaaggagaaactcctccccagctcattctataaggacagcatcgttctgacactaaaatctgacagagacaaagcgacaaaggaaagctgtgggccaatatgcctgatgaacatagaatagcaaaaatactaaaaaaaaaaaaaaaaaaaaataccaacaaattgaaccctgcagcacatcaaaaagctaatccacgctattcaagtcggctttactcctgggatgcaaggttgttagaggccattctcctaagtgaattaatgtaggaacagaaaaccaaataccacatgttatcacttattagtgggaggtaaatattaagtacacatggacacaaagaagaaaaatacacacaagggcctacttcagagtggaagcagggaggagtacatagatctaaaatcttttaggttggtgcaaaaataattgcagtttttgccattgaaagtaatggcaaaaacctaatacctatcaggaactatgctcattccttgggtgacaatacagtttgtacaccaaacctctacatatgcaatttacatatataacaaacccgcacatatgt

SEQ ID NO: 349851 - DNA, 614 bp, Homo sapiens
aaggaagggctggtatcaattataatgaaattttgcagaaaaaattgaaaaggagaaactcctccccagctcattctataaggacagcatcgttctgacactaaaatctgacagagacaaagcgacaaaggaaagctgtgggccaatatgcctgatgaacatagaatagcaaaaatactaaaaaaaaaaaaaaaaaaaaataccaacaaattgaaccctgcagcacatcaaaaagctaatccacgctattcaagtmggctttactcctgggatgcaaggttgttagaggccattctcctaagtgaattaatgtaggaacagaaaaccaaataccacatgttatcacttattagtgggaggtaaatattaagtacacatggacacaaagaagaaaaatacacacaagggcctacttcagagtggaagcagggaggagtacatagatctaaaatcttttaggttggtgcaaaaataattgcagtttttgccattgaaagtaatggcaaaaacctaatacctatcaggaactatgctcattccttgggtgacaatacagtttgtacaccaaacctctacatatgcaatttacatatataacaaacccgcacatatgt

SEQ ID NO: 349852 - DNA, 588 bp, Homo sapiens
tataaaactataaaccttctagaacaaattataaaagaaaatctgtgcaatcatgggtttggcgatgagttttagatacaatatcaaaaggtcaaatatacaccaaaaataagtagtactttattaaaatcaaaaaatttgctctatgaaaaatataagagaatgaaaatatttttcctcgccagtgatacagtatttgcaaatcacatttgtataaaggacttacgtccagcatataaaaattgctcttatacttcaaaacagataaacaaaaaccaaaataaaaaatggcraagtcttaacagacacatcaccaaagatgatacactcatggcaaaaagcatatgaaaatgtgttcaatagcatttgtcattagagaaatgtaaatgaatacaaaactgagatatccattagaatgactaaaatctaaaaattaaaaaaagtaaatttgtcaatgcctgctaccagaagggatgcatagcaacatgaactctcatttatttctggtgggaatgcaaagtaatggtacagccactttgaaagacaatttcgcagtttctgacaaagttaaatatagtgttactatat

SEQ ID NO: 349853 - DNA, 417 bp, Homo sapiens
gttaattatttaataaaaattatttgaactcttatatccacacaaaacctgcatgtgaatatttacattatctttattataatgtataaacactggaaacaaccaagatattcttcatttggtgaatgggtaatgtacctatggtacatccatgcaatggaaatactattcagcaataaaaagaaatragctatcaagccatgtaaaaacatgaacaaaatttaaattcttatttataagtgaaaaagaccagtctgaaaaggctatggagttaacaattttatttatatgaatttctgtaaggcaaaactgtagagaccttaaatagatcagtgatatggaaaaggtgaaggttgaatatatgtggcacaggggatttttagctggtgaaattattttgtatgctcttgtaatggt

SEQ ID NO: 349854 - DNA, 538 bp, Homo sapiens
aaaataatataatgtgataaagagaaaattagattgtcaaaatatatggtaaaagaataagttgaaaactactggcttggtgcagcagtgcatgcctgtaatccgagcacttggaagtcaaggcaggttaatcgcttgagctcaggagtttgagaccagcctgggcaacatggtgaaaccctgtctcgagacaaaaaacacaaaaaaaatagacaggcatggtggcttgcacctgtttcccagctactctggaggctgaggggcaaggatttcctaagccccagaagtcaaggccggaatgagcttggatcacaacactgcactgcagtctgggcaacaaagtgagacactgtctcaaaaaaataaaaagaaaaaaaagaagaatagaaaagaaaaaaaaagtgagaaggaaggaaggcattgagaaatttctgtgccaaaatctgagaaaggtgaaaagcctagraaaatgaaatcaggtagcagcttctttgacctcctaagaacattattttactctaaatactaagtagaactt

SEQ ID NO: 349855 - DNA, 567 bp, Homo sapiens
aagcaaatttgagactaaaggcatagcacaaataccattaaaatactagaaataaaagagagaaagaatagagcccaggcattattttactatatattgcacaataaatataacatgcatatctatgtatccacaaacacacacacacatatatacatacctgtatgtgtgtgtgtgtgtgtgtgtgtgtgtgtgtgtgtrtatatatatatatatatatatatatatatatacaggtttatacatctgtatacatatgtatgtatacacacacacatatacatgtatgtatatttatatacacatacaactgtatgttaaatcatgacatagatattatagtggattatttatttttactttcttgatacattatttgatataataaagtgaaaaatcacataaaaagaatatgatagagaaaataaacagtgaaaagaaaatttaaatatatagttacatcacagacagttcagagaataccagaataacttatatcaatagggccacctgaaaagtacaactataaaactgtagaaaaggtaagaagtaatgttttcaggaact

SEQ ID NO: 349856 - DNA, 567 bp, Homo sapiens
aagcaaatttgagactaaaggcatagcacaaataccattaaaatactagaaataaaagagagaaagaatagagcccaggcattattttactatatattgcacaataaatataacatgcatatctatgtatccacaaacacacacacacatatatacatacctgtatgtgtgtgtgtgtgtgtgtgtgtgtgtgtgtgtgtgtatatatatatatatatatatatatatatatacaggtttatacatctgtatacatatgtatgtatacacacacacatatacatgtatgtatatttatatacacatacaactgtatgttaaatcatgacatagatattatagtggattatttatttttactttcttgatacattatttgatataataaagtgaaaaatcacataaaaagaatatgatagagaaaataaacagtgaaaagaaaatttaaatatatagttacatcamagacagttcagagaataccagaataacttatatcaatagggccacctgaaaagtacaactataaaactgtagaaaaggtaagaagtaatgttttcaggaact

SEQ ID NO: 349857 - DNA, 548 bp, Homo sapiens
aaaatgaatagacagtttttcttagaagttttagattacatgaaagcagaataacacaatggtgcttacagcaggactcaacaaagtgatagtccctgctcaggattggacagagataratgatcttcaactgtaagagtaaaatattccatttttctcatggatgtgctgtatgtatttacaattaaaatcacaataatagaaacactgaaattttacaaaagtaaatatatatatatagcttacacaaattataagcactatcattatttaagaattaaaaaaatactaagtgcagtctaagtttcatgtgtgttttagtttttcttaacgattccagtggtatgaatgaatatatatatatatatatatatatatatatatatatatatgctttgaaaattgattttcaaatacaaaatggggtgttaagatcctatcccttgatcacataaatataaacaaaaatagggtcatttacaatattcatatgttaaattacacatcttaattgggaggaaatagtctttccttagggaattattcta

SEQ ID NO: 349858 - DNA, 581 bp, Homo sapiens
tccagaattgttctcttataccttatttagtgacctatatgttgagaccatgttttcctgaatggtgttgagggtagcagatgttctttgatgtctggccattgaagagttaggtatttattgtagtcttcactgtctaagcttatttgtagttatttttcttgggaatgctttacgtgatgtgatctaagctgtttatgctttagggggcacccaaagcccagtaacactgtggttttgcagactcatagaggtaccatattaatgatcttgaataaggtctgggagcattttctggattaccaggcacagtcccttgtttcttctctcaamcataaagagctccccgcccccccgccttctctctctctctctctttgttctgagtcacttaaagttgtaggtggagtgacataaacacctctgtagccatcaccactatgactgcactgggtcagagatgaagccaacatagctctgtgtctcacccaaggcctgctgtaaccactccctggtactgcctgtgttcactcaaggtcccggggctctacaatcagcaagtaccaaagccagccaggctg

SEQ ID NO: 349859 - DNA, 437 bp, Homo sapiens
tgcttcctgactttttaatgatcgtcattctaactagtgtgagatagtatctcattgtagtattgattggcatttctctaatgaccattgatgatgagctttttttcatgtgtttgttggccacataagtgtctttttttgagaagtgtctttttaattttttatcttcaaagagaatttaatatacgtataagtccaaataaaattcatcaagggaaacgtgtttgtctttcacttctaagtgtttacaatctaaaacaagtatgacattagaagcttccaattatttcaatataaattaatattttagtattattttaattttaataaatttcaacactagtttattcaattataataaattttaatattgatttgctgctgtrgctcattttgtacattaactcattgtccttttaaaattttgtctgctttcc

SEQ ID NO: 349860 - DNA, 477 bp, Homo sapiens
  misc_feature (1)...(477): n = A,T,C or G
gatttacagacacgagagcagggtataggaaagccacgagatacagtgtagtatccagggtgagtagctacctagagagttatgccctgggcctgaaggagaagaaggaaggtcgttggatcccacagtgagtaattttgtgtagagagccgcctgataaaggcaccttcagtggagggacagcmcctgctcaaagtgtcacaaaggggaggaaccatgcaggggggaagccaggagaatagatacttcaacgtcattcttcccttcctcccatctcctgctgacacgctccatttacgttagccccactggaagatggagggtaagggagccagctgaggcaatctgtccaggcagcctcctgggggacagacagggtggagaaggatggagaatgggtcttgagagcaaacagaagatattcagcacacatacacagatgaacaggcactaccctccggattgctatntatgtat

SEQ ID NO: 349861 - DNA, 477 bp, Homo sapiens
  misc_feature (1)...(477): n = A,T,C or G
gatttacagacacgagagcagggtataggaaagccacgagatacagtgtagtatccagggtgagtagctacctagagagttatgccctgggcctgaaggagaagaaggaaggtcgttggatcccacagtgagtaattttgtgtagagagccgcctgataaaggcaccttcagtggagggacagcacctgctcaaagtgtcacaaaggggaggaaccatkcaggggggaagccaggagaatagatacttcaacgtcattcttcccttcctcccatctcctgctgacacgctccatttacgttagccccactggaagatggagggtaagggagccagctgaggcaatctgtccaggcagcctcctgggggacagacagggtggagaaggatggagaatgggtcttgagagcaaacagaagatattcagcacacatacacagatgaacaggcactaccctccggattgctatntatgtat

SEQ ID NO: 349862 - DNA, 480 bp, Homo sapiens
caaatacctgctcacgaacacagcaatccctaatactagatatgcttaattctctatcacaagagacaataaacagtccatgggaaagaccaaggggacgatctcacagcacgattttttcactgattacacatcagaaagctgtaagggactatgatttatgtaggaagcataacaaataattaagtcatttaaaatcatcatctrtatacaggaattaaaaattacacacaaattaatatacatgaagaaaatactggaaatagccttccctatgatacgatactattagcagtatagtattgaagtgaattttgctctctgtttctcaggatttctactttctttatgttgttatcagtttatttttctatgaatgctttctgtttgcccacagtctttgtgtgcccaggatagaaacggtatccacaatagaagtcctttccagaaatactttttcttttttttaaataacaaggg

SEQ ID NO: 349863 - DNA, 570 bp, Homo sapiens
gcacggtggcctgcgcctgtaatcccagcactttgggaggctgaggtgggtgaatcacctgaggtcagtagttcgagaccagcctggccaacatggtgaaaccccatctctactaaaagtacaaaaaattagccgggtgtggtggcaygcgcctgtaatcccagctacttgggaggctgaggcacaagagtcactgcagagattgcagtgagccaagactgcactactgaactccagcctggacgacaggagtgagactccatcttaaaaaaaaaaaaaaaagaaagaaaagaaaaaagcaaagagaaggaaaatataattgtaaaaggaaaacaagaaaaaataatgatcaaagtctttctcatagtgtggaggaaaaaattcctaagcacaataacacagtaaactgattataattctgggttgaatatatattttaaatgatatgttgtaaatacttaactgagatgttcataaatgagaggggaaaaggtaggaaaccccaggggtaagaaatgaacagagatgaggtttccccaagaaggttccccgtgtggatacgcttcccca

SEQ ID NO: 349864 - DNA, 579 bp, Homo sapiens
ataaggattagatttaccatgagtgcaaagtggacttttctgggtagagaacttttcaaaagattaaaaaaagaaagaccctgttttgtaatcaaggtcaggttttctctgagatcagggagtcagtaagttctgtgcagcaagagctttttcttactcaaatgtaaaaccatagtgtcttatgcagtgctcrgaatgtactagctatgctacaatcataagttgaacaaatgaagaaatgacctggttgccatcccatgttcttaaaggtattgaaatatcctcactgatgatgttgatcggctctggatctaggtgtgggtatggagatcactccattggtattgacagggtagttttccatggcctcctttttacagcattagggacagcgttagggaagagagtcccccgggtgcactgtctgcccgtgtgccagtggctcatgtgaagacagaggcagtgagattgaggacggcagaggcagcccatggacaccctgactggcagttgcttttatatctggctaatgttaactcttgctgttaataattcctgtgtgataccatgcagcaggaa

SEQ ID NO: 349865 - DNA, 554 bp, Homo sapiens
gtaaatatatattatataakataatataaaatatatatttgtgcagacacacaatatagatagtaatcaaatagatgcatatatgcacataaaatatatatgggaatcccctataataactatgatttttatttcacatttaattcatccaaatccctgttaatatatagattttggtcctattgtattaactagctaacatgaatgaaattatgtataatttaaaatatctgggcgcggtggctcatgcctgtaatcccagcattttgggaggccgggcaggcggatcgcctgaggttaggagtttgagaccagcctggccaacatggtgaaaccccgtctctactaaaagtacaaaaaaactagccgggcatgctggcaggtgcctgtaatcacagttactctggagactgaggcaggaaaatcccttgaacccgggaggcagaagtgcagtgagccaagatcgcgttactgcactccagcctgggagacagaacgagactccatctcaataataataataatcttttgagaaaatgctacatagaatgtgt

SEQ ID NO: 349866 - DNA, 558 bp, Homo sapiens
tgttacaacagaagtttagaagtaatccaacccgcaccaagaccttattaaccatgaaataaccttgacctgaacacaatgcactcattggcacaaagcaaaggggtaaaaaccctttttatgtgtcactttttaaggcccggattgtgtttaattacaaactttttggtatttttcttacaaattcttatgtcaaaaataattatcttcttatacaaattaggttttgaaattaattaaatgtagcaatttcagttaatctctattagtgttcacctttaaaacattactacctcaattaataaaaataatttaaaaatatgtttctcttcccaatatatatttcattctatttagtagaaaaatgacaataatagaatatgatggcagaatttggttgctgtatccaaaattctatattttctggttgtttygtcaactattcatcttctaaatctgcataactgtgttattatgacttctaacttaaggaattctgatgtatttagatacggtagctccccaattacaaccctgtaagccttttttgtaacacac

SEQ ID NO: 349867 - DNA, 597 bp, Homo sapiens
gtgcctgcatacacacacacacacacacacacacacacacacacagcccacacacacacatgtcaatacacaggtacacagtatcactcacacatagtcatgtttcccgaggaaaaaaaagtgaatgctatatagtcaagtagaaagaatactgttaaaaggcaagcaaaaactgattaccttttatctgggatattccttcttatataatattaacagtgggctctgagtccttcccttctgcatcagttaaaatcctgctcactttattcccgtctaaattagtaccatccactggccattctgtgctttcagatttttttaatgtgtatttttaataaaatgatatttataattcagaactcaggtcattgtgacccttttcttgcaatctaaaatamgatctataattttgttttggaagcatgtagataaggcattagaagtaaggcatttgttgtactgaaaccaaactcctaaaagacacattccagaagttatttcaaatggttagtcccacccaccatccctctccatttctcattctgatgatttgctgaacaggggtgaccctcccgtctactacagtgaggccct

SEQ ID NO: 349868 - DNA, 553 bp, Homo sapiens
gcctgtaatgccttcatatgaaatttgaagatatatgtatatgaagcatacaggtcattcttactccagctaagctctcccacaagaactctgtttttgaggggcacaaacatcagataatctgagccgtgggcccccagctcccttgagcatatctagatatgggtcattctagtgggaaggtttgccgaattatcctgactgggtatgttttacacaaagtagctctgaaatttttctctaatcactgcccyccaaattgttaagtaaatctctcttttgtgcctggtagcatgccctgtgataccaccttacccaagtggcagtacttcctgtgaattggtcagtaaaaaggagcctggatgtttccacactgatggttgccaagccagggagtgagatgccaggtccccttgccttgggcctgctgtagtgtgagcagctaggacagggccccctcctccatcatccctctgaaggggaggaaagcctctcactcttattttggatgctcccggggacatctcaggctttctccctcctctgctactgt

SEQ ID NO: 349869 - DNA, 600 bp, Homo sapiens
tattagcagagattgcagaacagtattacctcagcaaataaaagaataagtaattatattagcttagctaatataattatggctgaagtttgctttaacaatataatgttatatataatgttatatgtaatgttatatatgttgtgtttatatrtaatatatattagctaataatttgggtacttgcaaatttgttataaactaatttgttatatataataaattagcttataacaaatacatatagttatatatattatatatattagcttacaacaaatttgcaaatatacagataataaaatatattattatttatatataaaatttgcaatcatccagagttgcttaaacaattaggtaaaagatagatggaaactctgtaatagatgggtcagactgacaacactttaaaccactgatcgttagttgattacaatgaaaagtagaacaactggaaatttttttcagagcataagtaaaaaataaacttcatagaagaaagatatttaagaaacatgctaaccaaatgaaaattgttttgatatagaatattaaaaaattatttactttaagtgtgaggatagtattgtagttatg

SEQ ID NO: 349870 - DNA, 545 bp, Homo sapiens
tggaaactgctgtacagaataccacagatgcacaacttaaactcaaaagcatatttctcagtcctggaagctagaactccaggacccaggcgtcatcagagttggttcctggtgaggtcttgctgtctggcttacagggggccacatactcactgtgtcatcttcactcacacacacctggctgtacctgtttcttctctgtgtgtacaaagagacagggagagagagagagagagagagatccaatgcctcttcttataagggcaccagttctataggccgagcgagggccccacccttatatctcattgagccttcatcacctccttaaaggcctcatctccaaatacagccacattgggagttagggcttcaacatataaatttggtgggacagaatttaccccawagcagacgggatataagcagactgaacgttagaaagatttttacttgaaggaaaataataaggggaaaatagatctagaagattggaaaatcagtaagggagctattaagagattccacataccatgtactggaac

SEQ ID NO: 349871 - DNA, 545 bp, Homo sapiens
tggaaactgctgtacagaataccacagatgcacaacttaaactcaaaagcatatttctcagtcctggaagctagaactccaggacccaggcgtcatcagagttggttcctggtgaggtcttgctgtctggcttacagggggccacatactcactgtgtcatcttcactcacacacacctggctgtacctgtttcttctctgtgtgtacaaagagacagggagagagagagagagagagagatccaatgcctcttcttataagggcaccagttctataggccgagcgagggccccacccttatatctcattgagccttcatcacctccttaaaggcctcatctccaaatacagccacattgggagttagggcttcaacatataaatttggtgggacagaatttaccccaaakcagacgggatataagcagactgaacgttagaaagatttttacttgaaggaaaataataaggggaaaatagatctagaagattggaaaatcagtaagggagctattaagagattccacataccatgtactggaac

SEQ ID NO: 349872 - DNA, 493 bp, Homo sapiens
acagcccctgctgcccagacactcgatatgagtgctgtgggaatagagtttgaactccaccatcaactctgtaactgtgagtagaaaaggggccaagccatgacattgtagatttgggaacccaggagccctgtgtgggtagagcraaggcatctggtcgagttagggtacaggaagacgcagaaagaggtttttggagacattgggccagactcttctgtagcaactgaggctccaactaatactccagcagggttagagttagggttaaacagaactaggcagatggttcatgagggtggaaagcagtggagattggggtgggaggatcagtctgtgggggagcagcctgtgggtgttggagggtcactgacttcccaaggggtcaggaagaagaagggcagtggcccagtaagaaaggaatgggtcctggattagacccagactcctgtctccacactggaactctctgcactcaggcaagagaattaat

SEQ ID NO: 349873 - DNA, 628 bp, Homo sapiens
ccttatcttatatcatcaaactctctgttccccctgctcccaccatctgtgggggtccctgtgtcacttccacttcatcccattatgcaagtgaccccatttcacacatttttgtacaatctgttggtctccatgaaagagtgtagctcttgacttactatattttcattgatgctcttatcttaattctcaacaggaattcctcctcactattctatttcttttgcatccctcaaaaaacttgtcaccaaatagtgttgacttttccatcagaacttacccagactgggaccagttctcacaatttccattgccccaacactcaggcacatctcattcttctccgtctatgttttcatggcagccttcctgctggtctcccacctccacagctggcttctcacaggattctcagcacaggagcagaggagtcacccacaccactgctcaaaccctgtgtggcttcccacctaactccctaaaagccaatgcccttccagtggctgaaggccctgcatgygaggggccaaatggccattccgggctttgcgttgtctcaggtgactgtcctcattcttggctctgccctggccacactcacaacctaacatccctgtcactaaacact

SEQ ID NO: 349874 - DNA, 628 bp, Homo sapiens
ccttatcttatatcatcaaactctctgttccccctgctcccaccatctgtgggggtccctgtgtcacttccacttcatcccattatgcaagtgaccccatttcacacatttttgtacaatctgttggtctccatgaaagagtgtagctcttgacttactatattttcattgatgctcttatcttaattctcaacaggaattcctcctcactattctatttcttttgcatccctcaaaaaacttgtcaccaaatagtgttgacttttccatcagaacttacccagactgggaccagttctcacaatttccattgccccaacactcaggcacatctcattcttctccgtctatgttttcatggcagccttcctgctggtctcccacctccacagctggcttctcacaggattctcagcacaggagcagaggagtcacccacaccactgctcaaaccctgtgtggcttcccacctaactccctaaaagccaatgcccttccagtggctgaaggccctgcatgtgaggggccaaatggccattccrggctttgcgttgtctcaggtgactgtcctcattcttggctctgccctggccacactcacaacctaacatccctgtcactaaacact

SEQ ID NO: 349875 - DNA, 584 bp, Homo sapiens
tagatttttcatgttcaaaaatacttacacaattatttattggaaggcatgagcaatttatgaaatcatcttcactaaagtccctggagttaaaatctgcccatgtaagttgttctttcctttaacccaacaggacttctatcctagaggtgccccacacctaggagacactaaaaattactctcaactgaaagattaagtgagtaattaaaattttaagaggarcccaacattctcttgagcctgggaccatgagagcatttctccctagaaattcaggacagacaaacacacacacacacacacacacacaatttatactaagtatagctgccacaggccatgaacctggggattaaaacccagcatagcaaatatataaaagatgaggggtctcagctggtatctgggttatttcattcagtgaccttcttgctgtctctcattcctttctgtctctatgcataacttcctgggtttatgctatcagaaattaccttgttgagttcctgtgatgtcatcctacagcaagaatcctatcagaaatttactttggaaatgactctggaaatgtaagttgaggg

SEQ ID NO: 349876 - DNA, 584 bp, Homo sapiens
tagatttttcatgttcaaaaatacttacacaattatttattggaaggcatgagcaatttatgaaatcatcttcactaaagtccctggagttaaaatctgcccatgtaagttgttctttcctttaacccaacaggacttctatcctagaggtgccccacacctaggagacactaaaaattactctcaactgaaagattaagtgagtaattaaaattttaagaggagcccaacattctcttgagcctgggaccatgagagcatttctccctagaaattcaggacagacaaacacacacacacacacacacacacaatttatactaagtatagctgccacaggccatgaasctggggattaaaacccagcatagcaaatatataaaagatgaggggtctcagctggtatctgggttatttcattcagtgaccttcttgctgtctctcattcctttctgtctctatgcataacttcctgggtttatgctatcagaaattaccttgttgagttcctgtgatgtcatcctacagcaagaatcctatcagaaatttactttggaaatgactctggaaatgtaagttgaggg

SEQ ID NO: 349877 - DNA, 593 bp, Homo sapiens
ttggatccctctctaaatagctgcaggcattggtagtgctctttctgcttccccactggttggttctgaatacgtaattaccttgaggtcgaaaggagaggattaacagaccttatcctaattgcttgtttttgtagagttgttaaaaaagatttgggctccagaaacagggggtgtagccagacagaaggcagcctggagttcaaaagtcttgtaatctttggctccacagacctataaaattgargtgttgactgaatgcaaacagcctgcagtctgagaggcccgggcccaagaaaggacaagaggcccatcggtcatttgaaaagccaggggtttcataatgactctggactgacccattaatggatggccccatttgatttccccttccctatgaacaccagatctggagctgtctgccacacaacagagcttttcttagctcctgtgttcctagaatttaagaataagtgaggtctcttggaaagccccagcatgaaaggagtaaattggaaatattaaggggcagtggtgcagtaataatacacccttgtttcctggtgtcactccttaggtaatggttataggct

SEQ ID NO: 349878 - DNA, 581 bp, Homo sapiens
ccttaactcaatcttttccttctttcctatgcttcattttttatcttcttctcttcctaaactttttaatatttattttccatcttttctatctccacactctctgtaatggctgtagattgaatttgattgcctccttcatctgcctttatgaatatgttagatgataacaaggtatgtgctgaatctgagcaaagggtaagaagtaacatcaaacgtttacaagcatatagagtaaccagaatgtccatacacttctggttgtcatgcaagttggtacaactactttggaaacttctctagctgtatctattaaagccaaatatatatatatatatayacacacacacacacacactccatgacacagaattctgctcatatagacactcaacacaagtgcacacatacatgcacaagaaacatgtagaagaatgcttgtagcagcattattcataataatcaaaacctggaaacagcccaattgtctgtcagtagaagggataaatacatcatataatgaatactctataaaaattaaaataagggaaattactgctacacatgaaattgctgttgca

SEQ ID NO: 349879 - DNA, 580 bp, Homo sapiens
gcttactttcattttccccgcaataaaaaaaaagatgatgataatgatagatagatagatagatagatacatagatacatagatagatagatagatagwgagatagatagatagatagatagatagatagatagatagatagataccacatgcacacaatgaccatcctaaactcattacttctccccatttcccataacatcagtagactaactcccagttccccttcttgattaataattactcatacctaacttcgcatctttattcctgggccctggttatttcctgattttataaatattcccttttctttgatattatccctgccactagccctaaaactaaaatcaactcaaccaaaaccaccagtgtcaccattatcagccgttgtctctccctcatccactcctcatctgctttctctctttcacttagaattacattatatgtgtctctcctttgtctatttctctcatatttctctgtgctttctgatataaccctcctcttttctaagcagtaccatcttctcaaccagcatttgctaagagcctccttccatataggcagtgtgaat

SEQ ID NO: 349880 - DNA, 583 bp, Homo sapiens
cctgagaagcctaaacaaccaaggaaacttatcctttgttattcctagtactttgctgttattagccaaccacttatcctgaaaatgatgatacagaaaaaaaggaaagatggaacaaccaatagttccttttccttttagttcttccttactcatcagtaagcacaaggtaatgttggtagaatgttgcatagcaagaaataaaaacaattgaatcaattttgtgtagcatttcttctgctctggtaasaactacatatgcatgtattaactacaaaacatggaatgtataatctaatcgattcgcatacaagtacaagattcctatagttgcatttaaaactggcattgcacaatataaagttgaatggtaaaattcatgctaataattctaaatgtgaatgcttctttacttagaattatatcaaatagcatatttaaaacaccattacaagttgagagccagctgcaaaaggatggaaaaagccttatattttaggaccttcaactgtaccctgtttttccagcaatttgaacaagaggccccacattttctttttgcactgggccatccgaggtatgt

SEQ ID NO: 349881 - DNA, 533 bp, Homo sapiens
ctgattatcacttcaaattaaggaataggcttcaaaacatttttttaaaacctcacttctccccacccgtccctacaggttgatttacgcacacttcttaagccaagtcaaagaactggcttaactctagtttcccttagaaagcrtgactccaggctgcctgagcttcctctgtccttttgtgacctcctgatgacctgggagttccacccactttttagggcctctcggagccttgaatctacacatcagtgggatttagtttcccttttgctttaatgactcctcagaaccttactcatgtagcaatctcacccacttcctttcttgtttctctggtccttatgggctatagcccacctctccttcccatgcaggcaggttctcagggacaatggtgatttatttatttacagttctccttatattttgtttggttagcttttatttatttctttttctcaggtgggggaaaaagctaggttatgtctttgggtgtcagctagtaatctttcacttttcttcccatgtaa

SEQ ID NO: 349882 - DNA, 544 bp, Homo sapiens
ggagaccattaatcagtacaaaaaaatagaaagaataaataagatgtggtttttgctagcacagyagggtgactatattaaaaaataatttaactgttcacttaaaaatagctaagagtataattaaattatatattataattatatgattgaattatatatatttgctctgatatgattattatgcattgcatgcctgtatcaaaatatctcctgtacctcataaatatatatacttactatgtaaccacaacaataaaaaatttaaaaatattaaaaaggtagaggatacaaaataaaccttagaaagtatgtgtttcagatgcagtcagaccagggactttaattttcagtcagtagagtaaaaacaatgggtgacagttgagcaggtgtagagctgctggcttttttggcaggttgtggttgctgtaaacaaaagaagttcattcttttacccctcactcctctctctagggcctggcagtcatagcaatgaaggtgagagtgggtgtgagtaagggtggaggaggcggcagggtggctg

SEQ ID NO: 349883 - DNA, 456 bp, Homo sapiens
gatgattgcaagattttgctattgcttggcaactgttctgctcatcctccagctgaaattctaatagaaaataatataatgtttatgtcatgtattttatctcaaatatgactttattaattcatctatgtatcatggtttccttaaatcagtgaagtataatcataaaaacacttttttgaacactttcttgttcatgctagcagcagtgaacagaggcgtagatgtggaaggtttctttttttttttttttctttttagacagggtctcactctgtcgcacaggctggagtgcaatagtgtgatcatgggtcactgcagcctcaacttatctggggttaaggtgatcctccaacctcagtctcccaagcagttggrgctaaaggcaattgtcaacatgccaggctaatttttgtattctttttgtagagacagggtttcaccatgtttcccagt

SEQ ID NO: 349884 - DNA, 633 bp, Homo sapiens
cagttgagcaagaacaaggggtagaaagcttattcaaagagaaaaaaacaataacagaaaactttctaaatgtgagaaagagataaatatccaggaacaggaaggtcagaaaacaccaaacagattcaacccaaattagactaccacaagacctataacaattcaactttctaaagctaaagtgatagaaagcatcctaaaagcagaaagaggaagaaaagcaaataatatataaacaaagctccaattcatctggtgacacaattctcagtggaaaccatacaggccaggaagtagtgggacaatattttcaaagtaatgaaagaaaaaactaccctccaagaatactgtattcatcaaatctatcttcaaatatgaaaggtttttcctcaacaatcaaaagctgagagaatttaccaccaccagacccrtcttacaaaaaatgctacagacagtccttcaatctggaagggaaaaaaaaaaacattaacatgcaaacagataatttttcaaagtataaaacccaccggtataattaagtacatagaaaatcacagaatactctactactgcaacaggtgtacaatctattcataactctagtgtgaagccccaaaggcaaatctacaaaaa

SEQ ID NO: 349885 - DNA, 488 bp, Homo sapiens
tataatgataaaagggtcaattcagtaaaagggtataacagttataaatatctctttatctgacactggagcaccaagyatataagtaaacattaatagatctaaaggaagagagagacagatggcaatacaataacagtaggggacttcaataccccagtctcagtaatggacagatcatcccaacagaaaatcaacaaataaacattggagttaagctacacaatagaccaaattagcctaattgacatttacagaacaatatacgcaactgatatagaattcacattcttttcatgagtacttaaaacattctccagaatagaccatatattaggccacaaaacaagtctcagcaaattccaaaaaagtagaaattatatcaagtatctttctgactacaattgaattgaactaaaaattgttaacaagggaaacctcataaaatacagaaacattttgaaattcagcaacttactcctgaatga

SEQ ID NO: 349886 - DNA, 613 bp, Homo sapiens
ttgttctgggcaaagatttatcaaaaacacagggagtaatgaatgctggtgagggtgtgtagaaagggcaaccctcatacactgttgctgtgtgtataaattagtaaggcagctgtatggagtacagcctgtatggaggcttctcaaaaaacttaaaatagaactagtatatggtccagcaatttcactactgcatatatatccaaaagaaagaaaataaatatattgaagacatatctgcattcccatgttcattgcagcactattcacaatagccaaaatatggaatcaaccagtgtgcycatagatggatgaataaagaaaatgtggtatagatacacaatgaaatattactgacccataaaaaggaatgaaatcctgtcacttgcaaccacatagatggaagtggaggtcattatgtgaaatgagacaatcacagaaagataaatatcgcatgttcttgttcaaatatgggagctaaaaaagtggatctcatgaagatagagagtagattggtggttaccagaagccaggaagggtaggagagagggaggatgaagagagtttaaataatgggtataaatatacagtttgatagaagaaataagaccta

SEQ ID NO: 349887 - DNA, 517 bp, Homo sapiens
aagaagaaatttagaaatatgggctgacaatagtgggctgacaccttgccccccactcacttccccatcccaactctccatcatccaagttcaggccaattagtcattatataccagaatataagccagccaagtaaaatgacaaccaaaaacactaatcaaccagtgtggagaaacaaatggctctattcagcagaacatgacagtttcaatactacagtaagatgaaatgagaaatacagtttaatcactaagtacttggcagaaagcagaataaaacaacttagcaattatttgtgtcatgtgtttgaatgttcacaaactacaagcttcttcctttaaggtagaagacaaatatctttcaaaagaggacaggtttttcatattagtctctaatacaaaaaggaatgtttttagccattccacagtgacctgttttttttgkttgcttgtatttggttttgcttttttaacatgacgatacaactgggggaagggggttcttcactaccagtct

SEQ ID NO: 349888 - DNA, 534 bp, Homo sapiens
ttgtccctgcccatgtccttctgattgatccattttacagagtgctgcatagtctattttacagagtgctgatcagtccattttacaaacctctagctagctacagagtgctaattgatgcatttttacagagcactgattggtgcattttacaaacctcttgtaagacagaaaagttctctaagtccccactcaacccaggaagtccagctggcatcacctctcacatacacatgtacccytttatatattctgaaagttaaaaactcaactaataaaaactattcttaatgttttacaacttcaatgtcatactgtctttgtacttctgaacaaatactgtgactctttttcttgtcaaatgtatatctacttaagaatacctttccttgtttactgtgattcctcttgtcttcaaaatatgtatctgcatctctgattagatttataatttatccatgtttactgttatttttcctattttttaaagatgcacttgaatcacttctcaatgtatgttgtgaatttatttgt

SEQ ID NO: 349889 - DNA, 534 bp, Homo sapiens
ttgtccctgcccatgtccttctgattgatccattttacagagtgctgcatagtctattttacagagtgctgatcagtccattttacaaacctctagctagctacagagtgctaattgatgcatttttacagagcactgattggtgcattttacaaacctcttgtaagacagaaaagttctctaagtccccactcaacccaggaagtccagctggcatcacctctcacatacacatgtacccttttatatattctgaaagttaaaaactcaactaataaaaactattcttaatgttttacaacttcaatgtcatactgtctttgtacttctgaacaaatactgtgactctttttcttgtcaaatgtatatctacttaagaataccttwccttgtttactgtgattcctcttgtcttcaaaatatgtatctgcatctctgattagatttataatttatccatgtttactgttatttttcctattttttaaagatgcacttgaatcacttctcaatgtatgttgtgaatttatttgt

SEQ ID NO: 349890 - DNA, 594 bp, Homo sapiens
tctatgcaccccctcctagtctcttctcagttgtctggccaacttatggcaacttaattgcattgtgggctctaattaataacctccctgtattcatgaactctggkctttaactttgtagtctccacccactctgattctggaatggactctgatatggtttggatatgtgttccctcaaaatctcaggtggatatgtgatccccactgggggaggtatgacctattgggaggtatttcgttcatgggggtggattccacataaatggcttgcaggtaatgagtgagttcttgctttgagatctcgttgtttaaaagagtgtggtacattttctgccttgctccctctcttaccatgtgatacactggttctcccttcaccttccaccatgattacaagcttcccgaggccctcaccagaagcagatggtggaagctttcttcctgcacagcctgcagaactgtgggcgaaaataaacctcttttctttataaattacccaatttcaggtattcctttatagcaatgcaaaaccaggctaatacagacttggacttacttttgccagtaggatgtggggagtgatggtatgcc

SEQ ID NO: 349891 - DNA, 594 bp, Homo sapiens
actggaatatgaagggtagactgcagttttatgtaagaacaagattgtgaaaagaaaaagaaattggaaatataccttagacagaaatgtacttatttcattctgtagatgacaaagtggtcagaaggctactctttgaagttgtataaacaacttcaaagattgttgaaactttgaagattcaaagattgggttagagacccagggctaccagtttttagctcaatgatgttgagcaagttactagcgtgtaataatagtatctacctccttaggtcactgtgaagataatgtcaaatattgcatataaagtgattaacccagaacctgacagagactaaggttacaggaattatttattgttatcatcatcataattattgttgttgctaatagatgccatacattacatgtgaaaagtccactacatgaatgcacatgaggtttttcttattctttgttaggtctttaagtatctatgaaatgagtgtcagggctacaaaccacagtgtctccatgaattaaaggttaagacagcagtaccagagtggattcaggatargctttaaactttgggaaggcaaagattcacct

SEQ ID NO: 349892 - DNA, 555 bp, Homo sapiens
agaattgggcccgggttttgccaaccrtctctctatcgattaattcaaattttatatgaaagttgaaaacactcggtgcccatggtttttcaatgaaaatgtaaaaaaaattttatttgtattataaatgatgatactgagattttatatgataaatatggtgtttgaatgaaaagtatttatttgttataaacatgtacttgttaattatgaaatcaccaaactaggatgctgcagaacctgtttgttttgtcttgcttttttttgttgttgttgttattccctgggttaagttttaaaattcataatttggaaatgatcaaatcatggcaaacatgctgaaattctttaacacattttaagattacaaatttgtttaattcaagaatgtaaagctcaggtcaggagattttattatagattcaagcttctagctttgtattttaaaaatttaataaatttgggggattttattcctccacactgtgagccatattttcattttatgacaccatctaactcagtcactagataaggccttaaaaaataatctga

SEQ ID NO: 349893 - DNA, 555 bp, Homo sapiens
agaattgggcccgggttttgccaaccgtctctctatcgattaattcaaattttatatgaaagttgaaaacactcggtgcccatggtttttcaatgaaartgtaaaaaaaattttatttgtattataaatgatgatactgagattttatatgataaatatggtgtttgaatgaaaagtatttatttgttataaacatgtacttgttaattatgaaatcaccaaactaggatgctgcagaacctgtttgttttgtcttgcttttttttgttgttgttgttattccctgggttaagttttaaaattcataatttggaaatgatcaaatcatggcaaacatgctgaaattctttaacacattttaagattacaaatttgtttaattcaagaatgtaaagctcaggtcaggagattttattatagattcaagcttctagctttgtattttaaaaatttaataaatttgggggattttattcctccacactgtgagccatattttcattttatgacaccatctaactcagtcactagataaggccttaaaaaataatctga

SEQ ID NO: 349894 - DNA, 555 bp, Homo sapiens
agaattgggcccgggttttgccaaccgtctctctatcgattaattcaaattttatatgaaagttgaaaacactcggtgcccatggtttttcaatgaaaatgtaaaaaaawttttatttgtattataaatgatgatactgagattttatatgataaatatggtgtttgaatgaaaagtatttatttgttataaacatgtacttgttaattatgaaatcaccaaactaggatgctgcagaacctgtttgttttgtcttgcttttttttgttgttgttgttattccctgggttaagttttaaaattcataatttggaaatgatcaaatcatggcaaacatgctgaaattctttaacacattttaagattacaaatttgtttaattcaagaatgtaaagctcaggtcaggagattttattatagattcaagcttctagctttgtattttaaaaatttaataaatttgggggattttattcctccacactgtgagccatattttcattttatgacaccatctaactcagtcactagataaggccttaaaaaataatctga

SEQ ID NO: 349895 - DNA, 432 bp, Homo sapiens
gctcattaaaggatcaaattatatgcagcatgctgtgcaggtaaggttgagatatcaagaattgggcccgggttttgccaaccgtctctctatcgattaattcaaattttatatgaaagttgaaaacactcggtgcccatggtttttcaatgaaaatgtaaaaaaaattttatttgtattataaatgatgatactgagattttatatgataaatatggtgtttgaatgaaaagtatttatttgttataaacakgtacttgttaattatgaaatcaccaaactaggatgctgcagaacctgtttgttttgtcttgcttttttttgttgttgttgttattccctgggttaagttttaaaattcataatttggaaatgatcaaatcatggcaaacatgctgaaattctttaacacattttaagattacaaatttg

SEQ ID NO: 349896 - DNA, 581 bp, Homo sapiens
tttgttataaacatgtacttgttaattatgaaatcaccaaactaggatgctgcagaacctgtttgttttgtcttgcttttttttgttgttgttgttattccctgggttaagttttaaaattcataatttggaaatgatcaaatcatggcaaacatgctgaaattctttaacacattttaagattacaaatttgtttaattcaagaatgtaaagctcaggtcaggagattttattatagattcaagcttctagctttgtattttaaaaatttaataaatttgggggattttattcctccacactgtgagccatattttcattttatgacaccatctaactcagtcactagataaggccttaaaaaataatctgacaagatacactgaagtcaggaagacagccagatgaatgtgttgtgcaattaaattatatctaacaaaagaccaatggcttctctacatctgagaatgatcagacaaccatatccacatttgattgttcatctgtgggctgaagtttaagctactaactcaacttgatcatgtaatgtcatgygacttttaccatccttcatactaaat

SEQ ID NO: 349897 - DNA, 634 bp, Homo sapiens
aactatacttccagttttgcctggtgtggttctaggttaatgaaagttgccctggtgcaattaatcatggttttccattttagtattgctccagtttggagaataaattatatagtcccctggttaggggacctgtattcattttccagtatgctgtggacaatgctgggtcctgctttcttgagaacctgaggccacccgtgtccttgacccattctttctgtataatctgtcctgccagcactttctctgctttggagaatagtttcaagaataataagaagaaataagatagtcaaaggatttttttcccaaccatttgtgttatgggaacattcactttttctatgatttcataatgtcacctgtgtaaaaccaataaacatctcccaygtatggtatcaagaatattgatccttaataactttgtgttcaacagcatttatataattatgtttcagattggggtggcaagtaattagtgggttgtaatttctatttaatgtttccaaagaatcatttaaaagcaaaatagaaatctagtgaagaatatcagaatgtgttgcacagattagaggacacattacttggaaaaaattttgtttcatatgtttttgaatagagaagagacaaa

SEQ ID NO: 349898 - DNA, 634 bp, Homo sapiens
aactatacttccagttttgcctggtgtggttctaggttaatgaaagttgccctggtgcaattaatcatggttttccattttagtattgctccagtttggagaataaattatatagtcccctggttaggggacctgtattcattttccagtatgctgtggacaatgctgggtcctgctttcttgagaacctgaggccacccgtgtccttgacccattctttctgtataatctgtcctgccagcactttctctgctttggagaatagtttcaagaataataagaagaaataagatagtcaaaggatttttttcccaaccatttgtgttatgggaacattcactttttctatgatttcataatgtcacctgtgtaaaaccaataaacatctcccatgtatggtatcaagaatattgatccttaataactttgtgttcaacagcatttatataattatgtttcagattggggtggcaagtaattagtgggttgtaawttctatttaatgtttccaaagaatcatttaaaagcaaaatagaaatctagtgaagaatatcagaatgtgttgcacagattagaggacacattacttggaaaaaattttgtttcatatgtttttgaatagagaagagacaaa

SEQ ID NO: 349899 - DNA, 617 bp, Homo sapiens
tcactgtagaccattgttttaacaattaatattcttttaagcagtgttaggcaaacaaaatatttctgcatctcacgatgttgaataaatcagtggggaayggatatgttcaaatttctgcaaattctaatagctttgcatgttttactgtgtttttagaatataacattggctgggcatggtggctcatgcctgtaatcccagcactttgggaggccaaggcgggtggatcacaaggtcaggagttcgagaccagcctggcaaacatagtgaaaccccgtctgtactcaaaatacaaaaattagctgggcatggtggtgggtgcctgtagtcccagttactcgggaggctgaggcaggagaatctcttgaacctgggaggcggaggttgcagtgagctgagattgtaccagtgcactccaggctaggcgacagagggagactctgtctcaaaagaaaaaaaaaaagaatataacatctacttttaaaaagtaatgttcttgttgtagtcatccagatgatttcagaaaacagtaagtctggactagcttaaatgaagttttttattatgaattttaaattttttggattgtgcattccatggtgggaaagtccgtg

SEQ ID NO: 349900 - DNA, 428 bp, Homo sapiens
taaaaatgcaataactgggatgaatctcattttgttgtgtagaagaaaccagtctcagtgtcacatactgtatgattcactttaaatgactttgttaagaagacaaaatgtagtaatagagagcattagtacttgtcaagggatcgggtgaaaaagtggtgtgattaagaaatactagcatgagcatgtgtttgggagtgatataaatattatgtatctttattgtggtggtggataygcaaatctatacatgtgctaaaatttacagagatatacacaccaaaaagtcaagttgactaattttggggatttcaaaaaaacaacacacaaagacttaagaaaaaaaaaagaaaaacataaacataaaaaagggaaaagtttgggcatctttggagaagcaggacttgccctggaattaaaacttaaga

SEQ ID NO: 349901 - DNA, 428 bp, Homo sapiens
taaaaatgcaataactgggatgaatctcattttgttgtgtagaagaaaccagtctcagtgtcacatactgtatgattcactttaaatgactttgttaagaagacaaaatgtagtaatagagagcattagtacttgtcaagggatcgggtgaaaaagtggtgtgattaagaaatactagcatgagcatgtgtttgggagtgatataaatattatgtatctttattgtggtggtggatacgcaaatctrtacatgtgctaaaatttacagagatatacacaccaaaaagtcaagttgactaattttggggatttcaaaaaaacaacacacaaagacttaagaaaaaaaaaagaaaaacataaacataaaaaagggaaaagtttgggcatctttggagaagcaggacttgccctggaattaaaacttaaga

SEQ ID NO: 349902 - DNA, 576 bp, Homo sapiens
ttttaaaaaaagtcctatgttctagcctcaaggacacaagtattcccaatgcacaagaaaaacagagaaaaattcaaactgccattgcagcttcccacatcctttctgccttacattaggacatatgggacatacataaacccatatataatatacataaaatttcacttacgtacttgtgcatacttaccaaaaaatgaatcacaaacttctgatttcatactatgatagtaatagagtttatgtgatgttctccatagagaacatcttatagatcaacagattttaggtttattataagccattctaggaatattaggtatgtctcctaaaataattattattacacctagtttggtgaagaggagactgaggtwtggagagcttgagtaactcgcttatcatcacatcatcagtaagtggataagaagaaaaaggtcaacagcaggtctgcaatttattctttccctttactggggaacatcccaggggaaaaaaaaagaaaggtaatatgatcaaattccttgtaaatatggtaacaataggcatgctggaaagcacatgagtagtattttg

SEQ ID NO: 349903 - DNA, 447 bp, Homo sapiens
caaccaattgtttatcagactgatgaagcaacagaatcagctagctccgttctcagaagactccacatttttcattaataccaatgcttgagggataaaacaacaaagtgattgattaaattcttcattcactttgcatatgtagacattctcagtttcttaccttctcaggatcagattttgtttggttgtttttttaaaaaaaawtctgtaactaaattatgcactcttttaggagtaatctgtttttgaaaaaaaagtaaatatttttggaggttgtgattgccattttagggtgttcaagattgctgctttctggcagtaaatatccacagaagaagacaaacaagttcacatcatgaatcttcttgtagtgtcataggacttgaaaagatgctggcatgtaatctgtatataaatttactacttttattactgataattata

SEQ ID NO: 349904 - DNA, 559 bp, Homo sapiens
tcttcaggaagatatagaagaaattcactcctaaaccatgagggtatcaacactatgtggaatcacaaatgagtcagaacttcttgacctcttagattataaaaagatgaatgttsttagtggaatgaggaattttgtaacaaaatccacccaaacatgtgatgtatatattgattttgttgataaaattcaccagagtccaaattatctcccaggaagtccaagtagtgtggacttctcagtctaaagcctttgcttgattctcttatctcctatcctattgcccaacttgatactgaaatcatgtaagtgtagacctgaaagagctcaaaggcattatgaaatcaaaatcttccatccttatgttctccaatagtgaaattttagtgactttttgacataaaattgataccagaccttatgtcaagaccatgtgctccttgattgtacagtcattgtcttattcatctaccactcagcaccacaccatacacattgtagacactccattatttttgaatgaacacagttaattaataaataactcctgctagccaag

SEQ ID NO: 349905 - DNA, 612 bp, Homo sapiens
tgtggttgagtctttgtattcgtattttaaaaagctctaagataatataattaggtgtagccgaagcagcaaatcactattctcatcccaagttgtgtgtgtgtgtgtgtgtgtgtgtgtgtgtgwgagagagagagagagagagagagagagagagagagaaatagttaggcatcaaagtctatgaaaaaattaaattaactggttcaaatgtagctatagtcaccgtagtatcatcaaaattgtcctcccaatttcacttctctctatttcaatcacttttttcaaaccttattcttcctgaatttttttcgttttcttcttttgcagtcttcctccaataacccttaaattataacccagtttctccagccggattcataaaaaattacaaagacatattcctaaaagactgggggaaaattttatttttttctgtttactgtaatacctaacctcattcatagacttttttgttgttgtttcagatgtaaaactggctatctcattaaattttgtttttaggtttctcccccaagtaacatacacctacaggtttgatatatttttgcaaattatctcattatgaaatattttgtttcattagctata

SEQ ID NO: 349906 - DNA, 612 bp, Homo sapiens
tgtggttgagtctttgtattcgtattttaaaaagctctaagataatataattaggtgtagccgaagcagcaaatcactattctcatcccaagttgtgtgtgtgtgtgtgtgtgtgtgtgtgtgtgtgagagagagagagagagagagagagagagagagagaaatagttaggcatcaaagtctatgaaaaaattaaattaactggttcaaatgtagctatagtcaccgtagtatcatcaaaattgtcctcccaatttcacttctctctatttcaatcacttttttcaaaccttattcttcctgaatttttttygttttcttcttttgcagtcttcctccaataacccttaaattataacccagtttctccagccggattcataaaaaattacaaagacatattcctaaaagactgggggaaaattttatttttttctgtttactgtaatacctaacctcattcatagacttttttgttgttgtttcagatgtaaaactggctatctcattaaattttgtttttaggtttctcccccaagtaacatacacctacaggtttgatatatttttgcaaattatctcattatgaaatattttgtttcattagctata

SEQ ID NO: 349907 - DNA, 612 bp, Homo sapiens
tgtggttgagtctttgtattcgtattttaaaaagctctaagataatataattaggtgtagccgaagcagcaaatcactattctcatcccaagttgtgtgtgtgtgtgtgtgtgtgtgtgtgtgtgtgagagagagagagagagagagagagagagagagagaaatagttaggcatcaaagtctatgaaaaaattaaattaactggttcaaatgtagctatagtcaccgtagtatcatcaaaattgtcctcccaatttcacttctctctatttcaatcacttttttcaaaccttattcttcctgaatttttttcgttttcttcttttgcagtcttcctccaataacccttaaattataacccagtttctccagccrgattcataaaaaattacaaagacatattcctaaaagactgggggaaaattttatttttttctgtttactgtaatacctaacctcattcatagacttttttgttgttgtttcagatgtaaaactggctatctcattaaattttgtttttaggtttctcccccaagtaacatacacctacaggtttgatatatttttgcaaattatctcattatgaaatattttgtttcattagctata

SEQ ID NO: 349908 - DNA, 585 bp, Homo sapiens
ggggacaaacagcactttcaaactttaacattctggaatgtattaagactsttttcaaagtttactcatttcctgatttttggttgctttggaaatccttaaatcattgataattgttttcatatttgaacgtatatcaaagcttaccctctagggtgtttaaagcctgcatatgtagtttgagagttatgaaatcactccaatgataacaaggtatttaatttaaaataagtgtgtagttggatattacccacaacactgaaaaggaaatgaaaataatggtccaatggcttgaattcattaggttctgcctgagacaggatttacatatgcatctcttgtgaaaggataagaagggaatcaactccccacttccccatcccttctaaatgtctaccaaatgccattgtttaatgtttaatgaattcctacaggtagatggcaaaagccataatataattagcaaggtcaacaaagaagaaaactcaggaggcccagtggagtatggcatattacttaggagaaatgaaaaggctgaaatctattaaacattaaggatgtttgcagagtatttcccttgagata

SEQ ID NO: 349909 - DNA, 597 bp, Homo sapiens
aataattgaatgcttaatgatttataattagtaattgttctctcatcatcttctgaattcatctakaattgtttctttccttaaaagaagcctatatgtgttagaaataatccatatctttattgtgacggtaagggcgcatctctgtcaaaaattattgaaatatacatttaaaagtcgattttataatgtatacacattacacctcaagaaataacttatttaaaagtccagaacttttaaaaatatatagtaaaacaaaagagttaatgtgtcagtaaaagagaacataactttggggctgatacatatctgtacactgtgacaccctcctgaaagattgtttacaactggcctccactctcagtggtgggttggtgcagtggagctgtattgattgttaattattttgaatgtgacctctgaattaatcataagaatccaaaattaacctaactatataaaagaggtaaacaagataataatacattcatttaataattcatcacaaatgaaaccaaaatgagatagacatcaagggcaaaatcagtttgggatatacattataaagtcttttcagtgctgtttattgaaatt

SEQ ID NO: 349910 - DNA, 597 bp, Homo sapiens
aataattgaatgcttaatgatttataattagtaattgttctctcatcatcttctgaattcatctataattgtttctttccttaaaagaagcctatatgtgttagaaataatccatatctttattgtgacggtaagggcgcatctctgtcaaaaattattgaaatatacatttaaaagtcgattttataatgtatacacattacacctcaagaaataacttatttaaaagtccagaacttttaaaaatatatagtaaaacaaaagagttaatgtgtcagtaaaagagaacataactttggggctgatacatatctgtacactgtgacaccctcctgaaagattgtttacaactggcctccactctcrgtggtgggttggtgcagtggagctgtattgattgttaattattttgaatgtgacctctgaattaatcataagaatccaaaattaacctaactatataaaagaggtaaacaagataataatacattcatttaataattcatcacaaatgaaaccaaaatgagatagacatcaagggcaaaatcagtttgggatatacattataaagtcttttcagtgctgtttattgaaatt

SEQ ID NO: 349911 - DNA, 529 bp, Homo sapiens
agggacaatcctagcctccttccaattttactagaaaagagcagggacaatcctagcctccttccaattttactatttccaagagactttgtttaggtggacctgatgcatggactttgaaaaccagtgcatttcttacttatccttgaggaaaaatgacgccattcagtattaagagtatggcccaattagattagttcccctagcaaagaagacaagtaagtaagctatgagtttgcatggctattraaccatgaggtgttaagaaatatataggctttaagaaaagaagaacagtacccaatacaaatccctgtagggagggaagcagacgtctctttttgtgtggtctctccttcacgagtatgaaggaatggaggtacatcctgtaggaatcaaggacatacatcttttgttacctcttcaaattcccctgtgagaagacattaaaaactgagaaaatgtttaatatctgagagtgagacatgctccaaggaaacatgattttaatcatcatttttcatcttat

SEQ ID NO: 349912 - DNA, 529 bp, Homo sapiens
agggacaatcctagcctccttccaattttactagaaaagagcagggacaatcctagcctccttccaattttactatttccaagagactttgtttaggtggacctgatgcatggactttgaaaaccagtgcatttcttacttatccttgaggaaaaatgacgccattcagtattaagagtatggcccaattagattagttcccctagcaaagaagacaagtaagtaagctatgagtttgcatggctattgaaccatgaggtgttaagaaatatataggctttaagaaaagaagaacagtacccaatacaaatccctgtagggagggaagcagaygtctctttttgtgtggtctctccttcacgagtatgaaggaatggaggtacatcctgtaggaatcaaggacatacatcttttgttacctcttcaaattcccctgtgagaagacattaaaaactgagaaaatgtttaatatctgagagtgagacatgctccaaggaaacatgattttaatcatcatttttcatcttat

SEQ ID NO: 349913 - DNA, 529 bp, Homo sapiens
agggacaatcctagcctccttccaattttactagaaaagagcagggacaatcctagcctccttccaattttactatttccaagagactttgtttaggtggacctgatgcatggactttgaaaaccagtgcatttcttacttatccttgaggaaaaatgacgccattcagtattaagagtatggcccaattagattagttcccctagcaaagaagacaagtaagtaagctatgagtttgcatggctattgaaccatgaggtgttaagaaatatataggctttaagaaaagaagaacagtacccaatacaaatccctgtagggagggaagcagacgtctctttttgtgtggtctctccttcacgagtatgaaggaatgraggtacatcctgtaggaatcaaggacatacatcttttgttacctcttcaaattcccctgtgagaagacattaaaaactgagaaaatgtttaatatctgagagtgagacatgctccaaggaaacatgattttaatcatcatttttcatcttat

SEQ ID NO: 349914 - DNA, 530 bp, Homo sapiens
tcagaattggattccctagtacttaatatgatcttggagataaaacgcccttctcttcactccagtgcaccaaatgtaacagatgtaaatatcgtaaatgaagctgaaagataatactgtgtgtctcatagatagaatcttgtatactagagcttactcatactgtgtggtcatgaagcagtcagaaatgagataaatgaatgaatacatgataatgtctaagagattwtgctaaaggaatcaacaaactaaaaaacaaaggatttcattaagtctaaggtctgagcaccctgccaaaacagggaagcaaaattaaaagttcataagctgaatagatttagtaacacaaggtgaatagtgaataaaacatacatgctcactgcccctccctctcaaaagtcctctaactgacaataaaatagtaaagtataaaatccacaagaatgacagaaatagataggagaccacaggcaatgagaaatgtaaattgttaaagtaatatgagctgttatactaggtaggtaagttcc

SEQ ID NO: 349915 - DNA, 646 bp, Homo sapiens
gatagaatcttgtatactagagcttactcatactgtgtggtcatgaagcagtcagaaatgagataaatgaatgaatacatgataatgtctaagagattttgctaaaggaatcaacaaactaaaaaacaaaggatttcattaagtctaaggtctgagcaccctgccaaaacagggaagcaaaattaaaagttcataagctgaatagatttagtaacacaaggtgaatagtgaataaaacatacatgctcactgcccctccctctcaaaagtcctctaactgacaataaaatagtaaagtataaaatccacaagaatgacagaaatagataggagaccacaggcaatgagaaatgtaaattgttaaagtaatatgagctgttatactaggtaggtaagttccaatttctcagtggcacatcacaatagaagctatttttttttcttatacaaagtcckaatggatattcctgcttggctggcaattctccaagaaatgattcagagatacaaactccttctatctgtggctccttgtattggtcatctcagactgccataacacaataccacagactacatgtcttcaacaacagaaatttattttctcaccattatggagacagaagtttgagatcaggacatcagc

SEQ ID NO: 349916 - DNA, 582 bp, Homo sapiens
tgcttttagttacaagctttgttaggtcttgacacaatgtacactaggaacttttaattcaatatctagacamatgccaactgaaattattgtttgataggaactatctacttccaacttataatttcaaaccaactacatggatttagggaaaagttttttttttgaaaaggtttttcacaggacaaaatgctaggcaggccacccccaaatatatgtaatactaccacgttttgtgcatttataagttgaatatggtacaacatgtctagatgaatattcaccctgtatgtgtatgtgggtcaagggagcacggcatagacatatagatgtgtctctcagattcctctttaaggaagaatttgttgcccactcatggagagtacagtcagcagataacctccaggggtcagccacttcagggtctacctcaactgcagacctccataccacccaaggttatgatcttcccaaagcagctcagatccaaggactgaatgaaatgtggatataaaattctagtcattttggccagatgcaagacattatcatgtcccattgctctttgccaaactggatgag

SEQ ID NO: 349917 - DNA, 582 bp, Homo sapiens
tgcttttagttacaagctttgttaggtcttgacacaatgtacactaggaacttttaattcaatatctagacaaatgccaactgaaattattgtttgataggaactatctacttccaacttataatttcaaaccaactacatggatttagggaaaagttttttttttgaaaaggtttttcacaggacaaaatgctaggcaggccacccccaaatatatgtaatactaccacgttttgtgcatttataagttgaatatggtacaacatgtctagatgaataytcaccctgtatgtgtatgtgggtcaagggagcacggcatagacatatagatgtgtctctcagattcctctttaaggaagaatttgttgcccactcatggagagtacagtcagcagataacctccaggggtcagccacttcagggtctacctcaactgcagacctccataccacccaaggttatgatcttcccaaagcagctcagatccaaggactgaatgaaatgtggatataaaattctagtcattttggccagatgcaagacattatcatgtcccattgctctttgccaaactggatgag

SEQ ID NO: 349918 - DNA, 582 bp, Homo sapiens
gtgctgtgagccagtttgcaccattcaaatgattctcattcacagtggccaatccctgattcctatggctcttagggagggagcagggtatcttttgtctcccttatgtgggtgatcccagagatamatttgttaggtcgtgtaagtattaaatgaaataaacttgaggaagggaacaaaaagagataattagatgtcttgcaatatgtttttctgtacttgactttcattgaccaaaggggcttctgtaaggcatatgggtatgagtaccaagaattttaagagctttcagaagggaaggagcacagattgggaaaggtttgaaagtcattttcaatgtttttatcctttttgttaaatagtcaacatttgtgcttgaagcctattaccagtacaagctgggcaagataactgtaactattcacagcagacaaaacagaaaactagattctccattttcctcaaacagtatatactcatgaaagagcaaacttcaaattccccatcttttcccctctactaacatagatgcttgaaaaattattttgattttatcaaagtgcacctttgtaaaggaaaaat

SEQ ID NO: 349919 - DNA, 583 bp, Homo sapiens
agtattccacttcctttcctttgaatrggtcttctaaaagtcatttccaaagcattacagcccatgaagtatttacagtggctaccctccttctcacaggatgatggcaaccgtaattacaattgcaggtcacaacctttcaaatatccctatggctttaggggttataaaaccataaagaagctccacatttccatttttatcattcaatccaatctttttactgtggaagtctccaagagagctttaggtaatcaacctttttcctcactgtcactcagcaattggactttcataagaatttgaagacagaaattatatccacagctctaagtgttctaaatatgtctctatttcttaccttctactttttctctaaacacagaacttttattcactgaatatttactacaaagcctactctaggtcaggcttaggcaatatgtgagaactggacatcgcagtgccaagagctcctaagtgatggataaaggaggaaaagagagggaggatatgactcgggtccccagctcaattgcagggaccatagcaggtctttgtgaagaaaagacaaatgttcact

SEQ ID NO: 349920 - DNA, 600 bp, Homo sapiens
gcagatgattatggtgtaatgtttgagattgcacagacatcagaatatgggaacaattctttattcttttaaaaaatattcacttttaaaaattagtattccacttcctttcctttgaataggtcttctaaaagtcatttccaaagcattacagcccatgaagtatttacagtggctaccctccttctcacaggatgatggcaaccgtaattacaattgcaggtcacaacctttcaaatatccctatggctttaggggttataaaaccataaagaagctccacatttccatttttatcrttcaatccaatctttttactgtggaagtctccaagagagctttaggtaatcaacctttttcctcactgtcactcagcaattggactttcataagaatttgaagacagaaattatatccacagctctaagtgttctaaatatgtctctatttcttaccttctactttttctctaaacacagaacttttattcactgaatatttactacaaagcctactctaggtcaggcttaggcaatatgtgagaactggacatcgcagtgccaagagctcctaagtgatggataaaggaggaaaagagag

SEQ ID NO: 349921 - DNA, 600 bp, Homo sapiens
gcagatgattatggtgtaatgtttgagattgcacagacatcagaatatgggaacaattctttattcttttaaaaaatattcacttttaaaaattagtattccacttcctttcctttgaataggtcttctaaaagtcatttccaaagcattacagcccatgaagtatttacagtggctaccctccttctcacaggatgatggcaaccgtaattacaattgcaggtcacaacctttcaaatatccctatggctttaggggttataaaaccataaagaagctccacatttccatttttatcattcaatccaatctttttactgtggaagtctccaagagagctttaggtaatcaacctttttcctcactgtcactcagmaattggactttcataagaatttgaagacagaaattatatccacagctctaagtgttctaaatatgtctctatttcttaccttctactttttctctaaacacagaacttttattcactgaatatttactacaaagcctactctaggtcaggcttaggcaatatgtgagaactggacatcgcagtgccaagagctcctaagtgatggataaaggaggaaaagagag

SEQ ID NO: 349922 - DNA, 618 bp, Homo sapiens
tgtatacatttgcacataaatcttgtatagtttgtaaactgcatgagaggagggaccttgtattagattctaattttctggcacccaataggcacttcttgtttgctaagcctggtggttatatatcctaatattggargaattctcagtcacatattacaggtaaaggtatagtaatgataataactacaacttcgtgaacgcagactatgtgccaggtattgttttgggtttttacaaatgtcaactaattcattcctcataaccaccctgggaaggagatattttgattttgaatcttattcttgacacttatttgatggggactttggtaaagttgcttacattttctttacttcagcatcagcagatactaaaaagaaatacaggggataatacaggcatcttggatgattgtgataagtaaacaataagtatttggtgcccttcacatagtggctgccaataacaatgttcatttcagtccttcctttagttctcttgtgttaccttggcctttttctacaagtagtgtttacttagaattggcctgtattgttcacatttgctttttaaaaacatttttatttacttattataacaaaagagtttttcagt

SEQ ID NO: 349923 - DNA, 618 bp, Homo sapiens
tgtatacatttgcacataaatcttgtatagtttgtaaactgcatgagaggagggaccttgtattagattctaattttctggcacccaataggcacttcttgtttgctaagcctggtggttatatatcctaatattggaggaattcycagtcacatattacaggtaaaggtatagtaatgataataactacaacttcgtgaacgcagactatgtgccaggtattgttttgggtttttacaaatgtcaactaattcattcctcataaccaccctgggaaggagatattttgattttgaatcttattcttgacacttatttgatggggactttggtaaagttgcttacattttctttacttcagcatcagcagatactaaaaagaaatacaggggataatacaggcatcttggatgattgtgataagtaaacaataagtatttggtgcccttcacatagtggctgccaataacaatgttcatttcagtccttcctttagttctcttgtgttaccttggcctttttctacaagtagtgtttacttagaattggcctgtattgttcacatttgctttttaaaaacatttttatttacttattataacaaaagagtttttcagt

SEQ ID NO: 349924 - DNA, 618 bp, Homo sapiens
tgtatacatttgcacataaatcttgtatagtttgtaaactgcatgagaggagggaccttgtattagattctaattttctggcacccaataggcacttcttgtttgctaagcctggtggttatatatcctaatattggaggaattctcagtcacatattacaggtaaaggtatagtaatgataataactacaacttcgtgaacgcagactatgtgccaggtattgttttgggtttttacaaatgtcaactaattcattcctcataaccascctgggaaggagatattttgattttgaatcttattcttgacacttatttgatggggactttggtaaagttgcttacattttctttacttcagcatcagcagatactaaaaagaaatacaggggataatacaggcatcttggatgattgtgataagtaaacaataagtatttggtgcccttcacatagtggctgccaataacaatgttcatttcagtccttcctttagttctcttgtgttaccttggcctttttctacaagtagtgtttacttagaattggcctgtattgttcacatttgctttttaaaaacatttttatttacttattataacaaaagagtttttcagt

SEQ ID NO: 349925 - DNA, 618 bp, Homo sapiens
tgtatacatttgcacataaatcttgtatagtttgtaaactgcatgagaggagggaccttgtattagattctaattttctggcacccaataggcacttcttgtttgctaagcctggtggttatatatcctaatattggaggaattctcagtcacatattacaggtaaaggtatagtaatgataataactacaacttcgtgaacgcagactatgtgccaggtattgttttgggtttttacaaatgtcaactaattcattcctcataaccaccctgggaaggagatattttgattttgaatcttattcttgacacttatttgatggggactttggtaaagttgcttacattttctttacttcagcatcagcagatactaaaaagaaatacaggggataatacaggcatcttggatgattgtgataagtaaacaataagtatttggtgcccttcacatagtggctgccaataacaatgttcatttcagtccttcctttagttctcttgtgttaccytggcctttttctacaagtagtgtttacttagaattggcctgtattgttcacatttgctttttaaaaacatttttatttacttattataacaaaagagtttttcagt

SEQ ID NO: 349926 - DNA, 582 bp, Homo sapiens
agggcaggggaaaagctagtcactccaccctaatctcatgcaaatgagttttccaactgatcggtgccatcttatctgctcctcacaatacacgtggctggcagagaagggaagatggagccgccatcttgaacatgtctagttcttagttcctgctggcattcacccctgcaagctcccagcttgcttgtctatgtctgcagcttgactttacaggctactgcttgttagaaaatgatttggggctgcttttcattaaagagaaaagccttactgaggacccccatatccttactatctgcctaaacgatttcttcttaactcctacatccttatgttctagggattgcaaatactttcatgagaatggggacaagagatgcttgcacatgagattatggcagraactcatgactggaaaaggatgaactatccaacatgtcctaagaattttggaatttctcctgaagttctcaggagttcctcaaaatttgaagacaactgtaatattgcaaggtttacagcttaggagttgcattgtgacagaactgtggaggaagcttcaaagtagagtgtgactag

SEQ ID NO: 349927 - DNA, 591 bp, Homo sapiens
tgataaggttaatatgtggcacacctctgacttgaacaaggcctgtttgtttacaaagtcaatggttacactcttaccctagagttctagtctccattctgctgccaattacccgatgacctatgtgactttagacatgtgaaataactgggttttttttacttttgaaaaaaaggaagagcatcaatgagataatttctagggcattgcttctcaaattttacatgaataaagataaccttgggatcttgttaaaaagtgattttttaattcagtaggtctagsgtagggcttgaacttctgcagttctagcaagtttctaggtaatggcggtgcaccttgtccacagatcacacttccagtaacaaaatggcctttctttttatttgtttaagagtttgattccagaaagaatggtcactacaaagatagggataaagctattttctacccagtgttcttccaggtaacattagataggctctaatcctaaggaactaaagaagacctaagtcaatcagaagcatcctaacataattgttgtgttgatgagcagctctgcatccttaacagcaactgctacacagccaa

SEQ ID NO: 349928 - DNA, 600 bp, Homo sapiens
acctaagtcaatcagaagcatcctaacataattgttgtgttgatgagcagctctgcatccttaacagcaactgctacacagccaacaagctctcatgcatgtctcacagctccctgaattagattccaaagaccatctgcctatgccacaactggggatgactttccgtctgtacttagtatttctctgccttgcaataattgccaagcatccaagaagcttcagagccattaaagacagaaacacacacgactcattttctagagacctatgataaaagacaatagagctagcattatacaatgcagcatggtatgaagacatctttctaatgcagagcaggatttgtttagttttaaagccaagtatatcagcagatatrctgcataaaatagagttgacgaggaagaacttggtgttacagactgctgggcccatgagttctctgttgcaacaaaatttaatgggccattgaggcttgaagttgtaattcaacataaacccactttgaaaattgcaatttgaagtattagtattttatgttattagaaggttttgctttgaaataatatttttaattttgcactggacattaggata

SEQ ID NO: 349929 - DNA, 572 bp, Homo sapiens
ttaaaaacatgccaatcaaatgaaatctgtatcaaaagtaaaagaaactcttgaaatatggtagtagaacttcagggatccatggaaaacagccattgatatatagcctgtctgtagtttttatatattccaaaaattttttgtgcctttctccaaacgagaccaacacatcatttatattgaatggattggacatacatgtagatagattagggtgggtratttcaaaaacatcaagcctgctcccatccctcatttcacaatccatcttattattaatagttaatgaattagttttttccattacaaaaaaaaataccaagaaagaaaatgtttagcattacaatttcactgaaaggagaatgcattgcattaaattttttgtaaggtgtgaatgaccaatatagactatttctgaatagttgggtaagactaggtttttaaaaaatgagttgaaaataattacataataaaaatgttgaagcttaatgaatccttaattggataatttattttacgaactggtaaacaagaaacactaaagagctatttatttgaatcaatgaagtaat

SEQ ID NO: 349930 - DNA, 593 bp, Homo sapiens
ctgggccagagaccctggatgaccacagaaccaagacactggtctcagtgactgcagaagcaaaccaagagttgcacttgaactcatagcagaggtgacagtcctgcccaactagagaacctgacatgaagccctgtcttccttaggtctctactgtagcagtgaagggaaacttcccatttactcttggagsgttcactgaaaaatcaactgaagaaaggtagattaataggagaaatggcatacagatttattggtgtaaacaagggaaatgtacagaatgattatcctaatgtgcaatgaattgagtacaggtggtttatacctttcttcttgggggagagggagattgagaaatgtggataattttaaaggggggtagtaaatgagttttaagggaatttaatgggcttaaaaaacatacaacagcctgggtcaaagtctgttgagtccacagagtaggcaatagtttgtgacaagaagtctattcaggtgtgttgacagacttcagtctttcttcttgtgcaatgagatcagttaatgaaaactcatggaaaggactacaggcaattgtttcttgctttggcgagtgt

SEQ ID NO: 349931 - DNA, 593 bp, Homo sapiens
ctgggccagagaccctggatgaccacagaaccaagacactggtctcagtgactgcagaagcaaaccaagagttgcacttgaactcatagcagaggtgacagtcctgcccaactagagaacctgacatgaagccctgtcttccttaggtctctactgtagcagtgaagggaaacttcccatttactcttggagcgttcactgaaaaatcaactgaagaaaggtagattaataggagaaatggcatacagatttattggtgtaaacaagggaaatgtacagaatgattatcctaatgtgcaatgaattgagtacaggtggtttatacctttcttcttgggggagagggagattgagaaatgtggataattttaaaggggggtagtaaatgagttttaagggaatttaatgggcttaaaaaacatacaacagcctgggtcaaagtctgttgagtccacagagtaggcaatagtttgtgacaagaagtctattcaggtgtgttgacagacttcagtctttcttcttgtgcaatgagwtcagttaatgaaaactcatggaaaggactacaggcaattgtttcttgctttggcgagtgt

SEQ ID NO: 349932 - DNA, 648 bp, Homo sapiens
ttcaaaactgggtttacaaaacatatgggtaaaacaaaatcataattaaaagtatacaatttaagacagataataaaaattgccattaaaaagtatagcatacaccaaaagcaatacttacagggaatgttatagtctttaaaatactgagaacaagaattttataaagatgaattaagctttcaactcaaaaaatatacatgtatgaaatagtaattcaaaggagactaaaggaagkaaatataaaaacagaaactaataaataagaaacaaaatttaatcaacattaatgagtaaaaaatattgtaataaatcaataaaaataaaataaattcaatcagtagtaataataaaatattccatcataagagattacctagtgagtaactgttaaggtttaccttgatttcacagtatgtattgttttatatacattgtttcaacaaacagaataagagcatgtattttgtgaggtaagcctcattaacaaatccaaacaagtactattcaaggaaagaaaaattgacactaccaagataaaaaatcttaaagtattaggaaatgaaatccaacaatgtattgatgaaataatacttcacatacgagtgttttaagaatgggtcaaaatgaagaaaatctgtcattgaa

SEQ ID NO: 349933 - DNA, 625 bp, Homo sapiens
acatgggagccagtgatccaggaaaagaaaaattaartgaagttttaatttaatacctacaatgtagcaaaaataacaattagtaaatgttggaaatagaacagataattcagagaatagggtatctgaagagacagaaagagaaagagaaagagaacatatcacatggtttagaaaatgttaccaaggcattaaaataacgaaataatttgataaaggcagacagtgctagatttaaaacaatggttagaaacttctacataaaaattaaatgctatataaaaaagaaaatttcattacaagatactctttaactctgtagcaaaatataattggaaagtcataataaaataaaatcttttaattgatattcaacttgtagaattaacttagaaacaaaatgcagacaatgtatgtcacattctgttttgtattgctatagcagagagagttacctgagagtgggtaatttataaagaacagagatttagtttttacagctctggaggatgggaagtctaagatcaaggggccacatctggaagaccttcttgctgcatcatcccatggtggaaagcagaaggaccagatggcacacttgagagggagcagaagatgaggctaa

SEQ ID NO: 349934 - DNA, 625 bp, Homo sapiens
acatgggagccagtgatccaggaaaagaaaaattaagtgaagttttaatttaatacctacaatgtagcaaaaataacaattagtaaatgttggaaatagaacagataattcagagaatagggtatctgaagagacagaaagagaaagagaaagagaacatatcacatggtttagaaaatgttaccaaggcattaaaataacgaaataatttsataaaggcagacagtgctagatttaaaacaatggttagaaacttctacataaaaattaaatgctatataaaaaagaaaatttcattacaagatactctttaactctgtagcaaaatataattggaaagtcataataaaataaaatcttttaattgatattcaacttgtagaattaacttagaaacaaaatgcagacaatgtatgtcacattctgttttgtattgctatagcagagagagttacctgagagtgggtaatttataaagaacagagatttagtttttacagctctggaggatgggaagtctaagatcaaggggccacatctggaagaccttcttgctgcatcatcccatggtggaaagcagaaggaccagatggcacacttgagagggagcagaagatgaggctaa

SEQ ID NO: 349935 - DNA, 512 bp, Homo sapiens
ttaattcctttaattctcttccccttgacactgtttgtcttaaaaaaatccaggtttaagtcaattagcacaaaaccatctcttggtgaaagttattggagcagggataaatatatcatataatttggtccaatcaaatggaaagataagcactttatcacaagctttatgaaacataataaggaaggcattactaagttgctgttggcattaattttgtgaccatgaaagaagtgaagggcagaacaataagaatttgagagaaatgtagtcttggtcaaaacatgcctgacattcrctcatctctgcacttgcagataagtgagataatcctgtatctttaagcagagttggcttagatttcaattatgtcgatattaaagtatcctaatagagataccctctagctgtaagccaatcctggcagcataagggaagtgacctgaggagtccatgttctctttttttagttccattccttagacacaagaatgttatgcaaggggcaatca

SEQ ID NO: 349936 - DNA, 625 bp, Homo sapiens
gacttggatcctatccccaatatatcttattatgtatatacaaatattcctaaatctgaaaaaaaatccaacctccaaaatactctggttccaagtattttggataagagatactcaacstgtgtgtgtgtgtgtgtgtgtgtgtgtgtgtgtgtgtgtgtaatttacactgattcaaagagagagaggaaattaaaatttaattctatctgctattggactcaatgaacctatgtccacaaatcctcttcagatgggatcagtgagtcagatatttctcccataagtctcagtttccatacaaatttgctgaaggaagcaattttcttaggtaacatgagcccaagatttaaaactatatttctcatggaatacggttttctaatggtaaacaaaggctttctttgttggacaacattttcatgaattctcgatgacaaattatgattatatgcaactctgtaaatactaatttagaactatatacaataaaatataactattttaataataataaaaatacacattactaaaatatgctatttattgactattttaatataaataccactttattggtattaatattatcaaagtaattaaagatgtccatcttcatttcaga

SEQ ID NO: 349937 - DNA, 456 bp, Homo sapiens
tgattagagggggctccttcaaggccaggagtggaccttgtgcaagggtcatctctctccccaccaccacagagcatgactgcaaacatgaggaaatatgaaagagccatgtggctgattaagagcctatctgccagccattacttttaggtgccacccactggatcacagcmcaaacaacactatcaaaaatattcttccagtatacaaccctgtgaaaccaatggcaagaatccagacaccaattaacagcctgttcagaaacttgaccctttgaaagcactcaaaatgaagtcaattgactatactcaacttacattacaataaaaggaacaccaaccctcttagatgaaaaagaatcagcataagaactctggcaattaaaaacaccagtctccccttacatccaaatgagcccactggctccccagcaatgattcttaagcagactaaaat

SEQ ID NO: 349938 - DNA, 481 bp, Homo sapiens
taaaactagccttacaagggagtgctaaacatggaaatgaaataatgacacctgcttccacaaaaactaaagcacagtgcacagacagtataaagcaactacacaatcaagtctacaaaataaccagctaacaacatgatgacaggatccaaatctcacgtattaatagtaactttgaatgtaaatggtctaaataccccacttaaaagacatagagtagcaagctggaataaaaacactgtccaactgtctgctgccttcaagagacccatctcacatttaatgacacccacaggtcaaaagaaaagaaatggagaaagatctagcatgcaaacagaaaacaaaaaatgagtatgagtcaytattcttacagtagacaaaaggaacttcaaatcaacagtaaagaagaaggacaaagagaggcatgacacaatgataagggaaaaattcaatgaaaagattaaatatcaaaatatatata

SEQ ID NO: 349939 - DNA, 601 bp, Homo sapiens
ttattgcataattagccacgttaccccttcttttttcatagaggctcggaatatagagcagcatttggaatattttgattatcataatctcagctatacttcattcttgtggaaataaaaaaaaaaatctctctactcttttcttctccatctataacacactcacaatctcccattgggaggacacaaaagtcttagccagtcactgtgtcacctcaaaacctagggtcactggtatgtacaayagcctctacaccaaaggtggttgaaatttttggtatgaaagtctattaataaaatatagcataaaatttcactcttccagttttgcacccaatacagggtgcacaataatcagtgtctgatgaaagctggagccatgcatcagttataggtccaaatctgcaatgcgactgggcacccatcatatagaacagcaagcctaagagtagaggtgaattttatatttggtctagattctgctttgtaggaggagtcctcttattcattgttctccctggcactgggttcactggtctggaaggttcattgttccttgccacatatcctacaaaagtgatcattggggtaatccacacct

SEQ ID NO: 349940 - DNA, 601 bp, Homo sapiens
agtaaaatgtgtgttagcttcactcccatgctaacaatatgggattgcccttaatctgagtcaggaggaattttttgaagtggagacagtgatagcatagggcctaccacactctttttttttttttctctttctgtttgagggtactcttttactatttaataaaaacctcggattctttatttagacttcttccttcagaataagatggaaatagatttaaatctcagcttcattttgtaatatcatgttcatttgtcagtttactccaccttcgtgagcctccactttctgccatgtaagatcatgatgctaactcttacctgctagtgacattgaacaaattgaacaatattgtgtatacgaaatttctgtcatattagacctccaataaatgtgatgtctttttgttggaacccattcttgggaagatctgaggaactttcagwaagacaattgcctctctcagagacattttcctgtgatcccaggtaagaaaattaacctttggaaagcaggttctttaagggtaatattgctacttttctgggatgatttctggattaggagtagcatatgtaatgtcccttggacttagtaa

SEQ ID NO: 349941 - DNA, 631 bp, Homo sapiens
ctattcccatgacaccagtccatatgaattgctcaaggtacacagctagtttgtaatgcatctttcgttgttgaaaaaagatctggaaaaatacagttttgtgattctactctctccttgggatacagagtctttctcttctccttgagataaaatggggactaggatcaagccgagaaaagagttattgaacctaagagaggaccatattgatgttcactttactattctttaattttttgaggttttaaaattgaaagaagagcgaattatatattaatataatttttggttttcaccttatttcaacctaatttcctatakggcatatgattaaaaagaaaaatcacaaataaacttagaaagggtggtatatttaacaaataattggggaaattagtgggtttcaaaaattaaattagcgcattattttccacttttcagaaaaacaaaacctagaaaactttaatgtgaaactattcataaattacaatacttcttgtaaagataaatgtcatggagatttttctaagtataaatatataaatatatacttagaaaatatatatacaagtaaatatatatattacttagaaaatatacacctaagtaaatatatatataaatatat

SEQ ID NO: 349942 - DNA, 512 bp, Homo sapiens
acttggaatagaaatcttgattcccaagttaaaatacaggatgttggatagcacagctaacaaggtttctaccactttttatgttgtacattagtattttaccaaattgagtcttcacaccaattgcccggagtcattcacgggcttgtgctaaatatggatatctgggacccatgccagatctaccagctcttatttggatgtaagtctgaaatttgtatttttgtccaatagcctgagtgatttttatgaatatcaaactatctaggataataatgaggacagattggctatttaataaatyataattgggttaattgaactaaaactgtgaatcaagtaaagcactctcttcaacatttttaatggcttctcttggaataaagaaaagcttatacatttattggcttgacatgcaagatactgcatcagaccaggcatggtggctcacacctgtaataccatcactttgcgaggctgaggtgagtggatcacttgaagtcaggagttca

SEQ ID NO: 349943 - DNA, 618 bp, Homo sapiens
ctggctgttctgttgaggacaggctgagggrcagcaagggctgatgggaggagaccagttaggtagctaatggaatagtacagccttaagatgatggtgacttgcaacaggggtgttgtagtgaatggtgtaagaagtgtacagcttttgaatatattctgaagctagaaccaacaggatttcccagtggattggatatcacctatgtgataaacagaggagtcaacttaccgttttttgaactgggcaattgaaagatgcccttgccaccaactgagaagggaaagactgcaggtggcacaggtttgcatatgagagagcatgttttccagagtttagttttgacatgttaaatactatatttaagaaggcagtagactatatgggccttgagttttaagagagaggtctcccctggatataaatttggaagtcatgggataaagagggaaaactagcaagtgagactaagacaaagcaattatgattgatgtaggatgagatctgggagagtatggcacctggaagctgatgtaaaagaagtggtccaccatgataacttctgctcttgggatatgcaagataagtacaagagctaatcagtagttagaaaataat

SEQ ID NO: 349944 - DNA, 573 bp, Homo sapiens
aacttacaaccatggtggaaggtgaaggcgaagcaagacaccttcttcacaaggcagcagggggtgataaatgaatgcaggaggaagtaccaaacacttatgaaaccatcagatctcatgagaactcactatcacaagaacaacgtgggggaaacagcacccatgattcagttacctctacctsgtctctccctttacacgtggggatcatggagattatggggattacaaatcaagatgaaatttggggtgggaacacagccaaaccatatcaccccatttctaaataagctcacattcacagtactgaggataaggatttggacagaactctattgagccactactcaatccactatagatttaaaattttctttggctgaaatacaacagaagtgaattcagtcactggtaagaagaacgagacagatttatgtgtaggtgccttagaactaagatgcttcaaaactaaccactcctgactctacccacatggacagttgttcagccaaaaagctcttcctgcactcccttcaaatacagcaaaaatctcatagcagcttataagcagtc

SEQ ID NO: 349945 - DNA, 573 bp, Homo sapiens
aacttacaaccatggtggaaggtgaaggcgaagcaagacaccttcttcacaaggcagcagggggtgataaatgaatgcaggaggaagtaccaaacacttatgaaaccatcagatctcatgagaactcactatcacaagaacaacgtgggggaaacagcacccatgattcagttacctctacctggtctctccctttacacgtggggatcatggagattatggggattacaaatcaagatgaaatttggggtgggaacacagccaaaccatatcaccccatttctaaataagctcacattcacagtactgaggataaggatttggacagaactctattgagccactactcaatccactatagatttaaaattttctttggctgaaatamaacagaagtgaattcagtcactggtaagaagaacgagacagatttatgtgtaggtgccttagaactaagatgcttcaaaactaaccactcctgactctacccacatggacagttgttcagccaaaaagctcttcctgcactcccttcaaatacagcaaaaatctcatagcagcttataagcagtc

SEQ ID NO: 349946 - DNA, 584 bp, Homo sapiens
aataattatcctaaataattcttttggcaaactctatataataactgctatggaaattagctttcttayctgaaaatctgaatttaagttgctctcaaaagtcaacagaattactttgtaaaacttcctttccttcttgtcattcttgtagttttgacaattttgagacacatgtaccagagagaatggccacctgtcatttgtcattgctggctttgcattctcaggccaccatcaaggatgctctagatgtgaggatgtctcattataatatgctcaaggtttattccagctctctgattctaaattattctgattgcccaaggcaagtgatctgacctcctcaatgtctcatacatactgccagtgaaacaatctttccactaataatatcttcttttggttttagtattgatcagcataaacctcataattgtaatttgttttatccagatagatgtcacttgatctaattagtttggaaggctttgattagtatcattattgatgccttaaaacaaatgaaaaaatattttgaatgaccaagcacttagtgtcaatgaaggaattgggccaaaatttaa

SEQ ID NO: 349947 - DNA, 650 bp, Homo sapiens
ctgggccccaggcttaacttctattggtatgggtcctggttgattgccaaccctggaggattgtcttccacccacacccttggccaccacttagcctggctcagttagaagagtctccattcctcttcccgaagaaccgtaagggccatgatgactcctgttccaggaaactttagctgtaaagagccgtgctttgtaaaagagatagtgactctcagcttgctaagtagttcccttcccagtaaaggcaaggggcagtcaggcatgtacaggaactggtgaattacttcatgccccctaatagtgcaggtccagggcaaacagaaagcttgctttgcggaaayccctgtggctccgattatatcaatagtctttttggataagggggcgaccggggtggttactaatgaacgttcagcaccagtattgacaagaaactcaatgtccttgcccccgactgtcatcctgaccatgtgctctttgggggcatatgagcccagtccccttcattcagtaactcttctgccacattgaacaaggccctttcgtccttgtctgaggcctcctgctcagagtcagcttgttttccttttaactggggcacttgtccttccaatgtcctattacagtaagcacactggttatgctgc

SEQ ID NO: 349948 - DNA, 381 bp, Homo sapiens
actaatacagtctaattcacttctccctccgtgtctctaatacccagaggcgatctaatcaggctacttgactgggagaagtcaaaacaaagcaacaataataaacagtaaatatcacaagtattactttattattttgttactttcctgtaatctagtatgtatttatgccatttgattattaaaaattatctgggccattatttccacttctgggaaggaatcacagaagactaatccaagagaaaattaaaattatatgcacaaatttgctcatactatagtcacctataattttagaaaatgggaarctattggttattcatctgtgtaagaatagttaagtatgttatatgatgcagctactcaagggaacatgac

SEQ ID NO: 349949 - DNA, 630 bp, Homo sapiens
agaaaggaaagagtgataatgagcaataagaaatcatttgaaggtacaaaactcactggtaacagtacacagaaaaacaatattataacagtgcaataatggtatgcaaactacttatattctgggtagaaagactaaaagatgagttggtcagaaataataactacaacaacttttcaaggcatagacagtataacaaggtacaaatagaaacaacaagaagttaaaaacgatggataaaaagtgtagagttttataagctatctcttagttactaatagtttatttttgcaatcagtgttaagttgtcatcagcttaaaatagtgggttatattatttgtaagcctcatggtaatctgaaataaaaaaacacacaacagatacacacacamaaaaaaacaaaagtgagaaattaaaacatggcactagagaaaatcaccttcactaaaaggaagatggaaggaggaacgaaagaaggaaaagaaggcaacaaaacaaccagaaagaaaataacaaaaattacaggagagagtttatacttatcattaataacattgaaaataagtggcctaatatctccaatcaaaagacatagagtggctgaatggataaaaaacacaagacccagt

SEQ ID NO: 349950 - DNA, 630 bp, Homo sapiens
agaaaggaaagagtgataatgagcaataagaaatcatttgaaggtacaaaactcactggtaacagtacacagaaaaacaatattataacagtgcaataatggtatgcaaactacttatattctgggtagaaagactaaaagatgagttggtcagaaataataactacaacaacttttcaaggcatagacagtataacaaggtacaaatagaaacaacaagaagttaaaaacgatggataaaaagtgtagagttttataagctatctcttagttactaatagtttatttttgcaatcagtgttaagttgtcatcagcttaaaatagtgggttatattatttgtaagcctcatggtaatctgaaataaaaaaacacacaacagatacacacacacaaaaaaacaaaagtgagaaattaaaacatggcactagagaaaatcaccttcactaaaaggaagatggaaggaggaacgaaagaaggaaaagaaggcaacaaaacaaccagaaagaaaataacaaaaattacaggagagwgtttatacttatcattaataacattgaaaataagtggcctaatatctccaatcaaaagacatagagtggctgaatggataaaaaacacaagacccagt

SEQ ID NO: 349951 - DNA, 557 bp, Homo sapiens
cgggttcaagtgattctcctgcctcagcctcccgagtcgctgggattacaggagcatgccaccacgcccagctaatttttgtattttcagtagaaackgggtctcaccaggatggtctctaactcttgacctcgtgattcatccacctcagccccccaaggtgctgggattacaggcgtgagccactgcacccagctgcatgtgtgtgttttcagggttagggatgaagaggttggttaatgggtacaaacatagaattaggtagaaggagtaattataatgcttgaaagtagagtaaggtgtctatattaacccacattgtaatgcacgtttcaggatagctagaagcgagaacttgaaatattctcaaaacataaattataaatgttcatggtgataaatatcctaaacaccttgacttggaaacaatcaaaatgtgtatcaactgtgaatgaataaacaaaatgtgttatatccatacaacggagtattactaggtaatgaaaaggagtaagtactgatacataatataacatggatgaatctcgaatgcatta

SEQ ID NO: 349952 - DNA, 557 bp, Homo sapiens
cgggttcaagtgattctcctgcctcagcctcccgagtcgctgggattacaggagcatgccaccacgcccagctaatttttgtattttcagtagaaactgggtytcaccaggatggtctctaactcttgacctcgtgattcatccacctcagccccccaaggtgctgggattacaggcgtgagccactgcacccagctgcatgtgtgtgttttcagggttagggatgaagaggttggttaatgggtacaaacatagaattaggtagaaggagtaattataatgcttgaaagtagagtaaggtgtctatattaacccacattgtaatgcacgtttcaggatagctagaagcgagaacttgaaatattctcaaaacataaattataaatgttcatggtgataaatatcctaaacaccttgacttggaaacaatcaaaatgtgtatcaactgtgaatgaataaacaaaatgtgttatatccatacaacggagtattactaggtaatgaaaaggagtaagtactgatacataatataacatggatgaatctcgaatgcatta

SEQ ID NO: 349953 - DNA, 658 bp, Homo sapiens
ataccattcagaacataggcatgggcaaagatttcatgaygaagatgccaaaagcaattgcaacaaaagcaaaaactgacatacggggtctaattaaactaaagagcttctgcacagcaaaagaaattatcaacagagtaaacagacaacccatagaatgggagaaaatttttgcaaactatgcacctgacaaaggtccaatatccagcatctgtaaggaacttaaacaaatttacaagacaaaaacaaacaaccctattaaaaagtgagcaaaggacataaacattgacattttgcttttattttatactcaccagatgttacgaatccctaataaggcttttcttaaaatactcatgtctttaacttaattaagtcattaaatatatatacatgtataatttaattttatgaaggctaatatatagaaattatttactgactgagattaagatatacacaaattttcattactttttcttattaattataccttatgaacatcttctagttcaaaataataaagtttttctaatattatgtaataaattatgtctttgtattaactgtcaaattatgtctccatttttgagctatatgagagttttttgtaattatttttattcataaaattaaacccatatatcaacctaattaa

SEQ ID NO: 349954 - DNA, 604 bp, Homo sapiens
aattttcattactttttcttattaattataccttatgaacatcttctagttcaaaataataaagtttttctaatattatgtaataaattatgtctttgtattaactgtcaaattatgtctccatttttgagctatatgagagttttttgtaattatttttattcataaaattaaacccatatatcaacctaattaattatgacaatattttgctactatgataatacatatatttttccttgacctaactgatggactttcaacatgtaaaatgtacaagaacagtatgtcaaggtaacrtcatgaatatttatctatatgtgataatgaatatttaaatattaaaatatatatgaatattgattgaccaatttaaacaaatcttcctttcatctaaaaaattagcaataaattagacaaaatatatttttaaaatatagcttgaagacatgagataattagaaaagtggtgacaaattaatatcgaagagagaaacttaaagatgtaattcctgaattttatggctactttttccctagggttaacttttggctctagaagaaatgagaagaacgtaagaagctgaacagtacttttgatggt

SEQ ID NO: 349955 - DNA, 647 bp, Homo sapiens
atggaggagagccatcctaactgagatgaacaccctttcttgactactatgcaagtctgaaataaacaaattgttaaactactgaaatactgagtctatttttttaccagcctactttaccctaatgaatacactgaatgatagaaacgaattatgccatttatttaacatttacatatgagcaaaacagtagtatccattttgaacgaactaatacacatttgaatactcayataagcatgggccagaaagagataccttcacctcttttgaacaggtcttagagagagacaccacttccgtggatggcatcctggggccaaatctaggggagtgtatttagatataatctaatgggaatgagagttatgtaacaagttagtttgaaaggaagggtgatataagatggataaagtatacaaaaggggctatggtgtggttttaattgttagtaatacctggagtaaaaatggcaaaatgttaaaattcattaaagcatggaactttttcatatatttgaaatagtttataataaagcgtgattataaactacatgataatttatctcttatcacacatgcacgcatgtatgggaatttaatttatgacaagggtggcactattaatatccatataacaatgaacac

SEQ ID NO: 349956 - DNA, 647 bp, Homo sapiens
atggaggagagccatcctaactgagatgaacaccctttcttgactactatgcaagtctgaaataaacaaattgttaaactactgaaatactgagtctatttttttaccagcctactttaccctaatgaatacactgaatgatagaaacgaattatgccatttatttaacatttacatatgagcaaaacagtagtatccattttgaacgaactaatacacatttgaatactcacataagcatgggccagaaagagataccttcacctcttttgaacaggtcttagagagagacaccacttccgtggatggcatcctggggccaaatctaggggagtgtatttagatataatctaatgggaatgagagttatgtaacaagttagtttgaaaggaagggtgatataagatggataaagtatacaaaaggggctatggtgtggttttaattgttagtaatacctggagtaaaaatggcaaaatgttaaaattcattaaagcatggaactttttcatatatttgaaatagtttataataaagcgtgattataaactacatgataatttatctcttatcacacatgcacrcatgtatgggaatttaatttatgacaagggtggcactattaatatccatataacaatgaacac

SEQ ID NO: 349957 - DNA, 601 bp, Homo sapiens
tctatggtcaagctaagagaacatagttttacagtagtgtttcttaaatgctgttaagcttattttctagagatacaattctgatgctgtccccaccctctaatkatcagcatccaaactattattacattaattgattacaagggtggcactattaatatccatataacaatgaatacatggccactattagcagtggggtataatttgtgccactggcattattactctgagcaaaatttttttttattgatacttgaatttcatcacagtctctcaccttttttccctatccacactccaacaactatctttgaagtagtttccattttcatctcattacttttctttttcttttagattcatgggggtacatgtgaaactctgttacaataatatattgcacggtaatgacatataggtttctactgaccctgtcacccagatagtgaacttagtaccctactacaaagtttttcagcccttgccttcctccactttccccacttttggagtctccactgtctgttgttcccatctttatgtccctgtgtactcaacgtttagctcacccttgtaagtgagaacacgcagtgttttg

SEQ ID NO: 349958 - DNA, 601 bp, Homo sapiens
tctatggtcaagctaagagaacatagttttacagtagtgtttcttaaatgctgttaagcttattttctagagatacaattctgatgctgtccccaccctctaatgatcagcatccaaactattattacattaattgattacaagggtggcactattaatatccatataacaatgaatacatggccactattagcagtggggtataatttgtgccactggcattattactctgagcaaaatttttttttattgatacttgaatttcatcacagtctctcaccttttttccctatccacactccaacaactatctttgaagtagyttccattttcatctcattacttttctttttcttttagattcatgggggtacatgtgaaactctgttacaataatatattgcacggtaatgacatataggtttctactgaccctgtcacccagatagtgaacttagtaccctactacaaagtttttcagcccttgccttcctccactttccccacttttggagtctccactgtctgttgttcccatctttatgtccctgtgtactcaacgtttagctcacccttgtaagtgagaacacgcagtgttttg

SEQ ID NO: 349959 - DNA, 551 bp, Homo sapiens
gccaaatacactcagttgttgacatcattgtcattataatcatcaccaaccatttattgagtcagggcaayatactgaggtttatacaggcattattttattcaatactcataagaagcctagaagctggcgccattgttattactctcattctatagataaacagagtaaggcatatattgaagatttgtagtaatcatatagaacacaacttaattcctttccactatgatcccaatccatcagtttgccaggtcagtgggagtggggtagaatcatgattttcaaccaataccatttgctcatatttcagtctgtgtctgttttggcctactagtgcatagtcagtagtagtggaggagatcaagcactttagtgagaataagggcaatgtctcttttctctcaaattgcttgccttatgctaacttggaaagtaaacatcaacagatttggctccattacttaaaaatagatatatagcatttactttgcctgaattctaaagagctgttattactgttttaaaattgagctaattaatacaataca

SEQ ID NO: 349960 - DNA, 507 bp, Homo sapiens
ctctgcagcggcagccttgccatcatggagggaagacacgcaggcagrgggctgtgggtgtgtgcatgcgtgtgcgcgtgtgtgtactgtcaggtgcacatatggagggcctcaggcaccagagacaaggaataattcctatgggagattgtatgtgcataggcgcagacaggtacagacaggcacagacagacatgtgcacaccaacccagaaagatgtggagcttcatacacacggggagatttatttaaaacaaaaacaattttcatggaagtgtaacatacatagagagaagtactcaagtcataagtctacagtgtgatgaagtttcacaaactgaacagatcatgctaccagcactcatgtcaggaagcagagcagagtcagcccccagaagtcccagtgagagctgcatttttttttttttccagacagggtctcgttctgttgtccaggctggagtgcagtggtgtgaccaaggctcactgcagctgcagcttcaactt

SEQ ID NO: 349961 - DNA, 507 bp, Homo sapiens
ctctgcagcggcagccttgccatcatggagggaagacacgcaggcagggggctgtgggtgtgtgcatgcgtgtgcgcgtgtgtgtactgtcrggtgcacatatggagggcctcaggcaccagagacaaggaataattcctatgggagattgtatgtgcataggcgcagacaggtacagacaggcacagacagacatgtgcacaccaacccagaaagatgtggagcttcatacacacggggagatttatttaaaacaaaaacaattttcatggaagtgtaacatacatagagagaagtactcaagtcataagtctacagtgtgatgaagtttcacaaactgaacagatcatgctaccagcactcatgtcaggaagcagagcagagtcagcccccagaagtcccagtgagagctgcatttttttttttttccagacagggtctcgttctgttgtccaggctggagtgcagtggtgtgaccaaggctcactgcagctgcagcttcaactt

SEQ ID NO: 349962 - DNA, 507 bp, Homo sapiens
ctctgcagcggcagccttgccatcatggagggaagacacgcaggcagggggctgtgggtgtgtgcatgcgtgtgcgcgtgtgtgtactgtcaggtgcacatatggagggcctcaggcaccagagacaaggaataattcctatgggagattgtatgtgcataggcgcagacaggtacagacaggcacagacagacatgtgcacaccaacccagaaagatgtggagcttcatacacacggggagatttatttaaaacaaaaacaattttcatggaastgtaacatacatagagagaagtactcaagtcataagtctacagtgtgatgaagtttcacaaactgaacagatcatgctaccagcactcatgtcaggaagcagagcagagtcagcccccagaagtcccagtgagagctgcatttttttttttttccagacagggtctcgttctgttgtccaggctggagtgcagtggtgtgaccaaggctcactgcagctgcagcttcaactt

SEQ ID NO: 349963 - DNA, 507 bp, Homo sapiens
ctctgcagcggcagccttgccatcatggagggaagacacgcaggcagggggctgtgggtgtgtgcatgcgtgtgcgcgtgtgtgtactgtcaggtgcacatatggagggcctcaggcaccagagacaaggaataattcctatgggagattgtatgtgcataggcgcagacaggtacagacaggcacagacagacatgtgcacaccaacccagaaagatgtggagcttcatacacacggggagatttatttaaaacaaaaacaattttcatggaagtgtaacatacatagagagaagtactcaagtcataagtctacagtgtgatgaagtttcacaaactgaacagatcatgctaccagcactcatgtcaggaagcagagcagagtcagcccccagragtcccagtgagagctgcatttttttttttttccagacagggtctcgttctgttgtccaggctggagtgcagtggtgtgaccaaggctcactgcagctgcagcttcaactt

SEQ ID NO: 349964 - DNA, 564 bp, Homo sapiens
tgtgccaccctgcctggctaatttttatttattttttgtacagacaagttctgaccacgtcgcccaggctagtgggagcattttgaacacctgctgcctgactcctaagctgaaaggcggagggggaagggcacagggaggagagtctggcgccctccaagggcctggcctgccctgagttgctctaggggtgttactgctttttaacctcaggccctatctattgatgactttcctgccaccgtcattgcccctactactccagcacctgggtctgccggrcccttgaacagctccctcctgggtctgcccggcccttgcacagctccctcctgggccagcaggctcaagggtttatgtgtcctcttcccaggtccacctcaggggcggtagggcttctacggttttgagctcttaccagccattggcttatttctgctttcttccccatgcctgaggggctggtctgtgagagggcatggctttggcagtgacattttgcagctccttgccccagccaggcttatcatggctcttgggtaggggcagcagggataaaacgaa

SEQ ID NO: 349965 - DNA, 497 bp, Homo sapiens
accgacctgggccagatagaatccagaaactcacagctgccccaattagctaaaacaaagggggtcaatgtgggttgtaccaagcatcaaagcaggaatatctgggggctccaggccatcagcaacaccatccagataccactggacctgcaccagtgcctaccctgggtgccacagccccatcctgccacccagcactggaagggattgtgattttaactggggaagaatttagggaacagagaggattgtgagggactggagagaacctcacatagcctgtactgaaggtggacccaccaaggtttctccagctggggtcccatccacagaggacaacatcggtgggaatagactgcagctggcgggattgaggtcaggccagggagggawtccccaccatagtggcgttacttggggcccactgggagacacctagttcccttcccacccagaggcagttctgcctgtccagttcagccgggagggaaacagca

SEQ ID NO: 349966 - DNA, 595 bp, Homo sapiens
ggacagagcaagcctcaggcaccttccctcaagacccctcgccccacagtccagaggactgtccatgcccctcctctccctcaaaacttttctgcaggcaactgcctgataaacctcccagaatctgtgccagcctcctggcctggtgtgttcagttgctccactgttgcctggatctgacactctcttcccctatcaggctgggagtcccagaggccagggcccaagcatctccttgctctggtcttcaacaaaagcccttaggaccatatagtccacgggaggggcacaaacctgctccctgtgaaaatgggcagtgggggaggtggtgggagccctgagactcagggcttctctggatggggagacaggagccccaggttcaatcccrctgctgctgctacagaatcactgtgtgacctcagatgtgaaattttctacctcgaatgtagacccagtagccttgggggtcccttgcagtctctgatactaggattagctagtaaccgagggttcattgtcgggggaaacaccagggcaatgggaaaacactacttggaagaccaggctggtatggccgtgattgaacaggaaa

SEQ ID NO: 349967 - DNA, 590 bp, Homo sapiens
ctcctcctctttacaggcctttccttacctccctccatgctgtccacttcctctgtaaagctctcaaccctgtccccttccccctctctcctgggaaagagccctcccatgcctagctgctgctcttagggaccctgtggctaggtgcgcggatggaaatccaggtatgyccaaccccctcccggtggagtaggggttgggtggttatggaatgacggaaagaggcaaaggagtgtataattggagggtcagacaaggctgggagttgaggtccctcctaccccttacctgagccctcaggtcctcgatgatcttgaagtaatggctccagtctctgacctggggtcccttcttctccaagtgctcccggattttgctctccagcctccggttctcggtctccaggctcctcactctgtccaggtaagaggccaggcggtcgttcaggctttgcatggtctccttctcgttctggatgcctcccattcctgccagacccccggctatcccggtggccaggcccccggaccccatgccgcccctgaagctggtggagcgggacacggagatccgggaaccagagcccccag

SEQ ID NO: 349968 - DNA, 631 bp, Homo sapiens
gctgctacagtcacaagcagaaatgttcccttctctcttcatgtttgcaaaattagcccccaatttcaaagtccataggtttgaatctagagtatatacccatgttgcatggaggactggaaagtaagtatctagcattttgggcttctggggtgaatggtgaggtgtgacttccagcaagactcaaaaggaagtgaggaatttcccaaacagaaggaggggaaaaaaacccataaaaacagtgaccactacagtccacacctttgaatgcctaactacatatattctcttctttatttatctttacttatgtgtctacctaataygatgcagatatatccaaaacagcaaaaaacacattcaactcctctcccaagagaaaccaaaatgtaatcagttactgcatccagcttcaagtccagaacttctgggtaatgatgttcattcatctcccagttcaatcataatcccatcttgatataaactatggattacattgttcaaattcattaccaccacttaatataaaataatgatgagaaagaaaaaataaaaggaaaattagttaaaatataaatatgtatcatattttaccaatttaaaatacatttttccaataatttaccatgtc

SEQ ID NO: 349969 - DNA, 518 bp, Homo sapiens
aagtagatgtatatatattagcagctgtattatctcatcgccaccacagcatcagaagtttattcatcttcaaacctattctcttcgttattatgactcaggtactttctgttgctgatttttttgtgtgtgtttgtggrtcttttaggcttattcagctgttcttagtagatgagttctccttcctgtctccgtttcaaatgccctctagagagacccagttaaatacagtcatccatatttaaagatttatgcaagaccaactctagactcctggctagtttattgattggctgctcttgggtcaggtgccaatcactgctgtgggcagctgttcctgtatggctgtttacacagaaggaattgtggggttatgtgcttggggtactttccagtgtttggcctgtccagaactgtaatgaagacaaagaatcactcaagaaatatactaaagaacaggtgataaaacaagagtctgtttgtcagcgctgggaaacaattgtttagacagacagaac

SEQ ID NO: 349970 - DNA, 518 bp, Homo sapiens
aagtagatgtatatatattagcagctgtattatctcatcgccaccacagcatcagaagtttattcatcttcaaacctattctcttcgttattatgactcaggtactttctgttgctgatttttttgtgtgtgtttgtggatcttttaggcttattcagctgttcttagtagatgagttctccttcctgtctccgtttcaaatgccctctagagagacccagttaaatacagtcatccatatttaaagatttatgcaagaccaactctagactcctggctagtttattgattggctgctcttgggtcaggtgccaatcactgctgtgggcagctgttcctgtatggctgtttacacagaaggaattgtggggttatgtgcttggggtactttccagtgtttggcctgtccagaactgtaatgaagacaaagaatcactyaagaaatatactaaagaacaggtgataaaacaagagtctgtttgtcagcgctgggaaacaattgtttagacagacagaac

SEQ ID NO: 349971 - DNA, 594 bp, Homo sapiens
aagtttcaaatactgatggctcttcttcctggcattcatcctcatgccacaccgccacctctctgccaaccatcatgacttcatgaatagttctccattaccagttaactgaagaaaactagcatagtttacatatagctctgagagtaagctggcatcactaaaagtaaatgtacaaaatagattactgaagtgctactcagttccactcagtcccaccaaagtgaaggtggagaaggaaaattatcctagtatgcagagcttgagtggtatatcgtccttgatttttccagcaagagagaaatgctgatggacagtaacaaatagtttggtcagattttcatggaagtggaaagataaagaccagaggactggtgacaagtrtctggatgggtctcaaaatgggactatcatacgaagacatttgggattcatataagtgtgacaacattggttgtcaatccaatagctataccccttctttgtgaacaaaacttcagatttgtacaggtgtccaagctcctccatgtgactttatgctccagagaaggctgaccacacctctacgcttgcaggtgaatcagtgaatctaag

SEQ ID NO: 349972 - DNA, 490 bp, Homo sapiens
ataataattaaggtaaaatagatctatttataatgaattaaatttttctaaaccctcactggggatattcttaaaactctatccccaaatataccagtgacattgcaggaaaatttcgagggaagtccaaaatactatttttaaaaattacaaaaattttaaaattcattaggaaaaaaatagaggaacttcagatattttgaaatctgttaagtsttcttcaaaattaacatgaggtctgcttactattaataatgaacatgttgaaaaaatcgtctgaatatgaggttattgaggtttttttcattccagatctctgctaattagtatcagggataattacatctctctctctagttcttctagagaactacttctcaactcctctctcccttatgattctatatatgagccagagaatacctcagcacagaatgctctaaatgtaaacacaacacaatttcctgtaaaaaacaaacaaacaaaacct

SEQ ID NO: 349973 - DNA, 490 bp, Homo sapiens
ataataattaaggtaaaatagatctatttataatgaattaaatttttctaaaccctcactggggatattcttaaaactctatccccaaatataccagtgacattgcaggaaaatttcgagggaagtccaaaatactatttttaaaaattacaaaaattttaaaattcattaggaaaaaaatagaggaacttcagatattttgaaatctgttaagtcttcttcaaaattaacatgaggtctgcttactattaataatgaacatgttgaaaaaatcgtctgaatatgaggttattgaggtttttttcattccagatctctgctaattagtatcagggataattacatctctctctctagttcttctagrgaactacttctcaactcctctctcccttatgattctatatatgagccagagaatacctcagcacagaatgctctaaatgtaaacacaacacaatttcctgtaaaaaacaaacaaacaaaacct

SEQ ID NO: 349974 - DNA, 517 bp, Homo sapiens
gaacagagtgggccggcccagggcgggtggggagggctctgaatcagggagagaattcaccacagccacatggctgacagcagccaccccaccgccacccgcactgagcatgccaaagctttcccaaggccaaaacaaacagctgtggaaaatgattctccagcagatctggaattaactgcacttctagagacacytatggaggtctcgctcattgtcgtgccgagaatcagcatgtacacgtccctgtattctggtcttcctttcatttctgattttgcaaattcacattggatatgactttctgttttttagaatttttaagaaggtagaattaaataagcataacttcaatatttttcatcctgacttccctgtacccaaacagcaaacctagcaacatgttagaggaaaatattgaatagcactcaccatttatgtcattcatgaaagctatcctttggagaagctggatgaatgagaataacttgccatgggaaatgtgcttataaaaact

SEQ ID NO: 349975 - DNA, 614 bp, Homo sapiens
ggtttgaataactatagtagctttcatttattgaatgtttcctacgtaccaatgatatgggctggctgtgtccccacccaaatctcacgttgaattgtaataatccccacgtgtcaagggcagggccatgtgtagataattgaatcatgggggtggtttcccccatactgttctcatagtagtgaacaagtctcatgagatctgatggttttataaatgggagttccccaacacatgtcctcttgtctgccaccatgtaagatgtatcttgcttcccctttgccttctgccatgattgtgaggcctccctagccatttggaactgtgagtccattaaacctctttcatttataaattacccagtcttgggtatgtctttattagcagtgtgagaacagactawtacaaccaggaaccaggaaatatgcatgtccttactttatttttgtatcaatcctatgaggtagggacttttattttcttcattttatcaataaagctcaggtagggtaatttggcctagattacatcagtaagtgaagagaacaaggtttcagcttaatcctgtcaatctggccatagcctatatacttaggctatacaaatattaaagt

SEQ ID NO: 349976 - DNA, 524 bp, Homo sapiens
gtttacctagagaatgtaagaaaatgcagtgttatattataacagatggttgacgtcatgctttattttgggcaacatatatttgtatacgtttttcaattatttaaaatgtgatattatgaccactcatttctagaatgccttgtgtaatggttaatcttcrttgttattagaaataagccccttttatatctctaaaatgctaacaaaagaaataattatgtacccaactctggtttttaggagtaaataatataacttttaataaagtattgaatagtactgaacatgtatttcagatagtacaaatttgttaatcagaagaaatcatgaataattaatgtgcttccaacagttcaatggcctagagaaacaaatagattctccctagataatccatatgtctcattgatttattgaaccctgaaatatttcaaagtattgaactgaaaatacttcaaagatagtagggaaatcaagcaagacaattttcaattttcaaatcatttttaacaataaaattt

SEQ ID NO: 349977 - DNA, 590 bp, Homo sapiens
aatgcccagtaaatgttaactatcctacagccagagtgatctttctagagcacacatttgctttagcactactctgcttaaaatccttcaaaggttctcagttacctatgggagagattatagggcatttctaaaatccttaatatggttttcatatttaggatccttaatgacctggcccaaactgattttcctgccttatctttcaccgcttcctctttttgcaatagagaactgcatgtttttctttcattgcctggctttgcacatgctactgtctctgccaagaatgatcttcctttccctcttaactcytttttatcctttagctctaagcgtacttgtcactttttttagctctcagttcttttctcaatctccaagtatgggttaggaactctccttctatagtacccttttgaaaaacttatcttacaggggtacattacctctttacttgtccatctatccccaccacttctgccatatataaacactagaacaggggccagcaaactttttctgtaaagggccagatggtaaatattttaggctttgcaagccacatggtctctattgcaactacacaa

SEQ ID NO: 349978 - DNA, 563 bp, Homo sapiens
ctggctaaatttctgaaggaatgtattcatgctctgaaacacaaaaccgttctcttgcttctataaaacagaacaaaacctgtgggaaaccaaattactttgctaagtgtgacaaatccaaactgctacagagcaagagataacataaattaatgggtcttggaggcaaacaccaggagttattttgaggtgagtgaaatccgatctccatcctaaaaccacactgtgtttccatggatcaagtttttagttttatgctttttagaaaactatttatgcacaataattacagccacctgaatgccctaaataaacgtagcccagtaaatgcaggcgtgtgcttgaatggtgccctattgctttcaagtactttgtagtgggctgcatgtctgttttgacgattcccccctaaaacctaaaggcagagatgctggaagggtttgcattaccaggtgacacagtgcttgactttgataagccrttgctaaggcaaagaaactcctaaagccttattgagggtagcccgtggaagtctgtcacactgtcttatattatttttcttt

SEQ ID NO: 349979 - DNA, 577 bp, Homo sapiens
actgcaaataaaagcttattaagatctttatactaaatttttttgttgttgttgcaacttaatcttttgacaattctggcaaccaacaaagggacccaaatgacactgctgatgaatcccaagacctcttggggaaygcaggagagatgttactgagcccttttcaggtcccctgtcttcctcacggagccccagtctgttcctttcaggttggactctggtctttttgcactgaatctctggagcttatcagctttcatttgggggttactttgtgctgtaagagagcatttgaccttgaggtgccaagggttagtctgtgctctgagaaggtgcttgacctttgggtttgtgctggctgatgagttactggcaagagctgcagttttaaaggtgactgacaacagttgcagtaagtggttattactgcagggagtcagaactccagcttccaaaattcgtagagatttggtttctatcttcttaattgctttgtcttgagcacttagttgaggcatgcctcaggtgtctgacagggtcaggcagaaactggaaaattattggctaagttggtcaa

SEQ ID NO: 349980 - DNA, 495 bp, Homo sapiens
aggcaaaagcatccaaatgtaatgttgacctttgatccttcatctccattgcttaagattttattctcccaattgtcttaagaggtcttaagcaacaaacataagtgttcaaaaaactacagagctctgttagagctaggcatagcacttgacttagtatcctcccaaagcaaaattttgcagatagacaacacatactacataaaacggtgtttcctcttgctcattttaaatttacctcccattaatttcattgcctgtcccttcccaaytgtcaagcaaaagcagtatgatcagatttcatcaaaataacttagaccacttaaatcaatgtgtattagacttttcttctttctgtgccagggtactctggaattttatgctctcttttagtaactgctcttctctggtaccaattgactggtgcatttatcatgacctgtattccaactgacacaccacaacaattcctgggaatacagtgaatttaacatt

SEQ ID NO: 349981 - DNA, 544 bp, Homo sapiens
tataaaatagtgattgtaaaaccaactatttgtgaaatagtctgccaagtattatgggatacataaagatgattaacacacagttcttgcaaaattggagcccacaacttagcagaagttgttaatcactttggtcaggtgaatgtttcactgaataagaaataytagtgtattaagtcatcagattctttaatgctttgaagtgcttcatactgagctctacataaaatagaaacttcgtgtgtgtgcatgtgtgtctatatatatacatatttgaagacagggtctcactatcttgccaaggctggtctcaaacacctaggctctagcaatcctttggcctcagcctcccgagtacctgggactacaggcacatgcctagcacatagaaaaacttcactggtgtccaaggtagctgaataggaagagctctggtctgcagttcccagtgagatcgatgcagaagatgggtgatttctgcatttccaactgaggtacctggttcatctcattgagactggttggacagtgggtgcagcccaca

SEQ ID NO: 349982 - DNA, 544 bp, Homo sapiens
tataaaatagtgattgtaaaaccaactatttgtgaaatagtctgccaagtattatgggatacataaagatgattaacacacagttcttgcaaaattggagcccacaacttagcagaagttgttaatcactttggtcaggtgaatgtttcactgaataagaaatactagtgtattaagtcatcagattctttaatgctttgaagtgcttcatactgagctctacataaaatagaaacttcgtgtgtgtgcatgtgtgtctatatatatacatatttgaagacagggtctcactatcttgccaaggctggtctcaaacacctaggctctagcaatcctttggcctcagcctcccgagtacctgggactacaggcacatgcctagcacatagaaaaacttcactggtgtccaaggtrgctgaataggaagagctctggtctgcagttcccagtgagatcgatgcagaagatgggtgatttctgcatttccaactgaggtacctggttcatctcattgagactggttggacagtgggtgcagcccaca

SEQ ID NO: 349983 - DNA, 566 bp, Homo sapiens
agattctttaatgctttgaagtgcttcatactgagctctacataaaatagaaacttcgtgtgtgtgcatgtgtgtctatatatatacatatttgaagacagggtctcactatcttgccaaggctggtctcaaacacctaggctctagcaatcctttggcctcagcctcccgagtacctgggactacaggcacatgcctagcacatagaaaaacttcactggtgtccaaggtagctgaataggaagagctctggtctgcagttcccagtgagatcgatgcagaagatgggtgatttctgcatttccaactgaggtacctggttcatctcattgagactggttggacagtgggtgcagcccacagasggcgagctgaagcagggcggggtgttgcctcacccaggaagtgcaaggggttgggggatttccccttcctagccaagggaagctgtgacagactgtacctggagaaatggtacactcctgatcaaatactgcacttttcccacagtcttagcaactggcagaccaggagataccttcccttgcctggcttggtgggtccca

SEQ ID NO: 349984 - DNA, 566 bp, Homo sapiens
agattctttaatgctttgaagtgcttcatactgagctctacataaaatagaaacttcgtgtgtgtgcatgtgtgtctatatatatacatatttgaagacagggtctcactatcttgccaaggctggtctcaaacacctaggctctagcaatcctttggcctcagcctcccgagtacctgggactacaggcacatgcctagcacatagaaaaacttcactggtgtccaaggtagctgaataggaagagctctggtctgcagttcccagtgagatcgatgcagaagatgggtgatttctgcatttccaactgaggtacctggttcatctcattgagactggttggacagtgggtgcagcccacagacggcgagctgaagcagggcggggtgttgcctcacccaggaagtgcaaggggttgggggatttccccttcctagccaagggaarctgtgacagactgtacctggagaaatggtacactcctgatcaaatactgcacttttcccacagtcttagcaactggcagaccaggagataccttcccttgcctggcttggtgggtccca

SEQ ID NO: 349985 - DNA, 632 bp, Homo sapiens
ctggcacccttcttcttctgcctaagaacatgcatcccatctaactggtaaaggagcaggtttcagggtgtggagarcacggccacaggagcaaagttttctgttttttgttttgacagaatctcactgtgttgcccaggctacagtgctgtggcaccatctcagctcactgcaacctccgccgcccaggtccaaatgagtctcgtgcctcagcctcccaagtagctgggattacaggcatatgccaccacacctggctaatttttgtgtttttagtagagatgtgattttgccatgttggccaggatgtttctgaactcctggcctcaagtgatctacctgcctcggcgtcccaaagtgctaggattacaggcatgagccaccattcccggcctggagcaagttctaaccaaatggtttgaccaaccacaagctgattactgacatccaatcaccagcatctagtcatgaaaacaacttaattataagatctaagttaaatgttaattaatcctgcctctacaaaaggatctcagatgttattcactaaattaataaatataagaaatggctatacttgaaaaactaaccatctactagtatggaatttaaaggaagatatgatggtctaa

SEQ ID NO: 349986 - DNA, 602 bp, Homo sapiens
tggaacgagatggccaaaatatcgaattctcacatttttaagaaattggcaaccataataaatcttattagacattggctcagaagatgctacaggcacatctgctctttatagtgaagattggccccaggtgtctatactgctctccgcctgggaactggtgaaagcaggtatattcctagctatgtatctctagacttcaccctggttcctgcttgatttttccraagagaagatgtttgcctgcccagctatcataccagcatcctgagattgaagaaagaagagtgacaggaagagagatccaagacacatgaatctacaaatgcaacaatctgcatccatctactactattatactcactgtcttctcacaaaaacaaaacagaacgataaaacctcatcactttctaaaatagccacactgtcttgataactctctattttattttcctttcacaacagagaccattctaggggtagaatagtgagtggatagtgggataaggcagctttcaattctctctaaagactagagtttatcactgagtatgtgcatttttaagaagtcaaaactaacacttagacaacttaagacacag

SEQ ID NO: 349987 - DNA, 456 bp, Homo sapiens
tttgatctttcaaataccgctgagattctctagtattctaaaattagagataatattcattgtgatatttggtttcccttaagtgtaaaatagttgagtattattctgtggtctaatatttgcttatgacrtatcaatggtttaaaaatggtacagttttcaattcaacaaaatatctaaccctccagaaggggcctagggagatgagcaagtgaaatcgcccattagtagtagaatatttttcatgtctctgatatatgatcaaccaacatcaactaacatctgctaacatacttcccatgatgataagctcactgcttccagagataatatattctatcactgagacactcaagttgttgaaaacttattttgttgggtcaaaagtatgtcacctaggtttgaatctcactatatcaattattggcagtgtcaccttgtgcaaatcatttcatc

SEQ ID NO: 349988 - DNA, 494 bp, Homo sapiens
tatcctaaggaagcaattgaacaggagcaaaaaatgcacatataaagatattcatttcagcattgtttatggttgtttaaaaaatagaatcaaatcaaatgaccattaatagaaaatttaaaaaagaaattacactaattcctgatgataaaatgttaaacacctaatttaaaatgacrttgtatctatatatattaccacagaaatatagccataatttgttactaaatgaaagcagcagataataaagtaagatattagcccatttttgaatacacatacatgcaaaaaaaatctgaaaggacatatgcaaaaagtctaacagtggatatctctgagtaagattatcagtggtttttattttctgctctctctttttctaaattttctaagcttttaacagtgagtatacattaattttattttcattgtctaaattatttaataaagaagtatatccaaatttagtaaacaaatataatggtaagcaaata

SEQ ID NO: 349989 - DNA, 494 bp, Homo sapiens
tatcctaaggaagcaattgaacaggagcaaaaaatgcacatataaagatattcatttcagcattgtttatggttgtttaaaaaatagaatcaaatcaaatgaccattaatagaaaatttaaaaaagaaattacactaattcctgatgataaaatgttaaacacctaatttaaaatgacgttgtatctatatatattaccacagaaatatagccataatttgttactaaatgaaagcagcagataataaagtaagatattagcccatttttgaatacacatacatgcaaaaaaaatctgaaaggacatatgcaaaaagtctaacagtggayatctctgagtaagattatcagtggtttttattttctgctctctctttttctaaattttctaagcttttaacagtgagtatacattaattttattttcattgtctaaattatttaataaagaagtatatccaaatttagtaaacaaatataatggtaagcaaata

SEQ ID NO: 349990 - DNA, 559 bp, Homo sapiens
acagggtatattttcctatttttgagcatgagttgaaaacatgttattatttcttaagggatggttggtcataaaacataatttatgcttatccgaatattttgaagccaactaatctccaaactctcttaaatcagatccatgatacagatttctgtggccaaaagaggtaagaaacttggttttctagctttccaaatgctaagaaaccatgtttcctagcaacactatgtggatccacataaggaattttcaaataccatttatagtaagttctttttattccctacattgccacttcactccaaactcgtgattactaaagagaaaatgagctttaaaatctttaagtaatgttcttaagaggacatcatagtgtttagccaaaatgaatgctgtttgtagtactgcttargcttatttaaaattctgtagagcttcactttattttgttctcattgctacaccaattgtaatatatggctattacaaaaggttgttagtattcaacaatgaaaacttcagtgattgtcctgaaataaaatggacaaagtataag

SEQ ID NO: 349991 - DNA, 567 bp, Homo sapiens
taggctcctttctgtggttattcaagctttcttgaccattgctatgtatagagagaatcccctatttgactcctgattttagctgcagtaacttcacaagaattttgatgaaacaagatttcttgttatatttgtatttccagggattctgagagtaagaatctttatattcctttctagaatattgagtttttctctgtccttgtaactgtaaagaaccacttttttcagarctaaaatattcccacaatcctctatcctattgctagacagcatcattatgctagggaaacaatattttgagattgttctactgtccaaagcttttgtcatcaatttagtgataattcctgacatgagtcagataattatgaaataatgtaattttatttaaattgatatcagcagaaatatacaatttgtaaaataggtactgatatagtttggatgtttgacccctccaaatctcatgttgaaatgtgttccccaatgttggagatggggcctggtgggaggtgttgggttcatgggggtagatccctcatgaatggcttggtaccctcccca

SEQ ID NO: 349992 - DNA, 560 bp, Homo sapiens
gacaggatgattcttatttctaccgtaattagcaaaagggayaattagttattttaacatattttaaataaaggttggttatttttgaaggtactggtttaaaaaaagcacataatttcttaagaaggctatgcccacattggggaaagaaactgtgtattccactaataactaaagtgctggtgtctatgtgagcctgcctttctgtcttttacatcttgtgatacaggtataggagctaggagtgaatagtattcatttctgtaggacagaataagaaagatctcgactaacaaatctatttttaactagtaagtagcagtatctcatttttccaatcctaggtgtcctctgatctgagaattataaactacatgtccttcttccttatggagaaaaactgacagtaagaattagcaggaaaagagacaacccataagaacaatgcttcctcctgataaaaggatagccattctgaaattcaaaaatagaaatgcaaagcagaggtagcagacaacagaaaaatgaaagggattgtcattccaagaattggggaatgc

SEQ ID NO: 349993 - DNA, 598 bp, Homo sapiens
tgacgctatagccatcaaaaatcctgttagacaaagcaggtcactggcaggtgtaattgggcttttgtgaagctgcaggagtggaaatgaacctcagagacaaagacaragaaatagcagaaacttccatagaaactgtgaagcaattcaaagaaggaatgtgggatggtaggaaaaaagctagatttggagccagactgacctaggtgtgaatcctgacgctggtactcactttacattcaactctgggaaaggaccttcatctttgaacattgtttgtttcctctaaaaatgagataggcatcatcagtatgtcactaggagaactagggatatgaatgtgaagtgatttagcacaagcgtaggcactctgtaaatagagcacactaatattattcaatgacatctgcctatagcagggaagtctcaaggtatacaagtccagctctaggcctgcaagtgttgaagagaccccagagccctcatttcttgaaacctggaaattgtctttgaccctcaaaaatgataagttagtataaatgttatatttggcttacaaagaaaccatcaatgcaaagaccacaataagtaaaaatta

SEQ ID NO: 349994 - DNA, 598 bp, Homo sapiens
tgacgctatagccatcaaaaatcctgttagacaaagcaggtcactggcaggtgtaattgggcttttgtgaagctgcaggagtggaaatgaacctcagagacaaagacagagaaatagcagaaacttccatagaaactgtgaagcaattcaaagaaggaatgtgggatggtaggaaaaaagctagatttggagccagactgacctaggtgtgaatcctgacgctggtactcactttacattcaactctgggaaaggrccttcatctttgaacattgtttgtttcctctaaaaatgagataggcatcatcagtatgtcactaggagaactagggatatgaatgtgaagtgatttagcacaagcgtaggcactctgtaaatagagcacactaatattattcaatgacatctgcctatagcagggaagtctcaaggtatacaagtccagctctaggcctgcaagtgttgaagagaccccagagccctcatttcttgaaacctggaaattgtctttgaccctcaaaaatgataagttagtataaatgttatatttggcttacaaagaaaccatcaatgcaaagaccacaataagtaaaaatta

SEQ ID NO: 349995 - DNA, 598 bp, Homo sapiens
acacaccaatttttttctgattctacagcttctgcttttaaacactaatcttcccaattatcaaatgattttgcttttgaacagagataaacagtatgctatattatttttcgatacaatttattctgagagtataagtaatgtgtgcattgtgctctctttcacatagagttttaaaagattaaggaaagggaacatattaatagtttgttttcattaatatttcattagtaatgaggcactatgtctcaaaaataaaragataatctttcttgaaaatactgctgttaatctgtgcatgatatttttaagtaatttccatatactagtatgtaaattaatgataatacacttttataaaatgcctttttatgctttacacatttttttgagaacatttatcttaatttcaaaaaatactgtggatgccttaaaagttaatattgagacctgagaacattgattacatctggaagataaaatatactgtttgtaatactttcaccttcttgccatttgcaaattgggatggttaagtgatgcattagctatttcttaaaatcttttttgaaatatatgttgtgcacaagcctgggca

SEQ ID NO: 349996 - DNA, 697 bp, Homo sapiens
agtgattcctctagcctgtggtgttagtaagtcaatcagattctctgggccttagtatattgtacctatattaatgaagaattatattagatcggtgatttttaaactggatttcttggagaaaaccctcaggttgaggggtgattgaggtatatgggaggagagatcaagtggatttttcaggggtttggagccgaatttcgctactataattccagacctgtctcaacttctatttctaatccattctattaagcaggatttttttgttcattttttaagtaaaatttttcatgtcaaagagattgtgttgccagaatctgatactgatttggtactactgtatttgatgatgatacataatttatgctcatatttgttattaagcacatacttgctaacaacatttttaaattaagggagaaggatcctctgttagaacagaatacttgtatgaaaattccygaggggagttgggatataatttgaccatgagggtatactctctataagtagatgataaagtgaattccttctatgtgggaaagaaggacataaggaaacacagatcaaatttgaaattcaatagttaatagaaaaagattcatggctttctgaataattatgtagcactttgtttttagaataacagttttcactttgttgaacctttggagaaacatgaactatgtatttc

SEQ ID NO: 349997 - DNA, 697 bp, Homo sapiens
agtgattcctctagcctgtggtgttagtaagtcaatcagattctctgggccttagtatattgtacctatattaatgaagaattatattagatcggtgatttttaaactggatttcttggagaaaaccctcaggttgaggggtgattgaggtatatgggaggagagatcaagtggatttttcaggggtttggagccgaatttcgctactataattccagacctgtctcaacttctatttctaatccattctattaagcaggatttttttgttcattttttaagtaaaatttttcatgtcaaagagattgtgttgccagaatctgatactgatttggtactactgtatttgatgatgatacataatttatgctcatatttgttattaagcacatacttgctaacaacatttttaaattaagggagaaggatcctctgttagaacagaatacttgtatgaaaattcctgaggggagttgggatataatttgaccatgagggtrtactctctataagtagatgataaagtgaattccttctatgtgggaaagaaggacataaggaaacacagatcaaatttgaaattcaatagttaatagaaaaagattcatggctttctgaataattatgtagcactttgtttttagaataacagttttcactttgttgaacctttggagaaacatgaactatgtatttc

SEQ ID NO: 349998 - DNA, 616 bp, Homo sapiens
ttaactttcccaaatcaattaaatattcttgaattcatatttcttgttctttccattaaactgtgatrtatattatatattttcaccttttgaatgaatgggaatccattatctgccgtcattgctggcacatttattaaatgagtgaattgactgattgattcatccagtatttatagagcatctatgtgtcaggctatgttttaggcattggtaaaacagtggtgagcacaaaagaagttcccatccttgcacagtttactttctgttagaggaaagcagacaataaacatacatacatagacagatgatagtagatagatagacagacagacaggtagataatgaataaatacaatacataaacaagtaaaacaaaaacaaaataatgacaatgtaagggctataagcaataaatcaagtaaggggatagagcatgacagcatgactcatgtactatttggatagaatgatcagagaagatctgtgcaggtgataattgagcaaagacttgaatgaaacaagagaaataacataaaatatctgtggaagggcattccagggaaagtgagtgagaagtacaaaggcccccagtttgttaatggagtttgttatg

SEQ ID NO: 349999 - DNA, 616 bp, Homo sapiens
ttaactttcccaaatcaattaaatattcttgaattcatatttcttgttctttccattaaactgtgatgtatattatatattttcaccttttgaatgaatgggaatccattatctgccgtcattgctggcacatttattaaatgagtgaattgactgattgattcawccagtatttatagagcatctatgtgtcaggctatgttttaggcattggtaaaacagtggtgagcacaaaagaagttcccatccttgcacagtttactttctgttagaggaaagcagacaataaacatacatacatagacagatgatagtagatagatagacagacagacaggtagataatgaataaatacaatacataaacaagtaaaacaaaaacaaaataatgacaatgtaagggctataagcaataaatcaagtaaggggatagagcatgacagcatgactcatgtactatttggatagaatgatcagagaagatctgtgcaggtgataattgagcaaagacttgaatgaaacaagagaaataacataaaatatctgtggaagggcattccagggaaagtgagtgagaagtacaaaggcccccagtttgttaatggagtttgttatg

SEQ ID NO: 350000 - DNA, 588 bp, Homo sapiens
taaactcataccagttgagctgctgaggccyctgcctgtcttgcagtcagggctctggccagccctcatggttcaattacataaaacagcaaatggcatttcctgttgtccaaattattacataccgtactaaaaacactaatttttacattatatcttttccactctttagaccccaaccaataattatctcaatcacattttaactaaagaggggaaaaggcacatggttactcatgcagttggtttatgtgttgtggttattaataatcaaagtcaccaaaggcaaagtggaaaaataacagctatgcaatcaagaacagagaaagaagcaagctcaatatagtttccaataaaccttaaaattgggctttgcaaatattaacaaaatatgagaactaaatgatgtgattgtttgtctcttttttatctaaagtggaccagagaaagttttgtgcagcgcagcaagacttctgcatcctgattgaatacagggtcacacaacccagaactcatttctgtgtatgatttctctttaagtgtcttgccctgtaaccctccctctcccagatattttagttgcaaatt

SEQ ID NO: 350001 - DNA, 485 bp, Homo sapiens
gctctttttgcccccgctggagtgcagtgtcacagtctcagctcactgcaacctctgcctcctgggttcaagtgatttcctacctcagcctcccaagtagctgggattacaggcatgcgccaccatgcctggctaatttttgtatttttagtagagacaggggtttcaccatgttgatcaggctggtctcgaactcctgatctcaggtgatccmcccgcctcggcctcccaaagttctgggattacaggcctgagccaccgcgccaggccagaaaactaaattgttactaagatggatagacatggttgctatgacctctcttctctcttttcctgattgaataaagatgtgacggatggaggtagcacagtcatcatgtgatcctgaaataaagacacagtgagccaaagatatgtcagaacttacatcatagagtccaaaattaatatcagtagccatacacctccagacttcttgttatatt

SEQ ID NO: 350002 - DNA, 485 bp, Homo sapiens
gctctttttgcccccgctggagtgcagtgtcacagtctcagctcactgcaacctctgcctcctgggttcaagtgatttcctacctcagcctcccaagtagctgggattacaggcatgcgccaccatgcctggctaatttttgtatttttagtagagacaggggtttcaccatgttgatcaggctggtctcgaactcctgatctcaggtgatccacccgcctcggcctcccaaagttctgggattacaggcytgagccaccgcgccaggccagaaaactaaattgttactaagatggatagacatggttgctatgacctctcttctctcttttcctgattgaataaagatgtgacggatggaggtagcacagtcatcatgtgatcctgaaataaagacacagtgagccaaagatatgtcagaacttacatcatagagtccaaaattaatatcagtagccatacacctccagacttcttgttatatt

SEQ ID NO: 350003 - DNA, 521 bp, Homo sapiens
tagcctcagagaaggactctgcaagttcccttttccatctgagatacattttctgacatctcaaattacagtgttccccattaactgtaaacttgaaggggttgataagcttagaaaagcagatttagttaatgcaaaataaaagttgacttctatagaacagttttacgcttggctcccatctttccaatcrttttgcatccagctgcctccatttgctgtgcgaagggtccagttttggaaggcatgtattatttaaacagcatattgtgtgccaagataccagtgctgaccagatgcatctggaatttccctgatactagttaacaattaccaaatgttaaaattatcacaagaaaaataatgctgatatctgacagtgccatagaaagaaacagcaaaacctttttcagtctctttagagcaacctaactacatattatgagatatgatttgttatgttgcaataaggctgaatcaagagatgattaatgaagaatttatgaaatattcaagggttt

SEQ ID NO: 350004 - DNA, 566 bp, Homo sapiens
ttgccttgtttccaatcttggaggaacagggtctagtttctcatgatgcaaaaatgatattatttttaagtgttttgtaggtgttctttgtaaagttttagaaattcccctctctttctagtttgagagttttaaaatcatgaatcattgctggattttgtcaaatgctttctctgcatcaattgatatgatcaactgatttttcttctttgttaacatggcaagttagattaattaattttcaaatgttgaaccacactttggggaacttggaattaactstacttggtcatagttttaattctttctatacattgctaaattccacttgcttagttccatagatctcttaagtaaaactcattagttccaaattcagaatgacccgcaaccctggtaccagagattatatgtagcaaagacaaataaataaattactcaatatagctttcttgaataaaaattagattataattgaattaaagttagacctaaaaacactttgaacttctaagacaaaccagtagatcagcaatgggtttaattaaacatatttttagttttcc

SEQ ID NO: 350005 - DNA, 589 bp, Homo sapiens
agaggggacctgcatttcttggcttgtggccccttcctccgtcttcaaaagccagagtgcaggctgagttcttttaccattgcattactctgactgcctcttctgcctcctcctctattcttaaaaaaaacttgtgactacactgagctcatttggataatccaagacaatctccttatcttaatatcagctgattagcaaccttaattccatctgcaactttaattcttctttttcatgtaacctaacatttcataggttccagagattaggatgtggatatttttggaaactgttattctgcctatcacactgttgatgttcaaaactctctctaagataaatgcttatattctcatgatcacttataattcttatttcctttctttactaaatttttttcttgttctatgacgcttgcaatggtatttccttacccttgtgctaagaaaaatacaaaacaggaaccctttctttaaatgtcattccaccttaaaataaacytgaaaaggaaataattgtctatgttagaaatttttcagaggatatattagacatttctaatctcattctgttggttgttcaacta

SEQ ID NO: 350006 - DNA, 596 bp, Homo sapiens
ggttacattctaggcaatgggctagaagaacgaacttcaaggcatgactgaaaaatggtgaattcagtataccagtaacattaatgggacatgggacagggatgacacaggagaaacaaatcaacaatgcctttttacgtcatgctacagagcttatcttttcttctcatgggcagaggaagccaacaactgattttcatgtagaatgagaaatcttgatatatgagagtagaacacatcactctgaaacatcactctgatgccatggtagagcaagtcaaactgaaggggcagagagctggtgggagactgaggtcactggccctgccaggcccttaggtcttacgagagaatgcggaggaggcagagtcacagggctgccccataggactccatcgtgagggaaatattctgtgctgatatggtagccattggccacatgtaaattttaagcagttaaaatgtggcaagcacaactgaataactgtatttttaatttaaatktacatctaaatagtagtagtgctactactgctgtagctgctgtactggagagaacagagctaaaatttcccccagaggtttctgtccccatt

SEQ ID NO: 350007 - DNA, 580 bp, Homo sapiens
tgaactccttctctgaagcctttttataagaacgctaatcccctctatgagtgttctacccttatcacttaatcacctcccggtactatcactctgacaatgaagattcaacacatgcatttgaggggacacattcggccaccatcaaggggctaattatttttctgatttgtatgtatcctggatagctgagattgaagattggggtggaaagggatagtaacatgtattattttactccaaatctatctgagaacacagatttaaaagtcaagtgagggaaagtcactttccttctctttgagttcctgctttacactaggctccattctcagccctgggcacaaaccaaataaaaaaagttccatgcacaactgamcttttgttctattaggcaaaggcagacaatcaatgaatgaatttgcgaaatgtcagatggtggtaacttccaggaggaaattgaagcaggaaaaacaaaggagatgcaatttggcataaagggtgtgctgtgttggctaagagggtcagagagggtggcattaaacagaaattaggagttacctctgggattccaaagaca

SEQ ID NO: 350008 - DNA, 602 bp, Homo sapiens
aaaatttttctataatagagttggaagcttgggcactttcaaaatcaaatttctgtattttcaagtgagaaaggtcttaatttcttgatgaaggggaagtttagaatttaattttcaaaatagaaaggcctaatttcatgtattttgatcttcctgaaaattaacaccagagatcttttttttttacatacttgcatttatagacatctatgggcatgcttagtttaaatgaaattacttgttcgcttaatttaatagaaagtgtactgaactaattagcattaattacctgttcgattaagacttggattgacaatggtaattaaattgattctccttctcaaatatggatgttcccaaagtattcattaactagtttcaacaaaatattccctaatagatttccagaatagatacggtatttcttctgcttttcatatctatcttttcttcctttaagaaatgattgctcctttgtgttccrtgtatttacagcttcttgagattactgaaaatctcaaataagttcaggtacttagtaaaagggtatggggtgttcccttcaaaccagtttgtctttatttctgtttttgattggctgt

SEQ ID NO: 350009 - DNA, 533 bp, Homo sapiens
ccaaaacctgaaatgcacgcgtcagcatttaccccacagaggcatattatttgtaaagtgtgcaaaacatttttcttccagtacccacttcaagaattttataattagcaaagtttcattagcagaataagacactttgtattccaagtgatggcttgtctggagtgttaggatgctttgctgggtaaattaactattctgtgtcaatttcttaaggaataattatgctctgtaactgaataacagactggcaactggggaggtcttgaaaattcctagaagctcagctccaggctaattcatttctattttgtcaatttttgtcatttctattttgtcaattgactggactgtcaattttttatggttattgtccccccaaaaagatgggatctaaaagataccaggaggtaaagtttctgctttttaaagtagtactaaaacttcatattgcacataaaattctaaaacacacacatacttcaaatgaagtacataccttctktgattccctaggccaatttgttttttat

SEQ ID NO: 350010 - DNA, 573 bp, Homo sapiens
tatgcagtatctgttcaatgctacacattggacaaaaaagaccaaaacttaatacctctctggagcttagtcaaatgtttcttgggagctggccttgctgagttctagtgtacatctcttcctgaggaaaagcttagaagaggaagcctattgggatgagtatagcccttgtcactgcaggtggtctctggattacaattggtctcatagtctttctcctctatgcattctaaatctccctacccttcagctattaccccagctggtcttggtagtttactatgtggtacagcccaaactcttattgaagaggtctctgagcccctgataaccatatccttcttaggttggtgttgtagtatttgtacactcagagttgctattaggcaaggggatacacaaggtgcccaagtggatcacctgacttgcacatatatctctcttgatcacattatgtaamaacaaccctatatctacctgaggatcagagtgaagtactgtcaaaatcgtgactctttgtcttgcttgctagtctctggatatgaggaatccacagtgcccaaccaggaacca

SEQ ID NO: 350011 - DNA, 607 bp, Homo sapiens
  misc_feature (1)...(607): n = A,T,C or G
ttttacttttcagtgcctgtgaaagataaaggagaaagaatcagggttggagaactggaaaagtcttggccaaccaaataggcaaccctgcagcaaagattgcccattagaagagtcaaatgctaggaagaaattgcaaaccctactattctcactgtgctcaaacttcgactaggaacttccacaaagagtgtggcyttggcttgaacattgcagcagcagattatgtaggtgctgaacttggagttttgcacttctcacagctgacagcaaattctttcttcaagggagacctgagcagtcctccatatctgccaaattactgcataggaacaaaaaggagccctccattcatctaagaagcaaaatgaactagcagagagagctttggcatcaggcaaatctgattgtaaatacttctagcatatagttgctcttacattggtatgttgcctattgtttcaaagtattactttccttgtcttaatggganaaattannnttnaataattatcttatggttatttgttgaatacatgggtaaagttattatgaggattaaataagataacacttgggaatagcctaatagagtgtttagcacata

SEQ ID NO: 350012 - DNA, 494 bp, Homo sapiens
  misc_feature (1)...(494): n = A,T,C or G
aactagcagagagagctttggcatcaggcaaatctgattgtaaatacttctagcatatagttgctcttacattggtatgttgcctattgtttcaaagtattactttccttgtcttaatggganaaattannnttnaataattatcttatggttatttgttgaatacatggrtaaagttattatgaggattaaataagataacacttgggaatagcctaatagagtgtttagcacataatggatgttcaatggatatattaaagtaataaattgccctaatttcttatttgcaaaagttaagagactctggtcacaacttctgatggaatatcttaaataattcatttttttcctagacattttatgcacaataatgggactgtgatacacacattaccccttctgcctgaagtgacttgactttccctctttgtcactctgcaaggtccattgtccattctgaagcattaaataactagtataataggtcatga

SEQ ID NO: 350013 - DNA, 635 bp, Homo sapiens
cttgtggaccaaagctagcaggattaactgcatctagcagcgttagtggatcagggattctagttaaatcccatctctattcctcgtagatactttccaggaatcaaagcaagcagaaatgtttcacttaggtttttgcaaaagggctgtagaatcaaatattgggcaataactttatttctrataaaagatatggctattgcttcaaattattaatctatccccacaaaagtgtgatatatttgttctatttctgtgtaaagatgactgaattgtaatattttgatttctgatgactttgtttatgtcaaaaatagttggagaatcttgctgaaggatggaaaatacaagtcacatatattgccacttgtctactctaagcccatggcaggcgtcactacttagctattccttttgtgtggtgctttttgggatccttccagcatggccagcatgaaacttagtctatataagagaggtaaagaattgttaccttactttattgtcttttaaaaatgttttcttatgaaaaattctcacatacaaagaaagagaacggtattatgagcccccaagtactcattactgtttatcagaaagtatttacaatttgaaagttcatttcgtctattcaa

SEQ ID NO: 350014 - DNA, 567 bp, Homo sapiens
cttggcacctttgccaaaaatgagttcactgtagtttctgggttctctcttctgttctattggtctgagtctgtttttatgccagtactattctgttttagttacaatcattctgtagcataatttgaagtcaggtaatgtgattcctccagttttkttcttttcactcaggatacctttaactattctgggtcttttgtggttccacataaattttaggattgtattttctatttctgtgaagaatgtcactggtattttgatagggattgcattgaatctgtagattgctttgggtagtatggacattttaacaacattgattcttctaatccatgtatatgggatatttttccatttttggtgtcttcttcaatttttataatctgtgttttatagttttcattatacagatctttcacttctttggtcaggttaattcctagatatttaattttatgtgtggctattataaataggattacatttttatttctttttcacatagttcactgttggcatatagaaatgctactgattttttataaacttttatgttatgttcag

SEQ ID NO: 350015 - DNA, 285 bp, Homo sapiens
gatcagttttacttatcttcatagcttttggctttactgacttttttttcctattgttttctgtttcctattttattttctaacckgatctttattatttcctttcttctacttactttgggtctcatttgctctttttttctgtttgtaaggtggaagatgaggtcatggatttgagacatttcttcttttctaatatggggtttagttctctagatttccccctaatactgctttagtggcatccaacaaatctaggttgtattttcattttaattctggtca

SEQ ID NO: 350016 - DNA, 581 bp, Homo sapiens
ttcccagtcactttgttggcagcagccaccgttgggatttaaatctctttcctcccaggatcactggatgcatatttactgagcacctattatatcccagagtctgttctaaatgctggagacacagtggtgggcacaagaggacaggcaaagtccctgtgttcacagaattccattctggtaggggatacagacaatcaacaggtaaatcaacaaatatggtaatagcagactatgcttgctataaggaacataaaacaggctgataggatatggaatgagatgagggggtgatcatgggtagggatactactttagataggatgatcagggaaggtgtctctgaagaggtgacactggagccaagacctataagatgagaaggaactagtcatgggaatatctgaggaggacttccaggcagagggaacagtacaggaacagtaagtacaaaagccttgagatgggagtcagcgtagtgtgcttgaggaacagaatgaaaagtggctgaggcagtctctggggtatactctagttggagtgccacrtatcaccaccatgctgaggctgacccaacaacc

SEQ ID NO: 350017 - DNA, 551 bp, Homo sapiens
gtgggggtgggagagatgggatgggccctgaggaaggatgaaattgcatccaaggcaaggtgctataagtcccttcagaaaaaagtcaccattttgcttcttttgcgaatcctgggagccatacttaccctgataagctgatgactttctagtcagccagaattatctagcaaatagccaggtagcagtgcttcactgcttttgcagaaaccctaactcacccagactggttctgctgtgctgtcctcaagtttttgtgttgttttggaatcctctacatggtcttcattttaaatacagatacctcatcttctcagaaggattgtacctccattatagagagagactcttcattctcttctttggatacccttgcagtagttagcacaataccsacctagatctttccccttctcaacaggtagactatttcagagggaatgtctcatgtggtttaatcctgtagtgggagaccagatagtggcttgtgctgccaaaagatactaacatttgggatttcatgattgagctatgtgtgatgagaaactggg

SEQ ID NO: 350018 - DNA, 587 bp, Homo sapiens
ctttgtgtgtttgtatttaaactgtgagactaacaggcgtgagatagactactcaggcaatagggaaagaaactggggagctctaggaactcctgcagagtgagtggctggccagaggatggtgttatttctctcagaagatccttgcaatatgaataatgtgatctaaagagaagctcagccttgtggaacaaagacagaaaggcaaaaaggctcaaattagcaccagtagaaaagatagccatatccctaattctttaaarcaatcaatcccttaatagagaaaatagatttgaaattttaccagtggtaatctaaaagaggctgccacttctgctttgtattttttaaacagcttagcacagttttctttgattgtggaggaaaattggacaaggcaaaaatatccattactattatctcaatagccactgaacacagggcccatgtttaagccagaacaacagtgacaggtggagagtgccatctttggagtctgtgtgcttaggcacaaataatatagcaccaggtgctgaccattcattggcctctcatatgttcctgaattatttaccaggtttattaca

SEQ ID NO: 350019 - DNA, 614 bp, Homo sapiens
cgttcaggagcagcctgggcaacatggcaaaatgccgtctctgctaaaaatacaaaaatacagccaggcatcgtggtgcatgcctgtggtcccagctactctagaggctgaggtgggaggatcactggagcctgggaggcagaggtcacagtgagctgagatcacgccattgcactccagcctgggtgggtgacagaggaagaccctgtytaaattgaaaaaaaaaaaaaagctctacattagaaattgagaacttctgttcattaaggacatcactaaggaaaaaggcaagccatagactgggacaatgtattcacaatgcatatgtcatcaaagaatctttattcagaataaaaaagtgggaatctatatgaaaacatagaaaatccacttttttaaaaatgtgcagtcttatgtttatcacagcactgttcacagtagtaaagtcatagaatccatctaagtgtccatcaacagatgattggattaaaatgtggtatatttttgccatggaatactatacacctataaaaataaatgaaattatgtcttttgcagcaatgtggatggaactggaagccattatgcttactgaaatgactcagaaacagaaa

SEQ ID NO: 350020 - DNA, 540 bp, Homo sapiens
gcagtcatgtaaaaaaaaagtatgcaaacagtataggtatgaatgatcacctccacaatattaccagtggttacctctgggtggtaaagtaatgcacgtttcattttcttgcctatctatattttctaatctaggatcacccaaccatgtattatttctgtaataagaaaaaaactgataaaagttattatttttaatatacatactccttgaaggggcaattttatatctaggaattcatcttaaggaaaaaactgtaagcatgcatgcaagatttagctatagtaatgtttattgcaaggttgtttctaatagtgaaaattttagaaataactcaatttctagtgttaggrgattgggaaaataaattttaatatattcatagattataaaactaggtaggtaaattaaatatttaatgatcttgaaaatgttcataatatcttaataggttaaacaaaacaaacaggttacacaacactgtattttcataccctttgacccagcaaattccacttctacgaaatactaacacaaaga

SEQ ID NO: 350021 - DNA, 560 bp, Homo sapiens
tgccttggcagtgtatgcccattctatactgctgctgtgactgttaagtgtaagcccatggagatgggctataaacaatctttccaaaggcctctttataatgtcttgttttttggtaaattgtggtaaatatatatattaccattttgaccatttttaagtctacagttctgtggcattaagtacattcacattgttatgcaaccatcaccatcatycactaagaaaataactatgtatattaagacaagcagggttgatctggggattttagtggctgaaattaaattcaatccttttaagacactggcatcctaaaattcaagattcaaattcctgggacaggaagtgtatttgttttagtgtggcttgtgcccactattgtggtcaggagagtggggtttcaagattggcagaccactagaattgcatgggagggacagtgggaggcagacattttccaaaggagtgaacttggggcagaaaaaaaatacttgatgaccactaaatgtggttaccatttagtggtcataatatatttgttaactagaattttgttt

SEQ ID NO: 350022 - DNA, 594 bp, Homo sapiens
agcccatggagatgggctataaacaatctttccaaaggcctctttataatgtcttgttttttggtaaattgtggtaaatatatatattaccattttgaccatttttaagtctacagttctgtggcattaagtacattcacattgttatgcaaccatcaccatcatccactaagaaaataactatgtatattaagacaagcagggttgatctggggattttagtggctgaaattaaattcaatccttttaagacactggcatcctaaaattcaagattcaaattcctgggacaggaagtgtatttgttttagtgtggcttgtgcccactattgtggtcaggagagtggggtttcaagattggcagaccactagaattgcatgggagggacagtgggaggcagacattttccaaaggagtgaacttggggcagraaaaaaatacttgatgaccactaaatgtggttaccatttagtggtcataatatatttgttaactagaattttgtttaatcaaaatggtttatataatgtgatcatgccagataataatatacaaaaaatttgtactatattatagacacaactgtgtttgtg

SEQ ID NO: 350023 - DNA, 472 bp, Homo sapiens
caccaccaacatagacttaagaatgtcactctcttgacaaaacaagccaacatcctctatcctctgtcccactcccaaacctgcagtaactttcctgtgcmattgtaatacagtgtaaactttcataaggatggggagtggccaagatggctgaccagaagcaggtaatgtacatggctctcacggagaggaacagaagggacgagtagatacaacaccttcaactgaaacatccgggtactcgcattgggattaatcaaggaaacaacctgacccacagagaacaaggaaaagcaagacaggacaacagcccacctgggagcaacagggaaccaggggatcttcccctgcccagggaagtggtaagtgaatgagcgaccccggaaaccatgcttctcccacagatctttgcaaccctcctgtcaggagatctccttgtgaatccactccactagcagcagggccttcagtc

SEQ ID NO: 350024 - DNA, 615 bp, Homo sapiens
caggactgaattgtggtgcactgcagaaaagcacacttactaaatcacaaacgaggaatctagtgcagccttcatttatttcttcaaggctattcatgcataagccatgtaccattgagcagaggctgtatgctccatttttacaacacatatgcagcacaggggagagggggaagtggaggaagagcatgtrtcaggggcagacaactgtgagctggagacaaatgctcaacagcaaggggattgtctgctatcacgcaagcgtcaataaaagcgacgcagaattgcttgtgatcccaggctcattcagctgtactctgctgtggtttatgggcttgatggatgaaacaaggctcacccaagagctcatttcacccaggcctgccaggcggttccaggatgctgggcattagaatgctgctcaccgatctccaggatgcaggatggctgcttgctcagattcacataaaaacgatgactctccagatccaggatggtttatttagcttttgcttagagatttgtccaggctggatatatttgaatacctggtttcaagaccataaaatcacatctgttagagtgaaaaattggcataagaaattggcatggcaa

SEQ ID NO: 350025 - DNA, 615 bp, Homo sapiens
tttgctggagggagttgcatctccagaaaacaggatgggcaagcctggtaagggaaaggaaacaaaccttcctgtgtcccctgaagacagaaactctgaaggagggaaagacgaaggatgggtctaagagtggttcaaagtaattgaggatagagcatagaaggatttcagtgactctagtggagtcagtttggtctgtttttgaatcttggaaaaggggaggagcaagtctgttgcgaagcctgtgcagagatgtacaagacatgcagatgggagagaggccactgagagtaaagggtggcacagcgggttcccatgttggaagtgaataactttaattgtatttaacagaagattttagcagcaggtaacagaaggtcagttaattagcgatctaatagccaagatctagggttttrttaaattttaaaggcagtactgagacactgttaaactctgtccaaagaaatcaagatcaaaatgagggctgttgaagatcattctttgtgtctctggacatgtccactgaagtccagaaatatcagaaacaggaaagtgtctcaaaagtcactccagttgctgggagttggtgagagaagaattgactgagaacaa

SEQ ID NO: 350026 - DNA, 615 bp, Homo sapiens
tttgctggagggagttgcatctccagaaaacaggatgggcaagcctggtaagggaaaggaaacaaaccttcctgtgtcccctgaagacagaaactctgaaggagggaaagacgaaggatgggtctaagagtggttcaaagtaattgaggatagagcatagaaggatttcagtgactctagtggagtcagtttggtctgtttttgaatcttggaaaaggggaggagcaagtctgttgcgaagcctgtgcagagatgtacaagacatgcagatgggagagaggccactgagagtaaagggtggcacagcgggttcccatgttggaagtgaataactttaattgtatttaacagaagattttagcagcaggtaacagaaggtcagttaattagcgatctaatagccaagatctagggttttgttaaattttaaaggcagtactgagacactgttaaactctgtccaaagaaatcaagatcaaaatgaggsctgttgaagatcattctttgtgtctctggacatgtccactgaagtccagaaatatcagaaacaggaaagtgtctcaaaagtcactccagttgctgggagttggtgagagaagaattgactgagaacaa

SEQ ID NO: 350027 - DNA, 587 bp, Homo sapiens
cagccttaataagtaaatttgataatagttgttactgagaaattataaacatgaagaaatattttgtaggaccagggtttgtagtggtatatgcaggcacagccataatgtgtgccatttgatgaataatgatgaaatagaagtatagatattaaatatccttcttcccaaatggccaagagagatcaaggcagaacactcagagtgaggccaaacctgcacctacttccctgggcacaatggctctgccaagcccaaggtcagcctcattttgcctgccctttcccacgagggcagcctgctggctggtagagttccgtgtcttcccttctagctggagcctggcagctgcaaatgtccataattatggaagatccactagttttctgctctgtggttgaaacaaggacagtttctctttttattgctgttctgtggcttcatgttctgaatmgccggtattattaataatggccaaggggatcttattagcatagggtggacctagccatgcatctctctaagagcggttgtgagagctgacaggttaacaaagctactcacataaacggcagagccatgaaagg

SEQ ID NO: 350028 - DNA, 600 bp, Homo sapiens
gatgaagtccaaatgcagtctactggagaaatctctcttgcttagggtgtgctagtctttttgttctatttaaattattgttctatcagctgattgggggaaacccacccatattatgaaaggtaatcccttttactcaatctacmaatttaaatgttcatgtcatccacaatgccctcatagaaataccgaaaatatagtttgaccaaatatctgagcacttcatggccagccaagttgacacaaaattaatcatcacaggtgcataacttcatttgcaatcatttttagtataaaaattcatacctattctaattctgctgcagagtagccaagtcaatttaaaatgaacagctaaagaagaaagccattggagaaagcagagttttcctctcactagctatgttacaaaaataagaggggatttagggaaggcaggcacagctcttagcatttaatcaaaattcagtggataagttaaagtatatctttagaactctatacaaggttatattttcttcacaagaaattttagaatcataaaaaaacaaagtggttgtgcgtgaaaggttgtgaaataaggtataaaaattaagtaag

SEQ ID NO: 350029 - DNA, 644 bp, Homo sapiens
tgattcatttctcccaagccgcatgaaataggtaatattactagctcttttatatagacgagtaaactgagaattagtttacaaatcattggttacacatccacactatggatatacagctagcaagttagattccgtctcaaatcaagtgatcaaggctaaattctttaccattgtaattatctatcaagtattaaatggtttttttcttctggtctttctatctttgtacagatttatatttttagaacaaattgagattatactacctatactcagttggtctagttgtgttgctaataacattgtgagtatatctccatatcatagactaatcttcataaaatattgtgtttaatagctccatggcattctgctaagtgatatgtggtgaaatgtattagttatttattgctctgtcatcagtcattccaaaatctcagaagcttaaagctgcagatatgtrtaatctggcatggtttctgagagtcaggactctgggagcagctaggctgattggctcaggcttggattctcccacatggtcacagctgagatgttgagtgggaccatggtcatctcagggtttgactgaggcttgagctgcccacctccctcacggcactgctggctggagatgtcaa

SEQ ID NO: 350030 - DNA, 364 bp, Homo sapiens
tttgtgatgatgttccttcttctgggatggttctgcaaagacagaagaatccagagcaaccacacagaaaatggaacacaagggactgagtgcccaccccatcatgctgtttttgcaggaagcacattttcccaatgcagtgttttatttctgctaaggctgaggctgataaatttatcccttttctaagaaaaaaattttattttggcacccacagagcagagaataagcccatattatgcagggagcaaagggtgctatatttcagtggaacagcacctcaccttcttctctcagctttagakggattcttccctgacttcacatcccaaagtaggacaaacccatctttcttcacagctga

SEQ ID NO: 350031 - DNA, 595 bp, Homo sapiens
gctgcaccataatgtctcattttacctaattctgttttaaaaaacattgactaaacattgtcattgggctgacaacagtggctcacacctgtaatttcagcaggcaggtggatagcttgagcccaagagcttgagaccagcctgggaaatatggtgaaactccatgtctacaaaataagtagctgggtgtggtggggtgcacctgtagtctcaactacttgggaggctgaggtgggaggatcaccttagcctggagagttcaaaattgcagtgagttgcgattgcaccactgcactccagtctgggcaacagagcaagaccctctctctaaaaacaaaacaaaacacattaccatctgttaaacatgggacattgggacatgtgctatttataggaaaaacatagatgtattaattctgatttttctgggttctagaaactctcagcccagataaatacacacatacatgcaatgtatatcacttatgacaatgtttaaatataaaagattatgttayatatatacacatgtatcatgtatgtgtgatggttaattttatgtgtcgacttggctggaccatggtgcccagatatg

SEQ ID NO: 350032 - DNA, 595 bp, Homo sapiens
gctgcaccataatgtctcattttacctaattctgttttaaaaaacattgactaaacattgtcattgggctgacaacagtggctcacacctgtaatttcagcaggcaggtggatagcttgagcccaagagcttgagaccagcctgggaaatatggtgaaactccatgtctacaaaataagtagctgggtgtggtggggtgcacctgtagtctcaactacttgggaggctgaggtgggaggatcaccttagcctggagagttcaaaattgcagtgagttgcgattgcaccactgcactccagtctgggcaacagagcaagaccctctctctaaaaacaaaacaaaacacattaccatctgttaaacatgggacattgggacatgtgctatttataggaaaaacatagatgtattaattctgatttttctgggttctagaaactctcagcccagataaatacacacatacatgcaatgtatatcacttatgacaatgtttaaatataaaagattatgttatatatatacacatgtatcatgtatgtgtgatggttaattttatgtgtygacttggctggaccatggtgcccagatatg

SEQ ID NO: 350033 - DNA, 598 bp, Homo sapiens
gatggtacttgaaaccattgaaggaactagaccgttctatttgaaagcagggaagagggctaagcttttagcctagaataggaataagcaggaaagcagaaatcctaggtagggtggacagtagacatgctgcaccacgggagtttatgccacagaacccccagaaggtgtcgggatctgaagacagggagaaggatatctgaaaacagagtgtgtttgaacatgtgcattagaagcacttagaccttagggtccctctattctccacctcagcagaagagtagacattttaaatttggactgaaagatagcaagcataattrcagggaagggggccatactgaaaacacaggatcaagtgaatgtacaaccactgagctcgttctgcaccaggctgtcaggatgctggtagccaacctcaagcactccaggcaggaggctggaagatttctctgcagggaagttggctaatgcaactcagagttgagagtgcctcgactcagtggtcctgcagtgaagcccatcactctagaagctctgttgaggcacagttccaggcctgtttataatgcctcactcctaaaaatgaacagccagc

SEQ ID NO: 350034 - DNA, 591 bp, Homo sapiens
aagcttcttatgtccactatattgttctttccttaaggtgtgtctcttgataatgacacactgaataacctgaataaccagatactgtgcaatctcttctacattttatttctatgtaaaaatattaaaaacattccaaacctctccactctggcagmagatcaacatgattttattccttactcaaaattctttacatgacaaatatttaaaatgaggcaaaacccacaacattaattcgtgttttggggtttctgcttaattatgaaatgagctcatgtaatttcccactgcccttagcagtggttacactaaagatgagaaaacaggttgagtcctgctacggactgaatgtctgtgtcccctcataattcataggttgaaacctaagtctccaatgtggaggcatcaggaggtgaggcctttgaaagtaatcgggtaatgagggtggggctcccacaaatgggactagcacccttgtaagaagaagtgccagagggtttgcctctgtctctctgttctcctccatatgagagtacattcaagaagctggccctctgcaaaccaggaagcagcgctccccagacacca

SEQ ID NO: 350035 - DNA, 591 bp, Homo sapiens
aagcttcttatgtccactatattgttctttccttaaggtgtgtctcttgataatgacacactgaataacctgaataaccagatactgtgcaatctcttctacattttatttctatgtaaaaatattaaaaacattccaaacctctccactctggcagaagatcaacatgattttattccttactcaaaattctttacatgacaaatatttaaaatgaggcaaaacccacaacattaattcgtgttttggggtttctgcttaattatgaaatgagctcatgtaatttcccactgcccttagcagtggttacactaaagatgagaaaacaggttgagtcctgctacggactgaatgwctgtgtcccctcataattcataggttgaaacctaagtctccaatgtggaggcatcaggaggtgaggcctttgaaagtaatcgggtaatgagggtggggctcccacaaatgggactagcacccttgtaagaagaagtgccagagggtttgcctctgtctctctgttctcctccatatgagagtacattcaagaagctggccctctgcaaaccaggaagcagcgctccccagacacca

SEQ ID NO: 350036 - DNA, 519 bp, Homo sapiens
acctttatacagaaagtttactgggaaatataaaagccttaaatcaagagatcaatgcactactttcttggtaggagagcaaaatataatcatgttttttgttagcaggtaaattgatgggttacacttagtttgggtatgatttttcatgacacatttgagaaatgttttaaatttatcaaggacgacaacaacaacaacaaaaatcccagtgttttggcagaaagaaaactagagaaatggtttcagggtggttaagaacctggctgtgaacaaacacagaccagggctagaagcaagtcacgccctcacaagcttggcatcttggcaagctacccgcctctaaaaaagttagttcccttctttgtaaattagagacatgtcaatatgcattaatgaattctgagaggcagtatcacaaaatatttaaacagaactgaatacaatgtgttctggraactgtatccaatgactcagaaagtgtttcttgtaatgctggaaataacgtttccatgtgaa

SEQ ID NO: 350037 - DNA, 563 bp, Homo sapiens
gagttaagggctgcagagatgtgtagggagaacacccccatggagggtaaggggacggagagtgggagcaagtggggagcctctgaccatgagaatgaggcctggcacctgaggaagagagaggaaagaggggaggacagggcaggaagagcctcaggctgtggtgcctcactgagagcatcttggccagcccagtggggagccccagaacacagactgatcttctgagacccccccggggctggactttctgccaagctccgtcactccatgagagcagcctgggggaggtggagcctggcatgaacaaggcagtgaactccaaaagtggggcaacagtcagctaccaatgctctagctccgagcagcaactctctctagaagggagagaggagtgaggcacctcctagcagccactcctcagggagctcgctcttcagtcagagggaaggaagataagcaaattagtgtgaagcactgcatgcccaatgaygagtgctataaggaaaagtaaagcaaagaaaaatgtgtattagggccagaaaggttgcaagtttcatgtg

SEQ ID NO: 350038 - DNA, 490 bp, Homo sapiens
agaacgtgtacccaagatggttgggttacagcttggttttatacrttttagggagacagaagttaaagacaaagatataaatcaatacatataaggtatacactggtttggcctggaaagatggtacatctcaaaatggggatctcacaggtcataggtagattcaaagattttctgattggaaattagttgaaagagttaagttttgacttaagaattaaagtcagcagaaagcaatgcttgagttaacataacaggggttgtggaagccacggttcttgttatgtagatgaagcctctgtgtagcaggtttcagaggtaatagatgataaatgtctcttttgggaacttggaaggtgtcagattctctggagaagacctactaaggtgagaagattatctacagaatgcaatttctcctacaatagatggctttgcagggccattccaaaatatgtcaaagaaatatattccttcaggtcctgttatc

SEQ ID NO: 350039 - DNA, 490 bp, Homo sapiens
agaacgtgtacccaagatggttgggttacagcttggttttatacgttttagggagacagaagttaaagacaaagatataaatcaatacatataaggtatacactggtttggcctggaaagatggtacatctcaaaatggggatctcacaggtcataggtagattcaaagattttctgattggaaattagttgaaagagttaagttttgacttaagaattaaagtcagcagaaagcaatgcttgagttaacmtaacaggggttgtggaagccacggttcttgttatgtagatgaagcctctgtgtagcaggtttcagaggtaatagatgataaatgtctcttttgggaacttggaaggtgtcagattctctggagaagacctactaaggtgagaagattatctacagaatgcaatttctcctacaatagatggctttgcagggccattccaaaatatgtcaaagaaatatattccttcaggtcctgttatc

SEQ ID NO: 350040 - DNA, 490 bp, Homo sapiens
agaacgtgtacccaagatggttgggttacagcttggttttatacgttttagggagacagaagttaaagacaaagatataaatcaatacatataaggtatacactggtttggcctggaaagatggtacatctcaaaatggggatctcacaggtcataggtagattcaaagattttctgattggaaattagttgaaagagttaagttttgacttaagaattaaagtcagcagaaagcaatgcttgagttaacataacrggggttgtggaagccacggttcttgttatgtagatgaagcctctgtgtagcaggtttcagaggtaatagatgataaatgtctcttttgggaacttggaaggtgtcagattctctggagaagacctactaaggtgagaagattatctacagaatgcaatttctcctacaatagatggctttgcagggccattccaaaatatgtcaaagaaatatattccttcaggtcctgttatc

SEQ ID NO: 350041 - DNA, 496 bp, Homo sapiens
aaatgtaagagcttctcattgtattaaatcttaatgagaaaggaaagagttatctgtaatgttttattatcaggtctctaatcaagatggataggcacccagaggaagccagtggcacctcactaggttatttgccttactgacatgctttgcagcttacatgtgtcacaagaagttcgtttaaagattgtatcayctaatgttactgagttatctttgggaatagaaaattgatttcaaaagtgtgtgcacagagatatcagttgcacctcggtagtccagagagcagaacagtttggcccagtcacccccagcaagggtcaaaaacaaaacaggagccccatgtggacacagattccaggcgtccacttctagctgacatggagtcagtcacagaaactgcatataccctttcccttaaaacaacagaaaaaagaatttaggaaatgatgtttttcaggacactttacatcaagcagtgaaggacagtgattat

SEQ ID NO: 350042 - DNA, 607 bp, Homo sapiens
acagtttttcaggactctccccatcactgacaacacatcagtaaacaagacagatgcaacctctaccctgctagaacttaccttttgccaggggaagatcrataatgataaaataagtatttgttgaatgaaataaataacctagtcattatgctgccacaaagttggccaaaacatttgaatttgccaagaagtttattcttaaaatagatttatatctgctattattaatcaataaccttggtcaacatctatatataatgctttgagattaatcagctactgatgaaataacatataataaaccataagtacaaaaatatatacatagggcatatattcaaaaatgtttgattgatagtgatgcgtgatcagcaatgtttgcagagcatcagtctaggtccaggccaactatgggaagagtgaatgtgtgatggaccactcttcccatttcaaggaggtacattggtctcctaaaagaatatatcatagaacctgcctttgaggatgaccaatcttttattttaacatctttgtttctgttgaaatattctgtttggctttcttcctataagatgggaaagaagaggaggaagaaggaagagca

SEQ ID NO: 350043 - DNA, 607 bp, Homo sapiens
acagtttttcaggactctccccatcactgacaacacatcagtaaacaagacagatgcaacctctaccctgctagaacttaccttttgccaggggaagatcaataatgataaaataagtatttgttgaatgaaataaataacctagtcattatgctgccacaaagttggccaaaacatttgaatttgccaagaagtttattcttaaaatagatttatatctgctattattaatcaataaccttggtcaacrtctatatataatgctttgagattaatcagctactgatgaaataacatataataaaccataagtacaaaaatatatacatagggcatatattcaaaaatgtttgattgatagtgatgcgtgatcagcaatgtttgcagagcatcagtctaggtccaggccaactatgggaagagtgaatgtgtgatggaccactcttcccatttcaaggaggtacattggtctcctaaaagaatatatcatagaacctgcctttgaggatgaccaatcttttattttaacatctttgtttctgttgaaatattctgtttggctttcttcctataagatgggaaagaagaggaggaagaaggaagagca

SEQ ID NO: 350044 - DNA, 375 bp, Homo sapiens
agttgttctttttcttttctgtcatttggggtaacatggaggtaaagagatggagaaaaacagaacaactcactggagaagtggttgtctgagaagcagaacccaaaggagtctttatagaagacaaattagaatatgacttgtcctgaagcctagcagtagtgccccaaggaaatgagacataaaatttgacatgaataaatatttaaataaataatctgattccataatggaattctgaccatgttaacaacaatgataactataacaatggaaaaatcmgtaataataatcactaacagaattttcaaaaattctgaatacaacataataaagcaggttttccccacatagaaaccacgccatagtttccat

SEQ ID NO: 350045 - DNA, 610 bp, Homo sapiens
aattctgaccatgttaacaacaatgataactataacaatggaaaaatccgtaataataatcactaacagaattttcaaaaattctgaatacaacataataaagcaggttttccccacatagaaaccacgccatagtttccatggcttccctcaatatgaggggtaggtagagctgtgggtgagactgtgrgttctagagacacaatgccactcactcgctgagtaacttcaagcaagttacctagcctcagtttctctgtctctataatgagataatgatagtgcatcccttactgaattgaaaggactagctagaataatgtatttcaagcagttagcagccgtagacacttagaaaatcattccacacatttctctctttcacctccctgagcactttccagtagcccaatccagacttagagcctgttgcctactctttcttctgtctctgacatcgacatctgtttttggagagcacagctgaatgctgggattcacttggcctgaagcgccagttgctttgctgcaacccctgcgttctggatacgcctggcagtgtatgcactgagagcttcctggtgtgtggggcagggctgtgcgggcttgt

SEQ ID NO: 350046 - DNA, 610 bp, Homo sapiens
aattctgaccatgttaacaacaatgataactataacaatggaaaaatccgtaataataatcactaacagaattttcaaaaattctgaatacaacataataaagcaggttttccccacatagaaaccacgccatagtttccatggcttccctcaatatgaggggtaggtagagctgtgggtgagactgtgagttctagagacacaatgccactcactcgctgagtaacttcaagcaagttacctagcctcagtttctctgtctctataatgagataatgatagtgcatcycttactgaattgaaaggactagctagaataatgtatttcaagcagttagcagccgtagacacttagaaaatcattccacacatttctctctttcacctccctgagcactttccagtagcccaatccagacttagagcctgttgcctactctttcttctgtctctgacatcgacatctgtttttggagagcacagctgaatgctgggattcacttggcctgaagcgccagttgctttgctgcaacccctgcgttctggatacgcctggcagtgtatgcactgagagcttcctggtgtgtggggcagggctgtgcgggcttgt

SEQ ID NO: 350047 - DNA, 610 bp, Homo sapiens
aattctgaccatgttaacaacaatgataactataacaatggaaaaatccgtaataataatcactaacagaattttcaaaaattctgaatacaacataataaagcaggttttccccacatagaaaccacgccatagtttccatggcttccctcaatatgaggggtaggtagagctgtgggtgagactgtgagttctagagacacaatgccactcactcgctgagtaacttcaagcaagttacctagcctcagtttctctgtctctataatgagataatgatagtgcatcccttactgaattgaaaggactagctagaataatgtatttcaagcagttagcagccgtagacacttagaaaatcattccacacatttctctctttcacctccctgagcactttccrgtagcccaatccagacttagagcctgttgcctactctttcttctgtctctgacatcgacatctgtttttggagagcacagctgaatgctgggattcacttggcctgaagcgccagttgctttgctgcaacccctgcgttctggatacgcctggcagtgtatgcactgagagcttcctggtgtgtggggcagggctgtgcgggcttgt

SEQ ID NO: 350048 - DNA, 572 bp, Homo sapiens
tgcatgctaattataatgcattagcatgctaacagacactcccaccagtgctacaacagtttacagatgccatggcaacatcaggaagttaccatgtatggtctaaaaaggggaggaaccctcagttccaggaattgcccacccttttcccagaaaactcatgaataatccaccccttgtttagcacataatcaagaaataaccataaaaatggccaaccwgtggcccctgctgctgctctgcctatggagtagctattcttttattcctttactttcttaacaaacgtgctttcactttactctatggtctcgcctcgaattatttcttgcaaaagatccaagacccatcttttgcggtctgtattggggacctctttggggtgacaccagtatctcaaatgagtcttccaatgactccagctccagctgctaccaaagtgcaaatgcctgtaggatctagagtgagcagaagaaccaccagctgagtccctcaacacagggacaccacaagagatcataatattgtagcttaatgttttgcagaggtttgttacacatcaataggtggtc

SEQ ID NO: 350049 - DNA, 450 bp, Homo sapiens
ctcagtcattggtaagggactttattctactgtcatcctgtcatctttatgcagaagattgctaaagagatttttgcttagatagattgattagaacagctgagctgaagcaacttgattagaatatagatggtcacatgccgtttttcatagcagmcttgcagtgtgcctctttctatgcatggtttcccctgctttgaaattcttcatgctttcctgggacattgtgatgggacacttgatcagctgatcctggggctgggttcatggaggtcgtgcttttagatcaccctgcataaggccaccctgcataaggctacctgactgggagtcccttgggtaatcaacatgcagaagaatggtagagaaagcctacacgcactccaggtatgcccacattaggtataaacgtctcatgtgtaaatgtaccagctgggttaggccaaacaa

SEQ ID NO: 350050 - DNA, 654 bp, Homo sapiens
gatctaacattaatttatatttttaaaggatcactctaagtattgctttgaaaatagactggagaagcagggtgaccagtcagggggtaatgcatgtgccagggaggagctggcttgggtggcagtaggggctataggtcccggagacgtgccaactggtcctttgggagggctgagagaatagtagttaagttttagtcctgagcaacttcaagggtggggttacatcgaccaagacatgaaagaccaaagttaacacaggttgtgagaaaaagaagttccatttttgatgtgttcaccttgagatgtccattagctatccaagtaggatgtgaggacacgtggagatttcaggaaagacacgtgccagggtgcactgcagggaattctcagtcgctggcctgcggtgggccctggcattcttctgtttaargaccaagatgatcctgatgcactgtcagagctttgagttacccctctaacacacaggaagtcactataggtctaaagagaggaacaacaatcagacttgggttttggtaagatcagttttgcttgtggtgtggagggaaaactgcagggactcaaaattgagacagaaaaaccagctacaaaaggtatcagaatagtacagtcaagagatgagaaactaaa

SEQ ID NO: 350051 - DNA, 616 bp, Homo sapiens
  misc_feature (1)...(616): n = A,T,C or G
nnnnnnatcaagaatagtactgtagtaagtacagggatgccctataactctgacattaatttccttccatttggataaaaacatagtagtggggttgctggatcgaatgaaattactcctgggttaaatttattcccaggttttttcttttgtagctgttataaatgggattactttcctgatttctttttcaactagttcattattagagaatagacacactgctgagttgtgtacactgattttttaccttgaaactttactgagttcatctatcagatctaagagtttcaggtagagtctttaggttcttctatatataagatcatgttatctgaagaaaggacaatttgaattccccttttcaaacgtggatgcatttcttttgcctggttactctggctaggacttccagtactatattgaatatgagtggtgaaggtgagcatccttatcttgttttagttcttagaagaaaggatttcagttctgcctcagtatgtagttagctgcagctttgtcatacatggcgtttactatgatgtrttctttctatgtctaatttattgagtttttttattatgaagggatgttgaattttatgaaaccctttttt

SEQ ID NO: 350052 - DNA, 595 bp, Homo sapiens
aaagcaggtcaggaggacgaatccttggtcttcaagtggattgtctgtgtgctagcagtggcaacaatgggctgagtgaatgggtcctcaggcccttagatggtatgcataatgtctgcggctgcaacagcagcagagggctaacttggggccccaagctacagctttgggtgccagcagttaggggtacaaagggcctagtggccatcaccgagcatccaagtggcacgcagctgggtggcacatggccgtaggcagggcagtggcagtctcacttggtcatgctatataatcctttttatattttgttgaattaggtttgttttagaatgcaagaaatattcataagggatatctttatcatgacttgtctcattttggtatcagggtaatagtgctctcatagaattacttaaaaagtgttactctttttttctgaagggtgtaaaaaaactgatgttaaaacttctttaaatgtcgatgcaattcacaagtaaagccatttratcttaggcttttctttgtaggaagttttctgattactaaactcttcacttgctaaggatctattcaggttttgtttccttttgagttt

SEQ ID NO: 350053 - DNA, 609 bp, Homo sapiens
gggtatttttgttgaagcaatcaattatgaatgtcccagaaccaataggataccaattaatagaaggtgaaagccagatgaggtggctcacgcctgtaatcccaaccctttgggagcttgaggcaggaggttcacttgagctcaggagttcaagaccatcctgggcaaacagggagacccctcctstacaaaaaatttaaaaacttagccaggtgtggtggtgtgtgcctgtgctcccagctacttgggaggctgaggtgagaggactgcttgagcctgggaggttgaggctgcagtgaactgtgattgtgccactgccctctagccgggacaacacagcaagattctgtctcaacaaacaaacaaacaaacaaacaaaaaaccttaagacagaagcaaaaaagcagcctccttaaacataagcaaaacactatatgttagtgtcacccaagtcctacccgttgcttctaagtccaggcttgaaaaggattcaggaaacagtagggcgcttcctgatattagagccagttcattctctcatttactcagccaacatttcttgtggaccatgaatgcatcaagcagcagagaaaagggcaacaaacaaga

SEQ ID NO: 350054 - DNA, 589 bp, Homo sapiens
gttgccaagaagaagcaggatgcttcatctaatctccttacaattccttgtaagtctaaagaagagcaaatgtcctagatttgcagctctaaacctgtagctactgaaacctgggtgtccacagctcatctagacatcaagcatgctgagatatctaataaaaaataacatctttattggttgctacatttcaagttcttatgattcagatacatgcttatgtaaaagtattattaaagctatattagctttttaaaaatgcaatctaggatttagtagaaacaaatcatcaaaaatgtgacaaaagctctaagaratctgcaacctttaaagagaaattgcaatattactgaatttttttcctcccaccattaaacttttctcagttaacagatgctaaacgtacaactcttttatgttgatggaacctcaaaatatctagtgtgaagggaattcttcacgctggtgatcactgacttgattcaatgttatatgtggccaaacgcactcaaaattttctcctttggccagaaaggctaaggaaaagaagggtgcaaagagcaactgttatcaccaaacagccagacaa

SEQ ID NO: 350055 - DNA, 581 bp, Homo sapiens
atgaatggtatgatggttctgacattgtttcgtaccaatattaatgtcacagttargagcagcagcttaagaggaaaacaaagttctctcactgatatcagttaccaagcatgcatccacacctcctgccgggcaccatatgaataaagagcaaaatacagctccctatacccagaacttcatagtctagagagtgaacacaaactctgcacagaaaactatatgcaagacagaaataatggaccaactagtgcttcaatgggaaaaggttacaccacacacaaccctgaaccaaaatgtggcatttaccaggtggagagaaaggaaagaaaagttttcccagcaccagggataggtcacagaagacagagacgtgtaagactgaatggcttgtccaaagcagtgcaagagccaatgtcactagactacagggtgcgaagatggggcagtcagagaggggcgtggaatgcttaggcaagggagctaggaaaagactttaagtgggtacgaaaaatggccagattcaagagcggtaactaggtggtattatggaaggtgactggattaaatagatagattaa

SEQ ID NO: 350056 - DNA, 581 bp, Homo sapiens
atgaatggtatgatggttctgacattgtttcgtaccaatattaatgtcacagttaagagcagcagcttaagaggaaaacaaagttctctcactgatatcagttaccaagcatgcatccacacctcctgcygggcaccatatgaataaagagcaaaatacagctccctatacccagaacttcatagtctagagagtgaacacaaactctgcacagaaaactatatgcaagacagaaataatggaccaactagtgcttcaatgggaaaaggttacaccacacacaaccctgaaccaaaatgtggcatttaccaggtggagagaaaggaaagaaaagttttcccagcaccagggataggtcacagaagacagagacgtgtaagactgaatggcttgtccaaagcagtgcaagagccaatgtcactagactacagggtgcgaagatggggcagtcagagaggggcgtggaatgcttaggcaagggagctaggaaaagactttaagtgggtacgaaaaatggccagattcaagagcggtaactaggtggtattatggaaggtgactggattaaatagatagattaa

SEQ ID NO: 350057 - DNA, 581 bp, Homo sapiens
atgaatggtatgatggttctgacattgtttcgtaccaatattaatgtcacagttaagagcagcagcttaagaggaaaacaaagttctctcactgatatcagttaccaagcatgcatccacacctcctgccgggcaccatatgaataaagagcaaaatacagctccctatacccagaacttcatagtctagagagtgaacacaaactctgcacagaaaactatatgcaagacagaaataatggaccaactagtgcttcaatgggaaaaggttacaccacacacaaccctgaaccaaaatgtggcatttaccaggtggagagaaaggaaagaaaagttttcccagcaccagggataggtcacagaagacagagacgtgtaagactgaatggcttgtccaaagyagtgcaagagccaatgtcactagactacagggtgcgaagatggggcagtcagagaggggcgtggaatgcttaggcaagggagctaggaaaagactttaagtgggtacgaaaaatggccagattcaagagcggtaactaggtggtattatggaaggtgactggattaaatagatagattaa

SEQ ID NO: 350058 - DNA, 568 bp, Homo sapiens
  misc_feature (1)...(568): n = A,T,C or G
aatactatacagcaattaaactgatcaaactagggctgagtcaataagaatgaatttcaaatactgaggaaaaaagggtaaagacagaaagggacaatctagaaatacaggtatgtcctcaaaaagcagccaccactgccaggcaaaggcaacctgcatgtatgaaagaactcagayacaatggccagtttcacaaaaggaaacaagatagcttgtatatgaagctgaaaagtgtgtgaaacactgtctaatgattacagatgcacatctctaaaggaatgataaacatcagcagctcatggttacttcactacgtagggaaggaaagagaggaatgagatctgggggcataaagaggagaggagtttgcaattcatctgaaatacttttatttcctaagtgggatgatgagatcacaggtgtttattattgtctacacttntttggtatgcctcacatgttacagaagctttagaaagccaactgcataatgactacaacctctttgagtgcagcaacacctgttcagtctggacaattaacagaacaggggggcaaagaggttaac

SEQ ID NO: 350059 - DNA, 563 bp, Homo sapiens
tgaaaaactgtttcaacatcccagtttaaacttgaagtcactttaatataatatataaatattaaaagaataatttaaaataatgtgacattagtgaagctggtgacagagaacaacattttcatgttgtgaaattggagagatctggctgcccasggagctccgggcttcttttctgccattggtgctgggaaggtctgctgccttgtggcttcatgagcctgttgctgttgctccagtaatctctttaatccttttcttttacattttaaatttgttcagtcaaaaaagaggttctcatttttctctttctggcttctttccaaagtagtgtaatggtgatttgattttttttttttaaaaaccacaaaggagttcctgctcagtgatgtgggttaggggctcttctaggtctcagagccatttattcctggtttcgaattgtttcactttctaggtgcgtatttttgaataaatacataaaatctgggaccctctgcaagcgtaaaatgaaatgaataatacctatctcgtaaaggaggaaggaggaggaaacgagatta

SEQ ID NO: 350060 - DNA, 591 bp, Homo sapiens
aaaattcaaaggggaaatagtagtcttgtcaacaaatagtgttgggacaactgtacatatgcatgcaaacaaacgaagttggattctgaccttaccttacacacaaagttgatcaaaacctaaatgtaagacctagaagtaaaaaactcatagaagaaaacataagcaaaatcttcatgaccttagattaaacaatggtttcttagatatagcaccaaattacaagcaacaaaagaaaaaaaagggggctatattatgcttaattaaaactaaattttttcttcaaaagaaaaagccaaggaagtgaaaagacaacctacagaatgggagaacaattttgcaaatcatacatcttctaaaagacttgtattcagaatatgtatcttacaactcaataataaaaaaacatataacctatttttaaaatggagaaatgatttgagtagaaaattctccaaaaaagatacacaataggcaagaagcacatgaaaagatactcaacattattggtcatttgagaaatgygaatcaaaaccaccaggagataccatttcatactatgatcaaaaagaaaataacaaatatgtttga

SEQ ID NO: 350061 - DNA, 605 bp, Homo sapiens
tactgatttactcacaaacctgcttattgaacagtattgattactgactttctgatgggcattttgaacaataagcttatgaaagactaaagtgtgttagaagccatcctaatttgattgttcctgaacaaaccctacaccataacagcctgtctgaatgcgaggggtgctctggatcaggaagtcacagcagtcacactgctgcgattcctttaacccaggcatgcaggaactcagcctgggcccaggagacaggctgcctcggaatgagggagagagactccacatttgccatctcatatccgtgggttctgagcccacactgtcacttttagagtttcttgtgggtttatagatttatcgtgtggtgtttcaagctggttttcttttttttttggaaaktaagtaacttgaaaagattaagtgattaatattcctgttgctgtgtcagggatccccgagccttctctcaggcttgattcactaaaaggactcagaagagctgttatagtcacagctgtgtttttactgcaaaaaggatacagattaaaattagcagagggaagggtgcatggagggaagtccagaggaaactaggcacacgc

SEQ ID NO: 350062 - DNA, 347 bp, Homo sapiens
acttgaaaatgccacctgagggcaggtcgctgccgagatgtgactgcaatattttggctccagagcagctttatggaccacctggaggagaaggcagacctgagtgagctggtgaagaaaaaagaactctgcttcatccaccactggcgagasagatgccatcagtgagtgggaggccagggcacggcagggggagctacagggccgttggaggggccccagcgtctgagccctgtcctcccgcaggaaaacccatcaccttttatcagaaccagggggccgtgccaaagatgcagcactgggaggaggacaccatcaggctggagctcagggaggagatgaaggta

SEQ ID NO: 350063 - DNA, 347 bp, Homo sapiens
acttgaaaatgccacctgagggcaggtcgctgccgagatgtgactgcaatattttggctccagagcagctttatggaccacctggaggagaaggcagacctgagtgagctggtgaagaaaaaagaactctgcttcatccaccactggcgagagagatgccatcagtgagtgggaggccagggcacggcagggggagctacagggccgtyggaggggccccagcgtctgagccctgtcctcccgcaggaaaacccatcaccttttatcagaaccagggggccgtgccaaagatgcagcactgggaggaggacaccatcaggctggagctcagggaggagatgaaggta

SEQ ID NO: 350064 - DNA, 347 bp, Homo sapiens
acttgaaaatgccacctgagggcaggtcgctgccgagatgtgactgcaatattttggctccagagcagctttatggaccacctggaggagaaggcagacctgagtgagctggtgaagaaaaaagaactctgcttcatccaccactggcgagagagatgccatcagtgagtgggaggccagggcacggcagggggagctacagggccgttggaggggccccagcgtctgagccctgtcctcccgcaggaaaacccatcaccttttatcagaaccagggggccgtgccaaagatgcrgcactgggaggaggacaccatcaggctggagctcagggaggagatgaaggta

SEQ ID NO: 350065 - DNA, 568 bp, Homo sapiens
aattataaaacctctaatatcattactcatatatatgatatacacagagatgcatcacctaggtcctccctgagagctgtgtcagtagacaggactcagytgtgagccccttcagacgtcacctcagctgcagagcttccccctgcctaaggtcctgaggttcccagttgtggtgcatatgcaatgactgattgaggtgaggcaaggaggcaggtgaaagaggtggggaggggacttggggcctataaagactcagtcatgtcattgcaatgtgaaaggatgccagtgggccattttatcttcaaagtcccctgtgagatgagccaaagctgtggtccaggacttcttttcagcccagctttttccctttccctcaatccagcttccttcttctccttttcacagtgccttggattcaagggcactccctagtatatatctccatgtccaagtctgcttactagagaacattgtatcatgaatgataccattcttcaaaaatatggggtactttgagtgaaaggagtggaacggtatagaagaacagctttggtagagtagttagaat

SEQ ID NO: 350066 - DNA, 585 bp, Homo sapiens
cagcagtcaataaggccactctagggaaaaatctttcagtatttccaytacacattctgtttacaataattcataaactggtaaaattcattctaagaaaacttggcaaataaaactttggactggaattggcatttctttctctgcttttcgttcccactgtttctttcttttatactacagtattcatattttaaaatgttttaaattatttcagaacattaagatagcagttacatattttaatagttatattattttaaaacgactctttaaaattaagttttagagaaactatattatggatagggctgatttacattttcaaattttctaaaatcagctttggttttagagctgattttttttttcatttctggaaaattatcaggtttaatcaaatacttttaaaatgattattatatattgccatctttaaataggtattttgattcttcctacagaaattaaaatgtattcagtggaactcacagtttaaaattctgtgtttctgatgaactctaacattccaatgttgccttctaagcaaactgaaagctgccttataccgaatgaggaagagca

SEQ ID NO: 350067 - DNA, 585 bp, Homo sapiens
cagcagtcaataaggccactctagggaaaaatctttcagtatttccatkacacattctgtttacaataattcataaactggtaaaattcattctaagaaaacttggcaaataaaactttggactggaattggcatttctttctctgcttttcgttcccactgtttctttcttttatactacagtattcatattttaaaatgttttaaattatttcagaacattaagatagcagttacatattttaatagttatattattttaaaacgactctttaaaattaagttttagagaaactatattatggatagggctgatttacattttcaaattttctaaaatcagctttggttttagagctgattttttttttcatttctggaaaattatcaggtttaatcaaatacttttaaaatgattattatatattgccatctttaaataggtattttgattcttcctacagaaattaaaatgtattcagtggaactcacagtttaaaattctgtgtttctgatgaactctaacattccaatgttgccttctaagcaaactgaaagctgccttataccgaatgaggaagagca

SEQ ID NO: 350068 - DNA, 585 bp, Homo sapiens
cagcagtcaataaggccactctagggaaaaatctttcagtatttccattacacattctgtttacaataattcataaactggtaaaattcattctaagaaaacttggcaaataaaactttggactggaattggcatttctttctctgcttttcgttcccactgtttctttcttttatactacagtattcatattttaaaatgttttaaattatttcagaacattaagatagcagttacatattttaatagttatattattttaaaacgactctttaaaattaagttttagagaaactatattatggatagggctgatttacattttcaaattttctaaaatcagctttggttttagagctgattttttttttcatttctggaaaattatcaggttkaatcaaatacttttaaaatgattattatatattgccatctttaaataggtattttgattcttcctacagaaattaaaatgtattcagtggaactcacagtttaaaattctgtgtttctgatgaactctaacattccaatgttgccttctaagcaaactgaaagctgccttataccgaatgaggaagagca

SEQ ID NO: 350069 - DNA, 601 bp, Homo sapiens
cacattctgtttacaataattcataaactggtaaaattcattctaagaaaacttggcaaataaaactttggactggaattggcatttctttctctgcttttcgttcccactgtttctttcttttatactacagtattcatattttaaaatgttttaaattatttcagaacattaagatagcagttacatattttaatagttatattattttaaaacgactctttaaaattaagttttagagaaactatattatggatagggctgatttacattttcaaattttctaaaatcagctttggttttagagctgattttttttttcatttctggaaaattatcaggtttaatcaaatacttttaaaatgattattatatattgccatctttaaataggtattttgattcttcctacagaaattaaaatgtattcagtggaaytcacagtttaaaattctgtgtttctgatgaactctaacattccaatgttgccttctaagcaaactgaaagctgccttataccgaatgaggaagagcacaaatactcggctgaatgaggtatcgcaaaagactgcatgcactttggagaaagacttaagttatt

SEQ ID NO: 350070 - DNA, 601 bp, Homo sapiens
cacattctgtttacaataattcataaactggtaaaattcattctaagaaaacttggcaaataaaactttggactggaattggcatttctttctctgcttttcgttcccactgtttctttcttttatactacagtattcatattttaaaatgttttaaattatttcagaacattaagatagcagttacatattttaatagttatattattttaaaacgactctttaaaattaagttttagagaaactatattatggatagggctgatttacattttcaaattttctaaaatcagctttggttttagagctgattttttttttcatttctggaaaattatcaggtttaatcaaatacttttaaaatgattattatatattgccatctttaaataggtattttgattcttcctacagaaattaaaatgtattcagtggaactcacagtttaaaattctgtgtttctgatgaactctaacattccaatgttgccttctaagcaaactgaaagctgccttataccraatgaggaagagcacaaatactcggctgaatgaggtatcgcaaaagactgcatgcactttggagaaagacttaagttatt

SEQ ID NO: 350071 - DNA, 535 bp, Homo sapiens
tttagttttttgaggaacctccaagctaatctccataatggctgtgctaatttacattcccaccaacagtgcacaagggttcccttttctctatattcttgccagcatttgttcttgtcttttggatataagccattttaattagggtgagataatatctcattatagttttgatttgcatgtctctgatgaccaaccatgttgagcacctgttcgtactgcctgtttgtcatttgtatatcttcttttgagaaatgtctattcaaatcttttgcccattcttattggattattagatttttttcctatagagttgcttaagctaattatatattctggttattaatcctttgtcagatgggtagtttgcaaatattttctcccattctgtgggttgtctcttcattttgttgattgtttcctttgctgtgcagctttttaactcaatgtgatcccacttgtccattttagctttggttgcctgtgtttacgaagtattactcaagaaatcaytacccagtgcaatgtcctggag

SEQ ID NO: 350072 - DNA, 539 bp, Homo sapiens
cccgtctgtgggagcagagtcgagatttgctggcaggtgtgccccctggggagctgcagtggtcctcgtctttctcctcgttgtagctgtagtggatctggctggtctgcaggcctccagagaagatggatgactgaagccattctagaaaatgcacacrcaaacatgaaagagaaactcaagtgcacaactcaaaataaatactaaaaaaaaaaaaagatgctcaactgaacactcaatttagaaggtgaaattcagcatcattcatatgaaagagctccacctaacatgtttacacaggttgacttataattcctctatctacgtgaacacactttctggtgattccacacgcctcaggcatggcatcagaactcaggatcgtagttccagtccaacattctctggatacctgtgctctgcctgcagctgcctggttccacaggtaccgtgtgaagactgaggtgcacattctaacagggaaggcagcaaagggcaccgctgacacaattaatcacaggatttcaagtccgaaactg

SEQ ID NO: 350073 - DNA, 536 bp, Homo sapiens
cattgtaatctatatacttaaataaaaactttaccttttataagtctttcaagagagtccaactgtgtagtaagcagtatttctttgttttttaatatctcaaatttaacttcatatagttctaactgaatttcataaaattgtattkctaattcatctacaacatttatatttttttcttgttctggaagatcttccatcttattttcatagaaaaaagaaaaataagttaaaacaaatagtatattaaaaacaaactttagaagcattctagctattttctattccttgttccgtactaaatataaaagagcaaataggaaagaaacactttttcatttcatctagtgatgctaatactttatcccatccttgaaacagagaaaaacatttaggttttgagaaacataaatggcaatgaggtattattatgtattgcatatcggtgtccccccaaaattcatatgttgacactgtaactcccaatgtgatgttatttggaggtgggtcctttggaagtaattaggttcagatta

SEQ ID NO: 350074 - DNA, 644 bp, Homo sapiens
ttggaagctctgcttgttcacaggtacagagcttttgcagaaccgactctgtacctggcagccttgaaggggcttggattcaaagcatattcttgagccacgccatctttaatcaaactgcaggtggaatttgtagctgttagaatagctcctattcctttcatttctttttctgtttttttactcttccatctcagcctaaaaagaaaaacacgttaatttgagccataggaatttagaatttgttttktcttttgcttagatatgtttgactaaagcttcctttttcacaggtttattttttccaacattttattatgaaaaaaatatatacagaaaagttgaaagaattttacagcgcgcacccacatattcaccacctaagattgtgccgctggcatcatcccacgtgctttatcaccgttctctccaccttttcatccttctattcatccatcagtccctcacattttttttgcaatgtttccaaggagacctctggacacttgcttctcaacattgcagcgtgtaggccctcagcaggagttcagaagtgcacatttcacagtgaaccttctgagagtgttgacagatcacagcttttctttttgtctaatgaaaagggcttgctggccattgggtgt

SEQ ID NO: 350075 - DNA, 562 bp, Homo sapiens
ttgtattgcctctttactaaaaccaagcacttcactctgctttttcaggtaggatttcttggcctactccttgacataattactaaaaactaggctatctggttttytaagcatcaacaggatgctaacaaaccattgtaaagaggacacgggacataagaactaacactggctgggcacagtggctcatactgggaggctgaggcgggcggatcacaaggtcaggggttcgaaaccagcctgaccaacatggtgaaaccccatctctactaaaaatacaaaaattagctgggcgtggtggcatgtgcctgtaatcccagctactccggaggctgaggcaggagaatggcttgaacccaggacacggaagttgcagtgagctgagatcgcaccattgcactacagcctgggtgaagagtgagactccatctcaaaaaaaaaaaaaaaaaaaaaattcgaatgaatataatgaacatgtgcttaagaattttttgtggtttttttttttgtctgtttgtttgttttagagatagagtctcactgtgtagccatggctggcctt

SEQ ID NO: 350076 - DNA, 605 bp, Homo sapiens
tttttcatccattcacccactgtattttttttattatagcatttagtcaatatacattcagcattattagtagtaagcaaggacttacttctgccattttgttatttgttttctagttgttttgtggtcttttcttccttttttcttcccttcttgtgattgttttactgaaggtgattttctctgatgatatgatttagtttcttactttttactttttaagtatccattgtatggtttttggtttaagtttaccaggaggyttgcaaatactatcttatgccccgttatttaagctgatgacaacttagtattgttcccataaacaaacaaacaagcaaaaagaaaactaataaaaattctataccttatttgttcccccactttttaactttttgttgtttctatttatatcttattctactgtctatgtcttggaaagttgttgtagttattatttttgattagtacatgattgaatctttctatgaagataagagtagtttacacagcacagctgcaatgttatagtattctgtgtttttctgtgtacttagtaacaccagggagttttgtaccttcagattatttcttattactcatta

SEQ ID NO: 350077 - DNA, 605 bp, Homo sapiens
tttttcatccattcacccactgtattttttttattatagcatttagtcaatatacattcagcattattagtagtaagcaaggacttacttctgccattttgttatttgttttctagttgttttgtggtcttttcttccttttttcttcccttcttgtgattgttttactgaaggtgattttctctgatgatatgatttagtttcttactttttactttttaagtatccattgtatggtttttggtttaagtttaccaggaggtttgcaaatactatcttatgccccgttatttaagctgatgacaacttagtattgttcccataaacaaacaaacaagcaaaaagaaaactaataaaaattctataccttatttgttcccccactttttaactttttgttgtttctatttatatcttmttctactgtctatgtcttggaaagttgttgtagttattatttttgattagtacatgattgaatctttctatgaagataagagtagtttacacagcacagctgcaatgttatagtattctgtgtttttctgtgtacttagtaacaccagggagttttgtaccttcagattatttcttattactcatta

SEQ ID NO: 350078 - DNA, 530 bp, Homo sapiens
atatcagtgttttatattgacctactaaacaaaatctttggatatattttaaccagttaagaagccatataaatattctctaatctatttaatttttccatgtagcataatggacacatgatatagtctgtcagtgccttgatgaaattcagatacacaatgtcaacagcttctctctttgatgtgaaatgtgtggcaattttgttttccataaaagttaggcttggcataatttgtttttagtgaatccatggtagctcctgctaataattatctgtttttccaaagcttacgtatttttgtttaccagtctgacccagaattttactgcygattgatattgatattagccttaataaagaaagtattctatataactaattaagcctatcttcccaagctattgataatgacacagcacagttaaagtaagaacattctttttggcattgggataattttccagcctctctgttgtctgattccaccaacaaataaatgagcttcatgacttccatcactgccacagg

SEQ ID NO: 350079 - DNA, 560 bp, Homo sapiens
ttatgcccaggtagactctgtgttttaggttcctcaaaaaagaccagtgtaaatgtaaacagtattaagcacacaagcatgattagagaaaaggttggtgttaatatttttttaacagaaagcaattacagtttaatcctctcattacaaaagttgcttcaaagaatgtgaagaaaagaatatatctgataatatattactcatttataagctgctactagtgyagaaggaattctttctttaattggaagaaaaaacaaagagattcccaggatccttgttacccttcatgaatgctggcagggcactttcacatccatttagtccttacttttatgtaatattctgttctcaaaacattgctgggaaagtgagaaggttatagatggtaaaactcagggtcatagcagagaggaaactttcccgttcaaggaatagaacattggcctcttgaattccagtccagggtgtttactgatcccccgctgctacttgtactagaactgacattcaaaatgaagtaaaaaataaaagtaagacagattaaacaaacaaaaaaa

SEQ ID NO: 350080 - DNA, 528 bp, Homo sapiens
tggaggctggggaggaagaataacaaagcattgaggatatggagctctgagaagtttgatccctcctctgtgtgattaatgttaagaaagaccaaatcaaggtaactttaaagcagatatgctggatatccttccatttgtatacctacctatccatctttattttttttgttttttagattttttatttccataggctttgggggaacaggtggtattttgttacatgagtaagttctttagtggtgatttgtgagattttggtgcacccatcacctgagcagtatacactcaaccccatttrtagtcttttattcctcactcccttccaccctttcccctgagtcctcaaagttcattgtatcattcttacacctttgcatcctcatagtttagctcccatttatgagtgagaacatacgatgtttggttttccattcctgagttacttcactgagaatgatagtctccaggtctatccaggttgttgagaatgccattaatttgttccttttatggctgagtagt

SEQ ID NO: 350081 - DNA, 537 bp, Homo sapiens
cttccatttgtatacctacctatccatctttattttttttgttttttagattttttatttccataggctttgggggaacaggtggtattttgttacatgagtaagttctttagtggtgatttgtgagattttggtgcacccatcacctgagcagtatacactcaaccccatttgtagtcttttattcctcactcccttccaccctttcccctgagtcctcaaagttcattgtatcattcttacacctttgcatcctcatagtttagctcccatttatgagtgagaacatacgatgtttggttttccattcctgagttacttcactgagaatgatagtctccagktctatccaggttgttgagaatgccattaatttgttccttttatggctgagtagtattccatagtatatgtatatacgacaatttctttatccacttattgattgctgggcatttgggctggttccatatttttgcaattgtgagttgtgctgctataaacatgcgtgtgcaagtgtctccttcatataatgac

SEQ ID NO: 350082 - DNA, 537 bp, Homo sapiens
cttccatttgtatacctacctatccatctttattttttttgttttttagattttttatttccataggctttgggggaacaggtggtattttgttacatgagtaagttctttagtggtgatttgtgagattttggtgcacccatcacctgagcagtatacactcaaccccatttgtagtcttttattcctcactcccttccaccctttcccctgagtcctcaaagttcattgtatcattcttacacctttgcatcctcatagtttagctcccatttatgagtgagaacatacgatgtttggttttccattcctgagttacttcactgagaatgatagtctccaggtcyatccaggttgttgagaatgccattaatttgttccttttatggctgagtagtattccatagtatatgtatatacgacaatttctttatccacttattgattgctgggcatttgggctggttccatatttttgcaattgtgagttgtgctgctataaacatgcgtgtgcaagtgtctccttcatataatgac

SEQ ID NO: 350083 - DNA, 537 bp, Homo sapiens
cttccatttgtatacctacctatccatctttattttttttgttttttagattttttatttccataggctttgggggaacaggtggtattttgttacatgagtaagttctttagtggtgatttgtgagattttggtgcacccatcacctgagcagtatacactcaaccccatttgtagtcttttattcctcactcccttccaccctttcccctgagtcctcaaagttcattgtatcattcttacacctttgcatcctcatagtttagctcccatttatgagtgagaacatacgatgtttggttttccattcctgagttacttcactgagaatgatagtctccaggtctatccaggttgytgagaatgccattaatttgttccttttatggctgagtagtattccatagtatatgtatatacgacaatttctttatccacttattgattgctgggcatttgggctggttccatatttttgcaattgtgagttgtgctgctataaacatgcgtgtgcaagtgtctccttcatataatgac

SEQ ID NO: 350084 - DNA, 590 bp, Homo sapiens
aaaacactcaggctttttgagtttccagagttcttgagctggttctttctcatctgtgtgggctggtgttcctctaatctttgaagttgctgtcmtttggatggggcttctgcttttatatcttttgatgccgtttagggtttgactgtgctataggttggattcagtcaactggcttcatttctggatgatttcaggtagccaaggcttagttcagcattcctgggctgtgtgctctaatcctggagggctgagaccaggccctctgctttgttgtctcgcccctcaagcttatgtacctgctggactggaggggctgagatgttcctgatctgccagcaataacattgttgggaggtcctggcaaaagtgcttaatcagggcagcagctgcagggtttgtgcgtatgcatgccagcagcagaagggcagccggtcagttgggtccacatgcatgccagcaaagcagtggaaggatgctgtgtgtgggtacacccagtagtgatccttctgcagaagctctctgatggctaggcagggtctgccagtaaagcagacatggtgatggctgctgggaagtgccctggtttg

SEQ ID NO: 350085 - DNA, 590 bp, Homo sapiens
aaaacactcaggctttttgagtttccagagttcttgagctggttctttctcatctgtgtgggctggtgttcctctaatctttgaagttgctgtcatttggatggggcttctgcttttatatcttttgatgccrtttagggtttgactgtgctataggttggattcagtcaactggcttcatttctggatgatttcaggtagccaaggcttagttcagcattcctgggctgtgtgctctaatcctggagggctgagaccaggccctctgctttgttgtctcgcccctcaagcttatgtacctgctggactggaggggctgagatgttcctgatctgccagcaataacattgttgggaggtcctggcaaaagtgcttaatcagggcagcagctgcagggtttgtgcgtatgcatgccagcagcagaagggcagccggtcagttgggtccacatgcatgccagcaaagcagtggaaggatgctgtgtgtgggtacacccagtagtgatccttctgcagaagctctctgatggctaggcagggtctgccagtaaagcagacatggtgatggctgctgggaagtgccctggtttg

SEQ ID NO: 350086 - DNA, 568 bp, Homo sapiens
ataaagaaaatgtggtacatatacacgtcaaaatactaagcaggcataagctattgaaataataaaaagaaaataagaaaaaataaatgaatgaaaygtgaaaaaagattgatgagaataaaattgcttgctttgttcattaaaaaggaaatcagagatgatacaaataaatggaataatatttcttgctcattggttggaagaatcaatattactgaaatggccatactgcccaaagcaatctacagattcaacactattcctatatcaagctaccaatgtcatttttcacagaacttgaaaaattattctaaaattcatacagaacaacaacaacaacaaaaaaacagtctgaggagccaaagcaattatatgcaaaaagaataaagctggaggcatcacattagcctatttcaaactatactagaaagccacagtaaccaaaacagcatggtactggtacaaaaacagacacatagaccaatggaacagaatggagaccagaaataaagcctcacacctacaaccatctgatcttcaacaaagtggataaaaatgagcaatgggg

SEQ ID NO: 350087 - DNA, 568 bp, Homo sapiens
ataaagaaaatgtggtacatatacacgtcaaaatactaagcaggcataagctattgaaataataaaaagaaaataagaaaaaataaatgaatgaaatgtgaaaaaagattgatgagaataaaattgcttgctttgttcattaaaaaggaaatcagagatgatacaaataaatggaataatatttcttgctcattggttggaagaatcaatattactgaaatggccatactgcccaaagcaatctacagattcaacactattcctatatcaagctaccaatgtcatttttcacagaacttgaaaaattattctaaaattcatacagaacaacaacaacaamaaaaaaacagtctgaggagccaaagcaattatatgcaaaaagaataaagctggaggcatcacattagcctatttcaaactatactagaaagccacagtaaccaaaacagcatggtactggtacaaaaacagacacatagaccaatggaacagaatggagaccagaaataaagcctcacacctacaaccatctgatcttcaacaaagtggataaaaatgagcaatgggg

SEQ ID NO: 350088 - DNA, 260 bp, Homo sapiens
tcttattgacttatagtactgcagaaatagggtcactcagaaacataacatacttggtttgttcagaggcatgtatgtacctaacagttcagttctatgatggctgtgacctgaaatcaactaagtattygtgatctatcacaaaaaatatgaatttttacttatataataacaatatattttacatatttatgtaagtgccatgtgacagttcaaccgaactttaattgcatactactttaccattccacacagttaga

SEQ ID NO: 350089 - DNA, 557 bp, Homo sapiens
atggacagatgtgctataaattctgcggcagaaaagtactatgagaattcttaaagaaatctgacatttaaaaccaatagcgtggctgggcatggtgtcctctgcctgtactcccagcactttgggtgatcgaggtgggatgattgcttgcatctaggagtttgagaccagcctgggcaacatggtaagaccgtgtttwaaaaaaatttaaaaataaaaaataaagccaatagcatctattttgaaataggggaaaagcctattctgataggataaatacaatgacattatctgtatcctaaacaacatagatttcaccagtataaaataagatgctctgtgtatgtgtgcatacctaaaaggtattcgtaggaacacacaatttagttgggaaatttaaaagaacatgaggatttcatataaactcctcacacaaaaaggatcaaatggcctttagaaatgcaagtcatattcatgataggagaatacgaaagtcctattacctcttttattcctgccctcctgcgtcatttcttctacattaacagcacaagtat

SEQ ID NO: 350090 - DNA, 548 bp, Homo sapiens
aggtacctaaagcaaatttcacagcttgaatggtataattatgtaagccaataaatttcttttttggttttttttttttgacaatatgcattagagtgatgatgtattttttaacaataaagatcatttttattaawataaagcaaaataagtttgcatttttccttctgtgccatttcccaccattattattctaagaaaacatacaaacaatagcaactatgcatgagtaatgtggaatatttctttcaatttcactacaaaatgtatggattttaataagactgttatatagcatctatcttagaagcaaaatctgaatcaaccatgtgtatcaagcaatctgactatgtattaggcaaatacagtcagaaacttgcattctggttacaaaaaaaatatgagtctcaacagaaattctttttccatgtttcagcaaaatatttaaggagttttttgtagtatgccaaataggagtgctgagataaagttaggttcgtcctataaaatgctatctctaatttatatggcctatgtagacacagtgt

SEQ ID NO: 350091 - DNA, 548 bp, Homo sapiens
aggtacctaaagcaaatttcacagcttgaatggtataattatgtaagccaataaatttcttttttggttttttttttttgacaatatgcattagagtgatgatgtattttttaacaataaagatcatttttattaaaataaagcaaaataagtttgcatttttccttctgtgccatttcccaccattattattctaagaaaacatacraacaatagcaactatgcatgagtaatgtggaatatttctttcaatttcactacaaaatgtatggattttaataagactgttatatagcatctatcttagaagcaaaatctgaatcaaccatgtgtatcaagcaatctgactatgtattaggcaaatacagtcagaaacttgcattctggttacaaaaaaaatatgagtctcaacagaaattctttttccatgtttcagcaaaatatttaaggagttttttgtagtatgccaaataggagtgctgagataaagttaggttcgtcctataaaatgctatctctaatttatatggcctatgtagacacagtgt

SEQ ID NO: 350092 - DNA, 600 bp, Homo sapiens
ggcatagtggctcacacctgtaatccmagcacttagggaggcaaaggcatgaagatagcttgagcccagaaatttgagaacaggctgggcaacgtagccagaccccattcttcacagaaaggaaaaataatgataataaatttccatttcactgaggagcaggtctgcagagttcttcatgttttcatatcagaagtgaaacttctagtagctttttttgtagattcattagataatatgcttaaatgattatgtcctataggaagaaagaccattttaattcttcctgtgcaatatggatgctcttttttctttctttattgcactgagtagacttcacatataatgttgaatagacatggtgaaagcagacaccattgtcttgttcctgatcttagggagaaagggttcagtctttcaacattaaatatgatgataggtgtaggtttttcctagatgaaatttatcaattttgggaagttttcttctactcctagtttgctaaaagtttttaacaggaacgtcagaatttttcaattgttctttctctgtctattaggctagttatataatttttctttttagtgtgttgacacagta

SEQ ID NO: 350093 - DNA, 600 bp, Homo sapiens
ggcatagtggctcacacctgtaatccaagcacttagggaggcaaaggcatgaagatagcttgagcccagaaatttgagaacaggctgggcaacgtagccagaccccattcttcacagaaaggaaaaataatgayaataaatttccatttcactgaggagcaggtctgcagagttcttcatgttttcatatcagaagtgaaacttctagtagctttttttgtagattcattagataatatgcttaaatgattatgtcctataggaagaaagaccattttaattcttcctgtgcaatatggatgctcttttttctttctttattgcactgagtagacttcacatataatgttgaatagacatggtgaaagcagacaccattgtcttgttcctgatcttagggagaaagggttcagtctttcaacattaaatatgatgataggtgtaggtttttcctagatgaaatttatcaattttgggaagttttcttctactcctagtttgctaaaagtttttaacaggaacgtcagaatttttcaattgttctttctctgtctattaggctagttatataatttttctttttagtgtgttgacacagta

SEQ ID NO: 350094 - DNA, 600 bp, Homo sapiens
ggcatagtggctcacacctgtaatccaagcacttagggaggcaaaggcatgaagatagcttgagcccagaaatttgagaacaggctgggcaacgtagccagaccccattcttcacagaaaggaaaaataatgataataaatttccatttcactgaggagcaggtctgcagagttcttcatgttttcatatcagaagtgaaacttctagtagctttttttgtagattcattagataatatgcttaaatgrttatgtcctataggaagaaagaccattttaattcttcctgtgcaatatggatgctcttttttctttctttattgcactgagtagacttcacatataatgttgaatagacatggtgaaagcagacaccattgtcttgttcctgatcttagggagaaagggttcagtctttcaacattaaatatgatgataggtgtaggtttttcctagatgaaatttatcaattttgggaagttttcttctactcctagtttgctaaaagtttttaacaggaacgtcagaatttttcaattgttctttctctgtctattaggctagttatataatttttctttttagtgtgttgacacagta

SEQ ID NO: 350095 - DNA, 556 bp, Homo sapiens
gcattagctaacatgtactaaactctgaatctgttctaactactggtctaaatactatctccttaaattctcagagcaattctgaagtatcattacctcaattttcccaagaagaaacaggtacaaaggcacacaaaagagcagtggcagaacctaaatccaaacttagtcatgcttttaactactgtatcatattcatcagggttcttctccatgtgttatcaggtgccttgccccaagacagcccgatttcttagccagaaaatggggctagacatcaaggcatagtggtccccgtgtagaacactggagtcrtgtcaaatatccctgcttttgcctgggcttggaatagaggcctgtggatggtaacataaattcagagccctctctcacttatgataccaggatgcagtaacaatctcttttccacacctgactgcatgaaggatttctggttgatgcaaatctggtgccattcttatttctaacctgttcactttcattgaaaaggcaaccattgattgttaagaaagaaacagtgtggggaacagcagga

SEQ ID NO: 350096 - DNA, 599 bp, Homo sapiens
ctctccaacaaaggcagcaagaacatacaacaggggaaggaaagtctcattagtaaatagtgctgggaaaacagaataacccatatgtggaagaaataaactcgtcccctatctctcatcacacacaataataaaatcaaaatggattgaagacttaaatttaagacttaaaattatgaaactactggaagaaaacattgcggaaatgctccatgatactggcctgggtacagatgttttatrtaagactcaaaagcatggacaaccaaagtaaaaattgacaagtggattacatcaagttcaaaagcttctgcaaagaaaatgaaacaatcttcacaaagtgaagagacaacccacagaacaggaggaaatatttgcaaaatatccatacgatatggtttggctgtgtacccacccaaatctcatcttgaaatgtatttcccataatccccatgtgtcgtgggaggtaattgaattacagtggcagttaccctcatgctgttcttgtcatagtgagtgagtgagatctgatggttttataagaggctttccccccctttacttgacacttctctcttctgccagcatgtgaagaagga

SEQ ID NO: 350097 - DNA, 570 bp, Homo sapiens
cattgggtggattttgttaggacagtaaaaatatatgtgttgttttggaatgattgatctggtgatctgtgcaggatggagtacaaaggggaaagagctggagcctgagagttgatttaggcccgttgattttacatgactcttcaatcaggtgcaaggtctatgagtcaattggaaaagctggctagttctcaggagaagaaatcatcagtatgtgaatgtttggaaggccaggcaygggtaaaggagaggtctgaaccttgtctttcaagtgtagagtaaagagaagggtacattagacttcctttgaactcctcgagggcaagtaccaagtctccatggcttccctggcacttaacagcatttgacacacagggagagctcattaaggggtatgtaagatataaggaatggaggagatggctctctcttagggacagcaagaaagcctgtatgtctccattgccctctgtcaacttgttgactagtaattcccacaggcatgtgttaaaatccaggcatgtgttaacattgttgccagttggccattcaacaagtactccttacgag

SEQ ID NO: 350098 - DNA, 570 bp, Homo sapiens
cattgggtggattttgttaggacagtaaaaatatatgtgttgttttggaatgattgatctggtgatctgtgcaggatggagtacaaaggggaaagagctggagcctgagagttgatttaggcccgttgattttacatgactcttcaatcaggtgcaaggtctatgagtcaattggaaaagctggctagttctcaggagaagaaatcatcagtatgtgaatgtttggaaggccaggcatgggtaaaggagaggtctgaaccttgtctttcaagtgtagagtaaagagaagggtacattagacttcctttgaactcctcgagggcaagtaccaagtctccatggcttccctggcacttaacagcatttgacacacagggagagctcattaaggggtatgtawgatataaggaatggaggagatggctctctcttagggacagcaagaaagcctgtatgtctccattgccctctgtcaacttgttgactagtaattcccacaggcatgtgttaaaatccaggcatgtgttaacattgttgccagttggccattcaacaagtactccttacgag

SEQ ID NO: 350099 - DNA, 631 bp, Homo sapiens
catcttagggaagtctgaaaatagaagagaagccaaaagaaacaaactgaaaaaccgattttagagaaaacaaagataattcagagaaaataagcttgtatcctctgagatatgtaaagagatattgcacctataaggtaagaacaagatgctacgtaaaaggaacaatcatttaacaagaaaatgttctggaaaattaaatatatgattgtcaaaagggaagaaaattcaatgaaaggcttggaagctaacataaagaaaatctagagagcagaataaaaatgttatgagatggaaatatgagaaaaaaagagaagaggcaaagaagcatgatttaagaggttctgcatccaacaaataaatctagaaagagaaaacaggttaaaatggagagaaaagtgccgtcttaaaaaaattataatacaaaagaaggtgccaaaggtagaagacaaaagtcttcagaaatactgggccattgagtggccagtacacaaatgtttaaacagatccataagtaagcataycattatacaattttagaacaccaacaataaagagataaatgctcaatcatctagggatcatcttcaaaggaaagggaataaaaccaaggtcagacgtgtcattagca

SEQ ID NO: 350100 - DNA, 626 bp, Homo sapiens
acattaggcacccttagaaatgctaaggataaagactgcagaccatgacaaatgcttactgtgtgaagggaaggcaaaagcaatacaagattgcttcgatattctgattacagctatgcaaaatgcactatatgctgggtcctagagaagcaaggatgagcaagactgtcccttccactgaagagctcacagtccagctcagggagagaaatatagcagcagactgttttggtgcaatgtgaaaaatgtttccatagaaggggatgcagcaggtagtgggagctcaaggcataaagccacaggaaggcttcttggaggcaatgatrtcccagctgaaccttgaaggactgagtggttggtcctgctgatggagttggcatctgctggacttggagccccaagcaactgttcaagtattgctgactggtcctccacctgaaggctgagcctcctactcttggcaaactgtcaattcaaaagtaaagcaatgttatgtgcgtggtcctatatgttcctcaataaccctctgaggtgggtatattacagcttattccacagcaggaggaagcaaagactaaggaggctagatctcttgtgttgagtcataccagcttcaaaaccacaac

SEQ ID NO: 350101 - DNA, 599 bp, Homo sapiens
tcaaacattttcccctatacttcactgcctgttaacattatttcatttattcttacagtgacccaaacacccattattattatccttatggtggcagactatattttccagaaacagctgcaccccatcccagagccttaccatgtccccagcaagagctgcagcctgtgtctcctctccttgaacctggatgggcctcagtgagtgtgtttaacaatagatgacccagagattatgctgtgaagaagccaagggcacacgaggaggctgcaagtagatgtccctgctgacagtcccttctgmaatcccagccaacagccagcagcaagcaccagttacatgagtgtggaagctccgggtgactccagcccagccaccaactaactgcaactccatgagaggtcctgcctaagaaccgcccagctgagcccagaaccagatgagattataataataaatgagtgttgatggtttatactaccaagtatgacatggcttgctatacagcaatacaaaaccagaggctcaccttaaaaataagtaactgtggctcaaggttatgaaatgacctgtccaaaggtgaaaggcaaaaagctaaa

SEQ ID NO: 350102 - DNA, 609 bp, Homo sapiens
cttgctctgtcctccaggcttgagtgcagtggcacaatctcagctcactgcaatctctggctcccaggttcaagcaattctcgtgcctcagcctcccaagtaactgggattataggcatacaccaccaagcctggctaatttttgtatttttagtagagacggggtttcatcatgttggccaggctggtcttgaactcctgacctcaggtgatctgtctaccttggcctcccaaagtgctgggattacagatgtaagccaccaagtctggacagcatttgtccttttgtgactggattatttcactcagcatamtgtcctcacggttcatccatgttgtaacatatgtcagaatttctctcctctgtaatgcgaataatatcacattgtatggatagacctcattttgtttatccattcgtctattagtggacacttgtgctgcttccatgctttagctatcatgaataatgctgctgtacaaaaatactgaacatagctgtacaaatatctcttcaagaaagtgtttttaattcttttggatctataccctgtcttagttcatttgggctgctttggagtgggtaatttataagccataggaatttat

SEQ ID NO: 350103 - DNA, 479 bp, Homo sapiens
gaggcctgagacccaacattggacagcacagtgcctaggcagggagcccacaaagacttctcaggtgtagccaggacacctctactctggggatctcgagccaacataggtggtggtcgggagaaagaatggatggaaggtcccattgttgtgcctgatgcaggtactcactctgcagtctcagcccctcacatgcccctctcacccccgagggtggtcctgcaagtgaagcacacacagacccccttccttcagccctgtgatttgagtgcggctctggtggtcgcctccatgmgctttgtcaataccccaccaccagtacccacagtggggtctcactgctcctctgaagccacagaagactgcgttgcccaagagcaggtgcaacccggagcatgggatgtggcattccccaaaacagtaatcacccaagagatcaggagcccctgcctcccatccttcaagggaacacccaaagg

SEQ ID NO: 350104 - DNA, 294 bp, Homo sapiens
tgaggagtccccgtggcctcgcctttcccatttgagaatcagcgtcttggcgctcccccgaagtgtgccttcatggcccaagcctagcagcgggaggacaggtgcccccacaagagtccggccccccagaaaaaacccatcacagggccctctctctgctggggcagtttcctttcccttcactttgcagtgtatccatttcattctagacaaagtggtgggtttgatgagacaagaacaaagcgaagaacaaagcggcaraaaaaatcagctcaggcctgagtctgatcactt

SEQ ID NO: 350105 - DNA, 437 bp, Homo sapiens
tcagctttttttcaagaaagtctatgttatttctctgaaggacatctagaaattcagaatgcacratgcccaaaagggaaagaacacggagcatgtcacagcaaacactgatcccacatggcattattattattaatcactaacttgactacagtcggtgggaatgaatcgctctggggggggtggacaatgggacttcaggacatcacagtcggagtgccacggctgactcataggcgactttggacaagtctgtttgcccttttgggactcagtcttcccctctctaacatggaaagcctgaaggatgtgactcacaatgaccgttttaatctagtattggcagatgtcccagattttgccaccgtgggaccaatgttatcacatagtacagaagccaatgtcctctgggttctgatcacctgggtgcagactgt

SEQ ID NO: 350106 - DNA, 437 bp, Homo sapiens
tcagctttttttcaagaaagtctatgttatttctctgaaggacatctagaaattcagaatgcacaatgcccaaaagggaaagaacacrgagcatgtcacagcaaacactgatcccacatggcattattattattaatcactaacttgactacagtcggtgggaatgaatcgctctggggggggtggacaatgggacttcaggacatcacagtcggagtgccacggctgactcataggcgactttggacaagtctgtttgcccttttgggactcagtcttcccctctctaacatggaaagcctgaaggatgtgactcacaatgaccgttttaatctagtattggcagatgtcccagattttgccaccgtgggaccaatgttatcacatagtacagaagccaatgtcctctgggttctgatcacctgggtgcagactgt

SEQ ID NO: 350107 - DNA, 631 bp, Homo sapiens
catcttagggaagtctgaaaatagaagagaagccaaaagaaacaaactgaaaaaccgattttagagaaaacaaagataattcagagaaaataagcttgtatcctctgagatatgtaaagagatattgcacctataaggtaagaacaagatgctaygtaaaaggaacaatcatttaacaagaaaatgttctggaaaattaaatatatgattgtcaaaagggaagaaaattcaatgaaaggcttggaagctaacataaagaaaatctagagagcagaataaaaatgttatgagatggaaatatgagaaaaaaagagaagaggcaaagaagcatgatttaagaggttctgcatccaacaaataaatctagaaagagaaaacaggttaaaatggagagaaaagtgccgtcttaaaaaaattataatacaaaagaaggtgccaaaggtagaagacaaaagtcttcagaaatactgggccattgagtggccagtacacaaatgtttaaacagatccataagtaagcatatcattatacaattttagaacaccaacaataaagagataaatgctcaatcatctagggatcatcttcaaaggaaagggaataaaaccaaggtcagacgtgtcattagca

SEQ ID NO: 350108 - DNA, 604 bp, Homo sapiens
cctggtttttctctgtggaaactttctgaatgtcatctctgttgtactgaaatgttataatcatggtaggccttggtaggaatcagttttcattaattctgccagttattagatgagcttttttaatgggaaacttatgtcctacatttctgaaggattttcatgaatcgttctatggtgatatccttcgttttctgtattctgtctttctggaattgttcatgttgtatgtcctgcactgattttcctattctcttttaaaatcttattgtttatagataaaagtttctcgtatctttctacagatatgaatgatatatttctgtttttagattttgaagttttctcttccccctatayggtatgcttccttcacgttccttttattgcttcattttgatctgcatctttgctgttagtgattttcctcaagtatctgatgtccttgggccctcatttaagagtgaaggtacaagaaacagatcagaaggtctgaatttgtgggtggggcatattgggtttggatttcacaatatctggtgtggttggcccatttgattagggagtctcaatgtcagtatctttagccaatgaatttttgatg

SEQ ID NO: 350109 - DNA, 516 bp, Homo sapiens
gtcttgatgacctgtctagtgctgtcagtggattattgaagtcctccactgttattgtgttgccatctatctcatttcttaggtctagtagtaattgtttcataaatttgggagctccagtgttgggtgcttatgtatttgggattgtgatattttcctattggactagtccttttatcattatataatgttcttctttgtctcttttataaccgttgttgctttaaagtctcttgtctctgatataggaatagttactcctgcttgcttttagtttccatttgtgtggaatatcttttcccacccctttaccttaagtttatatgagtccttatgagttaggtgagtctcttgaaggcrgcggatacttagtgaatttttatccattctaccattctgccattctgcatctattaagtgaagcatttaggccacttacattcaatattagtattgagatgtgaggtactgttctattcatcatgttagttgttgccttaaaaaaccctggttttt

SEQ ID NO: 350110 - DNA, 564 bp, Homo sapiens
agtgggagatgatgtttaaaagtgaaccatctcagccaggcacagtggctcacgcctgtaatcccagcactttgggaggccgaagcaggtggatcatgaggtcaggagatcgagaccatcctggctaatgcagtgaaaccctgtctctaataaaaatacaaaaaaattagccggaccggtgatgggcgcctgtaattaccccagctactygggaggctgaggcaggagaatggcgtgaacccgggagacagagcttgcagtgagcctagatcgcgccactgcactccagccagggcaatggagcgaaactctgtctcaaaagaaaaaaaaaaaaagtgaaccatctcagccaaatttatcacatgaagtgctctactgacctgttgagctgtagatcttgagggctgaaagtcttttccctcttccatgacatttctctcttcatttggctatcagagaataaagcaatgatgaaatgagatattctgaaatcataatttacctatgaacttggcctaaatcccagatatcagctcttaattttaaaagaagacagcagttcaa

SEQ ID NO: 350111 - DNA, 544 bp, Homo sapiens
tgctctgtggagaatgatctgtagtggggccagaatggagaaagggaggctgatgcaagagatgaggatagccttgactagagtagtggcagtgggaaatggaggattaaaatgagatttatgaaggcaaacaatcagtatgttctctgccagtggtgtttttttttttgttttttttttttttttgtaaaattgggataatcttcgtgtttacctcatgggttgttgtgagtattaaatgggctgaatgtrtaaagtacttagctcagtcagtattggcatgtagtaaatagctaataaatggtagctcttataattactgttattattactacagctatttgattactgttgttgttattactactgctattggctagatctggaggatcagggagaatttaggaatggctgtaagatttctggcctgtatggcctactggatgatgctgagatagggaacagaaaatgcaggtttgagacaagggaaagttgatgggttctgacttggcagtattcaagtacatgagagaggttgagtaat

SEQ ID NO: 350112 - DNA, 588 bp, Homo sapiens
caaacacctaatgaacctgccattcagcagattgggagctgggcacgggagatgcaggagagaagaaacaatgtcagttctccaaaacccctagtctagactatctggcagataaattaaccaggaaatgggttttgatgtgaggatggtcatgggagggagcatacaatatacagtgtggagtggccagcccaacaagaggggtccyttcccagaggagaagacacagctgcatcttgaagaatgagtagatgtgctcacatgagaaaggcccctctttttttgtccatttggagaactgctactcatctgtcaaggttcagcttgggtctcctgttagcctctcttcctcactaattctagaggtcagggactgtgactcatccctttgtctccagtgcccagcccggggcctaacacagagtagccacaaatgtttcctaaagcgagtgaaatggacttgcaggcagtgggagtagcatgggcaaaggcatggaggcatgatcagcatggggctttgcagagaactacagtctgtgtgtgtccgtggggcggtctaactgatgttttgtatcaataggaaaactg

SEQ ID NO: 350113 - DNA, 561 bp, Homo sapiens
caatctatagagagccttgaatataccagtctaagggatcaagagggagccatgagagtgctgagcaaagctttgacataatttaaatgacgctttaggaagctaaactggacaaaattatccagtgatccatttatatacaccaatatgactccaagatacagagtaacaatcaacacaattttctggaggataaactgcaatctaatttactcccagcgtggatccaggtttcgcagctgaaagtacgtatcagttttgaggccctctttaagataaaaaattaaaattaaaaatcaaaaaaaggtacaaaagtgaacrcttatttacaaggaggaaagaaattacaacatgcccatggctactccaaaccattcaattcaagaagtgagaaggaggggatgttagaatggaaagaggtaggaatcttaaccaattatagttattatatctgacttttgccaactgtacaaaaatatatgaccatgtgggacgacgcatgagctttgagagaatccctgcacaggaggagccatgaagcccaggcctcctagcctcatg

SEQ ID NO: 350114 - DNA, 578 bp, Homo sapiens
gcagtgtagtctaatggtcaggcacatacactttgaggacatagracatagactcataatcccagtgcagccatttgcaaactagggatcctggacaaattacctctctgtgtttcagtttgctcacctgtaatatggagacagtaatactatctaattgagagtgagagatagatttttttttagatggagcctcactctgtcgcccaggctggagtgcagtagtgtgatcttggctcactgcaacctctaccttctgggttcaagcgattctcctgcctcagcctcctgagtagctgggactacaggcgcacaccaccacgtctggctaatttttatatttttaaatagagatggggttttaccatgttggccaggctggtctcgaactcctgagctcaagtgatctacctgcctcggcctcccaaagtgctaggatcacaggcgtgagccaccgtgcccagccagagggatagatatttatgtagagattatatatagatatatttttaaggactaaatgaaataatatctgtaaagaaccaagaataccaagaacagtgcctgacatttccagc

SEQ ID NO: 350115 - DNA, 607 bp, Homo sapiens
cagggctgctggagatgaaaagagagggctggagcaatttggaaggcttcctggagggggaggtgggacttaaaggactggttgacccaagaaaaagggcggttgtgtttccaggctgctatgtgcagacatgagagagatggggtttgcctttggacatcataccagggcacagggctgtcaccaagaccacactgggggtactgaggagagggagttaaggggcaggagagcctcgcccatccaaagggccaggctccacccataggacccaagccagcaagatcaaaatctaatttactcattaggcatgttttttctgtacaaatcaaatcatgggctatttttccacatcataaatattgttttaaactcttgctcaygggcaattagattacaagcatcgcctggtgagctatacgccagcacatttggcgtgtctctggctgcttagtgagcaatttcctttttaaatgtttcccaatgattttttaagggtctttgaaatcttctccctagtgatgtgtgagggcccttgtctgtggctattaatgtccgtaacagcccaagagagactcagcctcatctgtgttattttccaaacagc

SEQ ID NO: 350116 - DNA, 378 bp, Homo sapiens
tggctttctctgttaaacttgcataaataataaataccagcattgcaaattcaaatgccctcaaggccaggctcatctagtaraagtgtgaaacatctggtatgagataaaagggtctgtgaggagttgagggcagctgcgttgaaccagagatcgtgtttcttgtaaagaagcattaaaattcagtttacaacaaaaatatcactaatgcaaagtaggatataacttcagcagaaagtctgccctttggtcacctgacagggagtcctgctttgtgctttttaaacagggcacattaatctggaaactgattatggcatgaatgttgcaagaacagcacagcacagggcatgagtttgggacaggtaccatgttgta

SEQ ID NO: 350117 - DNA, 569 bp, Homo sapiens
ctgctatcatttgcctagccaaaacacacattgaagaacctgttttctctttctaaaacagatgtccttattctatttaaataataacattacctttgatgtcatgaaagactataaagcctaaaatgttataatattttgaagtggtggagagggtaacatagtgtytaatatccatttaaacaccagtatatttgaaatatatcattattaatcagctggatatattttgttcttacttcttacatgcttatcaagtgcatacttagaaagccctggtttcaactaaaaacccctctaagttagccaacccagtgacaagcactcagaatacacaaatctattttccaagtgattcatggtccctagtctttggggtaagaggagggccagcagatccttgcttttagaaatcatataagatttctttccacaactgtgagacttggtgggtttggggtttttccttttttggcatctatagaaaaaaataccatctgtctcatcaccaaaaaaaaaaaaaaaaaaaggaaagaaagaaaaggaaaagcttgatatggcatagtgat

SEQ ID NO: 350118 - DNA, 569 bp, Homo sapiens
ctgctatcatttgcctagccaaaacacacattgaagaacctgttttctctttctaaaacagatgtccttattctatttaaataataacattacctttgatgtcatgaaagactataaagcctaaaatgttataatattttgaagtggtggagagggtaacatagtgtctaatatccatttaaacaccagtatatttgaaatatatcattattaatcagctggatatattttgttcttacttcttacatgcttatcaagtgcawacttagaaagccctggtttcaactaaaaacccctctaagttagccaacccagtgacaagcactcagaatacacaaatctattttccaagtgattcatggtccctagtctttggggtaagaggagggccagcagatccttgcttttagaaatcatataagatttctttccacaactgtgagacttggtgggtttggggtttttccttttttggcatctatagaaaaaaataccatctgtctcatcaccaaaaaaaaaaaaaaaaaaaggaaagaaagaaaaggaaaagcttgatatggcatagtgat

SEQ ID NO: 350119 - DNA, 594 bp, Homo sapiens
aatctaatggtaaaatgaagtgatacctgtaagttgctgacaacttctttgacacacaatagacattagataaatgatttttatgaaaataaacaaacagaaagaagttacgctagagctggcacagtgaagatcactgtggtcccaggtactcaggaagattacttgaacccaggagtttgtgatcagcctgggcaacaaagtgagactctttttttaaaaagaagttacaatgtagcaaaaagacaagtatgaaataatatggtggttatggagatgaagaggtataaaagctgtactagagaaataaagcctcatgagtcttaaaggttaaccaaggaccaaaacagctattaatatcattctgcttttactatgtgtttgtgacaggggcaacaggatcatcgaccggacagacagacacaagtggaccatcagctaaagtaacagggaattatggacaatcatctgaaataccagggacaattaaatcatcatctgatgtttcagggacaatggggcaatcagatacaacatctggaccatcagttgcagtgacaargacttctgaacaatcgtcaggagtcacggtgg

SEQ ID NO: 350120 - DNA, 414 bp, Homo sapiens
gaacactttataacaaacctgctgcatgtaaatctccatcttagaatctgctcctaggcagcacaacctgtgccacttacaggaattaaacatcattctctagagcccatcaattatttgtagcattcaagtctgagaatttaatggggaaggatacagaaagcagcctacctatgtctttcaagtctttgatggtggctttgaaaagaactaaatggatgaggcctcctctactaccctatttctcattcccttcccccttccattgtacaaataaaaaayatatgctttcctatatgccaatgagactattttaatagcctcaagacaactggtcctactggtaaattaatgacaagaagtaaatttgattactgacactcaaatatagaactataattttgcagaacacct

SEQ ID NO: 350121 - DNA, 604 bp, Homo sapiens
gaggagataatcaatttatgaattccttttcatctaaaattaggatttggtttagaaaaaaaaatcataggtttctcaagtgaactaaaaggtttatcaggaactttcttgctttaagtgatacataatgcatggtctcatgatgtcattgtattgcaaatacgtaaccwgcaattcacaaggagtaaactatttatatcctggtaatttgtactcaatgattgaggaaaatgtccactaagttcattatagccaatttgatttactttaagatgaaaagaaaaaataatcatttgattgccagtgcccacctattttacttccagcctcagtggttccaccattgcccaaagaagttgtggcttctaagtgaagggagaaaagaagtaaattcagaagaatcctataactgagaaaatccagtggtattcccagggtatggcagggagtgtgtatgtttgcggggagggaatcagtcatattccatgactgaagccccttatattccctattaggttacctgtgttggaacttccaggtgcaactgttgtgccagagactatgccagtggtgcctaaagcagggagagagaaagagaacccaa

SEQ ID NO: 350122 - DNA, 604 bp, Homo sapiens
gaggagataatcaatttatgaattccttttcatctaaaattaggatttggtttagaaaaaaaaatcataggtttctcaagtgaactaaaaggtttatcaggaactttcttgctttaagtgatacataatgcatggtctcatgatgtcattgtattgcaaatacgtaacctgcaattcacaaggagtaaactatttatatcctggtaatttgtactcaatgattgaggaaaatgtccactaagttcattatagccaatttgatttactttaagatgaaaagaaaaaataatcatttgattgcyagtgcccacctattttacttccagcctcagtggttccaccattgcccaaagaagttgtggcttctaagtgaagggagaaaagaagtaaattcagaagaatcctataactgagaaaatccagtggtattcccagggtatggcagggagtgtgtatgtttgcggggagggaatcagtcatattccatgactgaagccccttatattccctattaggttacctgtgttggaacttccaggtgcaactgttgtgccagagactatgccagtggtgcctaaagcagggagagagaaagagaacccaa

SEQ ID NO: 350123 - DNA, 625 bp, Homo sapiens
ctcacctgtattcattccacttcctgtggtcccagtgcctctaaaggacgtcgtagcttcttagagaggaaaggtaggaaaatatgaggtgagaggaattagcattgtgaggaaagtgaaggatgcactattcttaataacagagccatgggaggcactttactactaaactgttctgtggaggactctcaccagctggctggctcacctgtatttgaactcccaggtttagatgtgttgccagaagctaccctagtctctctctgtcacccaggctggagtgcaatggtgctatctctcactgcaacctccatccaggttcaagtgatcctcctgcctcagcctcctgaatagctggaattacaggtttatgccaccacagctggctaatttttgtatttttagtagagaagaggtttcaccacgttsgtcagactggtctcaaactcctgacctcaggtgattcacccacctcagcctcccaaagtgctggaattacaggtgtgagccaccatgcccggcctgtgttttctcatgcatagttttattcccaaatcaaataaagatgcaaattcctcaacagaggactcaatttttctggaattcaatggcagtaagacaagtg

SEQ ID NO: 350124 - DNA, 625 bp, Homo sapiens
ctcacctgtattcattccacttcctgtggtcccagtgcctctaaaggacgtcgtagcttcttagagaggaaaggtaggaaaatatgaggtgagaggaattagcattgtgaggaaagtgaaggatgcactattcttaataacagagccatgggaggcactttactactaaactgttctgtggaggactctcaccagctggctggctcacctgtatttgaactcccaggtttagatgtgttgccagaagctaccctagtctctctctgtcacccaggctggagtgcaatggtgctatctctcactgcaacctccatccaggttcaagtgatcctcctgcctcagcctcctgaatagctggaattacaggtttatgccaccacagctggctaatttttgtatttttagtagagaagaggtttcaccacgttggtcagrctggtctcaaactcctgacctcaggtgattcacccacctcagcctcccaaagtgctggaattacaggtgtgagccaccatgcccggcctgtgttttctcatgcatagttttattcccaaatcaaataaagatgcaaattcctcaacagaggactcaatttttctggaattcaatggcagtaagacaagtg

SEQ ID NO: 350125 - DNA, 625 bp, Homo sapiens
ctcacctgtattcattccacttcctgtggtcccagtgcctctaaaggacgtcgtagcttcttagagaggaaaggtaggaaaatatgaggtgagaggaattagcattgtgaggaaagtgaaggatgcactattcttaataacagagccatgggaggcactttactactaaactgttctgtggaggactctcaccagctggctggctcacctgtatttgaactcccaggtttagatgtgttgccagaagctaccctagtctctctctgtcacccaggctggagtgcaatggtgctatctctcactgcaacctccatccaggttcaagtgatcctcctgcctcagcctcctgaatagctggaattacaggtttatgccaccacagctggctaatttttgtatttttagtagagaagaggtttcaccacgttggtcagactggtctcaaactcctgacctcaggtgattcacccacctcagcctcccaaagtgctggaattacaggtgtgagccaccatgcccrgcctgtgttttctcatgcatagttttattcccaaatcaaataaagatgcaaattcctcaacagaggactcaatttttctggaattcaatggcagtaagacaagtg

SEQ ID NO: 350126 - DNA, 553 bp, Homo sapiens
tttggaaattttgcagcctgataatgcaatagaaaagaaaaacccattttctggggagaaattcaagcttgctgcagatatttacaaaagaaatgaggagcataatgttaatcaccaagacaagggggaaaatatctccagtgtatgtcagagacttcacagcagccactcccatcagaggcctggaggcttaggagggaaaaatggttttatgggccaagcccagggctgcactgctgctgatctgggcagcctcaggacttggcaccctgcatcctagccatggctaaaaggggccaagktatagctgggcccatggcttcagagggtgcaagctccaagccttggtggcttacatgtggtattgggcctgcgggtgcacagaagttaagaactgagagttgagaacctctgcctagatatcaggggatgtatggaaatgccttgatgtccaggcagaagtctgctgcgggggtgaagccctcatgggaacctctgctagggcagtgtggaagggtaatgtggggttggagccctcacatagagtccccaa

SEQ ID NO: 350127 - DNA, 553 bp, Homo sapiens
tttggaaattttgcagcctgataatgcaatagaaaagaaaaacccattttctggggagaaattcaagcttgctgcagatatttacaaaagaaatgaggagcataatgttaatcaccaagacaagggggaaaatatctccagtgtatgtcagagacttcacagcagccactcccatcagaggcctggaggcttaggagggaaaaatggttttatgggccaagcccagggctgcactgctgctgatctgggcagcctcaggacttggcaccctgcatcctagccatggctaaaaggggccaagttatagctgggcccatggcttcagagggtgcaagctccaagccttggtggcttacatgtggtattgggcctgcgggtgcacagaagttaagaactgagagttgagaacctctgcctagatatcaggggatgtatggaaatgccttgatgtccaggcagaagtctgctgcrggggtgaagccctcatgggaacctctgctagggcagtgtggaagggtaatgtggggttggagccctcacatagagtccccaa

SEQ ID NO: 350128 - DNA, 521 bp, Homo sapiens
gagtttgggggactgttagaaaggcataattgtgttttgaaatgtgaggacatgagatttgagaggggccagggrtggaatgatatggtttggctgtgtcccacccaaaatttgatcttgaaatgtaattttcacatgtcatgcacagaaccaggtggaggtaatcagatcatgggggtggttttccccatactgttctcgtgatagtgagtgaatctcacaagatctgatggttttatgtgtatcaggcatttcccctgcttgcactcattctgtcttgccaccttgtgaagaaggtgcctgcttctctttggccttctgccatgattgtaaatttcctgagtcctccccagcaaggcagaactgtgggtcaattaaacctatttcctatgtaaattacccagtctcaagtatttctttatagtagcatgagaacagactaatgcacttactctaacttcttctacctgcactgtttatcacatttatcttcaaatgtctgcctttttcttattattcaa

SEQ ID NO: 350129 - DNA, 524 bp, Homo sapiens
agagtaaaaatattgattcctatacctctctaattccaagttccagtgtaatagccactggaaaaattcttacacatgaaaagtctaatacttaaagcaataaataatgatgataatagtaatgagcatgtcgatcatttatgagttcctmactgtatctgctttttaaattagaggtttacatatcttattccaattaagaaatacctaagcttcaattagtaaaataaatttataaatgatgtatcttctcattttcacaattaaatttgtatatttatggttttcattacttttaaagtcagaaggccttcttttctgacttaatagaaagtgtcaagacattttgaattgaggttatctcatgtaatgacatcagcttagctcatacctctttcttaatactcaattaattttggtttcttttcatcttttagagaccacaacttccctaggaggaagtggcaccactggagcaaaaataaaattaggtaaagactttggagtatttgtatttattgttg

SEQ ID NO: 350130 - DNA, 524 bp, Homo sapiens
agagtaaaaatattgattcctatacctctctaattccaagttccagtgtaatagccactggaaaaattcttacacatgaaaagtctaatacttaaagcaataaataatgatgataatagtaatgagcatgtcgatcatttatgagttcctcactgtatctgctttttaaattagaggtttacatatcttattccaattaagaaatacctaagcttcaattagtaaaataaatttataaatgatgtatcttctcattttcacaattaaatttgtatatttatggttttcattacttttaaagtcagaaggccttcttttctgacttaatagaaagtgtcaagacattttgaattgaggttatctcatgtaatgacatcagcttagctcatacctctttcttaatactcaattaattttggtttcttttcatcttttagagaccacaacttccctaggaggaagtgrcaccactggagcaaaaataaaattaggtaaagactttggagtatttgtatttattgttg

SEQ ID NO: 350131 - DNA, 585 bp, Homo sapiens
gatactcagatagagtgactggggcaactgaaccattggctggagtaacaggaaccattaaaccatctgttgcaggatcagtgacaactggaccatctgttacaggagtagagacaactgcaaaaactwcatctggaggattaagtacaactatatcgtcagttggaggaacagggaccactggacaatcacctgaaagatcagggacaacaggaccatttactggattgacagggacatctgcacaatcagctggagtcacaatgacatctatccaatcagctggagtgctagtaacaacaggactaaatgttgatggcttagggacaactggaaaagctcttataggatcaggaacaactggattatcagctgaagctacagggacaattggaccatcaactgaaggattagagaaaactggaccatctattactggatcaggaacaaccagaccattagttacagaatcatggacagctggaacttcatctggaggacatagtacaacaagtccatcagttagaggaacagagacaactggacaatcagctgcagaatcagtgacaacagggccagttacag

SEQ ID NO: 350132 - DNA, 574 bp, Homo sapiens
tgacttacctgtggtaggaggtccaggagcagtggttttgtcagatgcttccttggaaggacctaaaacgagcaagggaagagcaataaactttttttttattttttctttgtttayagctttattgaaaatattaatttacaataaatcacacatgtttaaagtggataatttaatgacacctatttatacatctgtgaaaccatcatcccagccaagataatgaacacatccatcaacacccccccaaatttcttttttttttttctggtctcagaagagcatttacctaagacacgtccacgtggaacaagagtaccaaagcacttggaatatactaacacatctactaatgctagctcatgcccctgccatggaaacactaagaacttcttattgtagcaatcccttgttcacagaggtgaagtgaagattctcctatgaccctgatacatgtttctcttctgggtgccctttctctaaatgatgaaagcttttctcacactttactctatacatgtttcacttctggtgccccttctctaaatgatgagagcttttctcacacttaaat

SEQ ID NO: 350133 - DNA, 585 bp, Homo sapiens
gatactcagatagagtgactggggcaactgaaccattggctggagtaacaggaaccattaaaccatctgttgcaggatcagtgacaactggaccatctgttacaggagtagagacaactgcaaaaactacatctggaggattaagtacaactatatcgtcagttggaggaacagggaccactggacaatcacctgaaagatcagggacaacaggaccatttactggattgacagggacatctgcacaatcagctggagtcacaatgacatctatccaatcagctggagtgctagtaacaacaggactaaatgttgatggcttagggacaactggaaaagctcttataggatcaggaacamctggattatcagctgaagctacagggacaattggaccatcaactgaaggattagagaaaactggaccatctattactggatcaggaacaaccagaccattagttacagaatcatggacagctggaacttcatctggaggacatagtacaacaagtccatcagttagaggaacagagacaactggacaatcagctgcagaatcagtgacaacagggccagttacag

SEQ ID NO: 350134 - DNA, 528 bp, Homo sapiens
atgaacacatccatcaacacccccccaaatttcttttttttttttctggtctcagaagagcatttacctaagacacgtccacgtggaacaagagtaccaaagcacttggaatatactaacacatctactaatgctagctcatgcccctgccatggaaacactaagaacttcttattgtagcaatcccttgttcacagaggtgaagtgaagattctcctatgaccctgatacatgtttctcttctgggtgccctttctctaaatgatgaragcttttctcacactttactctatacatgtttcacttctggtgccccttctctaaatgatgagagcttttctcacacttaaatcttacttcatgtaacttggtttcttagttctcctgtattaattttggagggagagagtgggagaaaatgagaaaatgagagacctaatgttgccctcagcttaactacattttagacaggtttattcctagctattggctcttaatctcccttttcttatttactttagaaaactt

SEQ ID NO: 350135 - DNA, 540 bp, Homo sapiens
ttaacagacaacctacagaatggaagaaaatacttgcaaactatgcacctgacaaagatctaatatccagaatctacaaggaatgtaaacaaattagccagcaaaaaacaaccctattaaaaagtgggcaaaggacatgaagagttatttttcataagaaggcatacacatagccaacaagcatatgaaaaatttctcaacattactaatcattagagaagtgcaaatcaaaaccacaatgaaataccatctcataccagtcagactggctgttatgaaaaagtcaaaaaacagatgctggtaaggctgcagagaaaagggaatgtttattcattgttgatgtggatgtaaattaatcyagacactatggaaagcagtctggagatttcccaaagaacttaaaacagaaccccaccgtctgacccaacaatcccattagtgggtacctatccaaaagaaaacaaatttttctaccaaaaagacacatgcatttgcattttcatcgcagcattactcgcaatagcaaagacatggaatcaa

SEQ ID NO: 350136 - DNA, 622 bp, Homo sapiens
gggttacagggacaactgaactatcagctggagtgacagggaaaactggactatcatctgaagtgacagaaacaactggattatcatatggggtgaaaaggacaattggactatcagctgggtcgacagggacaagtggacaatcagctggagtggcagggacaactacactatcagctgaagtgacagggacaactagaccatcagctggggtaacagggacaacaggactatcagctgaagtgacagagataactggaatatcagctgtggtgacagggacaactggaccatcagctggggtgacagagacaactggatcatcagctggagtggcagggacaacaagactatcagctggagtgacagggataactggactatcagctggagtgacagggacaactggactgtcaactgaagtgacagggacaactggaccatcagctggggcgacagggacaactggactatcagttggagtgactgggataastgggctatcagatgtagtgacagagacaactggatcatctgcaagatcagggacaggtataccatcagttggagaaacaagaacaactagcacatcagttgaagaatcaaggacaactagaccatc

SEQ ID NO: 350137 - DNA, 422 bp, Homo sapiens
gatcaccctctgcccaatcttaaacataacgaggatagcacatcattttccacacatggtatgtttataaaattagttttgccaggaacatctctgctatgaaaggaatagttatcaaagagagtgctgccactggttttctgaacagccttaggcaggtcactgacccttgccatggttagagtctttctctttttggacacttttattaggtatgataaaatatgagggcttaacaaaagttattcctgagaaagcagaagggtacrcatgggagaagtctcctaacatcaagatgttactaagcatctaaggggtgtgactgaatataaattacgaagaaaattagtggagaatgtgaagccagagtggtaaaaagacatcagtaagccatgcaaaatgggattctctgtgtgctctta

SEQ ID NO: 350138 - DNA, 627 bp, Homo sapiens
taagttgcagagataattaaaattcagaacatatttcctagactccagtcctaatgcccctgtgtttccatgtttaaagaagaggatgaagttgaatttaatttaaatcagttattgaagtagcaacatgtaattacagattctgatttcaaattgggacttacgttaaaatcataggttgtttagtaggtttatattaaaacaaaaaatcccccttttgaatgagtatgtatgatactgacatataatttaaaagtgggtttctgttacacaacaatataatctgttaaaatgcatatttgctcaaaaatttaaaatcttagaagttaccactgttaagttatatataaattttgtttatacaatgtgcttattataaaatagcatcaatcataaaaaaacagaatcgcatcaggcaaagggaggtagatgagtatagtggaatgtggaattcgagaaataagaatttgaatccctccccttaaagtttgaccctgttttaagtccctcaagcagcctgaggtttaagtgttctcatctgtgaagtgggaactaataataatctctacatggaaagatttgagraaacagtaaatgtaatagtgcagcttagtgtaatacatagta

SEQ ID NO: 350139 - DNA, 252 bp, Homo sapiens
aagtgacagggacagctggaccattagctggagtgacagggacaactggactatcagctggggtgacagggacaactggactatcagctggggtgacagagacaactggacaatcagctggggtgacagagagtactggactatcasctggggtgacagggacaattggatcatcggctgtggtgacagggataaagggactatcagcaggagtgacagggaccactggaccatcagctgaagagacagggg

SEQ ID NO: 350140 - DNA, 252 bp, Homo sapiens
aagtgacagggacagctggaccattagctggagtgacagggacaactggactatcagctggggtgacagggacaactggactatcagctggggtgacagagacaactggacaatcagctggggtgacagagagtactggactatcacctggggtgacagggacaattggatcatcggctgtggtgacagggataaakggactatcagcaggagtgacagggaccactggaccatcagctgaagagacagggg

SEQ ID NO: 350141 - DNA, 578 bp, Homo sapiens
gccagtttgggctcctaaatttctgtgttcactgttgcttggagaaatggttaattctaggtcttggacaagaaaagtacaaggtgagcttgggacttcttaagtcagaaaatgaggaagcattcaaagacttagggagctctgcctaaatgacaagggtgctaaactgcatgagttcctgttggccaaatttggagaattttgagcactgaaaaaattatttgtaatagattgaggcacattgataatattgaaacatacatgaccccaatgataattaataaaaagaaacaaccacagcaacatttgataatgttagtggtgactatcatgtcaagtccttattctgaagatyggtaattcaagagaaaaattaatcaattatcaagtatttttattagaaactatggatcaagatattcgaatagttccagttgatcagagaaatctctctttttaaagaaaaattccaactaatatatgttgaaaaaagacacaattggaaaaatcactgttttgaaatgctgaatgaaatagacaaggagcataaataaatgctgaaatcattgagtgaaagg

SEQ ID NO: 350142 - DNA, 578 bp, Homo sapiens
gccagtttgggctcctaaatttctgtgttcactgttgcttggagaaatggttaattctaggtcttggacaagaaaagtacaaggtgagcttgggacttcttaagtcagaaaatgaggaagcattcaaagacttagggagctctgcctaaatgacaagggtgctaaactgcatgagttcctgttggccaaatttggagaattttgagcactgaaaaaattatttgtaatagattgaggcacattgataatattgaaacatacatgaccccaatgataattaataaaaagaaacaaccacagcaacatttgataatgttagtggtgactatcatgtcaagtccttattctgaagattggtaattcaagagaaaaattaatcaattatcaagtatttttattagaaactatggatcaagatattcgaatagttccagttsatcagagaaatctctctttttaaagaaaaattccaactaatatatgttgaaaaaagacacaattggaaaaatcactgttttgaaatgctgaatgaaatagacaaggagcataaataaatgctgaaatcattgagtgaaagg

SEQ ID NO: 350143 - DNA, 609 bp, Homo sapiens
acctctgtctattcttgtctctgagaagtggatgtcaggcacacaggaaatgcttccataatgtgagatgggtgactggtatattcttatgcagagtgtcactatgtttaatttagcagctaccaccacagtttcatttggtgtcagcagcagttcrcagggtcccaagcaaggtaggatgaactacttaaagtcagcagaggaaggtataaatatctcataggagggcattgctcagcatatgataagcacaatatcgccggttattgatatgagaacatttagaatgttcaagtctttttctccttcctgggagcacaagaaaagcacaacatttgaagtgaaatcaagaaagtgaagttaagcttcctttttcagtagagtacaggggaagggatagtcagtataaaaacattagtaagttggcaaaaattattcatggttcatattttctgaaacaagttttcaagaaaggtcttccagtggttcaggaccacgttgctgattccagtactgcttgctctattagttcctttagtttctcattttagggacttctggtaaattctgtgggacaaccatttcactgggaggttctagcacaggtag

SEQ ID NO: 350144 - DNA, 641 bp, Homo sapiens
ctgacagttacatagatgatttgggcccaagtgtacactgctatcattaaaccctaagaaagggactagtggtggaggactttctctgagaacaaatcacagtaaacttgctcagggaatgatatgtttcatgggcaaagtgtggattcactctcaaaattaaagtccagaaaaattaatttcctggtatattaaagaaacaaacatttcatttgttttattattaagagcccatgcctgttaaattaaggaccgcaaattgaccagttacaatcctttcttatttcaggtactactgagggcatctctgggaaaactctggaagctggaagtgcccacacaggtcaggmactctgaacgtggcctcttggccatgtgatctcattgctcaaccccaacttatgagtgagaacaagcagtttttggttttccgttcctgtgttagtttgctgaggatgatggcctccagctccatccatgtgcctgcagaagacgtgatctcattcctttttattcagcttgacattttctatcatttttctcctttaattatacatgatgcttattttctgtatcccctcactagaaagcttcatgaagtcaactgattattaaaatgcctcaagttgcatgaaagagtt

SEQ ID NO: 350145 - DNA, 570 bp, Homo sapiens
ggcacctgtgggatatgctggcatagtgcagcattagtctctgttttggcaagtgaaacatttaacaatactgttagccagattagccttggtgaggggaagcctgtaaacatgtgccaccctggccaccatgggcattttgttcccaagccccttaagcaggcactaggctgtctggggagtgaggctcctcacatcctatacatgtgatttcttttttcatttttcacatttgtgattttattaaatcgattgccttacaaaacattatggatgtcacaattattataacaccaacttaccaatctacagctaactggtgccatttgctgagcatattttgtaaaggaagggagatgctaaatccccaakatagtagtttcattgcagcctaggagaataaggagatgttgtttctcagacatttaaatctggctaatgaaacaggaaaagaaattatctcccccatctgaagagctgcttcagaaggaatattctagtaaatataaactacacttgtttatgctctcaataaatggcataagttgtgacacccctttcttggacttc

SEQ ID NO: 350146 - DNA, 603 bp, Homo sapiens
tgtgtagtaattacattgtggaattagaaataagaatcaatatctcaattcttcacccataatgagaaagagaatggcctaggatggggataagaaaactatgtgtttcctcaatgtgtcaacaagctctgttcagaggtttctagaaacaagagttaatctatatatattttctacacatcatttgtatctcatcggaatatttaatgaataaaatgtcaataactcaatcacttcacttaaatatcaatgagaggaagaaaaacatttatcttcaatctcctaactgattctcagtgccttggctccatgatgaagtttccttgaagcagrggaaaggaaagttaaaaagtttgagtgtctggccttcagttattagataaaatcttgcctatgtgataatctttcttcagaaaaatgctcttcacagacagtacaagcagtagatgtgattcaggcaacgttgtctactgggaggcaggtagtgattcgtcagtgcttacctgagttggggccagccctagttattccacttgctccagaagaagttgtggctgcgaagagaggaagaacataaatagaaaagatttaggggacttaaaa

SEQ ID NO: 350147 - DNA, 393 bp, Homo sapiens
aagctctgaaagcagcaaatcaggtaagtaaaagggaaaagtcagtgagtgtgcaggagtaaaatggagcatgtggatctgcccacattttctttatttagcagcactgtaaagaatgagaagaactggagttaggaagcccagttactgaccacaggtattgcaggtagtaatcgrccatgcagattcagacagaggttcctgtgctggaacttctgagtctgtgagtctggagtggggctagggtcatagtttgcaatcctaactacaaattagaatcaactagagaaatgtttgaaaatacatattgaagaatccttcacagactaattgaatctgtccctggaagaagggaccaggcattaaatattttttaaaagcctcatgggtccc

SEQ ID NO: 350148 - DNA, 537 bp, Homo sapiens
atgttgttaagcgagtaaatcacttaacctctgtaacctctgtttttgtatctgtaaaatgtgggtcaaagtgatctattttgtgaacttgggatgaggagccaagaaaatagtgaatagtgtaagtcaaagtacatttttcaaatgtggaaaggatcattattgttatcgatacagaaaaatgaagatttctgtaatttttaggtggaagttaatttaagtgagaattggttatatcatagcttaagaaattctgtgaatgcgtcctttccatttttgcctttgccacaggtacacctggaacaccaggtggtgcaactagtggaggcaaaattacatctggatggtccagcagtggcaccagcacgggckcttcaaatacaccaggtgagattagcaaagcactaaaaggtcacaaaaatgggagtcagtgtagaaatttgtttataaaagcttattcagtagggtattaattcagttgaaaatctttcctgcttgaaacttagagcactgttatttaaatattctgtgaatcct

SEQ ID NO: 350149 - DNA, 578 bp, Homo sapiens
ataacattaacgtaaaataactaaggaaacaaccgcagctacaaagatacatcaaaattacagattaaaaattaagactggaaatagataaacagcaggaatgttaaattggaattggtgaaaacccaggagaaaattgaagaaaaagaaaaattatctcaaaagaccaaatagcaaggtgttccattgagaataaataaaactgaaaatacagcaaggatattagaggatagarctgagaagaggtaaaccctacccctgaaatattgcagacactttcagaaaaggtataatgggctagagaatgatatagttttaggaaacaaacaaaagtatccaagatatattattgccttatctggagaagaaaaagcaatgaaacagaactaatatttaaaattataaataaggaaaaacattctgaatttagaaaaaaacccctaaatctatgtagtgaaataacctatcatatacctggaagaattaatcctgaagagtcaattatgcaaagtattctgaaaaacaattggacttgctgtactcatagataacaggtagtaagtagtcaagcgaattat

SEQ ID NO: 350150 - DNA, 578 bp, Homo sapiens
ataacattaacgtaaaataactaaggaaacaaccgcagctacaaagatacatcaaaattacagattaaaaattaagactggaaatagataaacagcaggaatgttaaattggaattggtgaaaacccaggagaaaattgaagaaaaagaaaaattatctcaaaagaccaaatagcaaggtgttccattgagaataaataaaactgaaaatacagcaaggatattagaggatagagctgagaagaggtaaaccctacccctgaaatattgcagacactttcagaaaaggtataatgggctagagaatgatatagttttaggaaacaaacaaaagtatccaagatatattattgccktatctggagaagaaaaagcaatgaaacagaactaatatttaaaattataaataaggaaaaacattctgaatttagaaaaaaacccctaaatctatgtagtgaaataacctatcatatacctggaagaattaatcctgaagagtcaattatgcaaagtattctgaaaaacaattggacttgctgtactcatagataacaggtagtaagtagtcaagcgaattat

SEQ ID NO: 350151 - DNA, 387 bp, Homo sapiens
  misc_feature (1)...(387): n = A,T,C or G
acttaacttgcttcaaatgaccaaagagatagattacgaatcaatttatttattaatatttgaatacttctcagaaaataagccaaaaaagtgcctgaaaaatataattagtaggataaaaattagtagataaaaccattcttatatcttagtttctactggatatatttaatacaatattatttataatataaacatatgaagcagtcattaaccattatatamtatcatgtataagttatcttaatctggtttaacaaaagtaaaaatgatcatcagaaaacaactatacaaagtataaaatggacaaatgttttcacatatattancttacttgaatcttacagacaccctatgcagtcaataatatattagtaattattcaca

SEQ ID NO: 350152 - DNA, 598 bp, Homo sapiens
atggttctctgatctcgtttatgtacaaactaacacataaccactaggtatatacacctatttacaggtcatttttttaggcaaattacagctgagtaatcattaaatgcaaaattcagcatacattgcatctacagtggacactgtaatttgctagcccagtttatattcttatttactatcaaaaccttgatttgatttagagtagaaatatttacctcctcatgttccttagcagttatgagtgaccaggtgactcaattctggccaagctgtataaatggaagcatatttattggggccttggggaaaagtaaactcaccccttcaaaataataactttcattttatattttcattatgaaagaaatgtatactattacagaaaatacagatatacaaaaataaaactaaattaatctacagttctaattatacagtagtatacacttatctgcaaggggatgtttcaacaaccgcagtagtgcctaaaatctcagataakactgaacactatatatatatatatactatgttttccctgtatgtttataactatgataaagtttagtttataaattaagaacagtaagagatt

SEQ ID NO: 350153 - DNA, 500 bp, Homo sapiens
gaaatatccaagttctcacactgggagtgactaggcaaataactcaacccatggagaatgaagaaaagcagggtagggcgatggcccacctgggtgcatcacagagccaaaggaaccccccactcccagccaagggaattgctgagtgattgtgcaactcctcctgcaaaaccacacttctcccacagatctttacaacacacagatcaagagatccccttatgagcccctgccaccagggccttgggtttgatacacagagctgtgtggagtctaggcasagaagccactcaggcacacacagagacacaggagttttacatacttctgccctgggatccctggcaaggcaggggatccatctgtacatatctctaggaagggggctgagtccagggagccaagcagagtcattctgcaggctcaacttccactgcacctcacaagttaagacccactgactttgaattccagccagccaatggcaacaagagtctgcc

SEQ ID NO: 350154 - DNA, 604 bp, Homo sapiens
acctcataattgttcttcctaattctatgatgcaccccctgccatatattttctacagagtgtaaagagggattttaaatgtatatcaattctatgctatttctcccctctttaaaattatagccccttgcatttagaaaaaccttcagtcttcctcccctgattcataacatttcgcttgctcctacatatctgaccttaccttataatattccccgcctcagctcccattatccagatatactcaacttctagctctgcttttctagcaagcatagctccwtcagacttacgacctttgtactggctgttacctctgcctggaatgccattctcctagagcttcactagcaggttgcttcttgttatcagacttcagaataaagaccatcttctcacagaagcctttgctaaccagacagtctaaaatagaacatcccattttgtagtatcaattcactttatattaatgctctgaagcttttcttgtttgtgaatttggttattggttggctagttattttatttatgtctacctctctcttcccactagaatgccccacggagcagagaactgtttatctgcatcccctttgaacagcta

SEQ ID NO: 350155 - DNA, 604 bp, Homo sapiens
acctcataattgttcttcctaattctatgatgcaccccctgccatatattttctacagagtgtaaagagggattttaaatgtatatcaattctatgctatttctcccctctttaaaattatagccccttgcatttagaaaaaccttcagtcttcctcccctgattcataacatttcgcttgctcctacatatctgaccttaccttataatattccccgcctcagctcccattatccagatatactcaacttctagctctgcttttctagcaagcatagctccatcagacttacsacctttgtactggctgttacctctgcctggaatgccattctcctagagcttcactagcaggttgcttcttgttatcagacttcagaataaagaccatcttctcacagaagcctttgctaaccagacagtctaaaatagaacatcccattttgtagtatcaattcactttatattaatgctctgaagcttttcttgtttgtgaatttggttattggttggctagttattttatttatgtctacctctctcttcccactagaatgccccacggagcagagaactgtttatctgcatcccctttgaacagcta

SEQ ID NO: 350156 - DNA, 598 bp, Homo sapiens
gcccttggtgtcagcaacagctcacagaatcccatgccagttggcataggctacataaagacactaaaggaagctataaacatccatgtatttattcttaaaaacatgataatcacagtattacctgttccacaaaggaaaacacttagaatgttcaagactttttcttgctcctggatcactagagacccaagtcactggacatgaaatctgtaaagtcagattaaacatccttctttctaaataggctstgatggaagaagtagttagtagcaaaacaatagtggatacattgcagggaaccattatggttcatttccctccaaaacagattatgaggaaagatattccagtggatcaagacagcattgctgtttccagtgttgtttgtcctattagctgctttactttctcattgtaggtacctctggtgaattcccagggacaacatttacatctggaggttcccacacaggtagttgaatgggaaggaaatcctcatcttgaatgcatgatgactttgtagcgctgcagtcaagaaatagtgactcagtgttttttgccagtgtctcccagacctcttgatcctattctttct

SEQ ID NO: 350157 - DNA, 598 bp, Homo sapiens
gcccttggtgtcagcaacagctcacagaatcccatgccagttggcataggctacataaagacactaaaggaagctataaacatccatgtatttattcttaaaaacatgataatcacagtattacctgttccacaaaggaaaacacttagaatgttcaagactttttcttgctcctggatcactagagacccaagtcactggacatgaaatctgtaaagtcagattaaacatccttctttctaaataggctgtgatggaagaagtagttagtagcaaaacaatagtggatacattgcagggaaccattatggttcatttccctccaaaacagattatgaggaaagatattccagtggatcaagacagcattgctgtttccagtgttgtttgtcctattagctkctttactttctcattgtaggtacctctggtgaattcccagggacaacatttacatctggaggttcccacacaggtagttgaatgggaaggaaatcctcatcttgaatgcatgatgactttgtagcgctgcagtcaagaaatagtgactcagtgttttttgccagtgtctcccagacctcttgatcctattctttct

SEQ ID NO: 350158 - DNA, 577 bp, Homo sapiens
atagagcaatagggattggggtgagagagacaggagaagccagagctttaacggccttgtaaaataagaacagggcctttggattttttatccagggaagtcactggaaggctctggggagaggattgacataatctgaaggagatyttgaaaaaatccttctaaattcaacgttgagaacagagtataaagagccaagcatcaaaagcagggagccctgttagcctactgcaatagtccaagcaagagatgatgggggtttggactagctgatggggaagactaaaactgaggcattctcacacattgagtgagaaaactcaaaagtactgttttaaacatgttaactttgagatgcttaaagaaggaagagcccacaaatcaatatgtataacaaaagatgaatttacagcaaaggagagtgatatggattggctgtgtccccacccaaatctcatcttgaattcccacatgttgtgggagggacctggtgggaggtatttaatcatgggggcaggtctttcctgtgctgttcttgtgatagtgaatgagtctcatgagatctcatggttttaaa

SEQ ID NO: 350159 - DNA, 557 bp, Homo sapiens
ttggtatatatagtcatcccttggtatcctcaggagttccaggacacccacggttaccaaaatccacagaacctacacatattctcacatgtactataaatcatcttagattactcataatacctaatatgacataaatgctmtgtaagtactttttattgttgtgttttttattgtttttcctgaatattttttaatctgcagttggttgaatctgatgatgcagaacccttggatatcaagggctgactgtgcctgtgtgtgtgtgtacatgtgtgtacacatttacctaaaataccctagataatattgcatgagaaataataatataagagctagatatttgctccaagttaggtgatgggaagaagggaaatcatcatttgcttgaggactacatgagatcttaggttgttaaagcttatttgcttcatgtctatgtttaaggttgtgaagctttgagtaaaagagagaaaaaaagacaaatttcattctcaaacaatgatccagctgtttaaaaagttctactctgggtaaaagcagaatgtagttttgta

SEQ ID NO: 350160 - DNA, 573 bp, Homo sapiens
agcaccactcttgcctcctgacagccactgtggcagcctttggtggtattttgcactgagatacttgtgctctcagaagtatgccagactctatagcacagagctcctataaaggataattccattttactgtgctgaagattttacatatattcccacataattctcacaatgatcttctatcattgataccatgattatcatcaccattttacataagcaaaactggagcttggagaaattaaggaactttcccaaggccatatagccatcaatgagggtggagccaaaactcagaccytactcttaaccgtttatgtttttaatttttatttttccatttttatttaggtattaacatggtttggctgtgtccccacccaaatctcatcatgaattgtaatccccacaattcccacatgtcataggaggaacccggtgtgaagtgattgaattatgggggtgggtctttcctgcactgttcttgtgatagtgaatgagtctcacaagatctgatggttttaaaaatgggagtttccttgcacaagccctctctttgcctgctgccatcca

SEQ ID NO: 350161 - DNA, 598 bp, Homo sapiens
  misc_feature (1)...(598): n = A,T,C or G
ttcttgtatttccctagggctcaagtcttctgataaatgaagctgctggattcggcctgcagcatttgcactggacaggctttcaatggaggagtgatcagaaacaaattttctgtctctgaaaaagaanaagtaatgcatagacccatttatcaatntncccttccaccatcagtcctttctgtgtcacatttaagaaatctttgcctccctcagatcatgaaggcatcattattgtttcactttccaatccacctggaattgatttttgtgtatggtgtgtggtaagaaccatttttttatggttactgatttctcactatttattgaaaagtgtcctctcyccactgctctacatggccacctttgtttttgaattttctattttcctggagttgattcacctgaatacatctcagtcttgattattctcagttttctttttccatgaactttcaatcttcctttattttaagaaagttctcccctatcatatcttggaaatgtttggcccttttcattttactctgtacttcagggatctcaattgtccacatgttgaaaacctgtcttcttctattgggcgtatctttcattt

SEQ ID NO: 350162 - DNA, 598 bp, Homo sapiens
  misc_feature (1)...(598): n = A,T,C or G
ttcttgtatttccctagggctcaagtcttctgataaatgaagctgctggattcggcctgcagcatttgcactggacaggctttcaatggaggagtgatcagaaacaaattttctgtctctgaaaaagaanaagtaatgcatagacccatttatcaatntncccttccaccatcagtcctttctgtgtcacatttaagaaatctttgcctccctcagatcatgaaggcatcattattgtttcactttccaatccacctggaattgatttttgtgtatggtgtgtggtaagaaccatttttttatggttactgatttctcactatttattgaaaagtgtcctctctccactgctctacatggccacctttgtttttgaattttctattttcctggagttgattcacctgaatacatctcagtcttgattattctcagttttctttttccatgaactttcaatcttcctttattttaagaaagttctcycctatcatatcttggaaatgtttggcccttttcattttactctgtacttcagggatctcaattgtccacatgttgaaaacctgtcttcttctattgggcgtatctttcattt

SEQ ID NO: 350163 - DNA, 546 bp, Homo sapiens
gatcatcattaccatcgtcatcctrcaaacctaaataaaaaacctttggcaattgtaattattttgaccaaggggctggcttattatgtcacagcactaatgaatgacttataatttatactataaagtaattgatatttttatgtcacattcatgaagcaagtaggttgtcaacagtctatacatttttcctttgtttaggtaatgacaaatattgttaacaaagctactgttcatgtctgtacagtctattcttatgcttctgaatgttccttaagagaaaatgaagttggtaacacacagttctgcaatatcgctggaagcataacaaatacaaagtcataacaacattgatttgataatatctagttatatgaaaattgataagtccctctgcttttattagaatgagctttatttatgtactgcagatcataaagacgatccagttcaaggagacatactcatttttaactttggttcagcacccatagaactgaattatactttataacaatattaggtaatagaatcttcccatggatg

SEQ ID NO: 350164 - DNA, 546 bp, Homo sapiens
gatcatcattaccatcgtcatcctgcaaacctaaataaaaaacctttggcaattgtaattattttgaccaaggggctggcttattatgtcacagcactaatgaatgacttataatttatactataaagtaattgatatttttatgtcacattcatgaagcaagtaggttgtcaacagtctatacatttttcctttgtttaggtaatgacaaatattgttaacaaagctactgttcatgtctgtacagtctattcttatgcttctgaatgttccttaagagaaaatgaagttggtaacacacagttctgcaatatcgctggaagcataacaaatacaaagtcataacaacattgatttgataatatctagttatatgaaaattgataagtccctctgcttttattagaatgagctttatttatgtactgcagatcataaagacgatccagttcaaggagrcatactcatttttaactttggttcagcacccatagaactgaattatactttataacaatattaggtaatagaatcttcccatggatg

SEQ ID NO: 350165 - DNA, 588 bp, Homo sapiens
tagcaattactaaaagcatattttgctagatccatgtattagtcctttttcaaactggtataaagaactgcctgagactgggtgayttataaaggaaagaggtttacttgactcacagttcagcatggctagggaggcctcaggaaacttacagtcatggtggaagataaaggagaagcaaggcaccttcttcacaaggcagcaggaaggataagtgccgagccaagggggaagagccccttataaaaccatcagctctcatgagaactcactcactatcatgagaacagcatggaggaaatggccccatgattcaatgacctccacctggtctctcccttgacatgagggaattatggggattacagggattacaattcaagatgagatttgggtggggacacaaagcctaaccatataaatttatttatttaatatcctagctccaatattatcttgggagaagagatcaaaaaacaaaaggaatcatatgttattcacagaaaagcaatggtccacttattgtcataaaaacatttaaaataatcatgacatttataagaggaaagatcttcttgaaaatttttc

SEQ ID NO: 350166 - DNA, 493 bp, Homo sapiens
agcatttgctttgtcctacaggttttggtatgtcgtgtttccacattcatttgtttcaagaaatttttctatttacattttagtttctttattgactcaatggtcattcaggagcaaatgtttaatttccatgtatttgtgtagtttccaaagttcctcttgttattgatttttagttttattccattctgctctgagaagatacttgatatgatttcactttttaaaaatgtgttgagacttactttttagcctaacatggtctatcatggagaatgttctatgtactgaggagaagaactgtattttgcagttgttgagttrttagataaaatgtcctgttaatgtctgttatgttcatttggtctaatgtccagtttaaatccaacgtttctttgttgattttctacctagaacctctgcttactgctgagagtgggggttttaaagtccctcgctattattgtattagagtctatctctctctttagat

SEQ ID NO: 350167 - DNA, 493 bp, Homo sapiens
agcatttgctttgtcctacaggttttggtatgtcgtgtttccacattcatttgtttcaagaaatttttctatttacattttagtttctttattgactcaatggtcattcaggagcaaatgtttaatttccatgtatttgtgtagtttccaaagttcctcttgttattgatttttagttttattccattctgctctgagaagatacttgatatgatttcactttttaaaaatgtgttgagacttactttttagcctaacatggtctatcatggagaatgttctatgtactgaggagaagaactgtattttgcagttgttgagttattrgataaaatgtcctgttaatgtctgttatgttcatttggtctaatgtccagtttaaatccaacgtttctttgttgattttctacctagaacctctgcttactgctgagagtgggggttttaaagtccctcgctattattgtattagagtctatctctctctttagat

SEQ ID NO: 350168 - DNA, 559 bp, Homo sapiens
ttttgccaaggggacaaagcccagtttcctctgaaaatagagtcaggattcaaccaatcccaaaactgccagccaggcagaattatccaaggccacatccaggatgtactatgggttcatcctgacttcagatcagacataccctgcattgggaaaaataaaccaaatttgaaatacattttgaaytcaaaatgatcatctatgggggcacttactaaaaatatggttattctaaagctcctaatacagagaggatatctttaatctttataattaggaagagggcacatgacaagtttctctttcaggtgctgggttagctaaaggcagcatgtagcctgaattatagggcaaagatactacatcccaaagatctaacagaagtaatgatcaggttgcaacagctgctagcaacctagtgatgttgaatgctaattacttttcattatttaaaggaaaagccatggggcattttaagagatgattcacgctacaaatatgtgtacagttggtattttttactgttagccatatacaatcatcatgaggaaatttcatg

SEQ ID NO: 350169 - DNA, 430 bp, Homo sapiens
tggctctaagaaaatcacaaaataatgaaaactaaagagttttataaacttttatacaataatagtgataagttatctttgaaggtagagatttaaaattatgcatgagttaactatatattaattgtttaaagaatatttcaaaatagaatgtataacttgttgccaacttctttttctttttttcttcttttttttttttttttttttttttttgagacagattcttgctctgttgccacggctggagtgcagtggcatgatcttggcttactgcaacctccacctcctgggttcaagcaattctcctggctcagcctcctgagtagctggractacaggtgcacaccaccacacctggctaatttttgtatttttagtagagacagggtttcgccatgttggccaggctggtcttgaactcctgatc

SEQ ID NO: 350170 - DNA, 599 bp, Homo sapiens
acttactatacttggatgactgaaagacatgaccagtcaaaagaagaaacaaaggcagggagagaagacatgaaagaaaataagagcagttacttcaaaaagaggaactggcttgatgtgattagcagtatattaatggtattttttaaaagytaaataatgatgatgttgtaattatggtcagtagcaactgacttcactaataacacctgttaatgtggtcattgtcatggcctcctgacaattagctcgaaccagggaaactggtgatattaagctgtctttgacataatataatatggctaaatctagttggtatctccttgtttcttgccttgttacctacaaaccccttctcccgcattagaaagcaatgaacttggtagaaaaatttctttgtatcatttctaaataacagtttaaagctagtgctgatttagatcataaactcagattactaattgtagaaaggaccttggtgtctaggtatgcttatttgtagtaaattcctgattaaaaaatgaaaagaaagtcacaaaagtaattggacagaacaaggttaggaagtaaaactctctcatccaattttgaggcacagt

SEQ ID NO: 350171 - DNA, 599 bp, Homo sapiens
acttactatacttggatgactgaaagacatgaccagtcaaaagaagaaacaaaggcagggagagaagacatgaaagaaaataagagcagttacttcaaaaagaggaactggcttgatgtgattagcagtatattaatggtattttttaaaagttaaataatgatgatgttgtaattatggtcagtagcaactgacttcactaataacacctgttaatgtggtcattgtcatggcctcctgacaattagctcgaaccagggaaactggtgatattaagctgtctttgacataatataatatggctaaatctagttggtatctccttgtttcttgccttgttacctacaaaccccttctcccgcattagaaagcaatgaacttggtagaaaaatttctttgtatcatttctaaataacagtttaaagctagtgctgatttagatcataaactcagattactaattgtagaaaggaccttggtgtctaggtatgcttatttgtagkaaattcctgattaaaaaatgaaaagaaagtcacaaaagtaattggacagaacaaggttaggaagtaaaactctctcatccaattttgaggcacagt

SEQ ID NO: 350172 - DNA, 354 bp, Homo sapiens
aaaaaaaaaaaagacttgagattctccttgaccttcatctgcactaacatcgtctctgcctgggaaagctgggcaaacaaaaatgggaaggcttaccaaggaaagtccctggtttctttttcagatatgagaaacrctccctcttcatgcttgttctctgagatgctttagcagattaagataggacagcagcagttttaattctgagcccaagaacgagaacacattagcagtattctttttccagtctgaccgtcctcacatttctatgctctactggctccaaaatatgataaattgttaagtatagaattttttttaaacaagcttggggaatgatgtgtttgtgggggc

SEQ ID NO: 350173 - DNA, 502 bp, Homo sapiens
aatggagaaaagatgaacacagctgtagcacttgggcctgtgagagctccaaatcactgtatctaaagcagcctcaaggctgaggtcagtcctctaagatgggctgccctgacagaagcaaatctgccagatttattgtgtctcatggcccaccagtcctggaacaaaagtttaaaggtgaaatatgtttttctctttctttttaaaatgcttttttatgtgaatcaaaacaaaaacaaatctctgagcagagatcataagtggaatgtaaaacatcacatttggrctcgcaagacttaagtgtctgcctgttaaatttgaagaaaaggaaggagttgcctggtccaggagcctagagagaacatgagaaagttgctggtttcttgctgaagacaaacacccattcagtgagatattgtggaagtcccttagtcttaacttgttagtctgttaattgggaatggcagaagaagtgaattactctgtggaattttgtgaaaat

SEQ ID NO: 350174 - DNA, 585 bp, Homo sapiens
aagcagcgtattcttattaatagttaaacatctccctcttattcatacaactcttgctttgtaaactttctttcacaaaaggacaaagatagactttaatggtccaattaaccaatttctaaactaatgaattcatagtattttaatacaagaaataaaggtgcataattatgatagtgatttttaaaatatttcatactatyacatgaagaagcattttctcttcaactcagaagacttctgcaggctttgttcctgtttgctctttacatttacatttatttgtgactacatcaaagcagccctcatctggcagatgaaaaatctctactgtagcataaagcctataaattatcaactgtttccatttagaatataattttggcacttattaacaaagcctaaccaggactgaggtttattctagctcgttttatcattctctgtgcactgcattcgcctcatggtccaagatgtgtggtctgtttccagtaacatatcagcaatccagccagaaggaaggaggaaggggaagacatatccactcctttttaggattcttcctggaaggtacacccatgacaa

SEQ ID NO: 350175 - DNA, 574 bp, Homo sapiens
tggtggtggtggatggttttgggatgaaactgtcccactcggatcatcaggcattagattctcataaggagcatgcaacctagatccctcacctgcacagttcacaatagggttcacactcctatgagaacctaatgctgctgctgatctaacaggaggcagagttcaggcagtaatgctgcctcatcccgctgctcacctcctgctatgtgacccggtaataggcctcaaactggtactggtcttcggccctggggttggggactcctgtacktggggactcaaagtctgggtgggttgactgggttagtacactgtatatactattcctgggcttggtttccatagtcaaaaatgtcaagtagactattaaggatattttataatttttttgactcttcagaagaaaatacaaagcagcagattgaaagataccctagttgtctgagaaataggtcatttggggttttcatattgttggataattaatttttcagtctattttgtgtacttttaactctttaaatttcaattatggatttttagattaaattagtattcctaaatatttgac

SEQ ID NO: 350176 - DNA, 609 bp, Homo sapiens
gcatctatgtggccaaatatactttgggttgttcttgaggatactggttttgggctgatgactatggtgggcagcatggatccattgggctccttctgctaaacagccacattgaaatggtttaaaagcaagtcagatcaggtgatttgtaaaattgtatttatctgtacatgtatgggcttttaattcccaccaagaaagagagaaattatctttttagttaaaaccaaatttcacttttcaaaatatcttccaacttatttattggttgtcactcaattgcctatatatatatatatrtgtgtgtgtgtgtgtgcgcgtgagcgcacgtgtgtgtatgcgtgcgcatgtgtgtgtatgtgtattatcagacataggtttctaacttttagatagaagaggagcaacatctatgccaaatactgtgcattctacaatggtgctaatctcagacctaaatgatactccatttaatttaaaaaagagttttaaataattatctatgtgcctgtatttcccttttgagtgctgcacaacatgttaacatattagtgtaaaagcagatgaaacaaccacgtgttctaaagtctagggattgtgctataatcc

SEQ ID NO: 350177 - DNA, 540 bp, Homo sapiens
agtctggggagacatcttgtgtaagaaagtgagcaggtggtcaataatgtatccttggctggtttccacagcaagagacagaaattcatggcaaggatgtggcccacaaaacagactatcacagagaaaagaattgtggaactttgcaaagtgctgttgaagagttcacatgaatatgaaataataaaataataaaatgctcatctcccctcctttttctcaacacctatcccatttcatgttaatactcgactccaatagcctactgcctgactctgtccagtccctggcatgattaaagacaacaacaacaacaaaaataactaagatgggkagggccaacaacagtgagtttttagacctaaaagtaacattggggtcacttagtccaacaatcttggttttacgaacaaggaaatgggtcttagaggttacttttgtagagagagagagaacttcagagctttttccttgcaatgagaagtcttaaattgcatattcagactggagatttagaaaaatgcctctacgatcttgtca

SEQ ID NO: 350178 - DNA, 540 bp, Homo sapiens
agtctggggagacatcttgtgtaagaaagtgagcaggtggtcaataatgtatccttggctggtttccacagcaagagacagaaattcatggcaaggatgtggcccacaaaacagactatcacagagaaaagaattgtggaactttgcaaagtgctgttgaagagttcacatgaatatgaaataataaaataataaaatgctcatctcccctcctttttctcaacacctatcccatttcatgttaatactcgactccaatagcctactgcctgactctgtccagtccctggcatgattaaagacaacaacaacaacaaaaataactaagatgggtagggccaacracagtgagtttttagacctaaaagtaacattggggtcacttagtccaacaatcttggttttacgaacaaggaaatgggtcttagaggttacttttgtagagagagagagaacttcagagctttttccttgcaatgagaagtcttaaattgcatattcagactggagatttagaaaaatgcctctacgatcttgtca

SEQ ID NO: 350179 - DNA, 540 bp, Homo sapiens
agtctggggagacatcttgtgtaagaaagtgagcaggtggtcaataatgtatccttggctggtttccacagcaagagacagaaattcatggcaaggatgtggcccacaaaacagactatcacagagaaaagaattgtggaactttgcaaagtgctgttgaagagttcacatgaatatgaaataataaaataataaaatgctcatctcccctcctttttctcaacacctatcccatttcatgttaatactcgactccaatagcctactgcctgactctgtccagtccctggcatgattaaagacaacaacaacaacaaaaataactaagatgggtagggccaacaacagtgagtttttagacctaaaagtaacaytggggtcacttagtccaacaatcttggttttacgaacaaggaaatgggtcttagaggttacttttgtagagagagagagaacttcagagctttttccttgcaatgagaagtcttaaattgcatattcagactggagatttagaaaaatgcctctacgatcttgtca

SEQ ID NO: 350180 - DNA, 554 bp, Homo sapiens
tcaaaactactagatgtttccttctctaagattctatgaattggctgggcatggtagctcatgcctgtaatcccagcactttgggaggccaaagcgggcagatcatgaggtcaggagttcaagaccagcctggccaacatggtgaaatcccatctctactaaaaatacaaaaattagccgggcatggtggtgggcacctgtaatcccagctacttgggaggctgaggcaggagaatcgcttcaacccgggaggcagaggttgcagtgatctgagatcacgccactgyactccagcctgggcgacagagcaaggctgtctcaaaaaaaaaaaaaaaaaaaaaaagattctacgaattaatttcttttacccctaatcctatcagctttttctccccattattctttcaactttaggactattaatggttttggcctggtaactctttgttgtggggaagaaagaggtgttcatgcactgtataatgtttaggagcatccctggcttctacttacacaccatgtagcatcccccaactgtgacaataatatctcca

SEQ ID NO: 350181 - DNA, 619 bp, Homo sapiens
tctattcttatgccttttcatggtgttcttgcctgaattcactgtgcctgagatcagtcacttttgaagcctcagaaaaccactgtttwatataaacaggagctaactaaaaactgcaagaggtcctcaaaagttccataacacaagaggcagatagttattcctttagggcaacagggagggaatcagtgagtacggatcatgctgagaagaacagctctcatagtaatttatataagcagcccatttatttcatatgaaatttcctgattataagagtatgtattaattacagaaactgaaaaatataaatgcttctgaggctgctgattatagcttctaaggacaatgagaagactagggagaacaatggacgattattactatttttttaggccaaacctatcaaatatggtcctattccaggtttttctcagactgccaataaggaaggaaatacgctttagggaggctatcctgtccttactgcatggctctgtgccacaaagtggcaaacctttctgcgagtacaagtttatgtaatttgtctgattggttcagacacaatggctgaggggccagccaggttactggaagagaggtgcaggatttcctttcc

SEQ ID NO: 350182 - DNA, 570 bp, Homo sapiens
agaggcaggaccctgaacaaaagcctgtgcagacactggaaagggtttaagatcatctgcatagagaattccaggatcytgtgcatccagagcatggtcgaggagtgtgggctctgcatggcacaatcctttggcttctcaccccatggcagctgggggagacatggctggaggacagtcagaccaaaggctcctcttggcccaacctgggtagtacttggagttaatgtcccctttgttgtaatgaataagtgggaatcaacctctttaactgcacgcttttcattcataccttctaggtggcagagaaaggtatttcaaaagagatttggaactagaaattcaagatccctagcttcatataaggcaagatatctgcaccttggtatcactaaggattatgcaacttgctctttgaattgcaagtgcagtcatctgatttcctgccccagtttccaatggtccaaagccaatgaagaaacagagcctgttatatattccaaaggagacatcataacaatgaattattatctaacatagaaataactttaattaagaggagagaataca

SEQ ID NO: 350183 - DNA, 570 bp, Homo sapiens
agaggcaggaccctgaacaaaagcctgtgcagacactggaaagggtttaagatcatctgcatagagaattccaggatcctgtgcatccagagcatggtcgaggagtgtgggctctgcatggcacaatcctttggcttctcaccccatggcagctgggggagacatggctggaggacagtcagaccaaaggctcctcttggcccaacctgggtagtacttggagttaatgtcccctttgttgtaatgaataagtgggaatcaacctctttaactgcacgcttttcattcataccttctaggtggcagagaaaggtatttcaaaagagatttggaactagaaattcaagatccctagcttcatataaggcaagatatctgcaccttggtatcactaaggattatgyaacttgctctttgaattgcaagtgcagtcatctgatttcctgccccagtttccaatggtccaaagccaatgaagaaacagagcctgttatatattccaaaggagacatcataacaatgaattattatctaacatagaaataactttaattaagaggagagaataca

SEQ ID NO: 350184 - DNA, 597 bp, Homo sapiens
ggatttagacctaggtttttcagcttcaaagctactctcctaatcaataactgtcatatactttataaaaacagttaacaatattaatatttgccatatttgttaagcactttgtttaatttatgacatgaaaattacttgcctttgagtatttccagcagtctattaaagatacattgattaaagggctgtctaatgaacgtgcaagcgtggttcttaagatgcctttgatgccccagagaatcttgcaaaccagttttcagccttcttttttttttttcagtagcatttcaaatcttcttttgactttaggraatgattataaatttttttctaagttttaatgaagagtagttgaaaataccagaatttaatatacgtaatagatgagagactgtgtagatcactgatgttaaaaatgatgaggtgataaattcaagttggaagaaatccagaatactaaacaggtttcactagaaaagccaaacgcaaagccagagctttcagtggcattaacatctcatttatttatctgcacgatagtatgctaaaaacaaaacccacaacacattggaagaacaaaaatgtttctcaagc

SEQ ID NO: 350185 - DNA, 596 bp, Homo sapiens
tgtcagcagtacattctgatagagttcagtcaaccgttttacacagtgatgggtgttccctcagcaaatggtttacttttttccccatgtgaaaaaaataccaataaacaatctggtagaggctaggagcagtggctcacacctctaatctgagcatgttggaaggctgaggcgggaggatcgtttgattccaggagatcgaaaccagcctgcgcaacatagtgagccccttctctacaaaaattagccaggcacagtggtgcacatctgtggtcccagctacagggaggctgaggcaaragaatcactggagcccaggaggtcaaggctgcagtgaagtgtgttcgcaccactgtactcgagcctgggcaacagagcaagacctgcctcagaaaaagaaaaaaaaaaaaatctgtccggtggaactatctttatatatgagaggctttatttacttgaaataaatttcttagagtgagtttcctgagtcaaaggaaatatagataatgttcatagacagataattttaattttaataaatattagcatattgctctcctaaaagttttaggcattcaaattcctgtcagaagtac

SEQ ID NO: 350186 - DNA, 644 bp, Homo sapiens
gcttaacaattgttggatattttccgtttatttctaacacaattacatataaataactattgaaatttatgatcatatttaaatctaatttaaattgtgtactttgtgcaaagtatacaaagatataaagaaggaaatctttaaaatcatttatagtcctaacacttaggcatctttatagttttgctgtaatttttcaagtctcttttctgaaggcatatatattttacaaacttgagatctcaccaaaaaatagttttgtattttgctttcaacattctgtagtaagtccagttttaagtataaaattatagaattcagtaataatattgaataactatagatcattatataaaacatttttctcaatgcaaaacataaatacatttaagttttctattacagrgagcaaaaatacttttagttagaagctttcagaatctgagggacatcaacaaataaaggataaatttatctataaatatggaatatggccatgtgctgtgtcacgcctgtaatcccagcactttgggaggccaaggcgggcagatcgtttgtgctcacgaggtcgagaccagcctgcacaacatgatgagactctgtctcccccgaaaatataaaaaatgagcagggcacagtggtgt

SEQ ID NO: 350187 - DNA, 612 bp, Homo sapiens
aggattaatggactgttccctcaaatatgggtcatagataagaagatcatttgtaccaaatgtttatggcaaggagtttccatggcacaacaaactgcatgtgcttatgtatagagatggaaattgatgtagcatttccaaaaatgatggcagctaagagattatgtggttttatctttgcaagccagtgtttctaattgctggacattatctggttcagtattccatttagataaatagattcaatgcatggctggcctatgagatttgggcattcataataaatttgactacataataaaaatatagtaatgatgcaactgggctcattatcaaatgagccaagatatagagcatatacctagtttcttctgcccaaatcttacatcggtcttttctttcattttctgcaatttcattgctgatggtgcctttcttttcctttaagtcagtgttttgtagartattcaaacatactttttccagaaagtttcatttgcatcaagaagtttcagatctttctttaaacttatcttaagacctggaactactagtcctctaaaaagaggccctgtgtatggacagggagagatagtatgaaccagaagggga

SEQ ID NO: 350188 - DNA, 388 bp, Homo sapiens
cattactccctaaacagtgaagcatatgaggatgattccaatgtaaagttcttctatttggtaagtctcagtcagtgggttcctggaatcctgttcaattgcacgtctgcttagcccagcacagcttagaaakcatgcatcagtcatgccacggtgaccagagtaagggcagccttctcactttgctggtgaatactgttcgatccattaacaacaaacaaacacatagaacgatctaaggcaataagtttccctaaggttgaagaacttgctgttcagagtccacttgtttaagcattcaaatgtaactcatatcaagtatttatgacactttgtaatagtaaaatattgggcagatgccagaaagtaaggtggaaagcttatgttg

SEQ ID NO: 350189 - DNA, 562 bp, Homo sapiens
ttggtattgtaatttggtcaaccaaaacttgggaaaaataggtccaaagtttttcattttcctracatgctctttctatttactacagaaatgtactaatataggttgccttttggtattgtaatttggtcaaccaaaacttgggaaaaataggtttattaataacaaaataatgaaaaaaaatggatttcaactagtatcgatttttaggtgtgtgggggcaggggcattcaagggtattatttcctagtaatgatcacttagattctaggccttacacatgattcaaatgcaggagaaatcaggaaagaagcaacagatatggtggtgggtatcggatgtctagactacaggcaaaccccaaataccaaagaagcatccatgtgtcaaaccagcataatttttgagctatgcctggggccacatacaaaaaaagaaaaggttagcttgaaaagaaaaatctaggagaggtaaccagaaggtcaaccacagttcacgggatctgggaagaagctagccgttaccctgtgtcatcttcctgagcagcttcctccccagccag

SEQ ID NO: 350190 - DNA, 558 bp, Homo sapiens
ctggccgcagaaatcacacttcatcatttttgcaatatcatactggtattacaaaaaagctccgttcagtgggaagtgggaataggggtgggctcaggtggtggtacttacacaacagcagtaataacagaaaaggggaccatattgttrgaggctggtcaacagaatctctttgtaggaatctaatttaaccaaataatctgaaatgcagataaaactttatgcattaagatattcattataataatatttgtaatagtaataatttgtaaacaatactcagtaatggagctggttaagtaaatcatggcacatctctccaatattcaattgtattctatattgcctcttatacaatcacatcaaaaatacatgtcattttcatatttccatatatacttatatgtgtagaaaaaggatgagaagaaaatggactaaatattaatgactactacctctgggtgatggaataattacttattatttacttttcatgcttttctccatttttaaacttttctaaaataggtgtatattacatagataattagaaataat

SEQ ID NO: 350191 - DNA, 509 bp, Homo sapiens
  misc_feature (1)...(509): n = A,T,C or G
gatggtctcgatctcctgaccttgtgatccgttcgcctcggcctcccaaagtgctgggattacaggcgtgagycaccgtgcccggcccttgcctttttcaataaaacctttccccagtttctttttgaacagagtactgaagtcattttccgtgtccagatttttatagtaaataatgaacattntaattcaggagtgttgaatggaaagtgccaagctttgatgtgattatattcatgtgattgtgtatgtgtgagtgtgtgtgtttaagaagaggtcttcagtaaactagactaccacggaatatttcatggaggctgtatagctctgatttggagaaggtttgtgctattgaagcatcacatggcacttttatgtccaccattcctgctccatgcaaaagtactttgaacaatgggaataataattaactgtctctatcattttcttatacagtaatcacatacttttttgcaatttgaaataaactttgtgtgtatatatatgta

SEQ ID NO: 350192 - DNA, 446 bp, Homo sapiens
cagcctcagaaagtgaactaaaaaccacctcctgaatattctttttgatggctaaaattataccataaagataaagcatgaaacacaagaatcctccacgagttatttaaagtgaaatcacagggcacatggactcatgtggaaggagaggacatgaactgattcttttggtgaattttatttaggactaatttgactccctaaaagatcctcttaccttctgtacagataaggaaactctgggtcctttccttttcaataccttcaggctgtcaaagaataacacaaacaagcacagaagaatgagtctagatcctctgtccatgaaggaaaagtgattaagcaccagctcactyaagcatggctggtgcaagtttatccctgagagaagatccaactcatcttccccttttgttcatatctggaaggcacgggacatcaccggt

SEQ ID NO: 350193 - DNA, 591 bp, Homo sapiens
gagctccctctgttatacaaagtcggagagggagaggagtccgggaggttcggagcaaagaattcaccctgcctgccttagagaaataaagtttaattgcgatctgtagttaggccattgtcctatcacctctattttttwaaaaaaacaattactttagtgaatgaatatttaataattacaagaattgttgactcaaggttaagtattgcaaggggagacgcttcatttggaatggtttgttactgtgtctttagaaattaagattgaaagagaagcgatagattattaaactacaggtcgccaacacagcaaggctttgaaagttgtacttttttgaacggaaagataatgcaaccacaataataatagctaacatcattatgtgatgcacttattcatgtgccaggtgccagactaagaacttcgcatagattatctcattaaattctttcatcaaatctattagtgtagatcttattattttattcccattttatggacgatgaaatacaaggttaattttcttgaccaaccatatctagtaaatggcagagctctaatttaaacctggagctccagctgtacagt

SEQ ID NO: 350194 - DNA, 608 bp, Homo sapiens
aagaagataatcgtatttactttggaagtacagatggccctctgtatccacggattcaaccaaccaaagatggaaaatattcagacaataagaaaacataaagcaaattttaaaagcagagcataacaatgatttatgtaatataggcattatattcagtattagaattaatttagaattaatttagaaataatttaatttagttccaaattcctggaactaaactcctggaacacacaggagttccagtgtgccttccatggtgaaaaataaaaatttaaaaataaagtatacagaagaatgtgcataggttatatgcaaatactatgccattcatagaaatgacttgagcatcctaggatttgggtatcctgatggtggagtgagtggggaggatggagggtcggaaggtgtcctggaaccaattycctaaggatagtgaagaacaactatacaggtctaggatatatgtgctgaaatgatcactgataaagtttaacagttgcttaagagggggaaaaaaaagcctgcaagtcaaattccaaagataaattcttcaaatcctgacaataagcaagctcctaaatagcagctagtgtactatctca

SEQ ID NO: 350195 - DNA, 535 bp, Homo sapiens
gagcacagtgcctagcacatagtaaatatttgacacayagcacatagtaaacagtgttagacactgttactattttatgattatgtgaacttagggaagaggaaccatactaagtgcctcagttcagagctgaaatgagtgtcaggtggcattactggaagtaggatggtagtaagcaccatgagatcagtcactatcttagctcccatctgactacttacgcccatgcctaaattcatttatcaataaattgttctcagattctagaagctattgacaagaccaagcaggatcatacagaaaatgttatagtaaacttgtgcgagatgacctagtctagcaaacatgcacatgatcttagctttctataaggaagataaagtttttagagacaagatgaaggaaaaaaataagtctacaaagcaagatagacccttgaagatgtaatggtgcaaactactttttaatgtatgttatcttaatacccaatggtctaagtcagttgttggctaaatttttcatctggggaatttaa

SEQ ID NO: 350196 - DNA, 535 bp, Homo sapiens
gagcacagtgcctagcacatagtaaatatttgacacacagcacatagtaaacagtgttagacactgttactattttatgattatgtgaacttagggaagaggaaccatactaagtgcctcagttcagagctgaaatgagtgtcaggtggcattactggaagtaggatggtagtaagcaccatgagatcagtcactatcttagctcccatctgactacttaygcccatgcctaaattcatttatcaataaattgttctcagattctagaagctattgacaagaccaagcaggatcatacagaaaatgttatagtaaacttgtgcgagatgacctagtctagcaaacatgcacatgatcttagctttctataaggaagataaagtttttagagacaagatgaaggaaaaaaataagtctacaaagcaagatagacccttgaagatgtaatggtgcaaactactttttaatgtatgttatcttaatacccaatggtctaagtcagttgttggctaaatttttcatctggggaatttaa

SEQ ID NO: 350197 - DNA, 535 bp, Homo sapiens
gagcacagtgcctagcacatagtaaatatttgacacacagcacatagtaaacagtgttagacactgttactattttatgattatgtgaacttagggaagaggaaccatactaagtgcctcagttcagagctgaaatgagtgtcaggtggcattactggaagtaggatggtagtaagcaccatgagatcagtcactatcttagctcccatctgactacttacgcccatgcctaaattcatttatcaataaattgttctcagattctagaagctattgacaagaccaagcagratcatacagaaaatgttatagtaaacttgtgcgagatgacctagtctagcaaacatgcacatgatcttagctttctataaggaagataaagtttttagagacaagatgaaggaaaaaaataagtctacaaagcaagatagacccttgaagatgtaatggtgcaaactactttttaatgtatgttatcttaatacccaatggtctaagtcagttgttggctaaatttttcatctggggaatttaa

SEQ ID NO: 350198 - DNA, 568 bp, Homo sapiens
ctgtgattatctacatccataaatctcaacagtcactcatgttgctgtttgaataaatgaaattagtaagttaggataggaacactccttttcttttcaaacattaaaatacacacacacacatgcacacacacacacacactctataaacattatggcctaagcagtcctgatacttctacataaataacttttatgtagatgctagttggaaacattagggttctcacaccccatctccacaagttgagattcggtatagtgatgcccttagagctgtaccttaaataagtccctgagagactgtgatctgctggttctaaagtagtgacctactttaaacatattttgragatttgtattaatctggcatccttataagtctatacaacacagatgataactagtcataataggaattgagattaaataagagtcaagacattttggtttctaaacaatgacagaagagaccatctagagcaattgctcttaagcctcctttcagaattttgttaaaaatatagatgtttggatccctttttcagacttaccaaagtagtttctt

SEQ ID NO: 350199 - DNA, 599 bp, Homo sapiens
agattctcccttggaccattcagagggaaccaactccactgatgtcttgatttyagacgtttgacctcccaaactgtgagaataaatttttgttattttacttcatgcagttttaggtaatttgttacagcagctctaggaaactaatacagtgggtggtttctttttttttaaggggatatcactaccagataacagtttgtaatttctacaaacaaggaaattattctacaaaaccataagataaccatcaaaatcaggaaattaacattgatacacaccattattatctaatccattcaaatttcaccagtcatcccaaaaatatcctcaagggtaaagaatccagttcagaatcacactctgcatttcagtgatgtgtctcctgaggcttctaaatctagaacagttcctcagcctttctttgactttaatgaccttgacacttttgaagattgcaggctaggtgttttgtagaataaccctaaatttggggtttccagtgtttccttattacattcagcttatgcatctttggcaagaatgttacagaaaggttgtgctcttctcattacatcctattggataacgcacaattc

SEQ ID NO: 350200 - DNA, 562 bp, Homo sapiens
gataactgaccactggtttggcaacattaaggtcactggtaatattaacaagagcagttttattgaagtggtatgggaaaaagccagtctacagtgggttttagaaagcaggagaygagattaaccagaaacagtgagtatgaacagctgttttgaagagttttccttcaaaggagagcaactggataaacaaacacataaataaataaaaccaagatggggaagtagctggcaagaaattgggggtgaagagagttttatttgtaagaaggttgaaataccagaatgagtgtatgcctatgggaatgatccagtaggaggaagcaattggcaatataggtcagaagagaggggactgcttgggcaacagccttgagcaggaaagaaggggtgagattcagttctcaagtaggaagtgtggctttaaataggagtataggtagttcaatgctatcaggcagagcgctggaatgtgaatgcagatgctggttgtgttttgggaacaattccatgaatagagctaaaagttactgaacatttactatacaccaagcatcttgga

SEQ ID NO: 350201 - DNA, 562 bp, Homo sapiens
gataactgaccactggtttggcaacattaaggtcactggtaatattaacaagagcagttttattgaagtggtatgggaaaaagccagtctacagtgggttttagaaagcaggagatgagattaaccagaaacagtgagtatgaacagctgttttgaagagttttccttcaaaggagagcaactggataaacaaacacataaataaataaaaccaagatggggaagtagctggcargaaattgggggtgaagagagttttatttgtaagaaggttgaaataccagaatgagtgtatgcctatgggaatgatccagtaggaggaagcaattggcaatataggtcagaagagaggggactgcttgggcaacagccttgagcaggaaagaaggggtgagattcagttctcaagtaggaagtgtggctttaaataggagtataggtagttcaatgctatcaggcagagcgctggaatgtgaatgcagatgctggttgtgttttgggaacaattccatgaatagagctaaaagttactgaacatttactatacaccaagcatcttgga

SEQ ID NO: 350202 - DNA, 488 bp, Homo sapiens
  misc_feature (1)...(488): n = A,T,C or G
attccaaagaacacttcaaggctataatttaagactagggagaaaaaaagaaggtttctgcagtttgcctcaaggttacatgtggagagtagggggaaaggagaaaaaggaaagaagaaaaagacaattctcaaaagaagagatacaaactgccaacaaacatgaaaaatgctcaacatcactaattaacatggaaatgaaaattaaagccacaatgagatatcacctcactcctgcaagaatgaccatagttaaaaaaatcaaaacataatagacgttggtgtgaatgtgtaaaagggaacaccacactgctggtggaaatgtaaagtagtacaaccgctatggaaaacagtatggaatttccttaaagaaggaagagcagaattaccatttgatccagcaatctcactactgngtatctacccacagggcacttgcatakgcatgtttatagcagcacaattagcaattgcaaaaatatggaacca

SEQ ID NO: 350203 - DNA, 528 bp, Homo sapiens
ttccttaaatgtttggtcgcatttctcagtgaaatcatctgtgcctagaattttctttctagaaaagtttcaaactccaaattcaattcttaattgaattttatatctgtatatctatagacatatacaaatatctgtatatcaacaagataattcggataattcaggttatctgcttcttttagaatatgcattgggagtttgtgtttgttaaggaatgtgtctggttcattcaaattgtcgaatttataggcataagtttcttctcaatatttcttcactagtctctagatatctacaagatctgtagtgatgttattactctcattcctgatactagtaatttgtgtcttctcttttctcttggtagctctggctggtggtttattaattttactgatcttttcaaagaayccagattttgatgttaatgctttttttctactattgtttgtttctttttcattgatgtctgttcttgtctttattacttccttttttggctttctttgggtttagtttttttat

SEQ ID NO: 350204 - DNA, 588 bp, Homo sapiens
gctacacaaacacttaactctctttttgactttgtgacgtctgtaatatggaccctgacaatgcatattttaaaatcacttctcatattcatagagaaaaaaaggctttttttctgtattttatttttttgtttttccaagtttagaggattggtatcttctggtttcttgaacagcatatgtccccctgatrttcttaggctgcatgcattttaatttctactgaaggaaaggaatctgcagtgtgacttatgtgttgcaacacacgttcagattaagtccatggtttgttttgggtgtttgtagctccttttcctggcatgtggccttttactgtaaggaaagctctgtgttcaggagggattggttattgagtgaatagtccactggagtctgctgatgtttgttctcaacaaaaatgaaaattaagcaagacctttgcctttgaggtcttcaacctcatcttcttgtaaatccctcccaccccagacttctttaaagtacttttctagtactgtctgctactgtctgctcccagaaaaggaccagccacatctgtcactgatgttaacataaattttagtcagt

SEQ ID NO: 350205 - DNA, 525 bp, Homo sapiens
tttgcttcagtgtatctccattagggtgtgtgtgagcgtgtgtgcacacccacatatttaggcaccctattccctcagagtttccagaaattggaagaagaggaagagaaaacaaagataaatattttgttgatatattggaacatgtcatttaattggaagtcagttgtctgttaactgaagctactctaaacacagttcagaactaagaaataaatgaaaaaggtgtgtgaactcaaagtcagtgtcaaaatattcatgtgctaaaggtcatactctttgtayatgggagatctactctataaagtcttttctcagaaagttttactcaaacatttttgaagtacttgtcttctggtttcctagccgatgcaaagcccataaaccacacaacaaataattgcataacacccatagtttgaatagtttctcatttgattcttactactagttcatgagatgggtaaggcaaaaattatttttactatcattttataggctgataaatggatactcagggagatt

SEQ ID NO: 350206 - DNA, 525 bp, Homo sapiens
tttgcttcagtgtatctccattagggtgtgtgtgagcgtgtgtgcacacccacatatttaggcaccctattccctcagagtttccagaaattggaagaagaggaagagaaaacaaagataaatattttgttgatatattggaacatgtcatttaattggaagtcagttgtctgttaactgaagctactctaaacacagttcagaactaagaaataaatgaaaaaggtgtgtgaactcaaagtcagtgtcaaaatattcatgtgctaaaggtcatactctttgtatatgggagatctactctataaagtcttttctcagaaagttttactcaaacatttttgaagtacttgtcttctggtttcctagccratgcaaagcccataaaccacacaacaaataattgcataacacccatagtttgaatagtttctcatttgattcttactactagttcatgagatgggtaaggcaaaaattatttttactatcattttataggctgataaatggatactcagggagatt

SEQ ID NO: 350207 - DNA, 525 bp, Homo sapiens
tttgcttcagtgtatctccattagggtgtgtgtgagcgtgtgtgcacacccacatatttaggcaccctattccctcagagtttccagaaattggaagaagaggaagagaaaacaaagataaatattttgttgatatattggaacatgtcatttaattggaagtcagttgtctgttaactgaagctactctaaacacagttcagaactaagaaataaatgaaaaaggtgtgtgaactcaaagtcagtgtcaaaatattcatgtgctaaaggtcatactctttgtatatgggagatctactctataaagtcttttctcagaaagttttactcaaacatttttgaagtacttgtcttctggtttcctagccgatgcaaagcycataaaccacacaacaaataattgcataacacccatagtttgaatagtttctcatttgattcttactactagttcatgagatgggtaaggcaaaaattatttttactatcattttataggctgataaatggatactcagggagatt

SEQ ID NO: 350208 - DNA, 646 bp, Homo sapiens
taaagttaagcaactagaatttcttggtaatctttgcaagagccatttcagtggaatgctgagggtgagaaagcagggtgaatgctgtacactttatatgaatgcataaaagcatcccccattgtaccctcggccccacctctccaacccttctcatggaaacattctcagtcctgcagagtttgcaatgaggtgaattaatttagcaccttgtgctcaagtgaagactataatggtattcaygagtttacatgatgtgactgtcagccttttcctcttcctttagcatcctcacaggtattttttatatgactaatgaatatcacttactgaccaacatgtatttgaggaggtgagtaaggtccaggaagtcttcatttctaaaaaggtcaaaagttaatgctgcaattaccagtaacaatcatgcatcttgaagtgcccttaatttaagtttgatactgtggtggtgaggtcatcttctgtcacctatataataaaaaaatgccttgatcctttcataaacataacttttcaaaagcaaaagggcaaaaaaggcacaaacacttgtgtatgtcattgcatataaaagactgaagggtccataaccaacagttagcaggagtaactctgggtagagggtgagatt

SEQ ID NO: 350209 - DNA, 502 bp, Homo sapiens
attgtcacttgaattgcataagctccacagaagcattaagaaacatcaatcaaatgttgcaaagagaaacacttttcttaaaggggaggactgtctcattcaaaaatgtcagtgccataaagacaaagaaagcctgaggaaatcttaaaggagactagagagacaggatgtagtagcttattattgctgctataacaaagtactacaaacttggtggcttaaagcagcacaaatttgttattttacagttctggaggtcagaagtttaaaataggtctgaataggctaataccaaggtattcattagggctgtgtttcttttggatgctgtaaaggaaaaatcattttctttgccttttccagctttcagaggccatgtgcgttycttggcttgtgaatccctcttccatctttgaagccagcagtgtaatattttcaaatctccctctctggctctgacactcctgcctcccttttataagaactcatgtaaatcagagtg

SEQ ID NO: 350210 - DNA, 524 bp, Homo sapiens
attgggcacttgggatcagatggcaactgaagcctatgctcatttcacatcaccaaatggtttggagttcaaaatattttagagattttaaataattacataatttttgatttacatgagatctcactttcagaagcaagtcacgtatttgaaagagtataaattatgatttatgtttctgtagctgtttttagagagctacagccctcagattcttgtacatcagggtgatgtacaaccctcagattcttgtacatcrgggtagttcaattttaagagcagctagttggcataagagtaaacggtgcccgtgtccatggagtgctgaagatgcagatttcagaactttcatgaatttttaaaattatgtttccatactttggccggtgttgggggaggtctgctcgtcttatttctttgaaaatacacacttattgcagagagttcgcggtagatatatacacctagctaacttaaagggcatctgagagatggcgtttttagttttccagacgtgatagttg

SEQ ID NO: 350211 - DNA, 524 bp, Homo sapiens
attgggcacttgggatcagatggcaactgaagcctatgctcatttcacatcaccaaatggtttggagttcaaaatattttagagattttaaataattacataatttttgatttacatgagatctcactttcagaagcaagtcacgtatttgaaagagtataaattatgatttatgtttctgtagctgtttttagagagctacagccctcagattcttgtacatcagggtgatgtacaaccctcagattcttgtacatcagggtagttcaattttaagagcagctagttggcataagagtaaacggtgcccgtgtccatggagtgctgaagatgcagatttcagaactttcatgaatttttaaaattatgtttccatactttggccggtgttgggggaggtctgctcrtcttatttctttgaaaatacacacttattgcagagagttcgcggtagatatatacacctagctaacttaaagggcatctgagagatggcgtttttagttttccagacgtgatagttg

SEQ ID NO: 350212 - DNA, 503 bp, Homo sapiens
acaaaacctttatacatctccataaattcaaacaagttgcatacatacaaacatatgcaaataatttaaggtagttcttggaagtggacataagtaaacattcaaatggctaatcatggcttaaaaggttttcaataattttgtcacctgatccaagtgctcttacaagtaattatagctcttttttccctctacacaagtccgtgagaaggaggcaggaccgaaaaatatgaattaaagggtctccccacagcaccctcaccaagacatatatgagacttgggcacctggccaatgacaaatacaaggagaattttctttactcctggcattgcaacatgctttcttgagctgatggaaaaataattattggcaaccaatcacaacagccctgcttatttattactagtgacaaacagattaaatgtataatagtgaaaatgaaccaattmaggtaaaaatcacagaaacagaaaggcactatgtgcagcctttgtcaaatg

SEQ ID NO: 350213 - DNA, 591 bp, Homo sapiens
gtccactttaaggtcaacccctcaccctcagaccatcctcgccaaatggcctgtagtgagtgccagatcctgcttggtccttctagggtctttcctcccaaaggcagccattgccacatatggacccctagagccaagaggtactcaatgggtggcttttgggcaggcaggaactaggacagagcttggacttggtggctggaggtcttcatgcatgctcacaaacctccgatgtgaaggttagarccatcggtggaaagagaaaaaggataaagcacaggcctgagcctttcatttgtatttttatccagggccctgcaaatgcagaaacagacctgcagggagaaaggggagtaagttagttggattacctcaaatttgaaagctaatttgattttgttagtacaccggaacatgccagttctctgatggctgggctcatgcaggtccacatctctagaatgtgatacccaaaccaaaatctagttcattcacagtgagaaccaaagctaccaagctgattcggatgttcatgtcagttgatcaaatacctgctccctatagaaactgtatatggaaaaccagattaca

SEQ ID NO: 350214 - DNA, 600 bp, Homo sapiens
cggcacccataaatatttgttgaataactgactagccatgaagcacatcgattcatccttcttctaragagccctggcatagggcattctcagcaccaactcctagggtttcctcaggtgctgtgagctcgggcagtgagccttggaaccagacacaaaaggtccatagtctaaaaggagagggttccctattgtgacctaccttgtgtaaatggtttctgccctggggatgtggaaacaggaatctttgcatagtgctcatggaggtacagactgttgcagccattttggtaagcaatcttgtagaatttagtcaaattaagtaagcatacatccagtgttccaactatatccctcctgggtatgtatcccatggatattctcacccaagtgcataaaaggacatatataaaaatgttaatttcaatatttgtgggtgtcttccatcactggaaaagcagatgggtaaatattgtggggcacacaattgggtattaagcagcgattaggaacaatgggttagttatacatccaacaatatggaacatagcaacatagagccacactaatgcttagtggaataagtagaaaacagaacaa

SEQ ID NO: 350215 - DNA, 600 bp, Homo sapiens
cggcacccataaatatttgttgaataactgactagccatgaagcacatcgattcatccttcttctaaagagccctggcatagggcattctcagcaccaactcctagggtttcctcaggtgctgtgagctcgggcagtgagccttggaaccagacacaaaaggtccatagtctaaaaggagagggttccctattgtgacctaccttgtgtaaatggtttctgccctggggatgtggaaacaggaatctttgcatagtgctcatggaggtacagactgttgcagccattttggtaagcaatcttgtagaatttagtcaaattaagtaagcatacatccagtgttccaactatatccctcctgggtatgtatcccatggatattctcacccaagtgcataaaaggacatatataaaaatgttaatttcaatatttgtgggtgtcttccatcactggaaaagcagatgggtaaatattgtggggcacacaattgggtattaagcagmgattaggaacaatgggttagttatacatccaacaatatggaacatagcaacatagagccacactaatgcttagtggaataagtagaaaacagaacaa

SEQ ID NO: 350216 - DNA, 603 bp, Homo sapiens
taagtataactacttctactcacttttggtttctgtttgcatggaatatctttttccatccctttatttttagcctataagtcttttaaggtgacatgagtttcttgtaggcagcatatagttgggccatgttttctatccattcaacmagtctatatcttttaattggaaagcctaatttgttgatattcaagattattattgatatgtgaggacttattcctgtcattttattaattgatttctaggtttttttgtatagcctttgtttattttcttctctctcattgtttatcattgtttttcttagttggtaacatttaagtcctttctcttcttatttgtatgtgtgttctactcagtgggctttatattttcgtgtgttttcatgatgacatgtatcatcctttcacttcaaaatgcaggactctgataagaattctttgttgagctagtctagtggtgataaattccctcagcttttgcttgtctgggaaagcctttatctctccttcatttgtgaaaaataactttgttgagtatggtattcttgcctgaccgtttttcttctttcagcactttgaatatcttttcccattctct

SEQ ID NO: 350217 - DNA, 471 bp, Homo sapiens
cttccttggcagttatttatcacattaaaatatctttcaagaaccatgatgaggcgtctgattattacaaagcatcatgccccatgaactgtctatgtttcaaggaaagatactgggaattatttctatttgacagccagtgcctagccaagtgcctggcatatagagggagtttcaaaaatatttaatgcattaatctaaactccttttatagaaaaaaatgtccatatgtgctgatgtgtgtctctgtgcctttacctaaaagtcagggtctgtgggctccggtagccatcccgctcacactttcttctagaattctaataagctcatctattttcttgcctataataygaacaaacaattagaacaaaaaaggaaggaatgtaatctgcttctagaggacaacacttatggtagcaataagagaaagcctagcagagatgacagaaagaaaattagaaaaagcaaagg

SEQ ID NO: 350218 - DNA, 654 bp, Homo sapiens
taacagtaagttggttataactactataaccaagatgttcttctgaatttctttatatattaattcacttaatccttccccaaaactagtaaggtaggtgccaatattattgttcccattttgcagatgaggaaaaccaaggcatagagggactgagtaaattgcctaatactacacagctagaaaatggaagacctggagttcaaactcaaggtagtctggatccccaaccttaaccactacacacactgtcactctctaaacagaaaagaatgtgctggtcatgactggygtgtcagaaagtctgtttgcaagaaccattataaatgatgtgtttccttcaatctattgttttagtctttcaatgactgattcccttggagaagctagccacgtaagaaaatgaaaggtcaataagcaaaagcctactgagttaggtttcatttgtctgtgttttaaggtagagaacacagaacatttgtctgtgttttaaggcagtttcactcattcacttagaagattttaagaacagagcttgtgaaacttgtcccccaaaaaactcacaaacagaacctagacttgggtccacattttggccagttaatatggacagaatcatgaagaaggaaaaagaaggtaacatgagaggagaaa

SEQ ID NO: 350219 - DNA, 567 bp, Homo sapiens
caaattgttctccatagtggtgatatttgtttattttcccaccaacagtggacaagggttcctttctcttcacatctttgccagcatttgttattgtctgtcttttgaatatttaaaaatttattttgtgacctaatatatgacccatccttgagaatgatacatgtgctragaagaatgtattctgcagccactgaaataaatgttctgtaaatatctattaggtccatttagtctatagtgcagattaaatctgatgttcgtttgttgacattctgtctggaagatctgtccaatgctgaaaggctgaaatgaggtaaagtgatatcccattgtagttttaatttgcatttctctgaaaatcagtgacgttgagcatcttttcatatacctgtttgccatttgcatgtcttcttttgaaaaatgtctattcagatattttgcccattttaaaatcagattattagattttttccaatagagttgttttagctccttataaattctgattattaaactcttgtcagatggatagtttgcacatattttctcccattctatgggttg

SEQ ID NO: 350220 - DNA, 463 bp, Homo sapiens
aaaatttaaatgatgttttctctgttgagttttgaatctgtacttaaggcctgttactcctttcttcttccctatttctcccttttggtacgggaatggyagtcccatgcctgtctcaccactgtattttggaagcctataatttgttttgagttcacaggcttgtaccaggagataaatttgcctcaaggtgaatcatcccttgagcctcacccatatctaatttagatgagactctagactttggatctttgaggtgattctggaacaagctaagactctgggggctaatgggatagaataaatgcgttatgtttgtgagaaggacatgaatttggggggccaggggtgagacactatggtttgaatgtgtctcctccaaaagtcatgttgaagcataatccccaatgacaatattgagaggtggggctgaatgggaggttttaaggtcatgagggctgtg

SEQ ID NO: 350221 - DNA, 463 bp, Homo sapiens
aaaatttaaatgatgttttctctgttgagttttgaatctgtacttaaggcctgttactcctttcttcttccctatttctcccttttggtacgggaatggtagtcccatgcctgtctcaccactgtattttggaagyctataatttgttttgagttcacaggcttgtaccaggagataaatttgcctcaaggtgaatcatcccttgagcctcacccatatctaatttagatgagactctagactttggatctttgaggtgattctggaacaagctaagactctgggggctaatgggatagaataaatgcgttatgtttgtgagaaggacatgaatttggggggccaggggtgagacactatggtttgaatgtgtctcctccaaaagtcatgttgaagcataatccccaatgacaatattgagaggtggggctgaatgggaggttttaaggtcatgagggctgtg

SEQ ID NO: 350222 - DNA, 585 bp, Homo sapiens
tgttgcctgtcagtcttgccaacttttaaatttttgcaatctaataggttagatgtagtatctttgtcttctttcagtttgcatttcttgtattattaataaaactggtcatctatttatgtttaatatagatatgtaatctgttaatgttcacttttttctaaaggatttttggtgtttttctttacagttcttyatatatcagataaattagtacttcgtgacatatgttgcaaatagttattctcaatctgttgtttgccctttgactttgcttgtggtggggttctgaggggtttttttttgtttgtttgtttgtttgtttttgcaatgcaaaaggttttgatttttatgtggtgaaatttatcaatttttagaaattgtatctgaattctaagtcatatttaggtagcattccctccactcaggctatagagaaaatcatcccgattttcctttagcattgttaggtcaatattttaacatttagatttctgattcatttggagtttattcttatgtatggtattgttaaaagaaaaaccttagccaaattaaatttaacagagtttaattgagcaaaga

SEQ ID NO: 350223 - DNA, 471 bp, Homo sapiens
agccagattggttacagcttggcattcgccttatttgaatgtggtttgaacagttggcccccttagggtggcccaaactcagtgagtggcacaagagtaggttatagcctgtttatacctttaagttacagttcactacatacacagaaatctttaggctgaactgaaaatatgtaaggaggcagctttaggctaaccttgatttaacagtatgatgaattgatcaaattttayctttaaaataattttcaattacatggagaaatgcacctaggaatgacaattcaaaaagaggaagataaaaaattgttcaatatgatacctacattggcaaaaaaaaaaaaaaaaaaagtcaaactctgtaaaatattttaagatttcagaggcttattctgagccaaatatgaatgatcatggcctgaggcacagtctcaagaggtcctgagaacatatacccaaggtggtttgggt

SEQ ID NO: 350224 - DNA, 669 bp, Homo sapiens
accaaacatcataaatatttatgtctgcttaataatattatagggaatttagttttttcttcagtgtgcttttcatattttctataaggaacttgtattacttcataatcaggaaaaagcagyacatgtactttaatttttttaaaaaagatcaagacttggccctgcttttttttctttgtagtcgagaaaaagacttagaaaatacatgtttagctgaagtaaaataagaacaggatcaatacatcctttttctccctcttctctttgcacatcctctctctgcctcttctcatggtttttcctctatcttctcactccccatgtctaacataacagtaaaatgcatgcagaaaatgagcaagccttctacagcagaatattttattgctgcaaaagctacttggggttaatttgttcataaaacaccactgtaagttatgacaagaacttagagaccacaatgctaatggataatgtaaagccctctggcataccaaatactccttcgctcttagctaacagtcttgaaacaagcaacaggaaccctattacaaggctttctctgtgttatcctagagggtgtaaaattccaggtcccttcattttagcagctgagtggtcaggggagaattattgcttcctttattttatggccctagtgagtct

SEQ ID NO: 350225 - DNA, 669 bp, Homo sapiens
accaaacatcataaatatttatgtctgcttaataatattatagggaatttagttttttcttcagtgtgcttttcatattttctataaggaacttgtattacttcataatcaggaaaaagcagcacatgtactttaatttttttaaaaaagatcaagacttggccctgcttttttttctttgtagtcgagaaaaagacttagaaaatacatgtttagytgaagtaaaataagaacaggatcaatacatcctttttctccctcttctctttgcacatcctctctctgcctcttctcatggtttttcctctatcttctcactccccatgtctaacataacagtaaaatgcatgcagaaaatgagcaagccttctacagcagaatattttattgctgcaaaagctacttggggttaatttgttcataaaacaccactgtaagttatgacaagaacttagagaccacaatgctaatggataatgtaaagccctctggcataccaaatactccttcgctcttagctaacagtcttgaaacaagcaacaggaaccctattacaaggctttctctgtgttatcctagagggtgtaaaattccaggtcccttcattttagcagctgagtggtcaggggagaattattgcttcctttattttatggccctagtgagtct

SEQ ID NO: 350226 - DNA, 515 bp, Homo sapiens
ttttctttcattgctatgtttgtgcattttgtccaattctttgttcaaaacaccaagaacctggacaccctctgccagtaacaatacccaggtgtgctgtgagkgtaaaggaaacaagggatcacttagcacagtatatggcacaaaggcatactagtaatcattctaattttttttaccatgattgatatttattgagtacacaatgaatgccaaacattatgctaataacttgtatggatcatctaatttactcctcacaaccaccgtagaaagaagataccattattattttcattccataggtgagacaactaagataaagaaaagttaagcaactcgtccaaagtcacactgcctgtgggagtctggattccaaatcaggcaatctgactacactgctctatgctgttctgctaaataaaaaactcttagcaaaatatgatgtcacccctgtgatccttgcaaccaacttaaagcattggacatttaagcagaagttcctaatttaaaga

SEQ ID NO: 350227 - DNA, 515 bp, Homo sapiens
ttttctttcattgctatgtttgtgcattttgtccaattctttgttcaaaacaccaagaacctggacaccctctgccagtaacaatacccaggtgtgctgtgagtgtaaaggaaacaagggatcacttagcacagtatatggcacaaaggcatactagtaatcattctaattttttttaccatgattgatatttattgagtacacaatgaatgccaaacattatgytaataacttgtatggatcatctaatttactcctcacaaccaccgtagaaagaagataccattattattttcattccataggtgagacaactaagataaagaaaagttaagcaactcgtccaaagtcacactgcctgtgggagtctggattccaaatcaggcaatctgactacactgctctatgctgttctgctaaataaaaaactcttagcaaaatatgatgtcacccctgtgatccttgcaaccaacttaaagcattggacatttaagcagaagttcctaatttaaaga

SEQ ID NO: 350228 - DNA, 561 bp, Homo sapiens
gtgcaaaattaaaggttcaagaataaccaagatagttttggaagaagaaaaagaatgaggaggaacttgctctgttggatgtcaagatgaatttaaaaattatggtatttagccccgggcatggtggctcatgcctgtaatctcagcactttgagaggcggaggcgggtgaatcaccttaggtcaggagttcaagaccagcttggccaacatggtgaaaccccatctctactaaaaacaaaaattagctgggcatggtggcatgtgcctgtaatcccagctacttgggaggctgaggtgggagaattgcttgaacctgggaggcggaggttgcagtgagccgagatcatgccattgcactccaacctgggagacaagaacgacactccrtctcaaaaaatagaaataaaagttatgctatttagattgaaatactatatacaatgacaaagaacaaactgttatgcataacatgggatgactctctcccagacttaatgttgaatgaaattagtgagacacaaggattacgtattgtatgatttcatttatagcaagctca

SEQ ID NO: 350229 - DNA, 567 bp, Homo sapiens
tttcagaactccgagaattacccagtggaatgaagatctccaggagaaaagactttaatggtttccagaaagacaggccataaacaagagttcaagaatcagagttccatcagacatctcaataacaatattacaatttagaagacaatagaacatatgccttccacatttaaaggacagttgctgtccaaattagagttctatacacagccaaattatccaacatgggaactctagaacaaacacattttttaggtgtgcaagatgggacactgattgttgcccttcaatagctttcttcttctttctgtcctcctcctccttcttctttttcttcttcttctccttctccttctcctttgccttctgtagtaaacatgacaaattctatctggacccatgaagatccagaatatgtaaaaattttccaactttcattctagctagatgtgtccaygtgactaagctttgggccaaaagtatgtaagtagaagtaattgatggtactccccaaaagttttattaaaagctaaaagcaggcccttttccttccattttttttctcca

SEQ ID NO: 350230 - DNA, 634 bp, Homo sapiens
tacacatggattttcttccaactctgccacgtcgaagacagcaaaatcaaccattcctctttttcctcagcctactcaacatgaagactatgaggatgaagacctttatgatgatcaacttccacttaatgaatagtaaatatatttttccttcctaatgatttaacaatttctctagcttactttgttgaagaatacagtatataatacatatacaaaatatgtgttaattaactttatgttatcagtaaggcttttggtcarcagtaggctattagtagttacgtttgcggggagtcaaaagttgtatgcgagtttttgactgcttgagggttggtgtctctaaccgccacattgtttaagggtcaactgaattaggctttgtgcttagccagtgcagatattcctgtctttatggaatagtctaattctggagcatatgaaatgccataagactaaatacttcaatggaaaaaatcaagtagctacctggaaggcttcggtgctctgggacatgtttcacattcttagtctcccctgttgctgggagttatggactgtaatagctatttcactgttgtaatacagtaagtattttgttgactttggttttatttacatcagtattatttaa

SEQ ID NO: 350231 - DNA, 634 bp, Homo sapiens
tacacatggattttcttccaactctgccacgtcgaagacagcaaaatcaaccattcctctttttcctcagcctactcaacatgaagactatgaggatgaagacctttatgatgatcaacttccacttaatgaatagtaaatatatttttccttcctaatgatttaacaatttctctagcttactttgttgaagaatacagtatataatacatatacaaaatatgtgttaattaactttatgttatcagtaaggcttttggtcaacagtaggctattagtagttacgtttgcggggagtcaaaagttgtatgcgagtttttgactgcttgagggttggtgtstctaaccgccacattgtttaagggtcaactgaattaggctttgtgcttagccagtgcagatattcctgtctttatggaatagtctaattctggagcatatgaaatgccataagactaaatacttcaatggaaaaaatcaagtagctacctggaaggcttcggtgctctgggacatgtttcacattcttagtctcccctgttgctgggagttatggactgtaatagctatttcactgttgtaatacagtaagtattttgttgactttggttttatttacatcagtattatttaa

SEQ ID NO: 350232 - DNA, 565 bp, Homo sapiens
atttaattcagtgaacacttattgagtattatttaattcagtgaacacttactgagtatgtatgaatatacatactcaataagatgtggaatggccatcttagmgactgtaaataattacagtgccataactacaataataaaaacatgtatgagatgcagacaagagagagtgcttgccacccatttgtttctagaaaattcacctaggctaaagcatctactgcaagtccacattgaaaatgttagggcctcatcttgatgtttgaagctgataattttgggtgtcaccagtagttttagcccaactccacttttatttactccagcttgaatttttgaaagtttaagactttaagccatgtaaagtgagacaatttatcattttcctgcactaatttttaaaaaatcatacaacagctgaatgaggtctgctatgtcctttttgtagatgaagaagcgtattacatcactctgtccaaaagaaattttattcagatttatttcagaaagagctttacttcacctgagaaattgccttttccttatggacaaagcagattatt

SEQ ID NO: 350233 - DNA, 557 bp, Homo sapiens
  misc_feature (1)...(557): n = A,T,C or G
aggattcccttttctccacatccttgccagcatttgttattgcctgttttttggataaaagtcattttaactggggtgagatgatatctcattgtagttttgatntgcatttctctgatgatcagtgatsttgagcaccttttcatatgcctgtttgccatttgtacatcttcttttgagaaatgtctattcaaacatttggcccatattttgattggattattagatttttttttcctacagagtgttgcttgagctccttatatattctggttatgaatccctggtcagaggggtagtttgcaaatattttctccaattctgtgggtttcctcatgttgttgtttcctttgctgtgcagaagcttttcaacttgatatgattccatttgtccatttttgctttggttgcctgtgcttttggggtgttactcaagaaatttttgccaagaccaaggtcctggagattttccccaatgttttcttttagtaatttcatagtttgaggtcttagagttaagtctttaatccagtttgattggatttctgtatacggtg

SEQ ID NO: 350234 - DNA, 521 bp, Homo sapiens
cattggtactcaacatccagatctgacacttatcactatcttaccatgtttgcttcatttgtcatttttttgtttgcttaagtatcttaaaatcccatacattgtgttatttcactgctgtgaacactttgggtagataccacgatatcacacctaacagaggcagcagcagtccttcggcttcatctcatagccagtccttaagcaaatttccctgattatctcaaaaatcatcttctagttggtttgttagaatcaacagaatataagtcacatgatgatytcgtttttaacaatcacctcagatgactttgatgttagctactttgagaaccactggaaattattttgccaacttgaaagttcaagttaggataccacaattcttggcacgtttggtggattataaatgtgattttgaaatattagaggaagcatttggggttaatgacaggatatgaatttatattagtaagtttgataagataaaatttcctcagtgaacggagaatctcagcccc

SEQ ID NO: 350235 - DNA, 514 bp, Homo sapiens
ctctcttaaggctccacactagcctggcttcagctaccttctgcatcttggtggtcccaaartgctacagccaactgtcatttatctttgagcatcaaatatgaatgcgcacacacacacacacacacacacacacacccctatccattcatgcatctgcccatttatctaacggagccccttcctcctgcatctggccattggtggcatctcagcccgggtgtctgacgctgagctcttcctccctgccaggcacccgcctccctcctgggtgctccccgtccctgagcccactgcatcttttgctgtggccctgacccctccacctgcaaggccagcctggcctaggctagaagcccaggggggctcagcgatgctggggatggctcaggcctcatcttgcagctctaggcccaggtgggctcatgacccctgtgacctgctaagcctcagccccctctgtcacacaaatgcagttcatatctcacctgggttccagacaccccgacccccc

SEQ ID NO: 350236 - DNA, 514 bp, Homo sapiens
ctctcttaaggctccacactagcctggcttcagctaccttctgcatcttggtggtcccaaagtgctacagccaactgtcatttatctttgagcatcaaatatgaatgcgcacacacacacacacacacacacacacacccctatccattcatgcatctgcccatttatctaacggagccccttcctcctgcatctggccaktggtggcatctcagcccgggtgtctgacgctgagctcttcctccctgccaggcacccgcctccctcctgggtgctccccgtccctgagcccactgcatcttttgctgtggccctgacccctccacctgcaaggccagcctggcctaggctagaagcccaggggggctcagcgatgctggggatggctcaggcctcatcttgcagctctaggcccaggtgggctcatgacccctgtgacctgctaagcctcagccccctctgtcacacaaatgcagttcatatctcacctgggttccagacaccccgacccccc

SEQ ID NO: 350237 - DNA, 514 bp, Homo sapiens
ctctcttaaggctccacactagcctggcttcagctaccttctgcatcttggtggtcccaaagtgctacagccaactgtcatttatctttgagcatcaaatatgaatgcgcacacacacacacacacacacacacacacccctatccattcatgcatctgcccatttatctaacggagccccttcctcctgcatctggccattggtggcatctcagcccgggtgtctgacgctgagctcttcctccctgccaggcacccgcctccctcctgggtgctccccgtccctgagcccactgcatcytttgctgtggccctgacccctccacctgcaaggccagcctggcctaggctagaagcccaggggggctcagcgatgctggggatggctcaggcctcatcttgcagctctaggcccaggtgggctcatgacccctgtgacctgctaagcctcagccccctctgtcacacaaatgcagttcatatctcacctgggttccagacaccccgacccccc

SEQ ID NO: 350238 - DNA, 551 bp, Homo sapiens
ccttctgcgtgcagctcccggcagctgtcacaggcctggggcttgacatgacaattattccctcgccacccttggaggtgccctcgccacccctgggggcagagctgccgctgacaggagtgatggaaggagaggctgcgtggccgcgctgctgccgctcaaacacctcgaagcccacagcttcgaggacaggcgctggaaagccagtgccagctgcgccarctcagccgtctgtctcaggcaggcaccgtctgctgtggccggcgggtggtgtgtctgggccggctctgctctagatgccgctaaggtgcaggaggcatggctgctgccctctgggagctcgtcctggggtgtccgtgtgacacggacctgcccatgcaaggtgctcagaccccctccacctcagagttctcacctgaaaagtggggataataactgtctccacattacaaccgggaggaccaactcaggctcactcattcagaaaacacacctggggccccagcatctggttatcaggcctggtgatgggatttgccaccaaccgaggg

SEQ ID NO: 350239 - DNA, 551 bp, Homo sapiens
ccttctgcgtgcagctcccggcagctgtcacaggcctggggcttgacatgacaattattccctcgccacccttggaggtgccctcgccacccctgggggcagagctgccgctgacaggagtgatggaaggagaggctgcgtggccgcgctgctgccgctcaaacacctcgaagcccacagcttcgaggacaggcgctggaaagccagtgccagctgcgccagctcagccgtctgtctcaggcaggcaccgtctgctgtggccggcgggtggtgtgtctgggccggctctgctctagatgccgctaaggtgcaggaggcatggctgctgccctctgggagctcgtcctggggtgtccrtgtgacacggacctgcccatgcaaggtgctcagaccccctccacctcagagttctcacctgaaaagtggggataataactgtctccacattacaaccgggaggaccaactcaggctcactcattcagaaaacacacctggggccccagcatctggttatcaggcctggtgatgggatttgccaccaaccgaggg

SEQ ID NO: 350240 - DNA, 528 bp, Homo sapiens
caactctgcctgtagcccagccctaatggcgcatcctatctgctgccttgcctgagagccaggaggacgactgggagctcctgggccccaggccagatagatgggaacactgtccacaccttgctcacggccgtcarccatgcatccggttgaaactaggactctcatactgcattgtgatctgatcattaataaaagaatgctgatttgtaaaaaaaaaagtgcctcaacttcttacgcacagcctaatttgggcctcacacaccccagaggggagaccctgtggtcctacagcctcaagaagaaagcaagtctttcgggctctgcaatctctccctgggaggccccactccaccgcacaggtggtagaggcacgcccaggtgccatctcttggcactgattcaacaatggctggagcagcttctccctgacaggcacccacagtggccaccctatgcggaccttacctccctccagtaacccagagtggacaggcaggactaacacatcctggagacatgtggaca

SEQ ID NO: 350241 - DNA, 588 bp, Homo sapiens
gagaccagcctggccaacatactgaaaccctatgtctactaaaaatacaaaaattagccaggcgtgatggcacatgcctgtaatcccagctactcaggaagttgatgcaggaaaatcacttkaacccaggagggggaggttagagtgagccgagatcatgccaatgcactccagcctgggggacagagcaacactccatctccaaaaaaagcaggggtgattttctgaaacatggaattaaacttcagttggtttattcaaaaacaaaagaaaggaaccttcatcaaattccatcctaaagaatgtaagaagaaagataagtcatcttgtccattcctaagactctgcctactttatacgcatttatgacttcatttgctttccaatatttaatgagcatctgttattcactggatagtgggcttcatccacttacatccaggtctacaggaatatggacacttacggatagaaatggaaaaagtctgattttttattctctttataaatgagttttaattcaagtctctcaaagttagggccttttattagtgactgtaaatctcagagcgacaagaagtcataaga

SEQ ID NO: 350242 - DNA, 588 bp, Homo sapiens
gagaccagcctggccaacatactgaaaccctatgtctactaaaaatacaaaaattagccaggcgtgatggcacatgcctgtaatcccagctactcaggaagttgatgcaggaaaatcactttaacccaggagggggaggttagagtgagccgagatcatgccaatgcactccagcctgggggacagagcaacactccatctccaaaaaaagcaggggtgattttctgaaacatggaattaaacttcagttggtttattcaaaaacaaaagaaaggaaccttcatcaaattccatcctaaagaatgtaagaagaaagataagtcatcttgtccattcctaagactctgcctactttatacgcatttatgacttcatttgctttccaatatttaatgagcatctgttattcactggatagtgggcttcatccacttacatccargtctacaggaatatggacacttacggatagaaatggaaaaagtctgattttttattctctttataaatgagttttaattcaagtctctcaaagttagggccttttattagtgactgtaaatctcagagcgacaagaagtcataaga

SEQ ID NO: 350243 - DNA, 613 bp, Homo sapiens
ctcgctctgtcaccccggctggagtgcaatggcacgacctcggctcactgcaacctctgcctcctgggttcaagcgattctccctcctcagcctcctgagtagctgggcttacaagctaatttttgtatttttagtaaagacggggaatgcaaatattttctactctatcttagaagttatgaagtagggttctggaaaacaacctgtgtttaaatctctactctacagccgctgtgtcagcttgggcaagttatttgtcagcaatggttttcttatgtgccaaatataaatagccccatccattgctcccttcctcaggtgctgccagcattcaggaaggtgtggagagctcaggtctgggcacagggagctctgcacaggtgcgtcccctgctgctgttagccacgacatttccttagacggcctgtcagctgcattctgagttgtggcagagtttcttygctttctttcaccaaatgcattttttttaaaaatgtcacctaaattccctaatcatttctcaccactcttccactgatttttatattacctgcaatcttctttctatcctataaactcatctatgatctcaaatgctcccacctctcatgt

SEQ ID NO: 350244 - DNA, 603 bp, Homo sapiens
ctacactttacagtcaatgagcaaaaaccaattccactcctcaaattcttctcacttactattcagctstctcaattcattaatttgcttaatcagccctcatcaataacacttctctccaatgcattcctctaactcaaaggaaaagcaagctctgaatactcaaaagtgtgattctataaagaaacaagaatggcagaaaaaatatacttgtatcaatgccttttggagccttagcagtaacttcatattaacatgtctgctattgtcaaagatcaagggtgaaagacatttctcattttgctgataccgtagtcgattaaaaaatttgaattaaatggttccattattgagtatctcacaaacacagttccatggaggttatcgacacagagaggcggcaggaagatctctgaagcattttctacaaagtgtggctcatctaaattcagatttccacaggcagcataaaaaccactcacatttgggaaatttgcaggtccatgggcattagggcagtagacttgaacaagagtgagcaactgttcttctgcttatcaagttctctgatgaacagagagctgacaagtaaaatcaattatg

SEQ ID NO: 350245 - DNA, 603 bp, Homo sapiens
ctacactttacagtcaatgagcaaaaaccaattccactcctcaaattcttctcacttactattcagctgtctcaattcattaatttgcttaatcagccctcatcaataacacttctctccaatgcattcctctaactcaaaggaaaagcaagctctgaatactcaaaagtgtgattctataaagaaacaagaatggcagaaaaaatatacttgtatcaatgccttttggagccttagcagtaacttcatattaacatgtctgctattgtcaaagatcaagggtgaaagacatttctcattttgctgataccgtagtcgattaaaaaatttgaattaaatggttccattattgagtatctcacaaacacagttccatggaggttatcgacacagagaggcggcaggaagatctctgaagcattttctacaaagtgtggctcayctaaattcagatttccacaggcagcataaaaaccactcacatttgggaaatttgcaggtccatgggcattagggcagtagacttgaacaagagtgagcaactgttcttctgcttatcaagttctctgatgaacagagagctgacaagtaaaatcaattatg

SEQ ID NO: 350246 - DNA, 510 bp, Homo sapiens
aatctcttcaaaatgggggtaataaaacatatttgaggtcttatgataatgtaacagatgatgtacatgtaacatgtcatcaacacagttccttgcaaatggtaggtacttaacagtttgtagccactaataataagaatasagtacgatccttgaaggcagagactttactgtcctcactccttttgtagacaagtggttgcttgcattgactgagggcagagcaactgttgtcaagtgactttggaagaagctgccaggtccccagccctggttaagcaaggctcagagctgcagttgcttcacagtacccagagtttggaaagctggacacatacttattgccacgctccctgggtccctggcctctgcagcatggctgactgcacatgagccaggaagcatgccctgtgagcagaaggggcctcggaagcagcttctgtctgcagtagctctgctcggtcgagcatcagatgcctctcttcttctgcagcgcatcgcaggtgcttg

SEQ ID NO: 350247 - DNA, 510 bp, Homo sapiens
aatctcttcaaaatgggggtaataaaacatatttgaggtcttatgataatgtaacagatgatgtacatgtaacatgtcatcaacacagttccttgcaaatggtaggtacttaacagtttgtagccactaataataagaatacagtacgatccttgaaggcagagactttactgtcctcactccttttgtagacaagtggttgcttgcattgactgagggcagagcaactgttgtcaagtgactttggaagaagctgccaggtccccagccctggttaagcaaggctcagagctgcagttgcttcacagtacccagagtttggaaagctggacacatacttattgccacgctccctgggtccctggcctctgcagcatggctgactgcacatragccaggaagcatgccctgtgagcagaaggggcctcggaagcagcttctgtctgcagtagctctgctcggtcgagcatcagatgcctctcttcttctgcagcgcatcgcaggtgcttg

SEQ ID NO: 350248 - DNA, 657 bp, Homo sapiens
acattttggctactacaaaggacattaattcctagggggaaaaaagagataataatagagaaaagaaaaaaaaaaacctcttcactaacccatgtattttcagctcacaacatctataagaactgtagaaaacttttggactctatcattcttagaaactattttatctcatatttgaacagcctggatgtgggaggcaaggtttcaatacttactacaaagatagaaatctagctttgaaaagttctgaacacagagtagaacagcttgagggtgttacttcaatattttctcttaaaggtaagctgagcagttacatatggcagtgtgccgtttaggaagatccctttacacaacaagttataagtaaatattcttgcagatgggtgtctaagagaaagcggctagtgcaatcaaataaaatcttktacaatgtctatgaaccaacacattaattaagttgattggattttgaaatctgtgattttaaaggctgtgatttacttgattatactcttttacaaacagatctgccttattaactcattcaaattcccaggggctccaacaaaaagtagcattaagcaagcaaaaagaaggtctaggacaactttaaaaaagaaaacccatagtgtagcaaagcgagatttctaagct

SEQ ID NO: 350249 - DNA, 626 bp, Homo sapiens
tcacaatctcacctttagaaatggcaatttattgattgctaaagcaggaggggaagccgcctaagacatcctgattcaattcataactcctggtaagtataatggaaaataggaacagagcaggaagatggttgttcactcctgggggtgaacataaagcctctgaaaaggggcaaagaaacagagaattgataccccccaggaatgccacttgcatcctggtcttgcgtttctggcttggtaaggaactcgtctctttggttgccgttggttatgtcagactccaaatatcccaaactgaatggttgttatccatacagccaatgggtacctgccaagtgctagacactgcactgaggactctgcaaacatgatcttatttatttatttatatttatttattttcagagtttaactctgccaccgaggctgcagtgcagtggtgcgatctcagctcactgcaacctccctgcctcctaagttcaggtgattctcctgcctcaccctccggagtagctgggattacaagcrcgtaccaccatgcccagataattttgtatttttagtgaagatggggtttcatcatgttggccaggctgggaagagagagaatcagagaggttagg

SEQ ID NO: 350250 - DNA, 580 bp, Homo sapiens
cttgaaaaactgttattagattgaatctcctaatgtagcatttacatctttttgtcactctgctcaagctcaacagcttcaagtagcttatttctgtcaaccacataaaatgtatatagtttgctgtccagcaattccaacacatttatatattgatttattctttcaataatayaagaaatactgtaataaaaatataacaataattttaatacaacgcaatcaaatacaatcataaaataatcatcgtccaagaagtcaaactgactctggaacatcatacagctcagtgctctttttatctagatttctttactgctaattttatttgggttgattttttccccaccctgcctcttccagttcacatttcagacagtccagaaagaaaaacagattctggccttctccgagttcacgtgtctgaagctgtctaacctgactagcaaggttccaggaaatctctctacctggcccagcttttgcatcatttgtccaccttggaccaatgaccaacacaggggaagagcaaaccctgattggctgcacctgggtcacatgttcattcctgcaacagggc

SEQ ID NO: 350251 - DNA, 604 bp, Homo sapiens
ctctctgatccttaaaacttcaaataggtttttccaaaacccctttctatactttgtgaaaagcccaaagcactttttaaaatttctgcagattgtcagggtccttaaactctcatgggatatatcaggtttccatttcttgcccttgctgaatttctgttactttctgtttcttgctgttgagttacctttgaattaaactgacgctaacacgaaccacagtgactttccttgacaacacacaaacaaaatgttcacatgaggacactgcatgtgtcagtcaggatgcgccatgkgatgctgtggcaacaaatgactccaaaatctaaaaggtccaggaataacaaaagtttatttcttgctcatatcacatgtccatcatggatttggtggtaagagacagggtggtgttgcttctcaaagactctcagcaatcttggatgaaggaaaatccatcatctgaaatatttctagccaccatatcagagagataagaaatttctagaaactcttgcatcagcaataaaatgttccagcacctgtcactttcatttatagttcattagccagaactgctctcatggcctcactcaaatcacaagaa

SEQ ID NO: 350252 - DNA, 604 bp, Homo sapiens
ctctctgatccttaaaacttcaaataggtttttccaaaacccctttctatactttgtgaaaagcccaaagcactttttaaaatttctgcagattgtcagggtccttaaactctcatgggatatatcaggtttccatttcttgcccttgctgaatttctgttactttctgtttcttgctgttgagttacctttgaattaaactgacgctaacacgaaccacagtgactttccttgacaacacacaaacaaaatgttcacatgaggacactgcatgtgtcagtcaggatgcgccatgtgatgctgtggcaacaaatgactccaaaatctaaaaggtccaggaataacaaaagtttatttcttgctcatatcacatgtccatcatggatttggtggtaagagacagggtggtgttgcttctcaaagactctcagcaatcttggatgaaggaaaatccatcatctgaaatatttctagccaccatatcagagrgataagaaatttctagaaactcttgcatcagcaataaaatgttccagcacctgtcactttcatttatagttcattagccagaactgctctcatggcctcactcaaatcacaagaa

SEQ ID NO: 350253 - DNA, 486 bp, Homo sapiens
atgtgtttaaagtataattattgagacaggtggccaagacagccgactagaaacagctaagatatgtgactctcatggagaggaactaaaagggcaaataaatacagcaccttcaactgaaacattcaagtacttacaatgggactaatcaaggaaacaacttgacccatggagaatggagaaaagcaaggcaagacaacggcccacctgggagtgatgcagagccaagaaaatatccccaacccaggaaagtggtgagtgaatgtgtgaccctgggaaaccacacttctctcatggatctttgcaacccttgaaataggagatcccctcatgaatccactccatgaaggctgtcagtctgacacgcggaactacgtggggtcttggcaargaaaacactcagacacatacagatacttgggagctttagatactccagctcgtgttttcccaacaaaagtatctgcaactcctgcaaagcagaag

SEQ ID NO: 350254 - DNA, 562 bp, Homo sapiens
taaaattaaaaaaataaaaaaagagtttacttaattggaaaagtactggatctcaccactcctgaattttttagtgtttttttttttttttttgagactgagacttgctctgccacccaggctggagtgcagtggcgtgatctcggcagactgcaacctccacttcccaggttcaagggattctcatgcctcagactcccgattaattgggattacaagcacacaccaccatgcccagctaatttttgtatttttagtacagatggggtttcaacatgttagccagactggttttgaactcctgacctgaagtgatccgcctgccttggcctcccaaagtgctgggattacaggcatgagctactgtacctgstccattcctgaacattttcttcccacatataatctgccctcctttgatgacattgctccctccaaattatctccgggagagtcagaaatttagctgtattgtgttcttccttgagaaataccaacaccttctgataattggagtttttcagctaaaacctgccacctccattttattaaagctgttttt

SEQ ID NO: 350255 - DNA, 573 bp, Homo sapiens
aaacgaataggtaatatttaayggaagaactattgttcatatcataaacgcacacactcacacctgacacagcacatttgtataggaaataaaattttgcggtaatttttcaagttatatcagctagaattgcttttggatgcaaataatagaaatcctaactgcggaggcttaattgaagagggattaaggttctcaggtgacatacgtccagcttgtgctgtgactgttctactacactctaacaccagggtcaaggtgccatgcggttatatatccagttctgtagccccaccgttaacactataatgacaccattaaggctgggaaggagaaacggtgttagaaggtacccactccaacaggaaaatgaaagcttccccagagacctctcagaaactggcagttccatctctttgacaagatcttgtcctgtggccacacctagatgcccaggaggctcacaaagcaaacacatcacagagcccaacaccagcctgagtgcatctggcatttctgtaggcaggagaaaagggtggaatacccactgagatgatttttgcatttttagaa

SEQ ID NO: 350256 - DNA, 607 bp, Homo sapiens
cacgtgtgtttatgagaggcattggtctgtcgttttattgacttcttttcaattacatctctgtctgctcttactattattgtagtaaccattgtatggtttctattattttaaataatattttaaatgtattaagatatcttttatggccagaatgtaccctatcttgatgaatgttccatgtgagcttgagaatattgtgttctgttttaaaataaagtagtttatagatgtctattatttccagttgaatgatggtattgtgagttcaactatgtttctaatcattttgtgcctgctggatctgttcatttctgatagagatttgttgaaatctccaactatcttagtgaatttatccatttctccttgcagttctaatagtttttgcctcacttaacttgacattctgttgtgaggtgyatatatgttaacaattgttatttctccttggaaagttgacacctttattatacagtgcccttctttatccctaataattttccttcatttgaaggaaatactctgttggaaattaatgtagctactcctactttcctttgattagtgttagcatagtgtatttttctccattctttgattagtg

SEQ ID NO: 350257 - DNA, 514 bp, Homo sapiens
aatcattttagaggtttatttgctaaggttaaggagcatggcccatgacacagcctgaggaggtcctgataacatgtgcccatgttcattgtgtcacagtgtgactttatacattttaaggagatagaagttgcaggcaaayaaataaatcaatacatggaaggcatacattgattctgcctagaaaggcaggacatttcaaagtaggggcttccaggtcatgggtggattcaaagatttttctgatcagcaactggttgaaagaattaagccctggctgaagaattgaattcagcataaagaaatgcttgagttaagacaaggtaggacttgtggaaaccaaggttcttatgtagatgaagcttccaggtattaggcttcagagagaacagatggtaaatgtctcttataaggaccttaaatggtgtcagactctctggaaaagatctagtaaaggaagggattatatacagaatggaaatttccctcacaagagatggctttgcagagtcat

SEQ ID NO: 350258 - DNA, 514 bp, Homo sapiens
aatcattttagaggtttatttgctaaggttaaggagcatggcccatgacacagcctgaggaggtcctgataacatgtgcccatgttcattgtgtcacagtgtgactttatacattttaaggagatagaagttgcaggcaaataaataaatcaatacatggaaggyatacattgattctgcctagaaaggcaggacatttcaaagtaggggcttccaggtcatgggtggattcaaagatttttctgatcagcaactggttgaaagaattaagccctggctgaagaattgaattcagcataaagaaatgcttgagttaagacaaggtaggacttgtggaaaccaaggttcttatgtagatgaagcttccaggtattaggcttcagagagaacagatggtaaatgtctcttataaggaccttaaatggtgtcagactctctggaaaagatctagtaaaggaagggattatatacagaatggaaatttccctcacaagagatggctttgcagagtcat

SEQ ID NO: 350259 - DNA, 514 bp, Homo sapiens
aatcattttagaggtttatttgctaaggttaaggagcatggcccatgacacagcctgaggaggtcctgataacatgtgcccatgttcattgtgtcacagtgtgactttatacattttaaggagatagaagttgcaggcaaataaataaatcaatacatggaaggcatacattgattctgcctagaaaggcaggacatttcaaagtaggggcttccaggtcatgggtggattcaaagatttttctgatcagcaastggttgaaagaattaagccctggctgaagaattgaattcagcataaagaaatgcttgagttaagacaaggtaggacttgtggaaaccaaggttcttatgtagatgaagcttccaggtattaggcttcagagagaacagatggtaaatgtctcttataaggaccttaaatggtgtcagactctctggaaaagatctagtaaaggaagggattatatacagaatggaaatttccctcacaagagatggctttgcagagtcat

SEQ ID NO: 350260 - DNA, 514 bp, Homo sapiens
aatcattttagaggtttatttgctaaggttaaggagcatggcccatgacacagcctgaggaggtcctgataacatgtgcccatgttcattgtgtcacagtgtgactttatacattttaaggagatagaagttgcaggcaaataaataaatcaatacatggaaggcatacattgattctgcctagaaaggcaggacatttcaaagtaggggcttccaggtcatgggtggattcaaagatttttctgatcagcaactggttgaaagaattaagccctggctgaagaattgaattcagcataaagaaatgcttgagttaagayaaggtaggacttgtggaaaccaaggttcttatgtagatgaagcttccaggtattaggcttcagagagaacagatggtaaatgtctcttataaggaccttaaatggtgtcagactctctggaaaagatctagtaaaggaagggattatatacagaatggaaatttccctcacaagagatggctttgcagagtcat

SEQ ID NO: 350261 - DNA, 588 bp, Homo sapiens
ggattgaaggcatttgttacccgatataggcaatgtattgtagccacagagcatgaactccagaatcaggccactggggttcaaatctggggttcgaatccttcttccaaacttactctgagatttatcacatcctgattacattggcaaaacctcagcttccaagtcggtaagaaagggacaacaaaatcatcatgaggacattaaaacgattacaagagaaaaatatgtggaaggcacccaacctggtaatacccagaatatagaaakgagaaaggggctctatgactgtagtgagttactttaacttctatgaacctcagcttccctttctgtaaaatggagataataatacaacctacctgtaatgaaaacgtaataagtaaatatgcaccaagggcttataactattcttccagatatcatgtgttcggtgaggtagctgtcattgtcctcatgacgtctgtatgagtaattagatctaattataaagaccagcccaaaatagagcaccgggataaaagaatcccaatttcttgcatagtaccacaataaagacattcagaacatctatcaagtacaaagcca

SEQ ID NO: 350262 - DNA, 588 bp, Homo sapiens
ggattgaaggcatttgttacccgatataggcaatgtattgtagccacagagcatgaactccagaatcaggccactggggttcaaatctggggttcgaatccttcttccaaacttactctgagatttatcacatcctgattacattggcaaaacctcagcttccaagtcggtaagaaagggacaacaaaatcatcatgaggacattaaaacgattacaagagaaaaatatgtggaaggcacccaacctggtaatacccagaatatagaaaggagaaaggggctctatgactgtagtgagttactttaacttctatgaacctcagcttccctttctgtaaaatggagataataatasaacctacctgtaatgaaaacgtaataagtaaatatgcaccaagggcttataactattcttccagatatcatgtgttcggtgaggtagctgtcattgtcctcatgacgtctgtatgagtaattagatctaattataaagaccagcccaaaatagagcaccgggataaaagaatcccaatttcttgcatagtaccacaataaagacattcagaacatctatcaagtacaaagcca

SEQ ID NO: 350263 - DNA, 574 bp, Homo sapiens
acctcatgtatacattgcacttgatgagaatgttctacttgacgtagccagaaacattaagcaaaaaatagtgttgcattctgggttagaaacccatcttttgttttatgtctaatctatccagtgctaaaacatttggaatgatacctctgcatgctgctgtgaaggaaatacgaacataatgagtgcatttctgatttcagaccagatcatcatttccttctaaaatacctcactgagtttagcatatttattccttggtggaatgtttgctgtgtattgcagtacgaaagcaaaagaaaataatcattataattataatttccgggctaggagggaccttagtgatatatctagtccggggtgtcygggcttaaattacagggtcggctgataagtattctacttttcatgattcagaatctacaagttaaaagaggaagagagaagagaaaagacagtagtaaaggaggtacttttgcattaataagaacacagacctaggtgtctcacctccacctcctacctgagccacctttgataagtgagaatctctctggacatcagttttcag

SEQ ID NO: 350264 - DNA, 487 bp, Homo sapiens
atctatatatttatatatggataatccctatatctctctctctatatatatatgtgtgtgtatatatatgtgtgtgtgtagatacacatgtatatatgtgtgtgtagatacatatacatatctacatctatatctatatatggatatctatggatagagatatagataggtatatgtatctacacatatatatacatagagaaatttctatattgtgtgatagcaagatatatatagataggtgtgtatatatacatacacacacatatacacatacatatgtatatatgtgtacatatatacacatacatatatatacacacatatatatatatacacacagagagagagatatttctacactggtgtgatagcaagaagaaaaacagattatgtagaagtgattattrtttaatcagaattcactaaaatattgagagtcaccttgaaaaggtcacctggcagaataatatatacaaactagcaa

SEQ ID NO: 350265 - DNA, 550 bp, Homo sapiens
ttcacatgtgagtgagatcatgtggtatttgtcattctgtgcctggattatttcatatatgacaatatcatccagctttatccatgttgcctcaaatgacaggatttccttcttttttatggctgaatagcattttctttattcattgttgatgcacacttaggttgattctatatcttggctattgtgaataatgctgtaaaaatcatggaagtacagatatctcttcaatgtactgatttcctacttattatgtatcaattaaaacaaaaaacattaaaagaaggatkccatgtctgaagtgatgaaaacaaaactatcttgtaagtatccagttcctaccaaaccaaaaccccatagaaccacactgtaaggaatactgggaggaagtgggtagaaaagaaaatgtctcaccaaactacttttcagccatatttctagaagctgtgcatgtattggtcttctccttgcatatatttcaacattgaaagtcagtagctttactttataatagacctttatctatctatatatctatctatcccctgaa

SEQ ID NO: 350266 - DNA, 565 bp, Homo sapiens
ttttaaattgtttttgatgctctaaaaaggctgttttctttatattcgatcattgagaaactaccattaaaaaggctaaaatatctttttaattcctaatttataaatggagcatgttctacagcttgataacttcaaatgcayttttttattaatgcttttaacgattgttgagttttgcaaatagtttataaaatcatatataaattaatatgcctccagagttattactggtagcattagtttgagccctaaatcttgggaagagagataaagtattttttctttttcttttgcatatcaaattaggcaagacacattttgccactgttaaccttttatcaaccaattccccaaatcccagtgtcctattcctacaattatatgctcatagcttccctatggcctcacccttccctgacctaaggagagcacacaaattctaagatcaactcaaaatgttccataaccaaaaatcactcacctcacctatccaaatttaaatattcatgcccagactgtctattctagacctattttccatttttcaaagatgcctaggctt

SEQ ID NO: 350267 - DNA, 569 bp, Homo sapiens
aacaacatttacatagacacgatagagtgttttctagatagcatttaggcatttctacatcacccagttgaagtggtatttcataaataatttacaaataaaggaatttgtagagaaaacagggaaactaggtgcacacatgataaactcatagtatgtttggtcataagtgtgctayatacagaagcataattttgaggtaatttgctaatgtgttcatttttaaccacagacctctcttcatagttactggtatctttccagacaggtaaggctaactcctgcactacaggatcacattcttaatgtcttctaagttattttctttgtttctgacttgagatgccctactttttattccaaggatcatttttacattacaaaatgctctaaaattattattgcatattttaatgtatagagattagaataaaagtgcttccaaccttcaacagcagaagtctccttctacaggatctaccaccttgaagaaactctattagtcccagactgctgcccttggtggcgtgtgttcattctggcatctattttgtctttttttattctcc

SEQ ID NO: 350268 - DNA, 587 bp, Homo sapiens
ccaattgcttctctcagatgatcttcataagaaatttaaagtgtaaaaaccttcttccctacactttgagtaatttattgattacaagctacatatgcaccagtaggcctagaaagctatattagagactacaataacaccatttatctttgtctgtgcaactcacgttagatacttaagaattcagtaattcttagtcagtagttccatcctactcaaaattattcaggattctcatttgtttatttttgtagttctcacataataagtcttaatctttgaaggctaaatgtgcctcacactaatcaaagcactttatacatatttactcatctcatctcttatagcagagacctaatatgtaattaaattatagcatacagtctgttctgaactcaggayataaacctttaatatttctaataggatactaaataaataaaaggaggatgaggagaaggggagaagaaggagaaaaagaaagaaggagggacacttcagctgactaatatttattagtgataactaaatgcccattattttatgccattgagattttgaggccttttgttacacagcaacagaag

SEQ ID NO: 350269 - DNA, 587 bp, Homo sapiens
ccaattgcttctctcagatgatcttcataagaaatttaaagtgtaaaaaccttcttccctacactttgagtaatttattgattacaagctacatatgcaccagtaggcctagaaagctatattagagactacaataacaccatttatctttgtctgtgcaactcacgttagatacttaagaattcagtaattcttagtcagtagttccatcctactcaaaattattcaggattctcatttgtttatttttgtagttctcacataataagtcttaatctttgaaggctaaatgtgcctcacactaatcaaagcactttatacatatttactcatctcatctcttatagcagagacctaatatgtaattaaattatagcatacagtctgttctgaactcaggacrtaaacctttaatatttctaataggatactaaataaataaaaggaggatgaggagaaggggagaagaaggagaaaaagaaagaaggagggacacttcagctgactaatatttattagtgataactaaatgcccattattttatgccattgagattttgaggccttttgttacacagcaacagaag

SEQ ID NO: 350270 - DNA, 593 bp, Homo sapiens
aatgagtgtgcattagttattctgtaatttatattcaaaattggagagataatttgcaaacacctcataataaatcctgagctaacagaaacatttgtcagatttttctctcactttcctttctgtggtatgcagatgttcagtttcaaattagtcagattttcatagttctttctatactgctttccttctttgatttcattttgaaaaatakaacaaaaagcaagcaaattaaaattcataggtaggaagtcgagtttgcaaagatattctttattttttctctcttttttacctttccctaattctttccaattaataaatttttaaataattttagtctttcttaaaatgactaaacagtaagaatatttttatgacctccaacttatttcctaaggttaaataccacatttgtgccactatctgacattctttttagacttgcaaattcatcatatcccaaaacaatgctttatcccaattttgtatttatgtctaagatatgtcaatgtatcagtttcactttttatagtcactgaaactctacatctagttactcactgagtctttcagattctcttcaccacata

SEQ ID NO: 350271 - DNA, 600 bp, Homo sapiens
actgcaaattcatggatccacttactcttcacaacagaaaaatgctaagaactaaatattacatgcataacacaaaacttaagaatcaagaccggcaaaagtatcaaacatctggattaaagaaccaagagaaatatccacagttaacatcaccccttagaatccatcgtgaaagggaaagctcaggaaaagacggagaggagcacgttgtacgtgactgaatacactcctcttcttatgaacaaataacccagaaccctatttgttggattctacaaaaccaaaataaaatcaaaatctcactaacagaaaacaaagtgaaaatcctcctgggtactatttatttattttgtgtttgttttctctctcaatcttctgtagtgaattcagaccatttgttagaggtatctgggtggacagaagtagggctggagagatttgatgcygggccaacacttattttgagcatgccattaaaagctgttggcatgattctgccaaacatactttaaacatttccagcatgatagcatacaggataaacatataagagtttcctattataggaacaatagcaataaaacttgagttttatggcaa

SEQ ID NO: 350272 - DNA, 600 bp, Homo sapiens
actgcaaattcatggatccacttactcttcacaacagaaaaatgctaagaactaaatattacatgcataacacaaaacttaagaatcaagaccggcaaaagtatcaaacatctggattaaagaaccaagagaaatatccacagttaacatcaccccttagaatccatcgtgaaagggaaagctcaggaaaagacggagaggagcacgttgtacgtgactgaatacactcctcttcttatgaacaaataacccagaaccctatttgttggattctacaaaaccaaaataaaatcaaaatctcactaacagaaaacaaagtgaaaatcctcctgggtactatttatttattttgtgtttgttttctctctcaatcttctgtagtgaattcagaccatttgttagaggtatctgggtggacagaagtagggctggagagatttgatgccgggccaacacttattttgagcatgccattaaaagctgttggcatgattctgccaaacatactttaaayatttccagcatgatagcatacaggataaacatataagagtttcctattataggaacaatagcaataaaacttgagttttatggcaa

SEQ ID NO: 350273 - DNA, 600 bp, Homo sapiens
actgcaaattcatggatccacttactcttcacaacagaaaaatgctaagaactaaatattacatgcataacacaaaacttaagaatcaagaccggcaaaagtatcaaacatctggattaaagaaccaagagaaatatccacagttaacatcaccccttagaatccatcgtgaaagggaaagctcaggaaaagacggagaggagcacgttgtacgtgactgaatacactcctcttcttatgaacaaataacccagaaccctatttgttggattctacaaaaccaaaataaaatcaaaatctcactaacagaaaacaaagtgaaaatcctcctgggtactatttatttattttgtgtttgttttctctctcaatcttctgtagtgaattcagaccatttgttagaggtatctgggtggacagaagtagggctggagagatttgatgccgggccaacacttattttgagcatgccattaaaagctgttggcatgattctgccaaacatactttaaacatttccagcatgatagcatrcaggataaacatataagagtttcctattataggaacaatagcaataaaacttgagttttatggcaa

SEQ ID NO: 350274 - DNA, 602 bp, Homo sapiens
aaaaataaaattatattacaggacatttttcttcagtcataattaaggtgaccctttcatttattacttaaaaataataggtagattaatttacaaaagcagcttataattacacatgaagtagaattctttaataatgctattgattctcctctttgaattaggcatcattttcctctggctaagagagcttatattgctataatgctaggtgacaaactcttttggttctgaatattaaagcttaagttaacaagttcccttagctttctttctaatgaacaacrtaagtatagtttgaaatgaacagaaatgcttaacatttctttggatgtcatttattgttgcctccttcacacctcttttcatctagagaacagagtaatgtttggttgttggacgccgaaagaatgagggtcgtgattacatcggtatagcactggaggctatatgagtaagccacaaactttctcattaatgcagaacattgtcaaaccaacaaactgtgtatgccacccagaaggactgctgagagcagtcaatgatccaggcacaaatgtttcttatgattaggtataattgaagcctgtcagtaacaatac

SEQ ID NO: 350275 - DNA, 602 bp, Homo sapiens
aaaaataaaattatattacaggacatttttcttcagtcataattaaggtgaccctttcatttattacttaaaaataataggtagattaatttacaaaagcagcttataattacacatgaagtagaattctttaataatgctattgattctcctctttgaattaggcatcattttcctctggctaagagagcttatattgctataatgctaggtgacaaactcttttggttctgaatattaaagcttaagttaacaagttcccttagctttctttctaatgaacaacgtaagtatagtttgaaatgaacagaaatgcttaacatttctttggatgtcatttattgttgcctccttcacacctcttttcatctagagaacagagtaatgtttggttgttggacgccgaaagaatgagggtcgtgattacatcggtatagcactggaggctatatgagtaagccacaaactttctcattaatgcagaacrttgtcaaaccaacaaactgtgtatgccacccagaaggactgctgagagcagtcaatgatccaggcacaaatgtttcttatgattaggtataattgaagcctgtcagtaacaatac

SEQ ID NO: 350276 - DNA, 577 bp, Homo sapiens
ttctatttttaacttcctgaggaatctccacactgttctacaaaaagactgtgcgaatttctcaccaatagtgtacaaaactgttagcttttgcctttttgataaataccattataatgacgtgatagatcattgtggttttaatttgcattttcctgatgattactgatgttgagcattttcttatgtactttgtggccttttgtatgactttttttttcctccaacttttattttttttcagggatacatgtgcaggatgtgcaggttrgaagtagagcacaacctgtacatcctgcatgtgtgccacaggggtttgctctatacatcatcccatcacctaggtgttaagcccagcatctattagctactcttcctggtgctctacctccttccactccaaccttctgacaggctccagtgtgtgttgttccctacatcaatgtgtccatgtgttcttatcattcagctcctatttataagtgacaacatgtgggatttggttttctgttcctgcgttagtttgctgaggataatggcttctagctccatccatgtccctgcaaaggacatgatc

SEQ ID NO: 350277 - DNA, 577 bp, Homo sapiens
ttctatttttaacttcctgaggaatctccacactgttctacaaaaagactgtgcgaatttctcaccaatagtgtacaaaactgttagcttttgcctttttgataaataccattataatgacgtgatagatcattgtggttttaatttgcattttcctgatgattactgatgttgagcattttcttatgtactttgtggccttttgtatgactttttttttcctccaacttttattttttttcagggatacatgtgcaggatgtgcaggttagaagtagagcacaacctgtacatcctgcatgtgtgccacaggggtttgctstatacatcatcccatcacctaggtgttaagcccagcatctattagctactcttcctggtgctctacctccttccactccaaccttctgacaggctccagtgtgtgttgttccctacatcaatgtgtccatgtgttcttatcattcagctcctatttataagtgacaacatgtgggatttggttttctgttcctgcgttagtttgctgaggataatggcttctagctccatccatgtccctgcaaaggacatgatc

SEQ ID NO: 350278 - DNA, 587 bp, Homo sapiens
gcacaaaacagagtaagacaggtgtccagataatatgttgtagcagaagcagcaccagacagttgctaggtatttagggatctagtttcatctggcagctaactagcaagtcatccagtttctctgagtgtcagtttcctcacctgaaaaatgagaaaaatgccccaatgaccattacagccctgaaccactctttgaatctgtgaagtaaaattccttcatgacagcgtgagttctgcagctcagcaaatggaccaactgctatggaagatttagaaggttttagaggagtcaaaaaaccgatctctattatttcctaaatgtgggtttagcttaaggagtttctggagcactggctgatagcaaagcagtggctccatcgctgaggagaaaagtgcaaatgagtttattccaaatgggaatattgcctgcaatgcagcagtatttttctaacagtgtcattaatgaagctattcaatatcttgaggrttttacaacaatgtcatatgaatttgacagcatttcatttggaatgttttatataatactcatgcattttaataagcataatgggtaattaagatgcc

SEQ ID NO: 350279 - DNA, 588 bp, Homo sapiens
ttcctccggtaatgtgaatattgctttgctttgacatgaatagatttttaaaaagtgataatttcaaatatctcaaatttatatatatagtatatatttgtgtatgtatacacatacatataattcaacactcattcataataaaactcttaggatataaaaagtggaagaaaataaagtatatttaccaaactcctattcagtataaacattaaacttattaataaaatgttggcagttttcctccaaaattgggaataaggtacatttgttcattgtcaccagatttctttcaacatttttactgaaattcccagccaatgtaataaaaaaggtaagacccatcttaattgaaaagatgtaacagtttttacacattaaagatrgaagaaactataattaacctatgaacaaaattttaaatcaaaattagtaagttctaagcactaaacagataggcttacactggcatgttgctgagaaattttataaagaatgctgagacactttgctcttaataataatatatgtgttattaaagaccaagaataggttattaaaatttttactcatatactaggtgaaggg

SEQ ID NO: 350280 - DNA, 630 bp, Homo sapiens
ctctgaacttctgggatctgtgatttgctgttttatactatttttaaaaattattgatcattcaaatatttcaaagaaattgaaatatttcttctgccttgttatctctcttctctttctcatatttcaattatatgcatattagatcctgtgattttcccacagctttggaccttcccctatgtggttttcactcttaactctttgtgtttccatttggctaatttttgttgggccaacaagattctttcctcacccatgtctagcytactgatgtactcatcaatggtattctttgtcactactaccatatatgtactcagctaatttcactcactctctcttatagtttccacctctctgctgaaattccctcatcttttcaagcttgtttttcactatattcatttttttattactgcataacaagttaccacaaacctagcatcttagaacaatactcattaactatctcacaatttttgtaggcaggaagtctgggtacaacataactggattctctgctcaggatctcagaatgaggaaatcaggcctggggatctcagcttgttgttgttggcagaatttatttcatgcagttacaggattgaagtcctcaaattcttgctg

SEQ ID NO: 350281 - DNA, 630 bp, Homo sapiens
ctctgaacttctgggatctgtgatttgctgttttatactatttttaaaaattattgatcattcaaatatttcaaagaaattgaaatatttcttctgccttgttatctctcttctctttctcatatttcaattatatgcatattagatcctgtgattttcccacagctttggaccttcccctatgtggttttcactcttaactctttgtgtttccatttggctaatttttgttgggccaacaagattctttcctcacccatgtctagcctactgatgtactcatcaatggtattctttgtcactactaccatatatgtactcagctaatttcactcactctctcttatagtttccacctctctgctgaaattccctcatcttttcaagcttgtttttcactatattcatttttttattactgcataacaagttaccacaaacctagcatcttagaacaatactcattaactatctcacaatttttgtaggcaggaagtctgggtacaacataactggattctctgctcaggatctcagaatgagraaatcaggcctggggatctcagcttgttgttgttggcagaatttatttcatgcagttacaggattgaagtcctcaaattcttgctg

SEQ ID NO: 350282 - DNA, 598 bp, Homo sapiens
aggtatacataaagcattgtatatagtaagaaaagtttcgtggtgatcaatgcttccacacattgattaaatggagtaaagtgactaacacaactaaatgtgatggctggcacagaataagaacacagtaattaatatttagttttacattattatttacataattagtagtattttacagagtcctagtatctcagtctartgtgatcaagactctaaagacctactgtattgaactattatgtcaataataatgttaaggaagtcagaagaaaaggaagatggaagggagataaatttcaggttaagaagtatattacattcctatggatgtgtatattattaaataaactgtttgtcttaataaatttatagagaaccactttgtgccaggtactgtgttaactaatgtttatttttttaaaatcacacatgatacaattattgctttgagatgcttgtaatctagtagggatgataaacaaatacataggttatttcaagaggaccaaattaaagaggatgtggaagcagtaaacacagacaaccagtctgtaaggtgggcttcaggaaggatttgctggaggatctataacca

SEQ ID NO: 350283 - DNA, 598 bp, Homo sapiens
aggtatacataaagcattgtatatagtaagaaaagtttcgtggtgatcaatgcttccacacattgattaaatggagtaaagtgactaacacaactaaatgtgatggctggcacagaataagaacacagtaattaatatttagttttacattattatttacataattagtagtattttacagagtcctagtatctcagtctaatgtgatcaagactctaaagacctactgtattgaaytattatgtcaataataatgttaaggaagtcagaagaaaaggaagatggaagggagataaatttcaggttaagaagtatattacattcctatggatgtgtatattattaaataaactgtttgtcttaataaatttatagagaaccactttgtgccaggtactgtgttaactaatgtttatttttttaaaatcacacatgatacaattattgctttgagatgcttgtaatctagtagggatgataaacaaatacataggttatttcaagaggaccaaattaaagaggatgtggaagcagtaaacacagacaaccagtctgtaaggtgggcttcaggaaggatttgctggaggatctataacca

SEQ ID NO: 350284 - DNA, 595 bp, Homo sapiens
atcctcctgtccatatgcattctttggaatggttccatagattcattctaacacatgaggtaccttatccggccacactccattttctttgagtttttattttgtttgagaaaatagggcataagttaccattttgatgttatttaatgatacattaaaaaataaaagtcagcctgaaataatggacagcttgagcaaaaggtaaaatcagatcttcagcagttgaatagtctcacatcacacttcagtacagggaagcagtatgacccttcaaggaaatggagataattaggataactgaagattataaatgttggactctctaattctgtcaatgagaatccattacccgtaatgtaccaaacagcamgagagaaggagaaatagttaaagtcccaaatacccgttctaaacagtaatctttatgtatgtaccacagccaacaatcatgcatcactatttaactctatcagaatccacagaagcacaactaattaattcttcaaacaggagtcagagtacataccaatttctcatctctcttttgtggttattgccaggagtgtactaatccttgctgtgatgcacacacatg

SEQ ID NO: 350285 - DNA, 595 bp, Homo sapiens
atcctcctgtccatatgcattctttggaatggttccatagattcattctaacacatgaggtaccttatccggccacactccattttctttgagtttttattttgtttgagaaaatagggcataagttaccattttgatgttatttaatgatacattaaaaaataaaagtcagcctgaaataatggacagcttgagcaaaaggtaaaatcagatcttcagcagttgaatagtctcacatcacacttcagtacagggaagcagtatgacccttcaaggaaatggagataattaggataactgaagattataaatgttggactctctaattctgtcaatgagaatccattacccgtaatgtaccaaacagcacgagagaaggagaaatagttaaagtcccaaatacccgttctaaacagtaatctttatgtatgtaccacagccaacaatcatgcatcactatttaactctawcagaatccacagaagcacaactaattaattcttcaaacaggagtcagagtacataccaatttctcatctctcttttgtggttattgccaggagtgtactaatccttgctgtgatgcacacacatg

SEQ ID NO: 350286 - DNA, 567 bp, Homo sapiens
agatatctaattagacatggattatagacatggatttttctaattaatgtgagtataaagtagccttacatcttcatttattttattcattcactcatatttactagccatatactatggtgccactgactgtacactaaaggtaagcatacatgagaatttcatacagtaaaaattacatgattacagttcaaaaaattgctttcttagtggtgtgaccaatgtayattgatgtctaaaggaaaagtggctgactttgctcagagaagatgaaatggcatcttaaatgagtaacatttcagctttgacttgaacattttaacacacaggaaatgggagaagacattttagcaaaaaatgcctgcacaatatgtaaaggtacaaagtgtatggcataattcagatgaccagcaatttcagagtggcttgacctttgggttaaatggcaaaagatgaaattgaagagaagacagaatgggtccaaattggaaagagttttttatggcaagatgacaacattagaatgcatactctaaacaatagctggctcataaagaatatatggaa

SEQ ID NO: 350287 - DNA, 521 bp, Homo sapiens
cttctctcattcatttatatggaggctatcttttgccacagctacaggtgacaaaaaacaaaaaaattaccagtttaaagtattcccgaaaaaatagtattaatttcatcatcagcctgaaaatgcacttatggtaaactttgtaaaaagttcacactaaatattgatttacaattaatctttgcttcatttactgtatttacaatcctgggaatattattttattattgttaaatttaatttttatgaccttattttctcaacatgtattattttatacctatctttttgtaataaatattctataattcagacattaaagatgaaggaaagaagtattagaattttctgcaactgaatatagccaactataagatggaactttattacctatatgatggacaacaaatagtttattggcacttgttcaggaaatagtttcttctcaccyaaagtaactggaacaagataaattgtccttctacatgctgaatgatcaaacataaagtggaaaaaataga

SEQ ID NO: 350288 - DNA, 572 bp, Homo sapiens
ttttttatggcaagatgacaacattagaatgcatactctaaacaatagctggctcataaagaatatatggaaaacacatgatattttacccctaaaatcagctatttgaaactgaataggttctctatgtgatatgtcttcccttctctctctacactatcaccaaaaatattacagtgacatttgtacagtgtgatagagaartacattggaaaaccaaagttcagaatgtaaaaaaaagaactagaactaaatatttaatagcgacttacattttgagtctatatatttaactatcctacttcctgttaaaatcattaaatgaatatcaacatgctaagaaagctatgtttgtgaaaattaaggtatgtatgctaaccacaagctaaaaaattcaaaggtattcaacaagactaagtgtgaagcctgaggttgaagaaaataccaaaagatttgctattcacctcagatacgaaaaaccagcctgagatacaaagtgcttccttctttaagagtggcaaggactgaagaaaggggctgttagaaaggcagttgtgaaggaatccatctcc

SEQ ID NO: 350289 - DNA, 475 bp, Homo sapiens
ttcaaacaaagaaccagggaaatctcaattgaaatgacaaaagacaatctctagatgcaacaacaaggtgacacatatgttgaattacctgacaaggaatttaaagcagcctttacaaaaatgcttcagtgaacaattatgcacacgcttgaaataaatgaaaaaaatagaaggtctcagcaaaataacaaacttccagaaaagacgtataaaatataagagccaaatgraaattttagaacggaaaaattacaatactggaataaaaatattcagtgaatgagttcaacagaagaatggagggaacagaagaaagaatcaatgaatgtaaagaaaaaaataaaaattattcaatctcagttgccatttcaagtaaaggtgaatgtaaggtgaaacaggagcaaagatgactcttgttatgttttagcaaagagactggtagcattttgcccctgctctagagatttgtggaact

SEQ ID NO: 350290 - DNA, 592 bp, Homo sapiens
agggtttcagtatcccatggcagaaataagtggggagtcacaaaatgcactggggatttgtccttgcattaggtcattttaaacacacgcttctggcagattctgtaatatctatgtattggctttatttttattgtaatttgatggatggagagtgataccaaaaaattcctgctamgtacaacattttctttctcaccacctaggatgaatgaatcttatctagcgtaaaagagagatgctaaaggagatgccagagagggtgggtctatgtacctgcctgtcatccctacaactgctttgtgatctaggtttcatttctcccagttttacagacaaggaaactaaagctcatggaaattaaataatttataaaaatttacaatacaggaagagacagagatagttatcaaaggtagatctttttcaatcttatggcaccttcagctaatttaagactctgagaatctaagtctatgaactgcaacagaaacaaaagacactgcctgcccttcttttttggactgggctgtcctcacctgttagctattaagaagtgtgatcattttcagtccttactccagagtctgac

SEQ ID NO: 350291 - DNA, 173 bp, Homo sapiens
tgtcatccctacaactgctttgtgatctaggtttcatttctcccagttttacagacaaggaaactaaagctcayggaaattaaataatttataaaaatttacaatacaggaagagacagagatagttatcaaaggtagatctttttcaatcttatggcaccttcagctaattt

SEQ ID NO: 350292 - DNA, 598 bp, Homo sapiens
caaccttgtgctgctacttaccacttctagaatttaggttcatcttgtttttgtttttcaaaattcttatttcttgctgaaaaatgacaataattgtggcagtcctacctattccgcagactttttgcatgcaagggcatccaatgaaatattgaatatgcaagagctctgaaaaatatcatatctacctcaacttacagggtttcctgtaattttatggaaagatgacattatgactcctttttgaggtaacattagcacccttcataagcaagcacagaaatcctcttagctagatatgatacgtccatatgttaaaagaaaaaaaaaaamcaacagaaactgagaaggtagtctgctttaatgctagggaggaagatacagatttcattgaggtagagttctatccaagccaaaccgtcttgagacttaattatctaattagaatagctctcttagctttgtgaaatatagataggctgtttgtcccattgggagttttaaatcctatcttcaaggccactagactttgaggcaactatcccactactcattgcaatgtctagccatctaagtatacaacccactgcataggcac

SEQ ID NO: 350293 - DNA, 598 bp, Homo sapiens
caaccttgtgctgctacttaccacttctagaatttaggttcatcttgtttttgtttttcaaaattcttatttcttgctgaaaaatgacaataattgtggcagtcctacctattccgcagactttttgcatgcaagggcatccaatgaaatattgaatatgcaagagctctgaaaaatatcatatctacctcaacttacagggtttcctgtaattttatggaaagatgacattatgactcctttttgaggtaacattagcacccttcataagcaagcacagaaatcctcttagctagatatgatacgtccatatgttaaaagaaaaaaaaaaaccaacagaaactgagaaggtagtctgctttaatgctagggaggaagatacagatttcattgaggtagagttctatccaagccaaacygtcttgagacttaattatctaattagaatagctctcttagctttgtgaaatatagataggctgtttgtcccattgggagttttaaatcctatcttcaaggccactagactttgaggcaactatcccactactcattgcaatgtctagccatctaagtatacaacccactgcataggcac

SEQ ID NO: 350294 - DNA, 514 bp, Homo sapiens
ttgtttgcagagatggtgtttcaccctgttatccaggctggtctgaaactcttaggttcaagcagtcctcctgccttggcctcccaaagtgctaggattacaggcatgcaccactgcacccagcctaatataggtttacactgaattttttctttgtataacattttcataaaatgaaatgcacaaattttaaatgtccatctacatatttgttgaattttatgtatgtatgtatgtatgcatgcatgtattcacttattgtaatttgacaaactatgattgtatatatttatggggccaaagtgatgttatgattcatgaatacaatgtgtaataattaaatcaagctaattaacatatctatcacctcaactacttatttttttttttgtggtgcaaacacttgaaatttactctctaagattatttactctcactattattaagtaaattcaccatgcggtgcaacagatcccartaaaactcaaactaacttactcatcccatgtaactt

SEQ ID NO: 350295 - DNA, 615 bp, Homo sapiens
cttgttactagtgattagcagagagcctgggaaatggtaagcactcaataaatcaactaacaaaagtcttccaccaagattctgagcttaatacattgtgtaatttacacttatctggttgttttctgtaattctgcaatacaaacatttacaaagtctccatttactaagtggacactggagctagaaggattaacctctttccctgccgtccagggattcwcatcctagctctagagactgacataaatatagaaataaataatcactaaaataaattgctaaactatgagaacaagaaagtacagaggaaatgtttatcaagagaaggcatgagaagtttctcagaggaggtgccgtttaaatcttgaactctaggcaatttatcagatctataaaggaaaaagagaaaaaaaagtcttctagaaaataacggagttaaataatagccttgctaagtcatgaatccacaagggccatgacatgttcagggaactgcaagcagatcatcaagactatggaaaaccaaaaattgttatttttgaatacgtttaggtatttatatataccatgtttcatcaaagatacatacatatttgtgcatacacaaactta

SEQ ID NO: 350296 - DNA, 615 bp, Homo sapiens
cttgttactagtgattagcagagagcctgggaaatggtaagcactcaataaatcaactaacaaaagtcttccaccaagattctgagcttaatacattgtgtaatttacacttatctggttgttttctgtaattctgcaatacaaacatttacaaagtctccatttactaagtggacactggagctagaaggattaacctctttccctgccgtccagggattctcatcctagctctagagactgacataaatatagaaataaataatcactaaaataaattgctaaamtatgagaacaagaaagtacagaggaaatgtttatcaagagaaggcatgagaagtttctcagaggaggtgccgtttaaatcttgaactctaggcaatttatcagatctataaaggaaaaagagaaaaaaaagtcttctagaaaataacggagttaaataatagccttgctaagtcatgaatccacaagggccatgacatgttcagggaactgcaagcagatcatcaagactatggaaaaccaaaaattgttatttttgaatacgtttaggtatttatatataccatgtttcatcaaagatacatacatatttgtgcatacacaaactta

SEQ ID NO: 350297 - DNA, 615 bp, Homo sapiens
cttgttactagtgattagcagagagcctgggaaatggtaagcactcaataaatcaactaacaaaagtcttccaccaagattctgagcttaatacattgtgtaatttacacttatctggttgttttctgtaattctgcaatacaaacatttacaaagtctccatttactaagtggacactggagctagaaggattaacctctttccctgccgtccagggattctcatcctagctctagagactgacataaatatagaaataaataatcactaaaataaattgctaaactatgagaacaagaaagtacagaggaaatgtttatcaagagaaggcatgagaagtttctcagaggaggtgccrtttaaatcttgaactctaggcaatttatcagatctataaaggaaaaagagaaaaaaaagtcttctagaaaataacggagttaaataatagccttgctaagtcatgaatccacaagggccatgacatgttcagggaactgcaagcagatcatcaagactatggaaaaccaaaaattgttatttttgaatacgtttaggtatttatatataccatgtttcatcaaagatacatacatatttgtgcatacacaaactta

SEQ ID NO: 350298 - DNA, 615 bp, Homo sapiens
cttgttactagtgattagcagagagcctgggaaatggtaagcactcaataaatcaactaacaaaagtcttccaccaagattctgagcttaatacattgtgtaatttacacttatctggttgttttctgtaattctgcaatacaaacatttacaaagtctccatttactaagtggacactggagctagaaggattaacctctttccctgccgtccagggattctcatcctagctctagagactgacataaatatagaaataaataatcactaaaataaattgctaaactatgagaacaagaaagtacagaggaaatgtttatcaagagaaggcatgagaagtttctcagaggaggtgccgtttaaatcttgaactctaggcaatttatcagatctataaaggaaaaagagaaaaaaaagtcttctagaaaataacggagttaaataatagccttgctaagtcatgaatccacaagggccatgacatgttcagggaactgcaagcagatcatcaagactatggaaaaccaaaaattgttatttttsaatacgtttaggtatttatatataccatgtttcatcaaagatacatacatatttgtgcatacacaaactta

SEQ ID NO: 350299 - DNA, 597 bp, Homo sapiens
aacaaacataccatcatggaagacagcaaaaccacataaacacaacaaaatcagccaagtgaataaaaattaatggttaagactgagctgtacataccatcatgggagacagcaaaaccacataaacacaacaaaatcagcctagtgaataaaaataaaaaagactgagcacagctctttttgcttctgagacctaaaatttgtactcaggatggtgttgctgttgtatccaaytagagaacctgtctgtaccttttgcttgattccccaccctgggagcccctcagtacttcatggctacagactcttggctgcctgccctaaccacactgcagtcacacacacagtcataaataaaccccagcaggaagcgagacataggctcaaattagaacaccctctcaaccttttcatcaataactttcagcactgctcagggtaatggaaaaattgtttctaactgagctgcatatcatgagtttggaagccaagtaatagcttgcctattcatatcatcactgaacaagttatttcacctacttttagaatacttgaaatacttttttaatatagatcatagcatctttaaattttcct

SEQ ID NO: 350300 - DNA, 614 bp, Homo sapiens
cagtggctttagtgacattggttacagttttatcactgcctaatcattaattataatttttaaaggttctcagttgattatttgaggaactgtattttccttacagaataattcctaggtatattggatgatcttttccggtgactaaagtatatgtagggtgtttgttacaatatttgttctcttatcctttaattattttgtttgtaatcaatccagcatggagtaaaagaaataagagtaaagtaatatgtatattttttattttctaaaaatattgaaagagttcttcatgtaataatggttcttgacaaaatgtatcaagaaccatttataccaaccactttatacwaacaaaatctgaacacagagggaaggaatcaagatgtcagtattttaataagttctagagatgaatctaatgtatactcttgattaagaaacaaagatttaatggaaatatctcggctctagttggctaccaacatcttatgcctactattatcttaagagattaattgtatgctgtaagtattgatcttgattattcatgcaaattagtatccgaaatagcaaaagtaatttgattataaaaaattcaaattcaaaaatat

SEQ ID NO: 350301 - DNA, 448 bp, Homo sapiens
ctacattccctctctgccatcctctcttcccacttgtaggtgctacatgagcacagtggcctcatggtgactttgagcctacaagtgtgtacagtgtcacacctatgatctgcctcagccacaggctttcattgctccagaaaagatagygagggtgaagtctactgtggtctcctctgtatgtttcctgtaacagaacattctcaagtgaatagtgcatgccagccctgtcttccttgaaacccaagtacttttgtactctatcctgcagatttcttaacttttaaggactatggatcactcctatctcttgtcaaagcattgatgaagatttttcctcattatattttgtgttgctcatttcattaaggtactgtgaggagggtggaaaaaatagggagagagccatttagagaaatacatgaagttttctgctcatgttgccatc

SEQ ID NO: 350302 - DNA, 448 bp, Homo sapiens
ctacattccctctctgccatcctctcttcccacttgtaggtgctacatgagcacagtggcctcatggtgactttgagcctacaagtgtgtacagtgtcacacctatgatctgcctcagccacaggctttcattgctccagaaaagatagtgagggtgaagtctactgtggtctcctctgtatgtttcctgtaacagaacaytctcaagtgaatagtgcatgccagccctgtcttccttgaaacccaagtacttttgtactctatcctgcagatttcttaacttttaaggactatggatcactcctatctcttgtcaaagcattgatgaagatttttcctcattatattttgtgttgctcatttcattaaggtactgtgaggagggtggaaaaaatagggagagagccatttagagaaatacatgaagttttctgctcatgttgccatc

SEQ ID NO: 350303 - DNA, 594 bp, Homo sapiens
tggtaccaaacaggacagacagagtcctacagtcccaaaccaggacccagagtttccagggatgaagatccactttctrtcttcacttcttggctcatgcctttaagagggtgggcagggggaagattacaaataaacatcacttggttatcagctccagaacaagtttccctcaatttctctcttatatgtccatgaaaattggtcaaggacaattcgctagtatcatggttttcctcctaaaaggacaataaaagcagtagctacttacaattttctggggaaaataggaccagaggagtgtgagaacaatagcccagtttgcctgtctctaggatacttttccctacacacacaaaatgagcaacactgtaggggttcaggccatgaaatagaatgattcagtattttgcacaaaggccacttggaaattaagttcctgctaagtcctgttctttttaattataacctgtaaaaaaattattccacgtgttaaattttcataaatcatgtcgaaaataaggcttcatgtttgggagcctggatgacattttaagaaatacaaactaagcctattccaaggtaggaaaagtg

SEQ ID NO: 350304 - DNA, 534 bp, Homo sapiens
caatggaagcaggatctgtgagaggacctggatgccagagcagggagagaaaaaacaaacaaacaaaaaacaarcatcattaacgtaataggtaaaagacgccaaagacggacctcccccaaaccccaggtttgctgaggactggtctttgatggataactgtgtcaaataagcatcagttaaatcattattgtttataatacttcatgccaaaaaatacaaaaaccctaaatgtgatgtttgaggatccaactctcctatctctgttaatatcatggtgtatataccatcaacagtaaattgaatttattcacatattcaacagatatttattcatcttctcttctaggtgcccctcatttaaccaaaaaaccaaaagcccttaaaggaagcttaggatctataatcataacaaatatgtcctacgctctatggttattcatcattgagcagtactcagcctacctttcctgactcatctctctggaagtccacctattttaacgtattaatttaaggaaaatgtaattagga

SEQ ID NO: 350305 - DNA, 534 bp, Homo sapiens
caatggaagcaggatctgtgagaggacctggatgccagagcagggagagaaaaaacaaacaaacaaaaaacaaacatcattaacgtaataggtaaaagacgccaaagacggacctcccccaaaccccaggtttgctgaggactggtctttgatggataactgtgtcaaataagcatcagttaaatcattattgtttataatacttcatgccaaaaaatacaaaaaccctaaatgtgatgtttgaggatccaactctcctatctctgttaatatcatggtgtatataccatcaacagtaaattgaatttattcacatattcaacagatatttattcatcttctcttctaggtgcccctcatttaaccaaaaaaccaaaagcccttaaaggaagcttagratctataatcataacaaatatgtcctacgctctatggttattcatcattgagcagtactcagcctacctttcctgactcatctctctggaagtccacctattttaacgtattaatttaaggaaaatgtaattagga

SEQ ID NO: 350306 - DNA, 587 bp, Homo sapiens
aagatctgttgcccaaatggctagaaatataaaatgtgaggcatagcatagcaataattaaaccataactgaagatgagatggctttggaacaagcataatcggaggaaaagagggtgtttaataaatacctcaaggaactcaaaaatttaaatgctrcatagaaaaggatatacctacaagttgccactgaaccaggaagaagttaagaaggctattgtggcaagggagctaaatagtatatttcaaggggaaggatgtggtcaacagtgctaaaaattgttaaaagggcaaatgagatgaggaaacaaaatatctcttggatatagaaatggtaaaatcactggagatattggccatttcagtagaataataaaggcagatgctagaactgggatgtggtaggataagtttgaggtaagaaaattgcaagaagtccaggtaatactgtgttagaaatttagctgtaaaggaaatgggagaaaaagtgatagtaagagtatatgagatatagaatagagagaatttttcaaaaaggagagacttttgacttgacttaaaatggtacccccgttttaagccaaggga

SEQ ID NO: 350307 - DNA, 665 bp, Homo sapiens
aatataaaatgtgaggcatagcatagcaataattaaaccataactgaagatgagatggctttggaacaagcataatcggaggaaaagagggtgtttaataaatacctcaaggaactcaaaaatttaaatgctacatagaaaaggatatrcctacaagttgccactgaaccaggaagaagttaagaaggctattgtggcaagggagctaaatagtatatttcaaggggaaggatgtggtcaacagtgctaaaaattgttaaaagggcaaatgagatgaggaaacaaaatatctcttggatatagaaatggtaaaatcactggagatattggccatttcagtagaataataaaggcagatgctagaactgggatgtggtaggataagtttgaggtaagaaaattgcaagaagtccaggtaatactgtgttagaaatttagctgtaaaggaaatgggagaaaaagtgatagtaagagtatatgagatatagaatagagagaatttttcaaaaaggagagacttttgacttgacttaaaatggtacccccgttttaagccaagggactccgatttctctgcctcctttccaagtttgcttatgttttcccaatttgtaaatatcagtgtcaatttccccacctgcaaagtggggattatattttataat

SEQ ID NO: 350308 - DNA, 587 bp, Homo sapiens
aagatctgttgcccaaatggctagaaatataaaatgtgaggcatagcatagcaataattaaaccataactgaagatgagatggctttggaacaagcataatcggaggaaaagagggtgtttaataaatacctcaaggaactcaaaaatttaaatgctacatagaaaaggatatacctacaagttgccactgaaccaggaagaagttaagaaggctattgtggcaagggagctaaatagtatatttcaaggggaaggatgtggtcaacagtgctaaaaattgttaaaagggcaaatgagatgaggaaacaaaatatctcttggatatagaaatggtaaaatcactggagayattggccatttcagtagaataataaaggcagatgctagaactgggatgtggtaggataagtttgaggtaagaaaattgcaagaagtccaggtaatactgtgttagaaatttagctgtaaaggaaatgggagaaaaagtgatagtaagagtatatgagatatagaatagagagaatttttcaaaaaggagagacttttgacttgacttaaaatggtacccccgttttaagccaaggga

SEQ ID NO: 350309 - DNA, 587 bp, Homo sapiens
aagatctgttgcccaaatggctagaaatataaaatgtgaggcatagcatagcaataattaaaccataactgaagatgagatggctttggaacaagcataatcggaggaaaagagggtgtttaataaatacctcaaggaactcaaaaatttaaatgctacatagaaaaggatatacctacaagttgccactgaaccaggaagaagttaagaaggctattgtggcaagggagctaaatagtatatttcaaggggaaggatgtggtcaacagtgctaaaaattgttaaaagggcaaatgagatgaggaaacaaaatatctcttggatatagaaatggtaaaatcactggagatattggccatttcagtagaataataaaggcagatgctagaactgggatgtggtaggataagtytgaggtaagaaaattgcaagaagtccaggtaatactgtgttagaaatttagctgtaaaggaaatgggagaaaaagtgatagtaagagtatatgagatatagaatagagagaatttttcaaaaaggagagacttttgacttgacttaaaatggtacccccgttttaagccaaggga

SEQ ID NO: 350310 - DNA, 657 bp, Homo sapiens
atataaataaatgactgaataaataatatataataaataaataaataaattaaataaataaattgaaaaaatggacacttcttctgggagaggaatcaaataatttatgtagatgctgtcctctccagggggtggaacctaaatccccacccattaagtgtgggttgtagattgtgacttccttccaggaagtaccatactgaaggggggaaagagtcattttacagagagaaagatgaaaacaccacctcagccacgtgatcaggtttaacacttgctaagtcctgtggctagtagggtgtaataaaatggcattttctattatggctctcacctcaaaatctgtaacatcagtctaagcatgagaaaaatatcagaacaaaaacaaattgtaagacgccctacaaaatgcttgacagatactccccataaaggtccagatcgtaaaaaaaaamacacaaaaaaacgaaaaaacctgagaaactgtgagacttcaggaggctaaggagacctgacaactaaacgtagtgtggaatctgggatcagatcctgaaagagttaaagcacatcagggaaaaactaagaagacctgaataactataattaatagtagtttatgaatctgggcttattcgttgtgacaaatagactatagta

SEQ ID NO: 350311 - DNA, 657 bp, Homo sapiens
atataaataaatgactgaataaataatatataataaataaataaataaattaaataaataaattgaaaaaatggacacttcttctgggagaggaatcaaataatttatgtagatgctgtcctctccagggggtggaacctaaatccccacccattaagtgtgggttgtagattgtgacttccttccaggaagtaccatactgaaggggggaaagagtcattttacagagagaaagatgaaaacaccacctcagccacgtgatcaggtttaacacttgctaagtcctgtggctagtagggtgtaataaaatggcattttctattatggctctcacctcaaaatctgtaacatcagtctaagcatgagaaaaatatcagaacaaaaacaaattgtaagacgccctacaaaatgcttgacagatactccccataaaggtccagatcgtaaaaaaaaaaacacaaaaaaacgaaaaaacctgagaaactgtgagacttsaggaggctaaggagacctgacaactaaacgtagtgtggaatctgggatcagatcctgaaagagttaaagcacatcagggaaaaactaagaagacctgaataactataattaatagtagtttatgaatctgggcttattcgttgtgacaaatagactatagta

SEQ ID NO: 350312 - DNA, 550 bp, Homo sapiens
gtggtacatgtgcagttttgttacatgaatatattgcacagtggtgaagttgggattttggtgtgcccatcacctgaataatgaacattttacccaacaggtaatttttcaactctcatccctctaccttaccccctttatgagtccccagtatctactattcccctctgtatgttcatgtgtacccactgcttagctcccacttgggagtgagaacatccagcagtcrattttccgagttattttacataaaataatgtccttcatttccatccatgttactgaaaaagcatgatttcattcttttttaggttgtgtagtattccatgggatatatatatactacattttctttatccagtcatccactgatagacagttaggttcattctctaactttgctattgttaagagagctgaaataaacatataagtgcacgtatctttttaatataaagatttcttttcctttagatagacatccactagtgggatttctgtatggaaagataattttatttttagagctttaagaaatcacactgttttc

SEQ ID NO: 350313 - DNA, 570 bp, Homo sapiens
gttgtgtgctatagtttggctctgtccccacccaaaacctcatcttgaattgtaatccgcatgatccccacatgtcaaaggaaagaccaggcggaggcaatggaatcatgggggcggtttccctcatgctgttcttatgatggtgagttctcacaaggtctgatggttttgtaagtgttccatagttyctcctgcgttcattctccttcctgtcaccatgtgaaaaaggtgccttgcttctccttcacctctgacctgattctaagtttcctgaggcctccttagccatgccgaactgtaagtcaatgaaacctctttcctttataaattacccagtctcaggcaattatttataacagtgtgaaaatgggctaatacagcatgttccagtaaaactttactttcaaaagcaggtagtgggattgcctcctggttaaatttaaaaagatataatcctacagggagaaagggtagaaaattcagtaaatggcaaggtacaatttttcaaacacccattttgtaacccacaagtaacttccagatagtactataaaatcaaactgactttta

SEQ ID NO: 350314 - DNA, 619 bp, Homo sapiens
aattatttctacacatagaaagcctccatttattatttatgtttgtgattttatactctaatgtatcactatttaaattatagctgtattttatgtattgataattgttggttatcagcctttgttcttttattcaaaagtatcttaattatttcataytaccaacaaattttagaatcagcttgtaaataccacacaaatttattttaggatttttatggcaatcgtgctgaaggtatgaaagaatttgggaatgattggagctttttgcaatataaagactttacatccattaacatggtatgtatcaccatttattgaaaattcctttcattaaatgacagatatgcagctattttcatttttccttgtaaaaataatttctatccctaatgctatttattctacaccaatatttgccattattgatgtactagcagctcatatttcaagaaacattgttttgcctgagattaatatccattatgcctatatgtaagacgttggtgctgaatgaacatgactttaaaaaaatagattgtttctggagcagttttagattaacggcaaaaaatcagaagacaaagagatttcccatactgttattttttgttttact

SEQ ID NO: 350315 - DNA, 615 bp, Homo sapiens
tagtatggtctgtgcctagggtgtggacagaaaatattctgactctttgccctcttcctttcctatcttacttcaccaatctcctttgtagataatctggcaaatattctctaccttttatttaacccctccagtattagggaagcagacttttttcaccagaaaacatctcatttttgaccagctacaataattgttattttatggaacagaaaattaactttttaatgacttctcaatattttttattgcttgttctacagagaaaaaataaacaatctcttttcaatatgacagtcctgtaaatatttggagacatttttgataytatgattcattttatcctggtagccaatttctttaacatattcccaatggtttaagtattttttattatggcagcctttccttacatgcattctacctttgtcgttgaataacgtcaaaatgtcatacatttagtaattaattcaagatacttttgctgagaatctattatgtgcctgtgctagatgttagagatagaataaggggcaagatctgcatgtcccagccttcatgaacattgggaactgaacctaataaactagattgagaccttggctccatactact

SEQ ID NO: 350316 - DNA, 630 bp, Homo sapiens
tcttggaacagagagtcaggaaaagttccaaatttacaagaaaataaaaaaattcttttacatgttttagctaatactggttatactaaattttttaaaactttccaataaatagatgtagaatggtatttcattgtatagtagtattgatttgtattttctgattgttaattagttttagtatatttgaatctgtgaataatttacaaaaatctattctttgaaaatttagtttaaattattaccttttttaacttttagaatctcctttaaattttttacaaattagcttttttttttwaaaaaaaaaaaacatttattttaacctacttaaaaactttagagccatttatcttccaagtccacaatgtatgccttgtgttctattgtttcttttcttctaattctcactcagcggtcagttttcatatgtgcttctaaatttcattgttaagctcatattcagatggctcatcttattctttggaaatcttttgatttgaggatgggtcccactcagggacaatttctgcttccttcagctacactggggctattctaatctgcagctgcttttagataatacccaagcctgattttttgtgtgaatgcaaacccacatgatggcaa

SEQ ID NO: 350317 - DNA, 630 bp, Homo sapiens
tcttggaacagagagtcaggaaaagttccaaatttacaagaaaataaaaaaattcttttacatgttttagctaatactggttatactaaattttttaaaactttccaataaatagatgtagaatggtatttcattgtatagtagtattgatttgtattttctgattgttaattagttttagtatatttgaatctgtgaataatttacaaaaatctattctttgaaaatttagtttaaattattaccttttttaacttttagaatctcctttaaattttttacaaattagcttttttttttaaaaaaaaaaaaacatttattttaacctacttaaaaactttagagccatttatcttccaagtccacaatgtatgccttgtgttctattgtttcttttcttctaattctcactcagckgtcagttttcatatgtgcttctaaatttcattgttaagctcatattcagatggctcatcttattctttggaaatcttttgatttgaggatgggtcccactcagggacaatttctgcttccttcagctacactggggctattctaatctgcagctgcttttagataatacccaagcctgattttttgtgtgaatgcaaacccacatgatggcaa

SEQ ID NO: 350318 - DNA, 462 bp, Homo sapiens
tttataagtagtgccatcgacagttcattaatataaagctcaggaaatgattataaggcaatgagctaaaacttagtcacctccatgaacaaacaacaacatatttatatatttcaaatgccataaggttcaaggaattcaacaaattgaaaactaaactactattccaacttagcctaagccctcctccattgcaatggcactaccatctgtgaacaagctctctttggttttactatgaaatatctcttgaatccatttgctttcttttttttaaattgtttcccagctttattgacaaaagttatatatgtttatggtgtacaacatgatgtttcaatttatgtatacattattaaatgaattgagtccatttgtttkcattcattccttagctacaaattgtcaatcaaaactatcatctgtctagcttaaatttcagaaaatatcttatgtgtttca

SEQ ID NO: 350319 - DNA, 501 bp, Homo sapiens
ctttctcagtttctttgaatatgtrtcaagacacacaaccagatacttttctcttgcttcctttatatttcttggaattaaaacacttacatatatgactaaaagccagtatatagagaaagataaaatcacatgttctattctctatgtgtatgtttcatatcacaagtaaaggttttcttttctttctttcctattctttagttcctatgataagtcaatgaatggagcactacttaacaaattgttctaaatttcaaagggaaagtattagtatattttggtaaaatggctaccattgtgaactattgtcaagttaacttgaatcaataatgatgccatatccaaataagaatggttattatactgtttgttgtaaagtttcactcaataaaattttattgtggaaaatctctataatacaaaaattttaaatcaacattagagcagattacttcatttcatttatgacagcactaaaatatgcaataggattatgat

SEQ ID NO: 350320 - DNA, 501 bp, Homo sapiens
ctttctcagtttctttgaatatgtatcaagacacacaaccagatacttttctcttgcttcctttatatttcttggaattaaaacacttacatatatgactaaaagccagtatatagagaaagataaaatcacatgttctattctctatgtgtatgtttcatatcacaagtaaaggttttcttttctttctttcctattctttagttcctatgataagtcaatgaatggagcactacttaacaaattgttctaaatttcaaagggaaagtattagtatattttggtaaaatggctaccattgtgaactattgtcaagttaacttgaatcaataatgatgccatatccaaataagaatggttattatactgtttgttgtaaagtttcactcaataaaattttattgtggaaaatctctataatacaaaaattttaaatcaacattagrgcagattacttcatttcatttatgacagcactaaaatatgcaataggattatgat

SEQ ID NO: 350321 - DNA, 616 bp, Homo sapiens
aaggactttcccctaaagaagccttagtgtgtattgggaaggatgccatttccagggagctttgaccacataatactgacataaacatgacaacctaccactcagtacattttgccaagctcccaagtataggccatggacctcactctgagtagtaaattatataccaaactttaaaaaattataatataatctaagtcctcctcaggttcgtatacaaacttgcctctctaggcaatacatttaacattcagttttcctatatctaggctgcggataacaataaaatcaaattatggttatgaaataaaattaaattacagtttatatgaagcacttgcgcatagtgaccatcycctcaaagaattgttcgatttctttttagcaatttctgatatttgtattattaccatctgaagccagcattttccaagtgttttccatgatataataaaaactgttatctaagaaaataataataatatatttggaaaaaaaacctgggttaaatagataaccaaattaaaggacctgaagagtctaatcataaataaattttcccaagccctataatttactaatatgatttatgaatctccaataaggactatgacaa

SEQ ID NO: 350322 - DNA, 616 bp, Homo sapiens
aaggactttcccctaaagaagccttagtgtgtattgggaaggatgccatttccagggagctttgaccacataatactgacataaacatgacaacctaccactcagtacattttgccaagctcccaagtataggccatggacctcactctgagtagtaaattatataccaaactttaaaaaattataatataatctaagtcctcctcaggttcgtatacaaacttgcctctctaggcaatacatttaacattcagttttcctatatctaggctgcggataacaataaaatcaaattatggttatgaaataaaattaaattacagtttatatgaagcacttgcgcatagtgaccatctccycaaagaattgttcgatttctttttagcaatttctgatatttgtattattaccatctgaagccagcattttccaagtgttttccatgatataataaaaactgttatctaagaaaataataataatatatttggaaaaaaaacctgggttaaatagataaccaaattaaaggacctgaagagtctaatcataaataaattttcccaagccctataatttactaatatgatttatgaatctccaataaggactatgacaa

SEQ ID NO: 350323 - DNA, 628 bp, Homo sapiens
ctgggattgtattccctattcatttaacatgtaaaatccgcttttcaaatttaacaatgatcagcacttaagatagattttcttgtcaatatagagattttcttgtcaacatcatctattgcagacacaggtgagacacagtatgtatagtatgattccatattgcaacacccagttgattattagaaacatattctgcaatatacctgaaatgttagcacagagtatctccaggttgtaggttggcagtagaatccatatacttatctttattttctgtttttctctattttctaaattatttgtttatgatttaagcatataatcttttgtttttaaaaaagcacttttctgcccttcttccaaacacaaattgacctcctgttcctctgataaaaaatatgagggttttttgtttttttgatttttactgtggcctttagaaagtattctttcttaactagtcatagaatacctcttcatccacrttgaatttttcacattgacctgaatgccccatgaccttccatgtctctataagcttctacgccttttttctggatgcttctcttttttttcctatgtgaagattttccagagttctataaacagttatttgctctttttt

SEQ ID NO: 350324 - DNA, 644 bp, Homo sapiens
ataaatttcgttttgcccgtgtacatcattttaatatagaagctttttcttttcatagcagagaaaaaagtcattagagaattgaaaattcttgttacagcaaactgtctctgatttaaggtgagaccattttaatgcactattagttttatccagtggtacataacgatattattttaaaatatggcaaacaataaaaatgttaatgagcaacgttccagaaaattaattttatgtgtaagctgtgtaccaaccataaaatgctgaagtctataaagtaagctttttgtgtctattttaatttaggaccttcattgtttgaatatttttctttagttctatttcttaaccattttttaataattagtttttgatcggcaaagtatcttcacttccttgcttcatgtkctaaagatgtggtactccctttacgtattatgtttcaacggtagcaaattatagtaaaaagaaggatagggaaagaaagaagaagaggataaaaaaaatcaagccacagaaagcaaattagggttatttaccttttccctaagttattccagtgtatatagattcttatatagtcatggaggaatttgtaaagacccatagaaacatacccagtgatttccaaggaagtcctggca

SEQ ID NO: 350325 - DNA, 584 bp, Homo sapiens
gagtagagtacagtgttaaagagcgtggagtctccagtyacattgcttgtattcaaatccagactttgcaagttactagctttgtgatttttggcaagttttttaacctctgtgtgactcagtttcttcaactgtgaaagacggataacaatcattcctacctaataggattgtggtgaggattaaggaagttaatagagtaaagcgctcctaatagcacctaaatcatgtcttcctatctgttttagctgttattattactactactaatagtattattattattatcattattagtggtgtgtgttcaagaatgtcaaaaacaatttgaaacaggagctgaagacttggaagaaggtaatagaggattaggagtcttataaaaaaaaaaacaaaaacaaaaaaccagcaaacaacaacaaaaaaagcttttaccttccaggcactcactgaattttgtgacatattggagaactttagtttggttctcctgggaatccagccattatgtaaaatatctgaatgccaagaggttgctatgatggagaggacttgtgtagcctcgttggtcaccagattaagct

SEQ ID NO: 350326 - DNA, 503 bp, Homo sapiens
tggaaaaaaaagactcaaatgtgagtcatgtcaatatagaataaaatacaaaaagcaaaatactaaacgatccaaaagttaatatagataaatatattcataacttcaaggtatataaacattttccttkttttgtttctaaagtacaaattcagtttattcatctgtttatgacacagtacacaggaggcaaagtgtttcacatcatagatttcacttccaactgcttggaatgtacatttctttggcttacaggagagactagacaggaaagccaggctatgcttacgcaactaaaatgaggttgggggcaatgctaatgtcatcttcacagggacggccacagggactgttagccacaagctggttttctagacctgttagctggaagcgtggggagcaccgtttctggaagctcaagctatgttgggcttcagtcatctccaccacacaggtacagcagtgctttctgggtagtcgttcttagtgtcttgctggatgta

SEQ ID NO: 350327 - DNA, 503 bp, Homo sapiens
tggaaaaaaaagactcaaatgtgagtcatgtcaatatagaataaaatacaaaaagcaaaatactaaacgatccaaaagttaatatagataaatatattcataacttcaaggtatataaacattttccttgttttgtttctaaagtacaaattcagtttattcatctgtttatgacacagtacacrggaggcaaagtgtttcacatcatagatttcacttccaactgcttggaatgtacatttctttggcttacaggagagactagacaggaaagccaggctatgcttacgcaactaaaatgaggttgggggcaatgctaatgtcatcttcacagggacggccacagggactgttagccacaagctggttttctagacctgttagctggaagcgtggggagcaccgtttctggaagctcaagctatgttgggcttcagtcatctccaccacacaggtacagcagtgctttctgggtagtcgttcttagtgtcttgctggatgta

SEQ ID NO: 350328 - DNA, 608 bp, Homo sapiens
cacaaaaagcactgatcattaagtttattttttatttttatttttattattactattattattattttctttaagatagactttcactcttgttgcccaggctggagtggaatggcatgatctcggctcactgcaacctctgcctcccgggttcaagtgattctcctgcctcagcctcctgagtagctgggactacagatgctggccaccacgcccagctaattttttgtatttctagtagagatggagtttcaccaygttggccaggctggtctcgaactcctgacctcagtggtccacccacctcggcctcccaaagtgctggatgacaggcgtgagccactgcacctggcctgatcataaattttaaatgtaagcttaggtcataaagatttgatcacaaaaaaagttaaagtctgaaaccatatttgaaaattctaaataaaagacacataatcagaaaacctaaagaattacaaatcaattagaaaaatataaacaaacaaaaaagggtaaaaaatgtgaataaagaggaaattggcatgtacagtaaaacaattgaaaaaaagttgttcaatttcattagtcatcaaggaaaagaatattaa

SEQ ID NO: 350329 - DNA, 608 bp, Homo sapiens
cacaaaaagcactgatcattaagtttattttttatttttatttttattattactattattattattttctttaagatagactttcactcttgttgcccaggctggagtggaatggcatgatctcggctcactgcaacctctgcctcccgggttcaagtgattctcctgcctcagcctcctgagtagctgggactacagatgctggccaccacgcccagctaattttttgtatttctagtagagatggagtttcaccatgttggccaggctggtctcgaactcctgacctcagtggtccacccacctcggcctcccaaagtgctggatgacaggcgtgagccactgcacctggcctgatcataaattttaaatgtaagcttwggtcataaagatttgatcacaaaaaaagttaaagtctgaaaccatatttgaaaattctaaataaaagacacataatcagaaaacctaaagaattacaaatcaattagaaaaatataaacaaacaaaaaagggtaaaaaatgtgaataaagaggaaattggcatgtacagtaaaacaattgaaaaaaagttgttcaatttcattagtcatcaaggaaaagaatattaa

SEQ ID NO: 350330 - DNA, 661 bp, Homo sapiens
cttaatgctagatttgactaatttatattaggaaattaattagattcataaatagaaattatctttgctaataataattggaagtaagaacttttaccccagtgaacataaatatcaaaatttcaaaattaatcagaggtttcctgcagatatatcatgtatggagaawaaggggatgtcatttctaggagtatttcctaacatccaaggctgaatttgttgcctctgctctgtacaccatttatcacactttattattaatgtctattttattttcacttcccctccaggtcagcactcttcaatagaatattctgtgaagatagaacggatctgtatctgtgctgtccaataggttagctactggccacatatggttatgacacacttaaaatatggctattcttaatcagaatgtatcgtaatataaactacagattatatttcaaaaacttagtgcaaaattaaaatatatagcattaatatatttttacatagaatgcatgctgaaatgataatattttgaatatatggggttacatgaaatataattaatttcactcattttttctactttttaaataatgactactatgaaaatttagaattatgcatgtagctagaaattgtagagtactgtatctctatgaggaggcatgct

SEQ ID NO: 350331 - DNA, 514 bp, Homo sapiens
gtatctttctaatgatcaggccagtttggaaaatattgacttatattcttcattttagtaaaagttatgcatataatgactcaaatgttatggaatttgaactgaaataaaattttaggtatgcaatatgaaacaaaatttcttactctactgtttggtcatccatagaaaatttatcttttattttaatgaccagtggtatacccaacatgaaatatatttaactgatatcttctttttgttggtagaaacacattcaggacttaaggaattctatcatcttctttatgatatttcttaactagagggatacattagaatcaatcttgacatttttctgaatatatttgcctaggaaattcattgtcaacatgttaatattataaaaagggamccattaaccagtcattcctccagtgttattcctcctgattaaagaacacagcacctcctatgttatcctatatatgaacataagaacatattatctgaccccacaaaagtgaaaccagaa

SEQ ID NO: 350332 - DNA, 450 bp, Homo sapiens
accatggtcactttattcgtaagccaattgggtgataacaggggtggttggggaaagaggctgactggtattcaaagaatgggttactctgtccacttgatttcaaaacccccctccacwgctgaggtcacctcttggtgagcattcttgtgggacacacatattttaacattttttttccttcagagatatatattcatatatctcttcccgatgtttctttctcagcagttttccaattacgtttcttcaaattccctgaccatccagtcaaaccattggctacagcccatgaactgggatagaagaactttttctcatttctcctttgtggcaaaatgtgtgcaaccaggtaccctgttcaaagatctactcactgggaagattttccatcatgactctccttcagggatgtccttgagaggggctgttgtgatgctgttgcccagt

SEQ ID NO: 350333 - DNA, 585 bp, Homo sapiens
gctgactggtattcaaagaatgggttactctgtccacttgatttcaaaacccccctccactgctgaggtcacctcttggtgagcattcttgtgggacacacatattttaacattttttttccttcagagatatatattcatatatctcttcccgatgtttctttctcagcagttttccaattacgtttcttcaaattccctgaccatccagtcaaaccattggctacagcccatgaactgggatagaagaactttttctcatttctcctttgtggcaaaatgtgtgcaaccaggtaccctgttcaaagatctactcactgggaagattttccatcatgactctccttcagggatgtccttgagaggggctgttgtgatgctgttgcccagttttggggggaatctgyggagtcactaacctggctaaatttatgataatcctctgtcattctccaagatccatttgtcttctgcataggccaaataggagagttgaatggagatacggtgtgaattgctatccttgcatcttttcttaacagtggcactaataatctctgcaatccctcaatgaatgttttatta

SEQ ID NO: 350334 - DNA, 467 bp, Homo sapiens
gataaatggataaagaaaatgtcgtatgtatacacagtggagtactattcagccaataaaaaagarttatttttatttttattttcttgactgcatagtactctattgtgtatatgtaccacatttataataatttaaccttattaaattattatttaattgtaataaagtaattttataatattgatcatcagagaaatgcaatgagatatctcattgtagttttgattttcatttctctgatgatcaatattataagattacattattaaaattattataagatgaacacccttgtaacttgtaattcctgtcattttcaaaatcatggatgaaactggagctcatgttaagtgaaacaagccaggcacagaaagacaaaatcacatattctcacttatttgtgggatctgaaaaccaaaacaattgaactcatggacacggagagtagcaggatggttatcaga

SEQ ID NO: 350335 - DNA, 467 bp, Homo sapiens
gataaatggataaagaaaatgtcgtatgtatacacagtggagtactattcagccaataaaaaagagttatttttatttttattttcttgactgcatagtactctattgtgtatatgtaccacatttataataatttaaccttattaaattattatttaattgtaataaagtaattttataatattgatcatcagagaaatgcaatgagatatctcattgtagttttgattttcatttctctgatgatcaatattataagattacattattamaattattataagatgaacacccttgtaacttgtaattcctgtcattttcaaaatcatggatgaaactggagctcatgttaagtgaaacaagccaggcacagaaagacaaaatcacatattctcacttatttgtgggatctgaaaaccaaaacaattgaactcatggacacggagagtagcaggatggttatcaga

SEQ ID NO: 350336 - DNA, 577 bp, Homo sapiens
gtctgggcaagtcagactatcctgattgctgctttcaccctgctgcccattacagtaaccaagcccagcctgcctttggtggttgagttccaccacttggtctctgataccccaggaaccagttactcccattgcatttagattttccaattcagtgactgcagttcccactttgaagtgtgacatacagaaagagtgaacccagagttcttcaaagatcctggggtttctttcacaaatttatttctcatagagtggtggaaggtatgtcttctgtaccctcccaatgtgggtgggtagttactaaattataaatycattctaatattctaacctcctaagcctttgaatcactttctctacactaaaccaaggtacatccagcatttccaatttgctcacagtggaccatcctttggtccttgttctaaccaggcaaccaaactgtagaacgctttctatccccagaagctacaacattaaatgcagaatttctgctaaatgagcacatatcaataaatatggcctaatcctacattatctttctgccaccattaccccatactgttagtatcat

SEQ ID NO: 350337 - DNA, 509 bp, Homo sapiens
gaccatcctttggtccttgttctaaccaggcaaccaaactgtagaacgctttctatccccagaagctacaacattaaatgcagaatttctgctaaatgagcacatatcaataaatatggcctaatcctacattatctttctgccaccrttaccccatactgttagtatcatccccacatacattctctggattctgccttataaattagaaaactcaagaagtgctttgtgagtgtagcttacatcctcatgggtcacattttacacctcactcttagaagtctactgaaacttgagtccaattataggtctggaagcaaagatgagagataaggggtgtcctgaggaaaatcagcttcgaattacgtggcaactgccttaggggagtccattactgttgtcattgctcaaggaaggcagggtcaatcccctcagatggatacaaaggcccagactattgtgagtacagacaaaggcagataccactgagggtggagagactgaccctt

SEQ ID NO: 350338 - DNA, 509 bp, Homo sapiens
gaccatcctttggtccttgttctaaccaggcaaccaaactgtagaacgctttctatccccagaagctacaacattaaatgcagaatttctgctaaatgagcacatatcaataaatatggcctaatcctacattatctttctgccaccattaccccatactgttagtatcatccccacatacattctctggattctgccttataaattagaaaactcaagaagtgctttgtgagtgtagcttacatcctcatgggtcacattttacacctcactyttagaagtctactgaaacttgagtccaattataggtctggaagcaaagatgagagataaggggtgtcctgaggaaaatcagcttcgaattacgtggcaactgccttaggggagtccattactgttgtcattgctcaaggaaggcagggtcaatcccctcagatggatacaaaggcccagactattgtgagtacagacaaaggcagataccactgagggtggagagactgaccctt

SEQ ID NO: 350339 - DNA, 644 bp, Homo sapiens
taggggtgaatgtatctagtttcatcaagatcgttccacacatccccactgcaatatatatatataggatcccattttctttttccagtcaataccctcaccctaagagtagaaatcattcaaagatgagagttcaacttgcactgtaatttaaccagttgcaggatgaggttttgtgtttaagttttagcaatttcagcccttcagctacaggaaataagggaccctttcaggacacacacagatgctcttaggtcatttatttggtacttgagctaggaatttgaatcatagagcacattcttttctttaccaattcatccagtgacattttcaggtgagattkggtgtgttcagggtggtagggccatagacatatccggtgacattagaagtaaccaacgaacataattatattaattagttttccaaaaatgtttgaaagtatcatatacagagtcacctagctccttgtttcttatacgtggttgattagaattatacaatgcagatatgttgcatattttttataaacagttcatgccatggactatcagtgttctctttactaacaaaagaaagtcatcattgtctttaatcagattagggaatcagttctagataccccagaaacaattcagaaa

SEQ ID NO: 350340 - DNA, 453 bp, Homo sapiens
gtaaaaaaaccccataaattttgagttacagtggttaacttaatgagtaattgtttgaaagtagaaattatttatatttctatgtattaaatttgagatataataacattccttgaaataagtataccctgaattcattaaaaattcataaaaacaatttaaaataagagcaaaatatataaaatgagttttatgmcttagttaccaattgtttcaattcaaattcactggctttactataggtattaaaaggttgcatagcagagtgggtcaatctattaaggtttcattgttttcttagtaaaaagttacttcaaaaatgaaatagaaaatagagaattatatttgcattcaaaactagaaattgttccaatagtccaaaccaagcaaagtccttatttaacataaataaccaggataactgacttactaccttacttttctgtgtacata

SEQ ID NO: 350341 - DNA, 564 bp, Homo sapiens
tgcttgccatattccttatttttttccaatgcaaagttgacgaaagtgatgtawcattacctggccaaggcagttaaaaagctcttacttattctatttctcccttctccgttgcttcctgcctggaggcaagaggtccacagagtcatttcagatctcaggtactggtggagccactaaacttagattccattttactagattacagaccactaagaatttagactcattatgtcaccagatgaactattttaactaatgcaatttgtgttctttcttttatataagcatcaattcatttgaaacacctccaattaatttttgtttagtctctgtcctcagaagagaaattcataaaatttatttatatcttaccagtatttgaaatgttctgctaccactggcttcttgcaatacttctatcttctgaattccatactaacagataccttaacctcttcacctacattataggctgcttcctctcagatgtctttgctggtatctcattcttctttaaatgttagagtaccctaaaggtgagtcttcagccttcctcatggt

SEQ ID NO: 350342 - DNA, 609 bp, Homo sapiens
taacatatcttttgtttttgttcttgactttcttagacaatatcaagagtgaccttgataatgcagaaatcagattgtataactgccttacttaaaagatgcccaggtgattctgtttttataaagtctaaatttataacacaccatttatctttatctcataacagtatatggattgatacaaagcagtgaaagattatcataacaattcaatgaaagagttgttttcacatgcttttggaaatccagaacaatagcttcatagtctatcaactagatgaaatttgacaaaaaagaaattgggattaaatgatgatccttctaatagttctgctgtctaaatttgtgtagttaggaaattgcacatgtatatgtgaaatgatttttaaaaagtcatgtatataataacatatataatgtataaattaaatttatacacattatatatatgttatatatattattattacttttggagacaaggtctcactttgctgcccaagctgaaatgcagtggcatgatcatacctcrctgcaacctcaagcaatcctcctgcctcagcctcactagtatctaggactacaggtgtgcaccatgacactatataa

SEQ ID NO: 350343 - DNA, 561 bp, Homo sapiens
ggatccctgcttctactcttgccttgtaatcctttttctgcacagcagccagagtgaccttttgaaagtataaatcagaccatgtcacttccctgcctagaactctaaaaaggctttccactgcccttgaggaaaaacaaaaaacaaaacaaaacaaataaaacatccatactatagatgaaagacactactacacgacttgatttgatttctggttacttttctgaccttttctcctatctctccctcttgctcttgttcaataagcttcatccatactgttttcctctttgttcctgggaggtgcaaggatctttactgattatgtttgatgaggctattctctctgcttggaaaacaattccccctatctcaacatatctaacccattctcttcattcttgtttcagttcagatagtatccttaagtgaagcttttccttagcaataagtgcaaaacaatcctcgaacccaacagcctccaacatatcacctatagtaattgtcagaatttgaaarcactgtgtttacatttatttgcttgttcactttatcttttag

SEQ ID NO: 350344 - DNA, 452 bp, Homo sapiens
gggcctgactgttaaaaggaaaactaagaaacagaaagcaataacatcaacatcaacaaaaaggacacctacacaaaaaaccccatctgaaggtcaccaacatcaaagatcaaaggtagaaaaatccatgaagatgaggaaaaaaatagcacaaaaatgctgaaagttccaaaaaaagaatgcctcttcttctkcaaaggatcacaactcctcacctacaagggaaaaaaactggacagagaatgagattgatgaattgacagaagtaggctccagaaggtgagtaataacaaactcctacgtgctaaaggagcatattctaacccaatgcaaggaagctaagaaccttgataaaaggttagaggaactgccaactagaataaccagtttagagaagaacataaatgacctgatggagccaaaaaacacagcacaaaaactttgtgaagcat

SEQ ID NO: 350345 - DNA, 570 bp, Homo sapiens
acacctacacaaaaaaccccatctgaaggtcaccaacatcaaagatcaaaggtagaaaaatccatgaagatgaggaaaaaaatagcacaaaaatgctgaaagttccaaaaaaagaatgcctcttcttcttcaaaggatcacaactcctcacctacaagggaaaaaaactggacagagaatgagattgatgaattgacagaagtaggctccagaaggtgagtaataacaaactcctacgtgctaaaggagcatattctaacccaatgcaaggaagctaagaaccttgataaaaggttagaggaactgccaactagaataaccagtttagagaagaacataaatgacctgatggagccaaaaaacacagcacaaaaactttgtgaagcatatacaagtatacaagctgaatcratcaagcagaagaaaggatatcagagattgaagatcaacttaatgaaataaagtgtgcagacaagattagagaaaaaagaataaaaagaaatgaacaaagcctccaaaaaatatgggactatgagaaagatcaaatctacatttgattggtgtacctga

SEQ ID NO: 350346 - DNA, 500 bp, Homo sapiens
aatgcctcttcttcttcaaaggatcacaactcctcacctacaagggaaaaaaactggacagagaatgagattgatgaattgacagaagtaggctccagaaggtgagtaataacaaactcctacgtgctaaaggagcatattctaacccaatgcaaggaagctaagaaccttgataaaaggttagaggaactgccaactagaataaccagtttagagaagaacataaatgacctgatggagccaaaaaacacagcacaaaaactttgtgaagcatatacaagtatacaagctgaatcgatcaagcagaagaaaggatatcagagattgaagatcaacttaatgaaataaagtgtgcagacaagattagagaaaaaagaatraaaagaaatgaacaaagcctccaaaaaatatgggactatgagaaagatcaaatctacatttgattggtgtacctgaaagtgacatggagaatgaaaccaaggtggaaaacacccttcagg

SEQ ID NO: 350347 - DNA, 586 bp, Homo sapiens
tatacccacatacatatatacagtatatgtgtacatatatattcaggtaagtatatgtgtgcactgtgtgtatatatgtgtgcatatgtatgttgtatatacaaatgtgtgtgtgtgtgtgtgtgtgtgtgtatatatatatattcaaataagggtcacaaatatgccagaatgaaaaataacaaaacatcggcttaagtagagaccaagcaactatgacatgctttcacctaagattctatgaaataacaaaataaatgtaaaaaggccaaatgaatttaaagcatcacagggaaacacaaaacagcatcattaaaaacaaaaaaaaatccasaaagatagaaaggaaataggtgcagataatcagataattttaaaatggaagctataatggcacaaatgcagtaaggggaaaatacattcattataaactccttagcacttaagcaagctagcccaactcatacaaaaagtggcacagggcccatttggaaaaacacactgggtgacctctccctctcctggatttgtgctaagcaataagtaaaaatgtcattaacccacaggttaagcagttagtgtggaa

SEQ ID NO: 350348 - DNA, 652 bp, Homo sapiens
atacaatgcattgttattaattgtagttwttggactatacgatagatacaatatttggtattaataataccaaaacttattaatcttgtgtaacagagacattgtaccatttgaccaatatctccccattccactctcaccctaatctctggcaactaccagtctacgctgctctatgagtttgagttttttcagttccacatttaagagagatcaggcagtacattctttttttacaacaccgtagtcatgttagtaaattagtgactcaacattgtatgcctttttcagaggcttcctcagattcatttttgtgcatcagaaatcttgttataagcgctgtgttcattttatatgtattataactaggatttttttttctttcagaacattttaaaatatatctcttatcagtgagtctggggcatagaggaaattgtttgccgttcctcaggcaggacactttttcttttttcttaccctctgcattccttcttcctaactagagaagtgttttctcctataagaacatatcaatttagtgctatgataggaaagtatttgtaagaggaagatatttatctgataaatgttccactttgaaacatctgaataaacaaatggtactaacttaggaggaccttgcttacaa

SEQ ID NO: 350349 - DNA, 652 bp, Homo sapiens
atacaatgcattgttattaattgtagtttttggactatacgatagatacaatatttggtattaataataccaaaacttattaatcttgtgtaacagagacattgtaccatttgaccaatatctccccattccactctcaccctaatctctggcaactaccagtctacgctgctctrtgagtttgagttttttcagttccacatttaagagagatcaggcagtacattctttttttacaacaccgtagtcatgttagtaaattagtgactcaacattgtatgcctttttcagaggcttcctcagattcatttttgtgcatcagaaatcttgttataagcgctgtgttcattttatatgtattataactaggatttttttttctttcagaacattttaaaatatatctcttatcagtgagtctggggcatagaggaaattgtttgccgttcctcaggcaggacactttttcttttttcttaccctctgcattccttcttcctaactagagaagtgttttctcctataagaacatatcaatttagtgctatgataggaaagtatttgtaagaggaagatatttatctgataaatgttccactttgaaacatctgaataaacaaatggtactaacttaggaggaccttgcttacaa

SEQ ID NO: 350350 - DNA, 652 bp, Homo sapiens
atacaatgcattgttattaattgtagtttttggactatacgatagatacaatatttggtattaataataccaaaacttattaatcttgtgtaacagagacattgtaccatttgaccaatatctccccattccactctcaccctaatctctggcaactaccagtctacgctgctctatgagtttgagttttttcagttccacatttaagagagatcaggcagtacattctttttttacaacaccgtagtcatgttagtaaattagtgactcaacattgtatgcctttttcagaggcttcctcagattcatttttgtgcatcagaaatcttgttataagcgctgtgttcattttatatgtattataactaggatttttttttctttcagaacattttaaaatatatctcttatcagtgagtctggggcatagaggaaattgtttgccgttcctcaggcaggacactttttcttttttcttaccctctgcattccttcttcctaactagagaagtgttttctcctataagaacatatcaatttagtgctatgataggamagtatttgtaagaggaagatatttatctgataaatgttccactttgaaacatctgaataaacaaatggtactaacttaggaggaccttgcttacaa

SEQ ID NO: 350351 - DNA, 586 bp, Homo sapiens
tatacccacatacatatatacagtatatgtgtacatatatattcaggtaagtatatgtgtgcactgtgtgtatatatgtgtgcatatgtatgttgtatatacaaatgtgtgtgtgtgtgtgtgtgtgtgtgtatatatatatattcaaataagggtcacaaatatgccagaatgaaaaataacaaaacatcggcttaagtagagaccaagcaactatgacatgctttcacctaagattctatgaaataacaaaataaatgtaaaaaggccaaatgaatttaaagcatcacagggaaacacaaaacagcatcattaaaaacaaaaaaaaatccacaaagatagaaaggaaataggtgcagataatcagataattttaaaatggaagctataatggcacaaatgcagtaagggkaaaatacattcattataaactccttagcacttaagcaagctagcccaactcatacaaaaagtggcacagggcccatttggaaaaacacactgggtgacctctccctctcctggatttgtgctaagcaataagtaaaaatgtcattaacccacaggttaagcagttagtgtggaa

SEQ ID NO: 350352 - DNA, 586 bp, Homo sapiens
ctattccaatttccacactaactgcttaacctgtgggttaatgacatttttacttattgcttagtacaaatccaggagagggagaggtcaaccagtttgtttttccaaatgggccctgtgccactttttgtatgagttgggctagcttgcttaagtgctaaggagtttataatgaatgtattttacycttactgcatttgtgccattatagcttccattttaaaattatctgattatctgaacctatttcctttctatctttctggatttttttttgtttttaatgatgctgttttgtgtttccctgtgatgctttaaattcatttggcctttttacatttattttgttatttcatagaatcttaggtgaaagcatgtcatagttgcttggtctctacttaagccgatgttttgttatttttcattctggcatatttgtgacccttatttgaatatatatatatacacacacacacacacacacacacacatttgtatatacaacatacatatgcacacatatatacacacagtgcacacatatacttacctgaatatatatgtacacatatactgtatatatgta

SEQ ID NO: 350353 - DNA, 303 bp, Homo sapiens
gctttattgacatcatctgttgttacctacattttcataatttcctctaagttcatggttttgtttgtataggactctgtttatgatamggtactactcaaactaaatttgagttttggatataaatttatatgtatacacagggctttacaaagtatgataagctctatggataaagaaagacagagcctatataataacaaacaggcattgtttctgaataaagaggcaggtaattaggagtatgcctaaataccagtgttgatagatgctttttcttggttaatatcttagagctattga

SEQ ID NO: 350354 - DNA, 637 bp, Homo sapiens
tacaaatggctttcttcttgttgacttttccctcttctaatacattctactggtccacacattttttcatttttcatcttacaaaattagttgacattcctcatctagtgtcagtgccttacacatgcacacatttatgggtactttacaggaattagtaaaaatgcatgcatattttcagtcagccatgttaaaccagagatcctttataatattcttttagagaaagaaaagctctattacatatgaaaatattttgcttctgtgttagctctgttggcaataaagagcattaaaacatttttaggaaattatattacaatgtaaataaatcttaaaaggatacaaaacaacaaaacaaaaatactggttgctgcygataaaaatctagaaatgaagcaaaaataaatatttaaaactgaaatgatggtagtgagttgtagcataactgaagtttacttagagtcaatattaaagcactgttgatcttaaagctctacctcattttctttcctaatgatgagaataaattaagagagacagccagttataaggccaaaacactgaatagaaatgaggtgatgtgagacttaatcttccgcttgtcagtaattaatagtctttgtgatccagaaaa

SEQ ID NO: 350355 - DNA, 553 bp, Homo sapiens
tgctcttaaaagttgcacctcctggctgaaggccaaccaactcaggacattacagcaactcatgacagaataaccctgctccaaggaaagagaaaacaacagctaattccactgcctgcgtcatcctggctaatcggaggccctgagtttgttcagatcactgccagcataatcagcattcaagaaagccagcatactaaacatatctataaccaaggaatctcacagagtctacttcactcccctgccacctccacaagagcaggtcttggtatccatgcctgggagacctgaagatggatcacatcacaggactcttggcagacattctgcagcacctgcccagcctggtagccctgctgagtggctagacccagaagagcattaacactcaatgcactccagytcccaggaatccccatcccttaggaagggtgagtgcacatatcaggggatcactccatgggatgaaagaatctgaacagcagccctggagttccagatttttccgctaaaatagtctacccaaatgagaaggaatcagaaaagtaat

SEQ ID NO: 350356 - DNA, 598 bp, Homo sapiens
ataggtcataaaagcaaaaatggacaattgcgattacataaagttaaaaaacttctgcatarcaaagaaaacaattaacagagtgaacagacaactcatagatttgaaaaaacatttacaaaccatatatcttgtcaggcgttaatatccaaaatacctaaagaactcaaacaactcaattacaagaaaacaaataaccttattcagagagggcaaaggacatgaatacttaaaagaaaacacacaaatagacaacacataaatggaaaaagtattcaacatcactaataatttaaaaatacaaattaaaaccacaatgagctatcacctcatactttttagaatagctatgatcaaaaagatgataaataatgtataggctagaatgtagagaacagaaaacccttatatgttgttggtgagaatgtaatgtaaacagccattttggaaaacagtatagaggttactaaaaaaactaaatacatatttaccacataacccaacattcctacttttgagtagccaacagaaatttagtctgtatgttaaagagatttctgcactcttgtgttaattgcagcattattcatagtagtca

SEQ ID NO: 350357 - DNA, 586 bp, Homo sapiens
ttttctcagtacaagtatatacatacacaaacatattcttaacaaaataggaaggaaatactcatgacaatcacagtcttcagttctgcaactagtcacatggtcacagctggtattgaaaactaccttcttcgactacccattctgtattctctttgctttcagcaagcacctcagctggttgtggttttttacctggcagagtgacaaaaaccttcattcctgaggggggtgggtcatccrcagtcctgcctggattaggttgttgtactttcccattgaccttaatcacagggcatggtaatactgagagataccctaagggatctgctatattccacgcacactcttccgtgcctccattgtggagtagtaggctaatttcatctttatactctgggtcaatgaccccagccaacactgtaactccctccttaacctgttgacctagaggtaggagaagcccaaagtgaccaggtggcaattttaacttccagtttaatggaatcattgttgtgtctcctcatggcagcattcctccctctgtaattaagacctctaagtcagcagaacctaatgtagtggg

SEQ ID NO: 350358 - DNA, 586 bp, Homo sapiens
ttttctcagtacaagtatatacatacacaaacatattcttaacaaaataggaaggaaatactcatgacaatcacagtcttcagttctgcaactagtcacatggtcacagctggtattgaaaactaccttcttcgactacccattctgtattctctttgctttcagcaagcacctcagctggttgtggttttttacctggcagagtgacaaaaaccttcattcctgaggggggtgggtcatccacagtcctgcctggattaggttgttgtactttcccattgaccttaatcacagggcatggtaatactgagagataccctaagggatctgctatattccacgcacactcttccgtrcctccattgtggagtagtaggctaatttcatctttatactctgggtcaatgaccccagccaacactgtaactccctccttaacctgttgacctagaggtaggagaagcccaaagtgaccaggtggcaattttaacttccagtttaatggaatcattgttgtgtctcctcatggcagcattcctccctctgtaattaagacctctaagtcagcagaacctaatgtagtggg

SEQ ID NO: 350359 - DNA, 586 bp, Homo sapiens
ttttctcagtacaagtatatacatacacaaacatattcttaacaaaataggaaggaaatactcatgacaatcacagtcttcagttctgcaactagtcacatggtcacagctggtattgaaaactaccttcttcgactacccattctgtattctctttgctttcagcaagcacctcagctggttgtggttttttacctggcagagtgacaaaaaccttcattcctgaggggggtgggtcatccacagtcctgcctggattaggttgttgtactttcccattgaccttaatcacagggcatggtaatactgagagataccctaagggatctgctatattccacgcacactcttccgtgcctccattgtggagtagtaggctaatttcatctttatactctgggtcaatgaccccagccaacactgtaactccctccttaacctgttgacctagaggtaggagaagcccaaagtgaccaggtggcaatyttaacttccagtttaatggaatcattgttgtgtctcctcatggcagcattcctccctctgtaattaagacctctaagtcagcagaacctaatgtagtggg

SEQ ID NO: 350360 - DNA, 592 bp, Homo sapiens
tgtttgattcaaggcatagccatgtgttcaagatcatacaacgctgcaaagatttggccaattttttttccatctcttgtctgtgctttctttaggtttgtttcactgtcacacagcaactccccaaacatagtatcccctgacatccctaaattttatagtcagtggttctagyacaaagggagattctcattttatgtacttccaataaatgctgtgattgagtctcattcattctctggagtcattcttgaatgcctgaaagaggaaaatggaatgcacctttggttaaattcaagtgatgtgactcactggtgctgaatggggtcaccttcatctaaagtacatggggggggactaggggaaagttgtttacaaaacaaaagtttgactagaagatatcaaattcttgcaggaaaaatgagatcctcttgatataaaatataaaggagaaatagtcttacactagaagagtaacttgagcaagagttttcattataatttagaatgaatttttgtgatgaaatgatagaatctggaaaaatgttattagaaacaacaagtagattaatgtacagtttgggaaaaaaag

SEQ ID NO: 350361 - DNA, 580 bp, Homo sapiens
ataaaagctagttaactttaggcaggaagttaatttcaggaaatgacttctgtcagaagcacagaaatgtgacaaggaataaagaatgggaagtcaagttgaattaaaattgactgttaaaatggatgtggacatataaatacatgaaaaaacagcatattcatgcaaggagaagaagaagtacagtctaagagcataaggtcttttcattttcctagtagggtaaagatgctaattaacattagacttttaaaagtcaaggatccagcttgtaatatctctgacagtaactaattgaataaaaaatgaatgaatcgtctctcamccattacaaaataagggataataaaacgtattaaatcagcaacagtaaggagaaatagataaataagaattataaataaatcatagtgggatatttaaatacatttctcagtttttgataaaacaaacagactcaacattagtaagcatataaaagttgtaccccacaacttcaggatacctgttcttttcaaggacatgtaaaatattttttcaagaatggatctatattggaccacaaagcaagtcttatgtt

SEQ ID NO: 350362 - DNA, 625 bp, Homo sapiens
acatgtaaaatattttttcaagaatggatctatattggaccacaaagcaagtcttatgttatttcagtgatcaggatccttataaagcaaaggtcaacaaatattttatgtaaacagactgtgggtaaatatgctaggttctgtgggtgacatggtcttgagagaagagagagaaaggaaccagttaggcagatagctgggacaagtcctsggtagaatttctttttctaacaaaggaacagcttgaaagatcaaggtgcaagcacagataagggggcaaagtccaacataaaaatgccttctgtataactaacaatggttacatatacatggtaggcttcagtgaatacatcctttcctttcttggacatactcagataagggagtttgcatggggaggggcttacttgaaacgtgcctgtgctgcacagataaaagaagttacacagaaccagacatgtccacaatagagaattctgcccccagcacgtgcacagtgaggaaaattaaacaatatggagtgactaggctaagaatctccacatgtgcactaaaaggacaaggtggagctgtcaggaattcacaccttatgcaaacgaaacacttcttaaccagtttttcatgc

SEQ ID NO: 350363 - DNA, 602 bp, Homo sapiens
ttgagacaatttttgtatcaaaaagaataaaggtttcaatggtttgaaacatactgaatactttaaaaaatccattagtgtctaagagaaatgaacaaatggttatatggttaactttggaagaygatgtgtcaaattatgaattagaaattattcattaaaagaaattaaaaatttttgcaccctttcctggaagaatttcacatcagaataatcaagactccttgagggaaatattgtaatagaattttttagcttaataaacaaagaataaaaattgtattattataaaaacatataaagtctactaaaataatggatatagtcaataaccataaatggcttctaaaactgtaagtgaaatagtgatagaaaaatgtataatagataaatcagacaggtaacaactgtatcagctgatcactttcaatatcttaaataaagagacaatcagaaagatatgctggtaaaaaagtactcaacgtcatctatgaagtattctttccagaaattcaaatctttcatctggtcaagtctctagatttaactatcatttatgagaaattcaggccaactagaaatatatcaaaggcagcacaaga

SEQ ID NO: 350364 - DNA, 602 bp, Homo sapiens
ttgagacaatttttgtatcaaaaagaataaaggtttcaatggtttgaaacatactgaatactttaaaaaatccattagtgtctaagagaaatgaacaaatggttatatggttaactttggaagacgatgtgtcaaattatgaattagaaattattcattaaaagaaattaaaaatttttgcaccctttcctggaagaatttcacatcagaataatcaagactccttgagggaaatattgtaatagaattttttagcttaataaacaaagaataaaaattgtattattataaaaacatataaagtctactaaaataatggatatagtcaataaccataaatggcttctaaaactgtaartgaaatagtgatagaaaaatgtataatagataaatcagacaggtaacaactgtatcagctgatcactttcaatatcttaaataaagagacaatcagaaagatatgctggtaaaaaagtactcaacgtcatctatgaagtattctttccagaaattcaaatctttcatctggtcaagtctctagatttaactatcatttatgagaaattcaggccaactagaaatatatcaaaggcagcacaaga

SEQ ID NO: 350365 - DNA, 602 bp, Homo sapiens
ttgagacaatttttgtatcaaaaagaataaaggtttcaatggtttgaaacatactgaatactttaaaaaatccattagtgtctaagagaaatgaacaaatggttatatggttaactttggaagacgatgtgtcaaattatgaattagaaattattcattaaaagaaattaaaaatttttgcaccctttcctggaagaatttcacatcagaataatcaagactccttgagggaaatattgtaatagaattttttagcttaataaacaaagaataaaaattgtattattataaaaacatataaagtctactaaaataatggatatagtcaataaccataaatggcttctaaaactgtaagtgaaatagtgatagaaaaatgtataatagataaatcagacaggtaacaactgtatcagctgatcactttcaatatcttaaataaagagacaaycagaaagatatgctggtaaaaaagtactcaacgtcatctatgaagtattctttccagaaattcaaatctttcatctggtcaagtctctagatttaactatcatttatgagaaattcaggccaactagaaatatatcaaaggcagcacaaga

SEQ ID NO: 350366 - DNA, 577 bp, Homo sapiens
attaatttgttattagacaaaccctttgcaagtgttttatcctattttacatgttatctmcttaatcatttcatagtttctgtgtaaaagctttttagtttgatataatatcttttgtctatttttgtctgttcatctgaagtcttactcataaaatcttcacacagaccaatctcctgaagaattttctctatgttttcttctacaggttgcatagttttgagctttacatgtaagtgtttaattcattttgagttgatttttgaatattgtgggatataggagtctagttttattcttcgacatatatatgtccagttttcctaggaccatttactgaagaggctgttatttctccaatgtatattcttggcacctttgtggaaaatcagctgcctgaaaatacaaatataagggaatcgctgaaagattaatattagatttctcagcagaaaccttacaggccaaaaaagaacgggataatgtattcatgttctgaaagaaaaagaaaagaacctgctagccaagaattctatacccatcaaggctatccattagaaataaaagataaataaag

SEQ ID NO: 350367 - DNA, 605 bp, Homo sapiens
ataggcacccctcagtgaaaacattattaacaaatagtttcattctaatacaatagcaaacacttaaaatctaagatatatttaattatagcctacttagcattttaaaatttaaaatgtgtgatggttaattttatgtgtctaactgactgggtcacatggtgccaaaatatttatttaaatatcagtctgggtagtgtttctgtaaggaagtatttgaatgaaattgacatataaatcggtagaccaagtaaagcagattactctccctaattggggtggacctcaagcaaacactaaatcctcagtagaacaaaaaagkctgatcttcccctgagtgagagaatttctcctgcctaactgcctttcaactaggaaattgactattgcctttgaccttgaactgaggcactgactcttcttgggtctcaagcaagccagccttcagaataatcctacactatcagcaagcctgggtgtccagtttggtgattcatcttattgcacttgggatgattggcctctaatctgcatgagccaataattataataaatatttttatatatctacatatgtatatagacacatataaacatacatatta

SEQ ID NO: 350368 - DNA, 605 bp, Homo sapiens
ataggcacccctcagtgaaaacattattaacaaatagtttcattctaatacaatagcaaacacttaaaatctaagatatatttaattatagcctacttagcattttaaaatttaaaatgtgtgatggttaattttatgtgtctaactgactgggtcacatggtgccaaaatatttatttaaatatcagtctgggtagtgtttctgtaaggaagtatttgaatgaaattgacatataaatcggtagaccaagtaaagcagattactctccctaattggggtggacctcaagcaaacactaaatcctcagtagaacaaaaaaggctgatcttcccctgagtgagagaatttctcctgcctractgcctttcaactaggaaattgactattgcctttgaccttgaactgaggcactgactcttcttgggtctcaagcaagccagccttcagaataatcctacactatcagcaagcctgggtgtccagtttggtgattcatcttattgcacttgggatgattggcctctaatctgcatgagccaataattataataaatatttttatatatctacatatgtatatagacacatataaacatacatatta

SEQ ID NO: 350369 - DNA, 507 bp, Homo sapiens
tgatgttttgatatatgtatacattgtgggatggttgaatcaagctaattaacatacgcattacctcacatacagacgctccttaccttacgatgaggttatatactgataaatatatgctgaaaatatcacaattgaaaatgtatttaataccgaacacttagcctactaaacatcataccttagcctagcccaccttagatgtgctaagaacactttcattagcctacaactggcccaaatcacctaacacaaagcccattttataataaagtgtcgaatagctcatgtcatttattgaatactgttttttactgaaagtaaaaaacataacttataaccacaaccccaagcccacaagggtagttttaaatatgcagtatctgtgccataggaaaacccaggggaagttattaatatacaatttggccaactggacatactgctgaagccccatgaagactcsaagccaaagctttccctaggatgtgtcccatcaatggcatc

SEQ ID NO: 350370 - DNA, 589 bp, Homo sapiens
tagatggaccagccaattcctagggcaggttgattacatgggtcacattccattacacagaaggtagaagttttccacactggaatagacagtaatctggatgcggatatacctttcctgttggcaacatttctgaagrtctctcctttatgggattatcaagtgccgcatgtactgctatatataccataaaatattgctcctggaacaaataaatcatttttagataagataagtggtttatatgacaatgaaattcactggtcttaccatgaatcccaacacctagaagcggctgactttacaaataagtgtaatggtttaatttatttagttttcagttatgttgccatttggaaggaaataattgcttgtaagttcatggtacaagatgagatagatattataaattggtaaccaatacatgatgccgttctcccatctcccagagtgccaggaaacagagagaagtggtagaagtggtggaagtatttctcattactacattaataaactattctcaaattttgctcacttttccttcagcttcaagttttgttactttagtatccaaaggaggaatgctccc

SEQ ID NO: 350371 - DNA, 532 bp, Homo sapiens
agccagccgtggtggtgcgcacctgttatcccagctactcaggaggctgaggcaggagaatcacttgtaccggggaggcagaggttgcagtgagccgagatcacaccactgcactcagcctgggtgacagagcgagactctgtctcmaaaaaaaaaaaaaaaaaaaaaaagaaagatagccgaggctatgtcttccagtagtagtataggggcttataccttataagcatagggaattgaaataaactcctagattcagtgagtgtctgtaatcaataaagacaaaattacaagaaaagtacaggaccaagtgaatatcaaatgtcattaaacactgagataaactagaatggcaaatgagaagcgtagtgatagcataagacttcagtgttacaatagatacaaagaaaaaccactgaaatacagcagtgctcattttttgtgtgttttgctttctttatttcttaaatgttatactaatctctaattttcaggaatttttcacctctggaaaattttaactaacttaagc

SEQ ID NO: 350372 - DNA, 532 bp, Homo sapiens
agccagccgtggtggtgcgcacctgttatcccagctactcaggaggctgaggcaggagaatcacttgtaccggggaggcagaggttgcagtgagccgagatcacaccactgcactcagcctgggtgacagagcgagactctgtctccaaaaaaaaaaaaaaaaaaaaaaagaaagatagccgaggctatgtcttccagtagtagtataggggcttataccttataagcatagggaattgaaataaactcctagattcagtgagtgtctgtaatcaataaagacaaaattacaagaaaagtacaggaccaagtgaatatcaaatgtcattaaacactgagataaactagaatggcaaatgagaagcgtagtgatagcataagacttcagtgttacaatagatacaaagaaaaaccactgaaatacagcagtgctcattttttgtgtgttttgctttctttatttcttaaatgytatactaatctctaattttcaggaatttttcacctctggaaaattttaactaacttaagc

SEQ ID NO: 350373 - DNA, 486 bp, Homo sapiens
tactaaaaatacaaaaaattagctgggcgtggtggcaggtgcctgtaatcccagctacttgggaggctgaggcaggagaatcgcttgaacctgggaggcagaggttgcagtaagctaaagctaaacatgtcagctttgacctaaattttaggacctaaaattatattccaagagaaatgagtatataatacccaacagaaggcatacacgagaatttcataatagtgccaaaccagaaacaacccaaatttccatcaatagtagagtggataataaattgcgyatgaattttgtataatgggccactgcagagtaataaatacaataggtttctgcaacattcagacatagtattaagcaaaaaataaaataaaaataaaaacaacagacatgaaagaatacctactgtaggattctatttattccatttatataaatttcaaaggcaaaactaattcatagtgaaatatatgaaagagtagttgc

SEQ ID NO: 350374 - DNA, 577 bp, Homo sapiens
aaaaattactttaaaatatagattaataagaaagcaaaaatgagtttattatacttcattatgtataactataaaattacattgaataatatcttaacattgtgggtttcaagagaggccaagtctgctgatatgcatagcaacagttaattctaaagcctagagcagattttcccaaattgtgtttcccagaatataagaaggtgttcaaaaatttctatagtccatttagttgggaaattctaggttaaacaaagtttataatgtttctcagactttaatatgctcttgtgcattgtggatttccacagaagcataatatgcagttttctccaaatgacttagtcattagaatcctttttcagtagaacatttcacagaaataatgttctctggagcaatgaatgtcgaatcctgggaggtgaataagggactttattgtaacaatcaaaagaaaaattcatgaaatcttgaggaacrgtttttcaaagagaggaacactaagcagaaaaatgggtttttaactgtagcacataaaccaaatttatttatgttcttaaagagggtgtttttcact

SEQ ID NO: 350375 - DNA, 469 bp, Homo sapiens
catttcacagaaataatgttctctggagcaatgaatgtcgaatcctgggaggtgaataagggactttattgtaacaatcaaaagaaaaattcatgaaatcttgaggaacggtttttcaaagagaggaacactaagcagaaaaatgggtttttaactgtagcacataaaccaaatttatttatgttcttaaagagggtgtttttcactataatgatggacttaaacaatggctgaaatttcatggggaaaattaaatgatattgtagttacttttggagaacacatagttacttagaacatcaagttttgaaaaaaatgtttatataggagctgaaattctagtrgaattgatagaaatatgcttgcggtagaaatgtgtgtacttaaaatacacacgttacatgtgtaagtacgatgatcaagcattttaaacaagtacattagaaaaatatatctttaatgtgtgaaa

SEQ ID NO: 350376 - DNA, 639 bp, Homo sapiens
aaacctaaatggagttacaaaagataaagacctgggtgtggcgatgttggcagtgccacttttcaagaaaatctagatatgcagccagaggaacttagtcaaggtgatcatgttgacattacgaggaaagcgatggtgatgaaaatgatgagtatgtcccagaggaagtgacactggcaaaagcttcacattaagggaactccagaagatatttcatcactttgaaagcacaaaagataaastgttgaaaactgataaaaagttaggcatatgaaagatacttgcttcatggtgcattttgcaatgaaaagaaggcaaatactgttgatgctatactttataagtattttacaaaaaagctttaattctcaatgtttgtaatattttaaagaatactaaataatttatttttttaatttatcattagtgaaaataagaatgttgaagattttgatgaaaactatataaaggtcattaaagagtcatattttgtcccattgtttattaagattcctttgtatgggtctaatttgatggtcactttcacagtccattactactgtgcaaaatggggattgcctgtaatgaacatatcttacatactaatgtattttttgaaaattgcatttatttgaaaca

SEQ ID NO: 350377 - DNA, 511 bp, Homo sapiens
agttaacaagaaaattaaattaaaactacaatggataatactacacactctccagaatgtctgaaattaaaaagaccaaaacagcaaatactgtcaaaaatgtggaccacctggaaatttcatacattgctgttgggaatggaaaattgtacatctayagaaaaaggtctggtagtttcttatttttaaaaatgcctgcactatgagccggcaatccactcctagtagcgacccaagggaaactgaaataatcacaaaaatattgcataaggatgtccatagcagctttatttataagaatcccaatctggtttccaacatagtaaaaggaactgaagataaaaaataaccaaaaaacaaaaagcatagttatctacactgggtagtattcctctaactagatatataaaaaggaattcactactgataatcaaaatagcatagatgaatctcaatattattctgagtgaaaaacgtattacataaatctgctatatggtatgatcccatt

SEQ ID NO: 350378 - DNA, 468 bp, Homo sapiens
ttcattaaaattaaaaatttctgctatagaaataaacactgtcaaaagaatgagaagacaaactgcataataagaaaaaatatttacaaaagatatatctgataaaggactgttatccaaaatatacaatgaacatgaaaaacacaacaaaaagaaaactgacaacccaattataaaatgggcaaaagagctgaacagacactatcttcaaagatacacaattgacaaaatacattttctgttttcatagatattaaacatcatatgtcattagggaattgcaaattaaaactacagcrtccactatttggacagccagaatgcaaaatactgacaacaccaaatgctggtgaggatagtggagcaataggaactctcattcattgccagtgggaatgaaaaattatacagccactgtagaatacagtttggcagtttcttacaaaactaaacatatgttgaccatat

SEQ ID NO: 350379 - DNA, 594 bp, Homo sapiens
gtaatttagatctctcatcaaagaaaagcccagggccacatggcttcaagacagaatttgatcaaatattttaaaaagaacgaatattcattcttctcaaactcttccaaaagattgaagataagaaaataatttcgaacagattttatgagtccagcattagcctgatgccaaagctagacaaaagcagtataagaaaataaaactacaggttaatattactgataactatatatgtgaaaatccacacaaaataatatcaaaccatattcaacagaacattcaaagggttattcaacataattgacatttttctctgtaatataagtctgacagtcacaaatcaataaacgtgattcaccatattaaaataaggaaggtcaaaaccatatgatcatctcagtaggcataggaaaagcatttaacaaaatccaacatccttttatgataaaaactctcaacaaattatgtataaaataatgttcctgaccacaataaatagcaaatatgrcatgcccctagctaactttatactcaacaatgaaaagttaaaaggcttttcctctaagatcaggaaaaagacaaggatgccca

SEQ ID NO: 350380 - DNA, 504 bp, Homo sapiens
ttttacccagcatccggcttcatttagaatgccaagaactagggttccagtagctttcagaaggaccatggttggtgctcccttttcagatgtataaaccccttctccaaggggttatgtctttgaaatcctaccttacctcaagagcatttaatcactgaattttaatctaatcaatactataattaaaatatattgaaagcatagaaactcatgtgtgtgtatctgtttaggttatagggtgagtaatagtaagctaaatcttcaatgtccaaaggaagaggtaaaattttaaaaagctaaaacagaaagaaattcaataaataacaatataaayctatatagagatgtagaaattaacagcaaaacatcagatctttaaaaaggaaataaaatgtctctgataaattataagtagaagggatgcagtggacataccttactgaattatttaacagtttatagtaaatacatgttacaatttaataaaaataaaaacaaaac

SEQ ID NO: 350381 - DNA, 488 bp, Homo sapiens
taacatccttttctttctgaagatcccattcagaacataaaatgaaatttagttatcctgtttctctaggctcttcttaactatgatttcacttgttttcttatttctatttccttcaaaattttataaatattcttatctgggaattagtttcttagtttcttagttaatctggaaattagtttcttagtttctaagttaagaaactaagaaatagtttctcctatttctctttagttaacattccctaacttaacataaaaatactacttttcaaaaaatgtygaacaagttcaacatcaagaagcatttcacaagaagctgtcttcacaacaggcaaaaggtagattttaaatctacaattgttctttcatgcttgattttttaaagtatggccaataacaaaagcagtaagatttatttgtagtacagaattatacaatcactctattgctataagaaaatacaaaataaagtgataaatcctc

SEQ ID NO: 350382 - DNA, 576 bp, Homo sapiens
cttctggggaaatgttataataataaaagcataactgaatttcaaatatacgtttcaaaagtttgtagatcactagacatttacataaaaactgcatgccaaataatagcaaattttactaaaatttggccttaatgtaatctcaataaatcacatgtgctgcagttaaatttaaatttcatataggaaagatcaactaattgcaaaaatgccattatagagaaatcaattactttagtatgaaatcaggaatgaataacactatcacatgaagctatgttaaatcattagaaatccagttttgtttctttttccagaatgctccaatggaggtattcaactgaatcattagggcatatatgatactctttctctctgataaaaagaaaaaagaaaaaaatttaattggaaaaagtttttaaattagcaggttttatattttgagcagaatgtttaaaaatcatgtagcaacttcccaatcaaaaataacttgagatagtttttattttcaaatatgtaaggtatataaatatgagacayggtccttggtatgaagttgctaactcaaaacattac

SEQ ID NO: 350383 - DNA, 584 bp, Homo sapiens
tgcttataaaagaatgaaaaatcgaatttaccttttagttagttatctttatttagcttttgtcaaaataaaattgttttaattgtatataaaagatgcaagtgcaatggcttttttctgtgtaattaatgttagtaaaaatcattgcccaataatttactaatctttagactacataaacaagaaaaaagtatccatagcatgtaaatcttttgttgaagatcttatgaacatgacattttttcaaatgttgaagtttttcttttaaagtaaatctaaagtatatttcttgcacttttcctaaatagcaagtgtaaaatrtcatgttcactttctacataattactatgttatctataaaagagcataaatataatgttaaatacaagtttctgatttgcatgaaaatagtccatgttgcatgcaataagttcataataaaatatcctttgtgtggttctcagtcagagaccaaagttaaaaatgggaaaacacagcagatgaccaaactctaatatcaaaaaacattaagcaaatccatcattataaatctattatagtcctaaatgtacaaagcattatgt

SEQ ID NO: 350384 - DNA, 577 bp, Homo sapiens
acataattactatgttatctataaaagagcataaatataatgttaaatacaagtttctgatttgcatgaaaatagtccatgttgcatgcaataagttcataataaaatatcctttgtgtggttctcagtcagagaccaaagttaaaaatgggaaaacacagcagatgaccaaacwctaatatcaaaaaacattaagcaaatccatcattataaatctattatagtcctaaatgtacaaagcattatgtaacaaatgcaagcataaaaagagaataaaatccaatgtggatcaattaatttatatatatatgaagtaattgtaaactatgcaggtttttttttacacacagaagaagtttctaggcttcttcctataaaagatttaattaggaagaacagcctacgacatattaacgaatccaaaagccactccagactgtctactacacagtttaggtgataaatttagggttagaaagaaaagcccagtggcattcaagcaataaagaccaaggtttaagtaaaacttcaaccaggtacagtaggcagaacactacctgaatcccagtgacaccca

SEQ ID NO: 350385 - DNA, 525 bp, Homo sapiens
ggctcacacaattataaaggctgagattccctaagatctgttgttggcaagctggaaaccagaattgttggtctgtagttccagtctgaaagttggcaggttcaagacctaagataagccaatgttttagtatgagtttgaaggcaggaaaagaccaatatcctcactcaaatagtaaggcaaaagaaactactttttaccttttttcttccattcatgtcttcaattatttggatgaggtccgtctatgttagagagaactatctgctttattcagtctacctgttctcacagacacacagaaaatgtttgactaaatgtttgggtagtccatggcccagtcaagctgatgcataaaatgaatcactgcatgtatcatttttgataaaacatttcacatcccttctagtaagtagccacagatgcagttagcaaaatatcatgcaggtaccaaaggttatttttggtaaaaattcttatcygtaaatattaacactattctaataaggtaacaaatggttttaa

SEQ ID NO: 350386 - DNA, 609 bp, Homo sapiens
aacattcccacttaaacaaatcacttttttagaaaaaagtttaggaaattcaaaatagtctctccactggccttggagaatcatcatacacatcaggacactctaagctttaccacattaaacttcctaaagtttggtagaaattattaatactcaccaatgtttttgattstctaaactatctgagcatatggaaatattatcctaattcttcctatgttaggtatggccatgtgacttgtttgttcagtaaaataatagaaaagacagcattatctccatctgggagtatttaagagctgatgcatgattctccgtttttttcccttattatggaatatcctcatgtccatgttgagacagggctgtcatgagataggctactcttcatcagtttgtttttaataacttcatggaaagacttttccttgccaaccttcagtgcatatgtagggaaaacgagaaatacacttttaggtccctgagatttgggaattgcttgttgtataaaatagacaattatgactataaatattgtatggaaacctctttaaatttgcattttatagatattttgaaaatagaattgtatttctatcatacctatca

SEQ ID NO: 350387 - DNA, 617 bp, Homo sapiens
taaataagaaattatcaaaacaggaatcttttagttataaaaaaatcaaaatcttaactattattatgaaactgtgaaatagttttagtctgtttatctcctcctaagtattgcataaactactgtttcatgatctggtcacagagattaagtgaaaaacattcccacttaaacaaatcacttttttagaaaaaagtttaggaaattcaaaatagtctctccactggccttggagaatcatcatacacatcaggacactctaagctttaccacattaaacttcctaaagtttggtagaaattattaatactcaccaatgtttttgattctctaaactatctgagcatatggaaatattatcctaattcttcctatgttaggtatggccatgtgacttgtttgttcagtaaaataatagaaaagacagcattatctccatctgggagtatttaagagctgatgcatgattctccgtttttttcccttattatggaatatcctsatgtccatgttgagacagggctgtcatgagataggctactcttcatcagtttgtttttaataacttcatggaaagacttttccttgccaaccttcagtgcatatgtagggaaaac

SEQ ID NO: 350388 - DNA, 592 bp, Homo sapiens
gggcaattaatattgcagtaaaaagagaaaaacagaaaataatatgctttggacatttaaattgataatgatgctaattttatatgcaattagcatggagcattaacaatggtgttcacctgtaaacatatgaaggattgcttttggtcttgcaaaacaatcatttgctctcagctttaaattatgtaagaaacacttttaagtgatagcatacatccataattaaatattaaaataaaataaaattgaattaaatcaaatggaatttatttaaatttagaacacttattccaatgcctaaatataaatcaaggtaaagtcaataatcyttacaagttagtttttatcattgtaatttaatatctctacaagaaacaaaatgacctaagtaaataaaaattacagatggctaattatggaaaaaaaatagaggtattgtttgagttaatttttctaatgttacctataatcagatatcagcattttttagcaggaggtatctctcttaagatattgctacacaattacagacataacatttaaagctttaaatgatgatgacaatcagaaatatcccaagaacgaagtagtt

SEQ ID NO: 350389 - DNA, 592 bp, Homo sapiens
gggcaattaatattgcagtaaaaagagaaaaacagaaaataatatgctttggacatttaaattgataatgatgctaattttatatgcaattagcatggagcattaacaatggtgttcacctgtaaacatatgaaggattgcttttggtcttgcaaaacaatcatttgctctcagctttaaattatgtaagaaacacttttaagtgatagcatacatccataattaaatattaaaataaaataaaattgaattaaatcaaatggaatttatttaaatttagaacacttattccaatgcctaaatataaatcaaggtaaagtcaataatctttacaagttagtttttatcattgtaatttaatatctctacaagaaacaaaatgacctaagtaaataaaaattacagatggctaattatgraaaaaaaatagaggtattgtttgagttaatttttctaatgttacctataatcagatatcagcattttttagcaggaggtatctctcttaagatattgctacacaattacagacataacatttaaagctttaaatgatgatgacaatcagaaatatcccaagaacgaagtagtt

SEQ ID NO: 350390 - DNA, 569 bp, Homo sapiens
ttaccaaactaagagctggtagtttttaaaaagtagtaatcaaagcactgatttatgtagtttccaagttagcacatgcaaatgctttcaaaacgtagaatagcttcaattcccaccagtttagcagctgacatgattatgttcatgaatcctctaggaaattgaggaaacggtaataacaaccctacttaacaagagaagaaaaggactgcctggctgactgtataagtttcctgtgttaacactgattataaacatcggtggtggtaaacacagccaytgcataagattgagttgtgagcatttatgggaaaatgagatcagcagccatgattccattctattaaaacaactcctcccagaactatgtaagataatacctttgttgttctctcttccctctagcaagtgaatgggactatgaaattacaatctccatgagctaaatgagaaagggttaaattgttaatttttcttccaatggtactgtagtgtttaaaaaatataccttggaaaccaaagagttattaagttgttttgttttgttttccaggtatatttcatgaaca

SEQ ID NO: 350391 - DNA, 585 bp, Homo sapiens
gtgaaccttgtcacttgatcaaagtcagcataaaacagtgtgccagtagcagggcttgatttgaagtaaaaatacataaataaccaaacaaaacattgcattatgggtgcactgaattgttgcataagtctagggcatctgattattttaatgtttttcataaattttctttactagttagtcttgatattttatgctcaaatagtaaacatagccaatagaacacattaatcttcaagatgcattttaaaatgtgttatttctctttgtttataacttttaatttctttcttatatttcactggctaacaaaacacttttatttattcagtataaaatgtcctcatagaactattttcagtaatttaagcagcattctgtaaaataagtgatgctataaaactctttgggctaaggttttatgaaacaatttagtaacacygtattgttactcataattgctatgcaccattgaggataatttagatatgattgattttaatgtatgccacctatattatatttgtcctaaaatattttctacaataattatattactttaatctctatttttaggtgaaataa

SEQ ID NO: 350392 - DNA, 563 bp, Homo sapiens
tgtgattcaaacatgcacaggaggaaagagggtagttaaaagatgagattcattttatctgattccaggtaaatatgaaatrtatagaataaataagactttatcttaggagatcagtgagatctatcatgtaagaagctagagaactcagaaaatgtaaaactaaggtgttggtgaaggattagtgcatacacaactatttcaaaattagttcagttgctgaaacatatcaatgtctttaatctatttatgctgtggcaacagaccaaccaagttcaaatctcggtggcctaaaacaaatttcaaatctcagtgatgtaacacaatcaaagtttatttcttgctcatgctttgtgttcatactgggtcagcaaaagcctcttggttcatagttgtccttcaggagtccattctgtctaagcagtcactatttcaattgttgccagttactttgacagagagaaaggagttgcaggatcttgcatcaacagctaaattctcaacccaaaagtgacttgtgtcacttccactcacaattctttgtatcgaagtgggcacatgac

SEQ ID NO: 350393 - DNA, 563 bp, Homo sapiens
tgtgattcaaacatgcacaggaggaaagagggtagttaaaagatgagattcattttatctgattccaggtaaatatgaaatgtatagaataaataagactttatcttaggagatcagtgagatctatcatgtaagaagctagagaactcagaaaatgtaaaactaaggtgttggtgaaggattagtgcatacacaactatttcaaaattagttcagttgctgaaacatatcaatgtctttaatctatttatgctgtggcaacagaccaaccaagttcaaatctcggtggcctaaaacaaatttcaaatctcagtgatgtaacacaatcaargtttatttcttgctcatgctttgtgttcatactgggtcagcaaaagcctcttggttcatagttgtccttcaggagtccattctgtctaagcagtcactatttcaattgttgccagttactttgacagagagaaaggagttgcaggatcttgcatcaacagctaaattctcaacccaaaagtgacttgtgtcacttccactcacaattctttgtatcgaagtgggcacatgac

SEQ ID NO: 350394 - DNA, 494 bp, Homo sapiens
cccctttctcttgccttcaaggaggctagagcttcactgggacaagaaatatcacaaatactgagagaattgctaaaggctatgtaaagcttccagcatagcccatctttcatagaaatattgatatagtagacataataaatattgcataaccttcataattttggcagtggaagttgaagctgataactttcactttttattatttaatttttttccctctggaatctccaagtctatacagtttgaggatttgtttaaatcatgagaatgaataaggaaggttctgtaggttttataggaacgcatatgaagtataatatatactatggagcactcgtattttttttccttaagattctgtttagaaatgatggttagcgctgcaagctttcacgttttctctcagtgctcaraatttttttttttttcttccaggcaagtttctgcagcagcgactccctccagaggctccgtgaaccgagggaagggag

SEQ ID NO: 350395 - DNA, 578 bp, Homo sapiens
tcacacaactaggaatagatgaattagggaatcaaaccaagtttacatgtctagtacctctatttaggtcaaaagtccagtaactagctatatcattttcaaaactaakcatttttactatgataatctctttactatatgtaaatgcctcttattatttccccaagactattccttaattattaagtcattgaaattattttatagcgtatattctttagtatacacactctagaatacataataccaaagaccttaaggggttttccctctgtatttaatgttataaagatgctacattaattgacctcatagaatattcaaaattttagcagcagccagtgtttcccttggtgcctcaaacagcataagaaacaacagaatagagtagataatgtttcctaggagttcaagttgtttttctttttcccttaaaagtcctactggagatgaaattcaaacacttggtgaaatttagaccatttcaagcaatcagcatttgtggtatcaactgctactcatacgtaatccttcagattacttagctactaaagttttgaacagtctgtgagattaaa

SEQ ID NO: 350396 - DNA, 578 bp, Homo sapiens
tcacacaactaggaatagatgaattagggaatcaaaccaagtttacatgtctagtacctctatttaggtcaaaagtccagtaactagctatatcattttcaaaactaatcatttttactatgataatctctttactatatgtaaatgcctcttattatttccccaagactattccttaattattaagtcattgaaattattttatagcgtatattctttagtatacacactctagaatacataataccaaagaccttaaggggttttccctctgtatttaatgttataaagatgctacattaattgacctcatagaatattcaaaattttagcagcagccagtgtttcccttggtgcctcaaacagcataagaaacaacagaatagagtagataatgtttcctaggagttcaagttgtttttctttttcccttaaaagtcctactggagatgaaattcaaacacttggtgaaatttagaccatttcaagcaatcagcatttgtggtatcaactgctactcataygtaatccttcagattacttagctactaaagttttgaacagtctgtgagattaaa

SEQ ID NO: 350397 - DNA, 524 bp, Homo sapiens
ctatggttgtgcttatggaggaacaagaaaaacaaactgaaagaacataagatatttctcctgaggtcaatgtcattttgctttactatcatcatcgtctttatttattttctggccttttcgtccctatgtctgccctacctttgcttttacctgmctttaaagacctcattagttctcactctctcttgtccttggtaaagttactttacctctctgggttttaataatgccatgtgaataaacaggaataatattccctacatcccaggattattatataaattacaataattaatgtatatgaaaccacctagcatgatatgagtatgcaatatttaagttaaaatgggaaataaaatccacttttggaatttggatttggtaattgtattttacaaatctagagagtgaatgaattcctacatatgatgttccatacatgcttgttaagtaaacacatgggataaaacatatgatcggtttcctctcttatctgtggattataagtaagatttctacaa

SEQ ID NO: 350398 - DNA, 524 bp, Homo sapiens
ctatggttgtgcttatggaggaacaagaaaaacaaactgaaagaacataagatatttctcctgaggtcaatgtcattttgctttactatcatcatcgtctttatttattttctggccttttcgtccctatgtctgccctacctttgcttttacctgcctttaaagacctcattagttctcactctctcttgtccttggtaaagttactttacctctctgggttttaataatgccatgtgaataaacaggaataatattccctacatcccaggattattatataaattacaataattaatgtatatgaaaccacctagcatgatatgagtatgcaatatttaagttaaaatggkaaataaaatccacttttggaatttggatttggtaattgtattttacaaatctagagagtgaatgaattcctacatatgatgttccatacatgcttgttaagtaaacacatgggataaaacatatgatcggtttcctctcttatctgtggattataagtaagatttctacaa

SEQ ID NO: 350399 - DNA, 461 bp, Homo sapiens
tgtgctgctgttgactttagtttgataaataaaaagaaattttacttattttaattawtaactagataaatagaaatatatatatgtatatatgatacatatgttatcttgttttcagccttattagagccatctgataaagtcatttgttcgccataatttattgaacgtgtaccatgtgcccaatactatccttattttggagcaagatgaaaagtagttcacatcctaatgaaagaaaacatccaacaaactaaaaaatacgtaaagtatatgtcttgacaaatggtgtcgagttttgtggatgaaaacaaatcaaagaaattgatagggaatgtttttggcttgtcattttcaatcattgtttggtaaggtctcaccaataatgcgatgtatggacccagtgggttcataatgggaatcagtgggaaaaggaaggccagaaatttctgggatcctaa

SEQ ID NO: 350400 - DNA, 461 bp, Homo sapiens
tgtgctgctgttgactttagtttgataaataaaaagaaattttacttattttaattattaactagataaatagaaatatatatatgtatatatgatacatatgttatcttgttttcagccttattagagccatctgataaagtcattygttcgccataatttattgaacgtgtaccatgtgcccaatactatccttattttggagcaagatgaaaagtagttcacatcctaatgaaagaaaacatccaacaaactaaaaaatacgtaaagtatatgtcttgacaaatggtgtcgagttttgtggatgaaaacaaatcaaagaaattgatagggaatgtttttggcttgtcattttcaatcattgtttggtaaggtctcaccaataatgcgatgtatggacccagtgggttcataatgggaatcagtgggaaaaggaaggccagaaatttctgggatcctaa

SEQ ID NO: 350401 - DNA, 564 bp, Homo sapiens
tgggatcatacactatatccttttttcttgtccagcttattttgctcagtataattatttggagattcactcatactgtgtgtaccagtagttttctgcttttcattgctgggcagtgttccactacattgacataacacgatttgttttttcaattacctgttactgaacatttgggtttttttaagtttaacattttaagaaactgccaaataactttgcaaagtggttttactattcaaattcccaccaataatgtatgggaattccagttcctccacatctttgttaacatgtkctatggtcagttctttaattttagctattctaatagatgtgtagtaatagtatgacattgtagttttaatttgcatttctctattgagcatatttttatgtgcttatttattatcaaggtattttctttgatgacatgtctattcaaatattttacacagatttgattggtttattttcttattgcattttgaattttctacacattctgaataaaaggccttcatcagatataaagtttgcaaacatttctcacagaatatgaat

SEQ ID NO: 350402 - DNA, 564 bp, Homo sapiens
tgggatcatacactatatccttttttcttgtccagcttattttgctcagtataattatttggagattcactcatactgtgtgtaccagtagttttctgcttttcattgctgggcagtgttccactacattgacataacacgatttgttttttcaattacctgttactgaacatttgggtttttttaagtttaacattttaagaaactgccaaataactttgcaaagtggttttactattcaaattcccaccaataatgtatgggaattccagttcctccacatctttgttaacatgttctatggtcagttctttaattttagctattctaatagatgtgtagtaatagtatgacattgtagttttaatttgcatttctctattgagcatatttttatgtgcttatttattatcaaggtattttckttgatgacatgtctattcaaatattttacacagatttgattggtttattttcttattgcattttgaattttctacacattctgaataaaaggccttcatcagatataaagtttgcaaacatttctcacagaatatgaat

SEQ ID NO: 350403 - DNA, 481 bp, Homo sapiens
ctttgtaaacatcaaacccattataacaacactgtgggataggtacttttatcatcaacttcattttcatatgtagaaacaggaaaagacaagctaaattatttgctggaagtcacacagctatcaagaggtaaaacccaggcagtttgactccagagatcctgtagaggttcatatactgtggattttgctgatttttttccccaaagtgtcttttcttcatagttaatagaagtactttagaataattttacttgattttcatatgttttattcttatctagtatttaaatttgacacctatttttaatccccagagttagtcatcatgatcatcatcattrtcgtcatcatcatcatgatgccaccatcaatatcatcacattctctccatgcttgtttagatttacccacatctctatctgtgtctttgcctgctattactacttactcaatcctttctcccagttttagattcccc

SEQ ID NO: 350404 - DNA, 547 bp, Homo sapiens
tagatattttatttaactcccacagtgaccatatggattaagtgttattcacctaatttctttagaggcctctagttgctgttcttgtatgcttactaacctgatatttatggccccttcctgtcataatatgtcgattttctgagccttaataactttcccctcattttaaaaatatcacatttattatataccctattaattgatggagatgaagaggattattactatttatgttatttcattttcccattcartgatttcgatgctgcctataaattcaaggtggcaaagggaaaaaaaggtaaaatgcatgtggaaccgtttctcttttgtttttctcctttctaaggataccatccttccatattttctccttactcctgtttttctcatccctctcaccctagccctaactgcagcttcacatccctctcaccccctttaccaacttgtcttttaaacatgtgacttactgctaattccctcggttagttgatgaatactctcaggaacagagcagtgaaacaacttgccaagtttacag

SEQ ID NO: 350405 - DNA, 533 bp, Homo sapiens
tatgggcattggagcttatcctttgtgaggcccagctcaaatcttactgcctctgtggaatcttccctgagtccccctccgctttctctaaaggcagagttattccccctgcctctgttatcttgggtcactatatatatcccccagcacaacatttatctcaggatattatgactggaggtttatttcttttctctgttagattgtgagactctttatggcaatcactatgacatttctccatgtataccctgggtctagaacagtgcttggcacatggtagatgccagataagagtttgttctgtgacaactacatccatgctgcacagttggctgctattgtattcttgttttctgaggtcctgcttcatatggatcttgttgtttagtgggcagtgatcaatagagtagggtaatcctattgactcagaaaaatatataagacaatgtgggtcctaatcacagaagttttataacaaagattccaattttaagttcgaaascttcaactaaaaccaggcctaaatcatt

SEQ ID NO: 350406 - DNA, 561 bp, Homo sapiens
ataatttcattctttttaatggctgcttagtattccatgatgtacaggtaccacattttctttttccaatccaccattgatgggcatctaggttgactccatgactttgctgttgtgaatagtgctgtgatgaacatacaagtgcytgtgtctttttggtagaacaatttatcctttaggaatatacccagtaatgagattgctgggttgaataatagttctgttttaagttctttgagaaacctccaaactgctttccactatggctgagttaatttactttcccaccaatgatatataagcattcccttttctgtgcaaccttgccaacgtctgttattttttgtatttttaatcatagtcattctgactggtgtgagatggtatctcattgcggtttgatatgagtcttttctcatgttttttaaacttcatggaacataatctgtaatggcatagaagagttcatcatacaactatacactattgaatttaacggttcctcatgttgaacatttagcttcatccaattattttggcattttaaataatgttgaaatg

SEQ ID NO: 350407 - DNA, 544 bp, Homo sapiens
ttaggcaatggtaaatgcgtatttcattcattgagcttatctccaagtgtagctagaggagaaaaagtttcctttcaaataatctattttatattccagatttctttcaaagtccaaattgaacaaaagtttagttcttaaaggtaggtcatgtggtctgatgtggggttttgaatttcggttttctgctttttgatttgggacctcaatccctctctttataaatgatagaattggaatacataatttatctttaagatcacttctaccccytttttttaagaaaattaaaacccataaatttatagtcacttgatgtatctcttctgctttttgtctccttccccgtatttttaaatttgccattgcttgagtgtttgattcttctacagaggtagaaaaacaaattaacttgcatcctctctgctctattaatttctgatgtacttgagggtggatactgtcttttgttttttctgtactttcccaaaagtcaatcatttttctgcatagaggagtttctagccctgtttttaattgacca

SEQ ID NO: 350408 - DNA, 544 bp, Homo sapiens
ttaggcaatggtaaatgcgtatttcattcattgagcttatctccaagtgtagctagaggagaaaaagtttcctttcaaataatctattttatattccagatttctttcaaagtccaaattgaacaaaagtttagttcttaaaggtaggtcatgtggtctgatgtggggttttgaatttcggttttctgctttttgatttgggacctcaatccctctctttataaatgatagaattggaatacataatttatctttaagatcacttctaccccctttttttaagaaaattaaaacccataaatttatagtcacttgatgtatctcttctgctttttgtctccttccccgtatttttaaatttgccattgcttsagtgtttgattcttctacagaggtagaaaaacaaattaacttgcatcctctctgctctattaatttctgatgtacttgagggtggatactgtcttttgttttttctgtactttcccaaaagtcaatcatttttctgcatagaggagtttctagccctgtttttaattgacca

SEQ ID NO: 350409 - DNA, 629 bp, Homo sapiens
ctgattttgacacaaggattttaaatacatctaatgtttgttacaatagagttaactatcaacacatttcctttaaagttcttccagacagtctgtttaaaatgacatattttctaaagaaaaaatattcatcgtacagccaagctataaatgaccacatgttggtcaaatctgacatggaaatactagaatcacttctgaaaaattactcttttctgtagttatgaaaacaatcatgtatwaaaaaaaagtgtgtctaaggcaccatcatatcaaaaagcattttttaaaaaaaattttcaatatttcatacttgacaacattttgaggtatttacatagctcatcatgattccgccttgcctaggtatagtacatgatagcttgatgtcttttttttggtgatttttaactgggaatgttttgcttgaccacgtaactataatcttgtctcacatccttcatactcagctctgcccagtgcagctcagtcacaaagaagctgtggtatgaaatgtgaagatctggacttgagttttaaatcaaattctttagtagttaaatcaacagagctgtataagttccatggggcaaggacatcttggtacctcaatcctagcgcctagagaa

SEQ ID NO: 350410 - DNA, 604 bp, Homo sapiens
gttgtttgaattctatcactgtttctaaggcgagtataagaagtttaaagaggacttttctttttgtgatctcatagtaaagccttaaagtgtaccaactggctacttatcaacacaattattcttcattccaatgcctcctgccatattttattcatgtctcccatggagatatttataacccatcccatattcatataaagtaaagggaaaattttatcaggctctatacttaatagcttagcacagaaaaacagcagttgcctctcccagagaccttagaaaaagtgtgactacactgaaaagtcagcagacctcagtatgtgkgtcaactcttcccttcaccctggcaagctttacaagcagaacttttgatagactctgtagaagtaactgctgaaaccaattaataccagacaagagaaaatattaattgagcttgcataatatagatagcattttgccagaccctacggagagattccaaacaaatataagatctactggcttccttcaaagagctcattgtgtgtttagaggaactggaacttgaagaatgagaaggaaaagtcacttttcttcttccagtcctagtgctctctca

SEQ ID NO: 350411 - DNA, 604 bp, Homo sapiens
gttgtttgaattctatcactgtttctaaggcgagtataagaagtttaaagaggacttttctttttgtgatctcatagtaaagccttaaagtgtaccaactggctacttatcaacacaattattcttcattccaatgcctcctgccatattttattcatgtctcccatggagatatttataacccatcccatattcatataaagtaaagggaaaattttatcaggctctatacttaatagcttagcacagaaaaacagcagttgcctctcccagagaccttagaaaaagtgtgactacactgaaaagtcagcagacctcagtatgtgggtcaactcttcccttcaccctggcaagctttacaagcagaacttttgatagactctgtagaagtaactgctgaaaccaattaataccagacaakagaaaatattaattgagcttgcataatatagatagcattttgccagaccctacggagagattccaaacaaatataagatctactggcttccttcaaagagctcattgtgtgtttagaggaactggaacttgaagaatgagaaggaaaagtcacttttcttcttccagtcctagtgctctctca

SEQ ID NO: 350412 - DNA, 470 bp, Homo sapiens
ggactatgaatatgctttgtacattttccttttttttttttcacttttatatattcaattagcatgtagtactttgaaataaaaaattaagttataaactattttaaggaataaaacaacaaaagtactgaaactagatttatawtaataaagtctatagtaaaagtctacttttttcaaattgctagttaagtaaaattatctatgatagtgcctattaataccaaaggtagcatttgaagaaatttcattccatggtaagttactataatggccattgtaattccagctaactgacatagccttctctaggagaaaagcttaaagaaggatagccagttggttaagcacaaactctgaggccaaactccttgtgttaagatcctagccccattatctgctaagtccctcaacctcagtttcctcatgtgtaaagtggtgaaaataatagtgctcacaacactgaattc

SEQ ID NO: 350413 - DNA, 485 bp, Homo sapiens
ataacatcagatttaccctctaggtaatttttaaggatataatacattatcgttgattataagtataakggtgtacagaaaatctttgtaggccttctcattatttaaacaattctttcatgcaagaatgtttgtgtatacatgcacatatgtatatatgtatatgtgtatatatatcacacatttgtatatatgtgtaaatatgtagatatgtgtgctattagatatagaaagtcatacatatatgacttccaatcagacctaaaactgactttaaatgtaaaatgaaattctgcgtttgacctatcttaccactactaccagcttaactggaatcatatggattaaacagtttctattttaaatctttgcacacttaacacatttaatagaatactcattagctttaaagaagggaagaaaatcctgggtgttttgttacaattttgtatttgctcttaccacagaaacaacttatgtttagg

SEQ ID NO: 350414 - DNA, 279 bp, Homo sapiens
tcagtcttgtctcaaatctcaattcagataaacaatgaaaaaagaatgaacagtgggttaagtacattttgatagtcttttttttttwaaaaaagtttgtgaataagcaatgttttggtgagaaagtttatctggcaaaagataggatagacatttgaatgtgaaatgattgcttattcaccacttctcaaatggtttcatgttgtttatattttggaagaaagtcttccttaataaaaaaagtatattgaccaccatgtacaagtgacacaatatgtg

SEQ ID NO: 350415 - DNA, 570 bp, Homo sapiens
acaaatggactaaacgctccaatcaaaagacacagagtggctgaatgaattaaaaaacaagacccaatcatcagttgtctataagaaacacatttcacttacagacacacatagtctgaagataaagagatggaaaaagatattccatgccaatggaaacaaaaaaaagaataactatgattatatcagacaaaataaatttcaagacagaawctataaaaagagacaaagaaggtagctatgtaatgataaagggatcagttcaacaagaggatataacaattgtaaatacatatgcacccaacactgcagcacacagatatatataaagcaaatattattagcattaaagagagacatcgaccccaatatgataacagctagagacttcaacactgtactgtgagcattggacagatctcccggacaaaatatcaatgaagaaacatcagacttaatcttcactatagaataaataggcctaagagatatttatagaacatttcatccaacagctgcaaaatacacattctgtttctcagcacgtggatcattcttaaggacagacca

SEQ ID NO: 350416 - DNA, 606 bp, Homo sapiens
accatgtcaacctactagcaatcttgtagggtctaccatcaaaataggtccagaagacagctacatctccctccctccatgatgctaccctggttccagccaccatgatccctcaatgggattattccataagcctcctaactggcctccctgcttctgctgtgatgcccaattcattcaattttcaacatagcttgcacagtgatctgatttaaacagaagtcagatcatgccacctgtctactcaaaaccttccagtgatttttacctctcacgccaagtaaaaaccaaagtccttacaatggccaaaaaaccaataataataataataataattcctatatcaccactcttcttgcctttctggcatcattccctactgcttttcctgtcactctgttatcctttgacagtcactactacaatctcrgttttgtacatgctgctccctttgcctggattgctccatatgcatctccacattgctcagtctttcacctctgttcacattctccatatatttactcaaacatcaccttctcagtgagaactaatatactgtgatcagtatatttaaaactacagctttcccttactgcctagcct

SEQ ID NO: 350417 - DNA, 463 bp, Homo sapiens
ttcccctttccttctataacaggtaatatgaaaatttagctaaacttgtgccccaattgagattaaattcaaataaatatgttatctcatatctataagccaaaaatatcttcaccaataaatttcatatttcaaagaacttgctttataggtagactaatattaatactcatgtttatctttctacattaacataattgccttaggttctcccctacaattttaaaagggcatataccaagtggaaargattatatatacaataaaatataatatatatgtagaatatgcatttttattgaacaataaatgtgtatatgcctgtccatctaaatcttatgtcttatgtgtgtttgacaatcttgctgtgataatcacacaggtattaaaaactggcacattttatttctccagggaaggaataatatcactttaattattcttatcaccatggtacagtagc

SEQ ID NO: 350418 - DNA, 621 bp, Homo sapiens
ttttcttctcttatgtcttattggtcatattgtgccacatggccattccttgttctctgggaagtagaaaaaaaaatgagtatttaggtttttaatcctttatgagggaaggtggcaaagcagaaggggttgggaatgaatatttagtgagccaacaatgttggccacaagcatcctttttaatttgctttccaatgaaagaggtatttgtgactggttctactcttctgtcgcyttcctgctttgaaagcaaatgtgatgccctgatccctagaaggcaacagtatcatggagttgagaagccaaaccaccaaggagagcagagcagaaaggtgaagagcacctgagtctttactgatgtcaccaagccactgcaccagcatagacttacttctttccagactttttcctacatgagaaaaataatcccctatttgttttagctgctgttgctcttttgcatgttaaggtagtgctctattgaatactttaacattttccaggtcaagatagaaaaccattcaaatgccagtacacagagaattggcatggggtgcgggtgccagggcaataagggagaagcaaagtggaggcaaactccaactctcaggaaaaaaaatt

SEQ ID NO: 350419 - DNA, 512 bp, Homo sapiens
gacttcagtcttctcctaccttcagactttagctggaacttgtaccattggctcttggttctcaggcctttggaatgcatactttgggacttagcttccataacctcatgagccagttaagcacatatgataaattatctgcattatcttttaagattccaatstcttgagctatctttttgttctagaatacatccagtttctagcttcctaagaaatttagcacctgttgtgttttctgaagatcattacgttaagtgaaataagccacacacagaaagacaaacatcacatattctcacttatttgtgggatctaaaaataaaaacaatttaattcatggacatagagggtagaatgatggttaacagagactgagaaaggtggtggggggatgggggcaggtggggatggttaatgggcacaaaaatatagaaagaataaataagacttactatttgacaacacaataaggtgactatagtcaataatacctttacattttaagaata

SEQ ID NO: 350420 - DNA, 605 bp, Homo sapiens
caagttatttaattatggaattagaaggatgagaataggagtggttttgatcacttctcttattttatgcagttctattgattttataataaaaagcatgattatgaaactattaaacattattgaaatataaatkatgtgaaagttatttatttcttcttaacaccctttacgttcagcaatactggtttgatgaagggggtttttatagtcagaactgaagctcaatgagtggtaatggattaagtcaatgcttctcacaatggacaatcctcctcctgacaatccataaactatgcctgttcattttagcacgcttcagtggcttctcagactctgactcctaggttaaatcattctgccaccactctatgagtgacaagggattcacactcacttgctcaatttccttccttggccttaacaaaaatgaccaagtgtgtcttatgggagtcaaatcgaccctctagtacatcctattctgggttgtaagtcaatattgaaagattcaaaagccctctatgtttttgttttttctttccgcttctattaggaaagagtaagactgttaagaagaccgaagcatgtattaatgctgtggctat

SEQ ID NO: 350421 - DNA, 605 bp, Homo sapiens
caagttatttaattatggaattagaaggatgagaataggagtggttttgatcacttctcttattttatgcagttctattgattttataataaaaagcatgattatgaaactattaaacattattgaaatataaattatgtgaaagttatttatttcttcttaacaccctttacgttcagcaatactggtttgatgaagggggtttttatagtcagaactgaagctcaatgagtggtaatggattaagtcaatgcttctcacaatggacaatcctcctcctgacaatccataaactatgcctgttcattttagcacgcttcagtggcttctcagactctgactcctaggttaaatcattctgccaccactctatgagtgacaagggattcacactcacttgctcaatttccttccttggccttaacaaaaatgaccaagtgtgtcttatgggagtcaaatygaccctctagtacatcctattctgggttgtaagtcaatattgaaagattcaaaagccctctatgtttttgttttttctttccgcttctattaggaaagagtaagactgttaagaagaccgaagcatgtattaatgctgtggctat

SEQ ID NO: 350422 - DNA, 432 bp, Homo sapiens
tctttaatcttgctagagatgtagacatccagatacaaaaacctagagacaatatacaaaatgaacatccccaacacatatagtcaccagactgtccagggtcagtgccaaagaaaaaattttaaagtcagygaaatagggtagataacatacaatgggaactccatgaggctaacagcagatttctcaccagaaaccttacaagccaggagagactggggatctatattcatctttctgaaagaaagaaaattccaaccaagaatttcatatcctgccaaactaagctttataagcaaaggaaaattaactttccagacaagaaagtgctaagggaattcattaccatgagaccatccttacaagagactgttaagagagttctaaacaaggaaagaaaagaatggcaactgctaccacaaaaactcaccc

SEQ ID NO: 350423 - DNA, 432 bp, Homo sapiens
tctttaatcttgctagagatgtagacatccagatacaaaaacctagagacaatatacaaaatgaacatccccaacacatatagtcaccagactgtccagggtcagtgccaaagaaaaaattttaaagtcagtraaatagggtagataacatacaatgggaactccatgaggctaacagcagatttctcaccagaaaccttacaagccaggagagactggggatctatattcatctttctgaaagaaagaaaattccaaccaagaatttcatatcctgccaaactaagctttataagcaaaggaaaattaactttccagacaagaaagtgctaagggaattcattaccatgagaccatccttacaagagactgttaagagagttctaaacaaggaaagaaaagaatggcaactgctaccacaaaaactcaccc

SEQ ID NO: 350424 - DNA, 544 bp, Homo sapiens
ttctttacagcaatgccaaaggataggaaagtaaatttaaagatctcaacccaaacgttctctgatttccctatcatctgcttacaaatatccaggcttttatttccaattcaacacatacggtttcttacatgtgttagaaatgtagtttcttacacgtgttaggcactggagttaaacactgagaagaataaagagtgaatctatgattcaaagatttgttatctgggcttctttgtgtgggggtgtgttgctctactcatttacggagaggagatatattatttatagtccagagtcagttttacagcagtaaatctattataaatatcctgctctttcatgctactttacacaagtgattgatagctaacacttccacagctcagcttctccatctagcggcctgagtaaaacagaagcttgaaagcaattcctaaccttcccctaaattacaatgggcagattgatttccaactcaccctaccatggctctctggactcaaagactcttttagamaatagtggaactaattaagccaca

SEQ ID NO: 350425 - DNA, 582 bp, Homo sapiens
ctggggttgcacagctagtaccctagtttctctgaaattgtttcttctaagcccactccccatccttctcctgcctgttttagatatgacctttacattactcaaggacaagcaataaaatattttgcactttgttttatttctttcaaggaacttcacaagagcagtcctgtatctgcttttcttaccattgaacctacagtgcccagcacatagtaggcactcgacacatacttgytaaaggaatgaacagatgagtgaccaaactggaaacaaccatcaaatacaaggataatacaaaaatccatgattcctgtcccgagatttctttcttttttaaccttttgtctgttgagattcatttatgtgcagtgaagtgcacccttattagtatacagttctgtgaattatgagaaatgcatacagtcatgtgggcactaacacaatcaagataaagaacaacaacaaaaaatttcctcctgtgctttgaaagtcaacacctcccccaccttttgctcctggcaacactaatatgttttctgttcctgtggtttcaccttatctctaatgtcacagaaggta

SEQ ID NO: 350426 - DNA, 609 bp, Homo sapiens
gggtgaattttttcagttcaagttgagaattacatattttcaggggtatcattgggcatattttaaggcatacagttcaaatgatgaaataaatcagaagggccacggcattataacaagggagaggttgggtagaccagagagccagagaaggcattgtgaaagagacagatacctcaaattcctgacacgtagcctaagggtatagagatttgtctagcttgcttcttggaggctatctgaacccatcccaaaccaaaaccaccatgttgaaatgcaagaataaactgcagaaaagtcaagtaggagaaacagccagcttacagatcgtttttgcccatatttaacctcagcttattcttataactccatgtgtaagcagtatatacatcctcttttatagatttaaaaactgtggcctcaggagttcagagaatatctctcaaaatcatccccctcctcttatctcattcatttctcctcagtgaatctggtttgttaacttggtgtgattcagtagttttcttacgatgtttccttagcaacaaagcagataatgtaagcaaacggyctgaagcacattgaaggtaacctaaagaagaggaagag

SEQ ID NO: 350427 - DNA, 618 bp, Homo sapiens
cggggggagatatttttggatggtgttttccaaacatttttacatactgtaactgatactactttataaagggctttcacattcaaccatgtaggtagttgactatgcctcaaattcagaaaaatgtacagaatgatacttatacattaatgtagatgcaggactgcagagagattctaagcctttgtgctataagagagagaagtcctgttatttaactatrtcgctggagtcaaggtggtagatttgctgacctcctgcatcagggttgtcctgtccttggctattcattctgtattcatatcttcatcaaatattttttgaaaacccatttactgtgtgccagatgttgtgtcatagactggaaatacataccacgatgaacaagatcaatatggtccccagctttgtgaagctcacattctagtgtagaatatagacaagtgagcaaacaattgcaatatactgtaaattggagaaattcagaatatagtaaaatactgatattgcctaacccatacctgaaaaaaatgatttgtaaaatttccatacacttgtaccttgatttcctggggataacacttacgtgttcttcattacaagggaaccaaggaaatt

SEQ ID NO: 350428 - DNA, 618 bp, Homo sapiens
cggggggagatatttttggatggtgttttccaaacatttttacatactgtaactgatactactttataaagggctttcacattcaaccatgtaggtagttgactatgcctcaaattcagaaaaatgtacagaatgatacttatacattaatgtagatgcaggactgcagagagattctaagcctttgtgctataagagagagaagtcctgttatttaactatgtcgytggagtcaaggtggtagatttgctgacctcctgcatcagggttgtcctgtccttggctattcattctgtattcatatcttcatcaaatattttttgaaaacccatttactgtgtgccagatgttgtgtcatagactggaaatacataccacgatgaacaagatcaatatggtccccagctttgtgaagctcacattctagtgtagaatatagacaagtgagcaaacaattgcaatatactgtaaattggagaaattcagaatatagtaaaatactgatattgcctaacccatacctgaaaaaaatgatttgtaaaatttccatacacttgtaccttgatttcctggggataacacttacgtgttcttcattacaagggaaccaaggaaatt

SEQ ID NO: 350429 - DNA, 618 bp, Homo sapiens
cggggggagatatttttggatggtgttttccaaacatttttacatactgtaactgatactactttataaagggctttcacattcaaccatgtaggtagttgactatgcctcaaattcagaaaaatgtacagaatgatacttatacattaatgtagatgcaggactgcagagagattctaagcctttgtgctataagagagagaagtcctgttatttaactatgtcgctggagtcaaggtggtagatttgctgacctcctgcaycagggttgtcctgtccttggctattcattctgtattcatatcttcatcaaatattttttgaaaacccatttactgtgtgccagatgttgtgtcatagactggaaatacataccacgatgaacaagatcaatatggtccccagctttgtgaagctcacattctagtgtagaatatagacaagtgagcaaacaattgcaatatactgtaaattggagaaattcagaatatagtaaaatactgatattgcctaacccatacctgaaaaaaatgatttgtaaaatttccatacacttgtaccttgatttcctggggataacacttacgtgttcttcattacaagggaaccaaggaaatt

SEQ ID NO: 350430 - DNA, 578 bp, Homo sapiens
cctcagttagtgcctgaggcctggaggctgaaggcagtaactgggggcaaggatacaaaaggtggaggagaaaggcacttacaagaaactgcaagaaagccagcctggkataggggaggggtggggcctcctggccaagttaaagattttcatctttgtcctgacagctgcaggagatactggctttacacagtggggaggcgggggcaagtatgattagatttgtattaaagatatcacccaggttcctgtgcagaaaacaaattgcagcaaggagccggaagagcagataccagaagaacacttacgaggctggtgcagtagtctctggtgatagaatagcactgaagttaaggagaaagaattctagaaggagagtgtgatgaattgtatcacacctaaaaataaaaataagaaagtgtaggcctgaggacaagccattgtgtttctgaagaagaaaaatggaagagttttgacttttccttccttaaagaggagaacctaattcatttacatagaatcttaaaatctagccctgcaagatgtgtaaatgaataatacagcctcccaccctagcc

SEQ ID NO: 350431 - DNA, 578 bp, Homo sapiens
ttagtgctcccccagtatgctaaatagaaagccctctgcaatatattaaatgtatactaaatgtatatatttaataatgtcatgtataaaatatgaataaaatgtccacataggaaattaacacatatataccttctctgataagcactcctctrtgtgtcctgattatttactttctcttatcttttccttagtgttcctcaaattatatctatcctctaaaccagggatcagcaaactataacccccaggccaaatctagcccactccctgtttttatagataaagatttgttggaacacagccacactcatttgtttacctactatctatgattgttcaaccatgggagagttgagtaattgtgacatggaccataggccctaaagagccaaaataaatatactttggcactttttggaaaaaaagtttgcagacacctgccctaaatgattatagtttgagagaaacttaacagaaatgtgtttggttactgatgcataagagcaagcaccaataaaatggcataaaaatattaaatcacaaatggataagtgagaccaaggcaatttagcaaa

SEQ ID NO: 350432 - DNA, 574 bp, Homo sapiens
tgctcccccagtatgctaaatagaaagccctctgcaatatattaaatgtatactaaatgtatatatttaataatgtcatgtataaaatatgaataaaatgtccacataggaaattaacacatatataccttctctgataagcactcctctatgtgtcctgattatttactttctcttatcttttccttagtgtycctcaaattatatctatcctctaaaccagggatcagcaaactataacccccaggccaaatctagcccactccctgtttttatagataaagatttgttggaacacagccacactcatttgtttacctactatctatgattgttcaaccatgggagagttgagtaattgtgacatggaccataggccctaaagagccaaaataaatatactttggcactttttggaaaaaaagtttgcagacacctgccctaaatgattatagtttgagagaaacttaacagaaatgtgtttggttactgatgcataagagcaagcaccaataaaatggcataaaaatattaaatcacaaatggataagtgagaccaaggcaatttagcaaa

SEQ ID NO: 350433 - DNA, 578 bp, Homo sapiens
ttagtgctcccccagtatgctaaatagaaagccctctgcaatatattaaatgtatactaaatgtatatatttaataatgtcatgtataaaatatgaataaaatgtccacataggaaattaacacatatataccttctctgataagcactcctctatgtgtcctgattatttactttctcttatcttttccttagtgttcctcaaattatatctatcctctaaaccagggatcagcaaactataacccccaggccaaatctagcccactccctgtttttatagataaagatttgttggaacacagccacactcatttgtttacctactatctatgattgttcaaccatgggagagttgagtaattgtgacatggaccayaggccctaaagagccaaaataaatatactttggcactttttggaaaaaaagtttgcagacacctgccctaaatgattatagtttgagagaaacttaacagaaatgtgtttggttactgatgcataagagcaagcaccaataaaatggcataaaaatattaaatcacaaatggataagtgagaccaaggcaatttagcaaa

SEQ ID NO: 350434 - DNA, 605 bp, Homo sapiens
ccaatattcccaatcaacatagatgtgaaaatcctcaacaaaattttagcaaattaaatccagcagcacatcagaaagttaatataccacgatcaagtaggctttatttctgggatgcaagactggttcaacatccagcaaatcaataactgtggttcaccacataaacagaatcaaaaacaaaaccatatgatcatctccatagacatagagaaaagcttttgataagatccaacatcccttcatgataaaaagcctcaacagactaggcactgaagggacacacctcaaaataataggagccatcaagctcctattatttttgggacaagcccacagccaacatcatactgaataggcaaaagctggaaccattccctttgagaactggaacaagaaaaggatgtccactcccactactcctattcaacataatactagaaatgctagccaaagcaattaggcaaaagaaagaaayaaagtcatccaaaaaagaaaaagaagtcaaactatctctctttacagacaatatgattttatatttaaaaaaccctaaggactctaccaaaaggcttctggaggtgacaaacaacttcagcaaagtt

SEQ ID NO: 350435 - DNA, 555 bp, Homo sapiens
ctagagataatggacacaaagcatctgctaaacaattattgggagttcggccaaagggtgcaactgcgcctcagtcattcctcagcgttcaccatcccacaaagcagcagccggcactcgaggagactcgctcctgaccgacacctggccacctggcctgctttctctcccattcttttttttttttttctttttttcttgagatggagtctcgctctgtcgcccaggctggagtgcagcagcacgatctccgctcactgcaagctccgcctcccgggttcacgccattctcctgcctcagcctcccgagtagctgggactacaggcgcccgccaccacgcccggctaattttttgtatatttagtagagacggggtttcacygtgttagccaggatggtctcgatctcctgacctcgtgatcctcccgcctcaacctcccaaagtgctgggattacaggcatgagccaccgcgactggccttctctgccattcttattttggtgctggccatcagaaaacgaatcggtcagtccacacttggactgtatttcca

SEQ ID NO: 350436 - DNA, 428 bp, Homo sapiens
ttttgaactaactctgccaggcaagtttgacaagaagcaaccttcctgaaatgtttcaaaatacggtcatgttgattatattttatttcaagcaacctttttgttcttcattttctgtttctgggtttatttcctggtgagcagttagagcatgtgcattatttcctcacatgacatcaagagtgcagcatcagcctctggcttgtaaaggcacccagtaggcttatgttctgtacaatcgctgcttagcaaccagcatcaagtaaagtaattaagcktttgtagagtgtgataccaaatagcaactggcaccttcacctgcaccattaaaaaacctttaaagtttccttcagttttgagatatccattaaaaactatattaaaaaaacaaaacccagactgcttgataaaatgtacttaaacgattt

SEQ ID NO: 350437 - DNA, 596 bp, Homo sapiens
ctggaggttcaagcagacccccagaacagcacaattgctctatgaaaaagcagacagaatgcctttttatgcaggttcctgattttgatccttctcactgggtgggatatcctgattggggtctccagccacccctgctggtgttttctggtcagcagcaatttcaaaactctctgggacagagctctcagaaggtggagtagactgccatctttgctgtttagtagccttagccattgttgccttcaggctttagagagtcaaggtgaccagggactggagtgaactgccagcaaagcactgctgcccttgggaaaataggtcagactgcttttttragtgggtccatgatcccattcctccgcagtaggcaggatctaccaagtggagactccagccccctcctgctggtgtgttcaggctggcaaaatgtctgtacctccctgggttggagttcccaaagggagggggaggggcaggccaccatttttctgtttcacagccatcactaatgataccttcagatcctggaaaatctgaggagactagggactggagatgactgccagcataccacagcatccttacgaaaaagt

SEQ ID NO: 350438 - DNA, 532 bp, Homo sapiens
tgtttgcacaggaagagctgtttggtagagggagttcaaatatcagccctcagaatattgagtttgaaattcatactgaaaactactggaagagcggccaggaagtgctcatcagaaaaggcaatgtgtgagggaagtcattagaactacagagagtgggtaatgacatgctcaggaaatctttgacccatcttaagagggaaaaagtaaagattgcccactgaagagtccacagggatatgacttgagagaacatttctttagaccatgtccttctttgccaatccctaatagatcttcttctagattaagaatattacatcctgaattacagagtattacagtttccagcagagtcacaggtagataaagcaagctgtcttatttttaattgtttttttaaaccataactattttccagcwtctcatccattccatcatgtgccattgaaatagtgtttccctcgaccatacactttcccccattcttttgcaaaaggggaggaaggattcattatttctctaatgttta

SEQ ID NO: 350439 - DNA, 582 bp, Homo sapiens
aatatctatccagtataaaaataataaaatgaaccttcaagtactcaccaccctgctaagactgagaatattgccaataccttttaaactcactttgtgtccctttgacacacaccattttaaaatttatttctggaaatacaaaatcagtgcttcaagtatgcatattatctattgagttactataaaaatcaccttcaaaaattaaagtttggagacgtgagraagaaattcatacactccttcagaaaattgtctgttgctggtgttgaaaaacaaggctaggaaatctccctgtcagacatataacacttccatacacacataaattttagattaccttaagtagtgcctctagaatataaagtgtaagaaaacagtagttagtgtgttttaattcgctgtggtagattacatttaactgggatatccaagagattataaagggaaatatattcattaatatcacaaggtatccaacatgttcaaattcctcagtaaatactattgtatggcatatacgaaaaaagaagtatctgtaaaacaaaaagacagttttatctgataaaaggtttacattaa

SEQ ID NO: 350440 - DNA, 576 bp, Homo sapiens
ctttaagttttattgcattttgtggctcaatgtccttgagtttctgcccatggtccatggcaggaattctcctgcagtttgggtgcacacatagagcatttcttaacaaagcctctgccaatctgccccccactggcagaacaccctaaaaccttgatggattcctgcttacttttcccatcagttgaaatgttagcgactgcagaaagtctttgccatacccactgtatatcttcccactctccctttagactgagtgctccttaaaatcaggaacctgttgatatmatttttctgtcattgtccaccagccagtgtttgatacgaaggaggtattctgcaaagagttgttgaatgagtgtatgaatgagaggcctgagattcccaagagagaggacttggagtctcatggacaaactttttcacacacattcgctcctgactattgagttttatgaatattttagtaatctacagaaaaaaaggtaattgtggctgggttgacttcgggaatcattgcataacagaatttttctaaaaaatgcacccttgaaagattttgtcataataaacaca

SEQ ID NO: 350441 - DNA, 594 bp, Homo sapiens
ttgtgaacattagtggataaacattctatagtatgtgtatacaataaaataatttttcaatgataagaagaaatgtgatatcaaggttaataaaatggaggaatctttaatatgtattttttgtgtgaaacagaaaggccagtctggaaaagctacatactgtgttattccagctgtaaacattctgaaaaaggtaaaactatagagacagtagcaagattagtggttaccaacggtttgcaggtaggggtggaggaatgaattggtggagcacagggcatttttaggacaatgaactcttctgtatcatactgtaatggtgggcacatgacaycttggatttgtcaaaacacatagactgtacaacaacacaaagtatacattttaatgacaacaatggtgataaactgtggactttggttaataccaatgtatcaatattgattcattaattctaacaaatgtgccatgttaatgcaaaatgtaaacaagaagagaaactgggaattaaaagaaaagaaaaaccaacaataagtagattaattgttcagctaaaggtttgtcctaaaggttttacaagctcaccactaactc

SEQ ID NO: 350442 - DNA, 620 bp, Homo sapiens
gggtccagaatcaattctcaattttgccatacataacttaacaggcccatgtgatacactttacctcactgagccttaccttcttcttatataaaatgagactttcagactatataggatctaaagtcttttctagctctaaaatcatacattctttatggctcaaaatgattgaggtcccactggagagccactaattcagatacattctattagcaatgcaatttctgtgatgatatatgtcagtacagcatactgaaaccacctttcagagtgacattgtcacacatctggtcaaataattaatatttccatctggatcaatgcttttggcaggaacattgagtacttatgccacatgacccttccatcataaaacagaaaatgtgttattattttgtgccatcaggcaatgaaacagttggctttccattttcctgtttttttyttcttcttttttttttttcatagagtcatccattaacctacacctggcattccatgtcataaagggatgcaaaatctcacatgtcttcatggagctacgagtgtcctttggtctatcttgtttctgtagaaaacttaagggtatactagatcaacaattattttaggtaaaa

SEQ ID NO: 350443 - DNA, 590 bp, Homo sapiens
tgttttagggagttttctatatgcataacacttgggagaaactgaactgaatgagaccatgtctgtcacttcatagaactttcagtacactggaggaggcacaaactcaaacatgcttgaagataaagtgaaatcagtgctaaggagaggtttggcaatgttaaaagcctaagtatgtgtgattaatttsagtcagaaaattggaaaagcatctcataatagatgttacttgagctgagttttgcagaatgctaagattgtgaggagcagacagattgagagaacaacataagtcaagacttgatagtggcaacattcagattattgcacttatggtacctggagaagataatgggggttagaatacctgttcaaaaagagaaaaaaaaaagggagagtggataaggaagggtatgtatagtattacataagcctgtgatacagtttggatttgtgtctccactcaaatgtcaacttgaattgtaatctccaatgttggaggtgggccctggtgggaggtgactggatcatggggcagtttctcatggtttaacactatagcctttggtgttgttatgatgagagtgagt

SEQ ID NO: 350444 - DNA, 590 bp, Homo sapiens
tgttttagggagttttctatatgcataacacttgggagaaactgaactgaatgagaccatgtctgtcacttcatagaactttcagtacactggaggaggcacaaactcaaacatgcttgaagataaagtgaaatcagtgctaaggagaggtttggcaatgttaaaagcctaagtatgtgtgattaatttcagtcagaaaattggaaaagcatctcataatagatgttayttgagctgagttttgcagaatgctaagattgtgaggagcagacagattgagagaacaacataagtcaagacttgatagtggcaacattcagattattgcacttatggtacctggagaagataatgggggttagaatacctgttcaaaaagagaaaaaaaaaagggagagtggataaggaagggtatgtatagtattacataagcctgtgatacagtttggatttgtgtctccactcaaatgtcaacttgaattgtaatctccaatgttggaggtgggccctggtgggaggtgactggatcatggggcagtttctcatggtttaacactatagcctttggtgttgttatgatgagagtgagt

SEQ ID NO: 350445 - DNA, 506 bp, Homo sapiens
tatcaattaatcctttgaaaagatcaagaaaatatttggactcaagaatgctcataatagcattatctgttaattaaataagcaaatatttattaagcacctactatgatctggaaacccttccagaatttgcagacaaataaccattgtcttcttgaccttgcattctagctgggcagtctgacagtgattagcactaacatagattattatggatggaactatttcaaaggtcaaggaagacctttctaaataagtgacatttgagcagaaattgactaraatgaggaagtgagtcatgagctatctggggaaaaaaacctatttataacagcaaaaatctgtaagtcacttcaatacccagaaaaaaattgaagggtaaaataaaacttgatagggccacatcatcttggtttgcccgggaaagttgtggtttacacttattgacccagaataagcataacagcatcctactttacttttatatatggtctggtttgggtaac

SEQ ID NO: 350446 - DNA, 637 bp, Homo sapiens
ttggcattcttttaaagtcttcatttagtgtttataatttataaggagcacataccgcccacagcattttgaagattatgcaaatgtagcctaaatgtatctcgtatattcaagaagttgccgtctcccacatgtctgtcttactgtagctgagaaaaatcactgttttgccaagatcctaagttagagccttctttgaacccaatttgtattgcaggggaaagtgaactccagttcaagtgacggggcattggagtctgggacagatctgcttggtattctccagcaaatcaaatgkctcagaggatctagatttcattctctataaaatgaagaagttggagttgatctttatgttcatgtactgctctgagattcttagatttcaggtgtgtgcatgtgtgtatgtatgtgcatagtttttagtttcattttttaggtgtatttttggaggtctttatttaaaaattcatttatatggcaatgccagctatgatctgactcttacagtaaaatagaaattctcactgaatgaggaaatgaaacactctctgaaaataactgaaatagatgagaagtatctttataaagctgcatacaggtgaaaggccttgccttgattctctgagatttcaaa

SEQ ID NO: 350447 - DNA, 628 bp, Homo sapiens
tacaatacttatagttacattttttaaaaaagaaaaggcatgaagcataaattctgatgggctgagtactgatttggaaccattggcattcttttaaagtcttcatttagtgtttataatttataaggagcacataccgcccacagcattttgaagattatgcaaatgtagcctaaatgtatctcgtatattcaagaagttgccgtctcccacatgtctgtcttactgtagctgagaaaaatcactgttttgccaagatcctaagttagagccttctttgaacccaatttgtattgcaggggaaagtgaactccagttcaagtgacggggcattggagtctgggacagatctgcttggtattctccagcaaatcaaatggctcagaggatctagatttcattctctataaaatgaagaagttggagttgatctttatgttcatgtactgctctgagattcttagatttcaggtgtgtgcatgtgtgtatgtatgtgcatagtttttagtttcattttttargtgtatttttggaggtctttatttaaaaattcatttatatggcaatgccagctatgatctgactcttacagtaaaatagaaattctcactgaatgaggaaatgaaac

SEQ ID NO: 350448 - DNA, 468 bp, Homo sapiens
tagtccattgtttctatgtaccacatttgttatctattacttctggatttatttttcagattattcagtgttggcatgtagaaatgctattgatttttgtatgttgattttgtattctgcaactttacttatttgtttatctgttctaacaggtttttttggtagagtcttaagttttcccacatgtaagattacatcatctggccaggcgtggtggctcacacctataattccagcactttggaggctgaggcaggtggatcatgaggtcaggagttcatgaccagcctacccatgggcagggcctgctgaaactcagagcccacttgttrggatggattattcacttctggctagggcttgtctaaattctccctcagtggaaggcagctgtgtccttccctgtgtttccttctactgtgacagggcagcacagtgttctaatggaaactaccataatcactgccc

SEQ ID NO: 350449 - DNA, 468 bp, Homo sapiens
tagtccattgtttctatgtaccacatttgttatctattacttctggatttatttttcagattattcagtgttggcatgtagaaatgctattgatttttgtatgttgattttgtattctgcaactttacttatttgtttatctgttctaacaggtttttttggtagagtcttaagttttcccacatgtaagattacatcatctggccaggcgtggtggctcacacctataattccagcactttggaggctgaggcaggtggatcatgaggtcaggagttcatgaccagcctacccatgggcagggcctgctgaaactcagagcccacttgttgggatggrttattcacttctggctagggcttgtctaaattctccctcagtggaaggcagctgtgtccttccctgtgtttccttctactgtgacagggcagcacagtgttctaatggaaactaccataatcactgccc

SEQ ID NO: 350450 - DNA, 602 bp, Homo sapiens
aacattttaatattttatcaaagggctcatgattatttgacattgtctgataagatgtgtctaarcaagaaatatatatatatatattgtatatatatgcatatgcacacatacatatttatcatgggtgatgtatcacatggaggtcaaattgtgctcccttttctaggaagggacacttttccctaaaatttagccagtatgctgcacgtaggccaatgcagctagaaaaagtctcactcactctcaagggaaaggggcgggggaacaagactattgccaatcaaacaacacctgttaaatctgcctacttgggcttacattacaatgacccattaggcataaagggtactttttaccgtacttgttttataggattttattatttctgagccacaatcttttgttgttgtaacactatggaatgttgaattaggattaaaatatcattagataaattcgaagttgcagataatcaagtaaaatataaactgaaagcagaaaatattcagataaaaatcttagtctgtgtattgtggaaatgactgtatgtctgatgatttgctgtcagtttcactgaactgtaacattagtgtgcaact

SEQ ID NO: 350451 - DNA, 576 bp, Homo sapiens
aacattttaatattttatcaaagggctcatgattatttgacattgtctgataagatgtgtctaaacaagaaatatatatatatatattgtatatatatgcatatgcacacatacatatttatcatgggtgatgtatcacatggaggtcaaattgtgctcccttttctaggaagggacacttttccctaaaatttagccagtatgctgcacgtaggccaatgcagctagaaaaagtctcactcactctcaagggaaaggggcgggggaacaagactattgccaatcaaacaacacctgttaaatctgcctacttgggcttacattacaatgacccattaggcataaagggtactttttaccrtacttgttttataggattttattatttctgagccacaatcttttgttgttgtaacactatggaatgttgaattaggattaaaatatcattagataaattcgaagttgcagataatcaagtaaaatataaactgaaagcagaaaatattcagataaaaatcttagtctgtgtattgtggaaatgactgtatgtctgatgatttgctgtcagtttca

SEQ ID NO: 350452 - DNA, 588 bp, Homo sapiens
ggtggtatattgtaatagagaagtgagtttggatcaaagggtcacatttagttgaagcacacaatgactgcttttttgattggtactaaggtttgctttgctcccaccaaaactcctgttaaaatttgatacctaatgtggctgcgttgcattgagagatggggccgagggagaggtgcttgagttatgagggtagatccttcattaatagatgaatgcccacccatgaggattgaatgtgttctcactctcactaaaataaattagttcctgcaagagcaggtcgttaaaaataggctgacttcctcagtttttctctcctccttcctcttttgccatgtgacctccttgcatatgccagtttgcttccctttttgctttccaccatgatttgaagcagcctgatgccttcaycagctgcagatgcccagtcttgaactttccagtctgtagaatcataagccaaataaaactcttcctataaactacccagtcttagatattttgttatagcaacacgaaacagactaaaacaactgaattcctgttgttagacattttcatctgaaatccctgcatctccaggca

SEQ ID NO: 350453 - DNA, 627 bp, Homo sapiens
gaagttaaaacacactaagtttgcagtcaactggttccaattctacgtctgactgtattactgattacctacatgtccttaaatgaaacactttgccaggatgactcttagacttctcatctatgaaattgagatgaaaattgttattcttcctaccatcctgcatttcctgtgtgaataaaatgaacactagctatgaacacaaaacactattaaatttctctttttttccctgattataattattgctaaaatmaccaaaaaagctataatttaaataacacttagtgtggacctggaagtatacgaatcattgtgcataaattaacttagctaaaattcataactaatgtatcaggtaaatatttttcctcccatcttacagaggaaaaatctacgaagtctaatggtgaagtgatatggccaagtctcactgtaactaaatgaattggagttgaaactctgaaatattagactccaaagttctttatcttaatcaaaatgaaacttaaactgaacgtaaaactttacatttttaattgactcttacaatattttaaagtttaaatttaaaaataattatgtaaaagatatgttttctctttaacatttttattctaaaaaatt

SEQ ID NO: 350454 - DNA, 642 bp, Homo sapiens
gtatggcactaagcattccacatacatcgtcttatttaatcattgctacaacctcatgaagcaagatctatgatgctactcattctggagatgccagaactgaggtataatgaggctgcccatttgttaaggtcccttagctggaagtgaagaagctggggttcaaaccccaggccttctatggaagaatccaattgctgctgcactccaatctggaagagtagaaaactgaaatctgtgctataacaaaaatgacaaatgattctatatgcattatatattacagcttcagagtcaacatgaggagttaaacctgaatggcaaattcatgaattgttaaggcctaccaggtaggaattttttcaagaaccccaatattcagctttaaacagtaaatgatattctcaacctaggttagaaatatagataggagttcaactttttgggtgacgaatagagaatatcagatagkcataaatatcatgggctcagaaatatctggtgttctgacttgtttcctagcttcttaaaaaactatcacactttagaaagtttttgaggactcagagaccccacaaaatgagtaaacaaaactgcaatttcactttctactgcttagttaataatctctaatcagacagt

SEQ ID NO: 350455 - DNA, 561 bp, Homo sapiens
agtcattaagtttcaaagttttgttcaaaatttactaagtttgctttgtcctttgtgattctgatgttggcataatagctccttgccttttttttttttttttcttttagacagagtctctctctgcttcccaggctcgagtgtagtggctagatctcggctcattgcaacatctgcctcctgggttcaagaaattctcatgcctcagcctcccaagaagctgggattacaggcgcccaccaccatgcccagctaatttttgtattttttgtaaaggcggaggttcgccatgtttgccargcaggtctcaaactcctggcctcaagcaatctgcctacctcagcttcccaaagtgctgggattacaggcgtgagccactgtaccggccaacatctcctcaatttctaaagttctttttctgctttctgtgctgttttacagtttatcaagccagacaaattctgagaaaaactagtaaaggatttaagtttgagactttcagccagctctaggaaccaaccttatgttactgttggccgcttgacctcagagttgatgatg

SEQ ID NO: 350456 - DNA, 521 bp, Homo sapiens
catgtttgccaagcaggtctcaaactcctggcctcaagcaatctgcctacctcagcttcccaaagtgctgggattacaggcgtgagccactgtaccggccaacatctcctyaatttctaaagttctttttctgctttctgtgctgttttacagtttatcaagccagacaaattctgagaaaaactagtaaaggatttaagtttgagactttcagccagctctaggaaccaaccttatgttactgttggccgcttgacctcagagttgatgatggggcctataattgtgctacttgagcatacatggacctagagaagagtttttactccccattcaaggttgatgtctactttggcaagatagggacaaatttgtatttgtcctgttacataaagagtcaggtacagagaccggaattaaatggtcccctattttttgctttttttttttttttcagtgttgttgcggtccattctgttgctacccatccaaagtcttccttgcctacagagccctgctgt

SEQ ID NO: 350457 - DNA, 521 bp, Homo sapiens
catgtttgccaagcaggtctcaaactcctggcctcaagcaatctgcctacctcagcttcccaaagtgctgggattacaggcgtgagccactgtaccggccaacatctcctcaatttctaaagttctttttctgctttctgtgctgttttacagtttatcaagccagacaaattctgagaaaaactagtaaaggatttaagtttgagactttcagccagctctaggaaccaaccttatgttactgttggccgcttgacctcagrgttgatgatggggcctataattgtgctacttgagcatacatggacctagagaagagtttttactccccattcaaggttgatgtctactttggcaagatagggacaaatttgtatttgtcctgttacataaagagtcaggtacagagaccggaattaaatggtcccctattttttgctttttttttttttttcagtgttgttgcggtccattctgttgctacccatccaaagtcttccttgcctacagagccctgctgt

SEQ ID NO: 350458 - DNA, 521 bp, Homo sapiens
catgtttgccaagcaggtctcaaactcctggcctcaagcaatctgcctacctcagcttcccaaagtgctgggattacaggcgtgagccactgtaccggccaacatctcctcaatttctaaagttctttttctgctttctgtgctgttttacagtttatcaagccagacaaattctgagaaaaactagtaaaggatttaagtttgagactttcagccagctctaggaaccaaccttatgttactgttggccgcttgacctcagagttgatgatggggcctataattgtgctacttgagcatacatggacctagagaagagtttttactccccattcaaggttgatgtctactttggcaagatagggacaaatttgtatttgtcctgttacataaagagtcaggtacagagacckgaattaaatggtcccctattttttgctttttttttttttttcagtgttgttgcggtccattctgttgctacccatccaaagtcttccttgcctacagagccctgctgt

SEQ ID NO: 350459 - DNA, 503 bp, Homo sapiens
aatttcatcattacatttcataatttcctttcattayttcatttcatttcatctcatttcattatttcatttcatctcatttttcatctcatcatttttcatctcatttcatctcatcatttcatctcatcgttcatctcatttcatctcatcattttatctcatttcatctcatctcatctcatttcaatttcattatttcatatcatttcattatttcatttcatttcatctcatcatttcatctcatcatttcatccatcatctcatcatttcatctcattttatctcatctcatctcctttcaatttcttttcaattttgtcatttcgtctcatcatttcatctcatttctactcaccatttcatctcaaaatttcatctcatcatctcatctcatctcatttcgtcatttcatctcatcatttcatctcatctcaagtcatcttatcatttcatctaagtgaaatgatgtaatggaatcatgaaatgaaatggatagg

SEQ ID NO: 350460 - DNA, 411 bp, Homo sapiens
gtacacaatttacagaagaggaactaccctyccaaaccaaaacaaaatgtcaaaattttaatttaccagcaaacctaggttgcttctgtgaaatgatctcatttgctgagttttaaaattgactaaatttcccaatttccaaatgaaaatatttagttatcttgtcttgctatgtgtttttggttaatatgatgattaatttttggtctattacttaacatattccatgattgttgatatggattataaggactcacaaaatagttttcagatgtctttaatttttttacttagtgtagatcctataaatggattaggagtattctattaactcccatgtattcagaaatcgaattggagtggtaaattctgtttgaagtaacaagggatatcaaaggaaaaaaataattt

SEQ ID NO: 350461 - DNA, 581 bp, Homo sapiens
ttgttgactgatccagtgagaaatgaccaacttcagttccagcctctctttaacatgtacatagcaatttgggcaagtcaagctccatcctgaaggacataataggggactctttaagcacattattatgaaggcccttcagggataacaccagagtgatgaggtgccctataccagggataatggagacagagttcttgggattcatcactggggtcctcaaagcatcttccaagggcataataaggaaggactcaaacacctttgaatctccgtgagaccaggcatgaggtcttttgaaagagttctttaactggagtgaatgtcaaagagaagtataataaaataaaagacctgagtagggtcccccttgttcataaaatgacactacctaaatcaccaaatctcactgagccttggtttaactcaagaggttccatgccactataagaggtggtaactgccaactgataggaaatattttcatatgcatagtcayagtgccccatatttatgaacttcttaagagtcttcaaaaagctttctatatacattatcctttactttctaacttttctaaa

SEQ ID NO: 350462 - DNA, 581 bp, Homo sapiens
ttgttgactgatccagtgagaaatgaccaacttcagttccagcctctctttaacatgtacatagcaatttgggcaagtcaagctccatcctgaaggacataataggggactctttaagcacattattatgaaggcccttcagggataacaccagagtgatgaggtgccctataccagggataatggagacagagttcttgggattcatcactggggtcctcaaagcatcttccaagggcataataaggaaggactcaaacacctttgaatctccgtgagaccaggcatgaggtcttttgaaagagttctttaactggagtgaatgtcaaagagaagtataataaaataaaagacctgagtagggtcccccttgttcataaaatgacactacctaaatcaccaaatctcactgagccttggtttaactcaagaggttccatgccactataagaggtggtaactgccaactgataggaaatattttcatatgcatagtcacagtgccccatatttatgaacttcttaagagtcttcaaaaagctttctatatacrttatcctttactttctaacttttctaaa

SEQ ID NO: 350463 - DNA, 334 bp, Homo sapiens
tttacaaaaatgtttcaaaataaccagatcaaaatcatccttatgccagaaagacttttttttttttattactagaaatgaaacagtaagtatttgttstattgacatacttaggcttagacctatgtttaacaagaaagcctaataatagcactgtggttagactgtagcctatttttccaaaccatcattttattattaaggaaagaaaggatcaaatacctttcattcatctgatatgatcctttaaaacacattccactaataagtcccatttggaacagctgaaaatcttttaacaaaactttttaaagatgagctcatggcttagtgt

SEQ ID NO: 350464 - DNA, 334 bp, Homo sapiens
tttacaaaaatgtttcaaaataaccagatcaaaatcatccttatgccagaaagacttttttttttttattactagaaatgaaacagtaagtatttgttgtattgacatacttaggcttagacctatgtttaacaagaaagcctaataatagcactgtggttagactgtagcctatttttccaaaccatcattttattattaaggaaagaaaggatcaaatacctttcattcatctgatatgatcctttaaaacacattccactaataagtcccatttggaacagctgaaaatcttttaayaaaactttttaaagatgagctcatggcttagtgt

SEQ ID NO: 350465 - DNA, 562 bp, Homo sapiens
aagtgtataaggagttgataaagaagttgatactataagttagtactacaatgacagcacttttcaagaaaagasttttttctctcttacaaatatcatgttagcaatatttgttttctccagaaataatgaggaaataaaaacataagtatgtgggtaattagtgtagtttcttaaagaaatgagttaggcaacaggctaataatgtatatttcgctggcttttgaatgccaacaatcatattctttataaggcacagagaagatttttctaaagaatatgtgaacctgaaaagtaatcaccacttggtagtgacaatatggatagggtgaagggcgtcaccaagaagcaatgaaaagatacatttgcagttaaattcgaaaaccatgatgtttaatacatatagtaataaagaatactttctcctgtttcaaaattattttagaatttaagatagaagctaaaatacctagggataatgatatgactatcaaaaattaaaaattaaaggacattttgagtattataaattaagaatgagaacttattacccaatgaacag

SEQ ID NO: 350466 - DNA, 562 bp, Homo sapiens
aagtgtataaggagttgataaagaagttgatactataagttagtactacaatgacagcacttttcaagaaaagagttttttctctcttacaaatatcatgttagcartatttgttttctccagaaataatgaggaaataaaaacataagtatgtgggtaattagtgtagtttcttaaagaaatgagttaggcaacaggctaataatgtatatttcgctggcttttgaatgccaacaatcatattctttataaggcacagagaagatttttctaaagaatatgtgaacctgaaaagtaatcaccacttggtagtgacaatatggatagggtgaagggcgtcaccaagaagcaatgaaaagatacatttgcagttaaattcgaaaaccatgatgtttaatacatatagtaataaagaatactttctcctgtttcaaaattattttagaatttaagatagaagctaaaatacctagggataatgatatgactatcaaaaattaaaaattaaaggacattttgagtattataaattaagaatgagaacttattacccaatgaacag

SEQ ID NO: 350467 - DNA, 562 bp, Homo sapiens
aagtgtataaggagttgataaagaagttgatactataagttagtactacaatgacagcacttttcaagaaaagagttttttctctcttacaaatatcatgttagcaatatttgttttctccagaaataatgaggaaataaaaacataagtatgtgggtaattagtgtagtttcttaaagaaatgagttaggcaacaggctaataatgtatayttcgctggcttttgaatgccaacaatcatattctttataaggcacagagaagatttttctaaagaatatgtgaacctgaaaagtaatcaccacttggtagtgacaatatggatagggtgaagggcgtcaccaagaagcaatgaaaagatacatttgcagttaaattcgaaaaccatgatgtttaatacatatagtaataaagaatactttctcctgtttcaaaattattttagaatttaagatagaagctaaaatacctagggataatgatatgactatcaaaaattaaaaattaaaggacattttgagtattataaattaagaatgagaacttattacccaatgaacag

SEQ ID NO: 350468 - DNA, 562 bp, Homo sapiens
aagtgtataaggagttgataaagaagttgatactataagttagtactacaatgacagcacttttcaagaaaagagttttttctctcttacaaatatcatgttagcaatatttgttttctccagaaataatgaggaaataaaaacataagtatgtgggtaattagtgtagtttcttaaagaaatgagttaggcaacaggctaataatgtatatttcgctggcttttgaatgccaacaatcatattctttataaggcacagagaagatttttctaaagaatatgtgaacctgaaaagtaatcaccacttggtagtgacaatatggatagggtgaagggcgtcaccaagaagcaatgaaaagatacatttgcagttaaattygaaaaccatgatgtttaatacatatagtaataaagaatactttctcctgtttcaaaattattttagaatttaagatagaagctaaaatacctagggataatgatatgactatcaaaaattaaaaattaaaggacattttgagtattataaattaagaatgagaacttattacccaatgaacag

SEQ ID NO: 350469 - DNA, 430 bp, Homo sapiens
gttcactgttagtctctgctgctgctgctggcaaattgggcactcagcagtggccacagacagttcagccttggtgagtggaagtccacmttgctgaatccatgcatagcctccatccctgccaccatggccactatgttcatgggctcattggacaatgacaggggtgtctgaggaaagaggctgagtggtatccacagaacgggtcatcttatccacttgattatcaaaatcctcctctgctgaagtcacttgttggtcaacactcacacagggtacaaatatcttcagtttttgaccactcagagaggtccatctacatactctttctccaagtttctttgtcaccaattttccaatcatgcttcttccaagtccctgaccatccagccaaaccattggctacagcccatgaatcagtatataaccg

SEQ ID NO: 350470 - DNA, 430 bp, Homo sapiens
gttcactgttagtctctgctgctgctgctggcaaattgggcactcagcagtggccacagacagttcagccttggtgagtggaagtccaccttgctgaatccatgcatarcctccatccctgccaccatggccactatgttcatgggctcattggacaatgacaggggtgtctgaggaaagaggctgagtggtatccacagaacgggtcatcttatccacttgattatcaaaatcctcctctgctgaagtcacttgttggtcaacactcacacagggtacaaatatcttcagtttttgaccactcagagaggtccatctacatactctttctccaagtttctttgtcaccaattttccaatcatgcttcttccaagtccctgaccatccagccaaaccattggctacagcccatgaatcagtatataaccg

SEQ ID NO: 350471 - DNA, 430 bp, Homo sapiens
gttcactgttagtctctgctgctgctgctggcaaattgggcactcagcagtggccacagacagttcagccttggtgagtggaagtccaccttgctgaatccatgcatagcctccatccctgccaccatggccactatgttcatgggctyattggacaatgacaggggtgtctgaggaaagaggctgagtggtatccacagaacgggtcatcttatccacttgattatcaaaatcctcctctgctgaagtcacttgttggtcaacactcacacagggtacaaatatcttcagtttttgaccactcagagaggtccatctacatactctttctccaagtttctttgtcaccaattttccaatcatgcttcttccaagtccctgaccatccagccaaaccattggctacagcccatgaatcagtatataaccg

SEQ ID NO: 350472 - DNA, 492 bp, Homo sapiens
tgattagttagccaatgccagagctctacatgagtcagactgttcagattgctgctttgtcttttctgcccattacggtagctacacycaccgtgcctttgagggttgagtgctaccacttggcccctgccacttcaggatccaattattccaaattgtatttaacttttgtaactgagtgactgcagttctcaccattagatctgacatacagagaagagcctttacagggctcttcaaagatgcaggtgctgtcctcacaaatctattttgcaaggtgtttgtcaagggtattaggtacagagtcactaaactccttgcctctcacgagcgatgattcattagtgtcaaatgaatttgttttgcatagctctttaaacctttcatgccaagaactgtcaatattctctacactattaaaagtagagtccttagcattttgggatctaatcatatttagcagccaaatccagaaaccccaaaaccaacaaa

SEQ ID NO: 350473 - DNA, 458 bp, Homo sapiens
ggaacactgtgattagttagccaatgccagagctctacatgagtcagactgttcagattgctgctttgtcttttctgcccattacggtagctacacccaccrtgcctttgagggttgagtgctaccacttggcccctgccacttcaggatccaattattccaaattgtatttaacttttgtaactgagtgactgcagttctcaccattagatctgacatacagagaagagcctttacagggctcttcaaagatgcaggtgctgtcctcacaaatctattttgcaaggtgtttgtcaagggtattaggtacagagtcactaaactccttgcctctcacgagcgatgattcattagtgtcaaatgaatttgttttgcatagctctttaaacctttcatgccaagaactgtcaatattctctacactattaaaagtagagtccttagcattttgggatcta

SEQ ID NO: 350474 - DNA, 492 bp, Homo sapiens
tgattagttagccaatgccagagctctacatgagtcagactgttcagattgctgctttgtcttttctgcccattacggtagctacacccaccgtgcctttgagggttgagtgctamcacttggcccctgccacttcaggatccaattattccaaattgtatttaacttttgtaactgagtgactgcagttctcaccattagatctgacatacagagaagagcctttacagggctcttcaaagatgcaggtgctgtcctcacaaatctattttgcaaggtgtttgtcaagggtattaggtacagagtcactaaactccttgcctctcacgagcgatgattcattagtgtcaaatgaatttgttttgcatagctctttaaacctttcatgccaagaactgtcaatattctctacactattaaaagtagagtccttagcattttgggatctaatcatatttagcagccaaatccagaaaccccaaaaccaacaaa

SEQ ID NO: 350475 - DNA, 458 bp, Homo sapiens
ggaacactgtgattagttagccaatgccagagctctacatgagtcagactgttcagattgctgctttgtcttttctgcccattacggtagctacacccaccgtgcctttgagggttgagtgctaccacttggcccctgccacttcaggatccaattattccaaattgtatttaacttttgtaactgagtgactgcagttctcaccattagatctgacatacagagaagagcctttacagggctcttcaaagatgcaggtgctgtcctcacaaatctattttgcaaggtgtttgtcaagggtattaggtacagagtcactaaactccttgcctctcacgagcgatgattcattagtgtcaaatgaatttgttttgcatagctctttaaacctttcatgmcaagaactgtcaatattctctacactattaaaagtagagtccttagcattttgggatcta

SEQ ID NO: 350476 - DNA, 492 bp, Homo sapiens
tgattagttagccaatgccagagctctacatgagtcagactgttcagattgctgctttgtcttttctgcccattacggtagctacacccaccgtgcctttgagggttgagtgctaccacttggcccctgccacttcaggatccaattattccaaattgtatttaacttttgtaactgagtgactgcagttctcaccattagatctgacatacagagaagagcctttacagggctcttcaaagatgcaggtgctgtcctcacaaatctattttgcaaggtgtttgtcaagggtattaggtacagagtcactaaactccttgcctctcacgagcgatgattcattagtgtcaaatgaatttgttttgcatagctctttaaacctttcatgccaagaactgtcaatrttctctacactattaaaagtagagtccttagcattttgggatctaatcatatttagcagccaaatccagaaaccccaaaaccaacaaa

SEQ ID NO: 350477 - DNA, 469 bp, Homo sapiens
actttccaaacctgactgagtttgagaacttccctcagcagatagaggcaccagaaggagcactggggcagcccagcctcacacatctgcttccttggggtttatgttatgacttgtaacactgtgggaggggtactgtcactctgttgacagtaataagytgcaaaatcttcaggctgcaggctgctgatggtgagagtgtaatctgtcccagatccactgtcactgaaccgagagggaatcccactttgcagactggatgcagcatagatcaggagcttaggagttttccctggtttctgctgataccaatttaaattattgctaatgccctgactcgcccggcaagtgatggtgactctgcctcctacagatgcagacagggaggatggagactgggtcatctggatgtcacatctggcacctgaagttagaaacataaaaacaaatattcttgcaattaatcatg

SEQ ID NO: 350478 - DNA, 469 bp, Homo sapiens
actttccaaacctgactgagtttgagaacttccctcagcagatagaggcaccagaaggagcactggggcagcccagcctcacacatctgcttccttggggtttatgttatgacttgtaacactgtgggaggggtactgtcactctgttgacagtaataagctgcaaaatcttcaggctgcaggctgctgatggtgagagtgtaatctgtcccagatccactgtcactgaaccgagagggaatcccactttgcagactggatgcagcatagatcaggagcttaggagttttccctggtttctgctgataccaatttaaattattgctaatgccctgactcgcccggcaagtgatggtgactctgyctcctacagatgcagacagggaggatggagactgggtcatctggatgtcacatctggcacctgaagttagaaacataaaaacaaatattcttgcaattaatcatg

SEQ ID NO: 350479 - DNA, 469 bp, Homo sapiens
actttccaaacctgactgagtttgagaacttccctcagcagatagaggcaccagaaggagcactggggcagcccagcctcacacatctgcttccttggggtttatgttatgacttgtaacactgtgggaggggtactgtcactctgttgacagtaataagctgcaaaatcttcaggctgcaggctgctgatggtgagagtgtaatctgtcccagatccactgtcactgaaccgagagggaatcccactttgcagactggatgcagcatagatcaggagcttaggagttttccctggtttctgctgataccaatttaaattattgctaatgccctgactcgcccggcaagtgatggtgactctgcctcctacagatgcagacagggaggatggagactgggtcatctggatgtcacatctggcacctgaagttrgaaacataaaaacaaatattcttgcaattaatcatg

SEQ ID NO: 350480 - DNA, 570 bp, Homo sapiens
ttcctgtgtttctatgtgggcttgagctctcgtcatcctcagaggtggctccttctgaggcacctttcactttccctttccctcctcccctcccttgctcacttgcttgtttcccgcactttgtaaatatactgcccgcatgcgaatctttggcatccttctcwctgaggggacccaacctaatgcattggaaaaatcctcattcttggagggcatcgttggtttgaattattgccacttctcatgttttaatgcatagggaaattccaaaaatttaggaaatctttaaattccctttgccaatctttcttagatttgattttagcagagattcattttctctaggtcacaaaatcacagaagccttccacaaatggctacacaacatagagtccacatagagcagagactcagaatctcccaggatttgacatccacacatcagacagtcctagagtctcaggttttttctaggtcgatcgcctcgtaaatctgccttgtgatatttttattctatcttaggggaagaccattgtgtggatgacgagggttgtttgtggaatgaataat

SEQ ID NO: 350481 - DNA, 570 bp, Homo sapiens
ttcctgtgtttctatgtgggcttgagctctcgtcatcctcagaggtggctccttctgaggcacctttcactttccctttccctcctcccctcccttgctcacttgcttgtttcccgcactttgtaaatatactgcccgcatgcgaatctttggcatccttctcactgaggggacccaacctaatgcattggaaaaatcctcattcttggagggcatcgttggtttgaattattgccacttctcatgttttaatgcmtagggaaattccaaaaatttaggaaatctttaaattccctttgccaatctttcttagatttgattttagcagagattcattttctctaggtcacaaaatcacagaagccttccacaaatggctacacaacatagagtccacatagagcagagactcagaatctcccaggatttgacatccacacatcagacagtcctagagtctcaggttttttctaggtcgatcgcctcgtaaatctgccttgtgatatttttattctatcttaggggaagaccattgtgtggatgacgagggttgtttgtggaatgaataat

SEQ ID NO: 350482 - DNA, 570 bp, Homo sapiens
ttcctgtgtttctatgtgggcttgagctctcgtcatcctcagaggtggctccttctgaggcacctttcactttccctttccctcctcccctcccttgctcacttgcttgtttcccgcactttgtaaatatactgcccgcatgcgaatctttggcatccttctcactgaggggacccaacctaatgcattggaaaaatcctcattcttggagggcatcgttggtttgaattattgccacttctcatgttttaatgcatagggaaattccaaaaatttaggaaatctttaaatyccctttgccaatctttcttagatttgattttagcagagattcattttctctaggtcacaaaatcacagaagccttccacaaatggctacacaacatagagtccacatagagcagagactcagaatctcccaggatttgacatccacacatcagacagtcctagagtctcaggttttttctaggtcgatcgcctcgtaaatctgccttgtgatatttttattctatcttaggggaagaccattgtgtggatgacgagggttgtttgtggaatgaataat

SEQ ID NO: 350483 - DNA, 571 bp, Homo sapiens
atgatcattacttatgaatatgtcaaaaataacttggcagacatggttgagaattttggggtcaggagagtatcctgaattatctgggtgrgaccatcataatcacaagggtccttataatagggaaggaggaaggtaacagccagaggggacctgggacaacggacagggaaactggagtgatggaggaaggggccatgctgttaggaatgtgggaacatcagaaagatggaatgctcgatattggattctctctcgaagcctagaatgaatagagccctattactccttgattttacttcattgagacttctgacctccagaaatgtaagataatacacttgtgttatgtggagcagtaaggttgtggtaatttgttacagcagcaacaggaaaccaatgcaaggggaaggggtgtgttttacttccctagtgtatcactgtcctctgttctcccaaatagttctgtgttgttgtgtttgctgtcaatttcaacaagagacagaaaacatttttctatgaggagagctagcaccacaattcttcttacgtagaaagtgtcttgagtaat

SEQ ID NO: 350484 - DNA, 496 bp, Homo sapiens
tctatgatcattacttatgaatatgtcaaaaataacttggcagacatggttgagaattttggggtcaggagagtatcctgaattatctgggtgagaccatcataatcacaagggtccttayaatagggaaggaggaaggtaacagccagaggggacctgggacaacggacagggaaactggagtgatggaggaaggggccatgctgttaggaatgtgggaacatcagaaagatggaatgctcgatattggattctctctcgaagcctagaatgaatagagccctattactccttgattttacttcattgagacttctgacctccagaaatgtaagataatacacttgtgttatgtggagcagtaaggttgtggtaatttgttacagcagcaacaggaaaccaatgcaaggggaaggggtgtgttttacttccctagtgtatcactgtcctctgttctcccaaatagttctgtgttgttgtgtttgctgtcaatttc

SEQ ID NO: 350485 - DNA, 496 bp, Homo sapiens
tctatgatcattacttatgaatatgtcaaaaataacttggcagacatggttgagaattttggggtcaggagagtatcctgaattatctgggtgagaccatcataatcacaagggtccttataatagggarggaggaaggtaacagccagaggggacctgggacaacggacagggaaactggagtgatggaggaaggggccatgctgttaggaatgtgggaacatcagaaagatggaatgctcgatattggattctctctcgaagcctagaatgaatagagccctattactccttgattttacttcattgagacttctgacctccagaaatgtaagataatacacttgtgttatgtggagcagtaaggttgtggtaatttgttacagcagcaacaggaaaccaatgcaaggggaaggggtgtgttttacttccctagtgtatcactgtcctctgttctcccaaatagttctgtgttgttgtgtttgctgtcaatttc

SEQ ID NO: 350486 - DNA, 571 bp, Homo sapiens
atgatcattacttatgaatatgtcaaaaataacttggcagacatggttgagaattttggggtcaggagagtatcctgaattatctgggtgagaccatcataatcacaagggtccttataatagggaaggaggaaggtaacagccagaggggacctgggacaacggacagggaaactggagtgatggaggaaggggccatgctgttaggaatgtgggaacatcagaaagatggaatgctcgatattggattctctctcgaagcctagaatgaatagagccctattactccttgattttacttcattgagacttctgacctccagaaatgtaagataatacacttgtgttatgtggagcagtaaggttgtggtaatttgttacagcagcaacaggaaaccaatgcaaggggaaggggtgtgttttacttccctagtgtatcactgtcctctgttctcccaaatagttctgtgttkttgtgtttgctgtcaatttcaacaagagacagaaaacatttttctatgaggagagctagcaccacaattcttcttacgtagaaagtgtcttgagtaat

SEQ ID NO: 350487 - DNA, 470 bp, Homo sapiens
actgctgaccacgtgacttttatgcaaatcagccatgtgctgtcatgaacagtttcctcatgtgtgaaatggggcactgaggatgtgaagggctgtcctgagggttccgccagctgatgcaccatgaagtgtacatacatgtatagacagacacacacacatacatgagaagagtatctagtgccycttttatgcattcttgagtaactcagaatgttatgtgagatactaacagtcatatgtcattttcaactaaaattatcaatatttatcttataactaacagatgcttctctgtacactgtaggtttcatgtacatttcttcaatcacaaaatttttcaccaatctatttacgtctagtatcagaaagttaagcaaggagattgcaaaccaacacaacacctttagtctggattttcccggagccccgtttgtgttagtgtcctcgggctactgtgacaagttctc

SEQ ID NO: 350488 - DNA, 470 bp, Homo sapiens
actgctgaccacgtgacttttatgcaaatcagccatgtgctgtcatgaacagtttcctcatgtgtgaaatggggcactgaggatgtgaagggctgtcctgagggttccgccagctgatgcaccatgaagtgtacatacatgtatagacagacacacacacatacatgagaagagtatctagtgccccttttatgcattcttgagtaactcagaatgttatgtgagataytaacagtcatatgtcattttcaactaaaattatcaatatttatcttataactaacagatgcttctctgtacactgtaggtttcatgtacatttcttcaatcacaaaatttttcaccaatctatttacgtctagtatcagaaagttaagcaaggagattgcaaaccaacacaacacctttagtctggattttcccggagccccgtttgtgttagtgtcctcgggctactgtgacaagttctc

SEQ ID NO: 350489 - DNA, 470 bp, Homo sapiens
actgctgaccacgtgacttttatgcaaatcagccatgtgctgtcatgaacagtttcctcatgtgtgaaatggggcactgaggatgtgaagggctgtcctgagggttccgccagctgatgcaccatgaagtgtacatacatgtatagacagacacacacacatacatgagaagagtatctagtgccccttttatgcattcttgagtaactcagaatgttatgtgagatactaacagtcatatgtcattttcaactaaaattatcaatatttatcttataactaacagatgcttctctgtacactgtaggtttcatgtacatttyttcaatcacaaaatttttcaccaatctatttacgtctagtatcagaaagttaagcaaggagattgcaaaccaacacaacacctttagtctggattttcccggagccccgtttgtgttagtgtcctcgggctactgtgacaagttctc

SEQ ID NO: 350490 - DNA, 470 bp, Homo sapiens
actgctgaccacgtgacttttatgcaaatcagccatgtgctgtcatgaacagtttcctcatgtgtgaaatggggcactgaggatgtgaagggctgtcctgagggttccgccagctgatgcaccatgaagtgtacatacatgtatagacagacacacacacatacatgagaagagtatctagtgccccttttatgcattcttgagtaactcagaatgttatgtgagatactaacagtcatatgtcattttcaactaaaattatcaatatttatcttataactaacagatgcttctctgtacactgtaggtttcatgtacatttcttcaatcacaaaatttttcaccaatctatttacgtctagtatcagaaagttaagcaaggagattgcaaaccaacacaacacctttagtctggattttcccggagccccrtttgtgttagtgtcctcgggctactgtgacaagttctc

SEQ ID NO: 350491 - DNA, 402 bp, Homo sapiens
tcactgggctaagatcttggagtcatcagttctggctccttctgaagctctagggagcagtctgatttagctyttccagcttctggtggcttctctctcccgggatgtggacacatcactgcaatctctgtctctgtgttcacactgccttctccacttcagtctatgctaaatgtctctctacctcttgtttttttttaggacacttgagtttgcatttaagtcccagttgattaatctaagaccatctccctgtttcaggctccttaatttacacctgcaaaagctgttttcccaaatgagatacatgcatagtcttcttggaatgaaacctcactatttggggatgatactcagtactacaccattacataaccaggtctcagtgttagtcctgtacat

SEQ ID NO: 350492 - DNA, 402 bp, Homo sapiens
tcactgggctaagatcttggagtcatcagttctggctccttctgaagctctagggagcagtctgatttagctcttccagcttctggtggcttctctctcccgggatgtggacacatcactgcaatctctgtctctgtgttcacactgccttctccacttcagtctatgctaaatstctctctacctcttgtttttttttaggacacttgagtttgcatttaagtcccagttgattaatctaagaccatctccctgtttcaggctccttaatttacacctgcaaaagctgttttcccaaatgagatacatgcatagtcttcttggaatgaaacctcactatttggggatgatactcagtactacaccattacataaccaggtctcagtgttagtcctgtacat

SEQ ID NO: 350493 - DNA, 402 bp, Homo sapiens
tcactgggctaagatcttggagtcatcagttctggctccttctgaagctctagggagcagtctgatttagctcttccagcttctggtggcttctctctcccgggatgtggacacatcactgcaatctctgtctctgtgttcacactgccttctccacttcagtctatgctaaatgtctctctacctcttgtttttttttaggacacttgagtttgcatttaagtcccagttgattaatctaagaccatctccctgtttcaggctccttaatttacacctgcaaaagctgttttcccaaatgagatacatgcatagtcttcwtggaatgaaacctcactatttggggatgatactcagtactacaccattacataaccaggtctcagtgttagtcctgtacat

SEQ ID NO: 350494 - DNA, 352 bp, Homo sapiens
tcatttcagttttgaacatcttgagttaaatcgtcctaacatatcttaygaatttgattttcttccctgggaagctaatatttcaaaaactgagagtatatagatttccaacttgtatccaatttataaaactatctctaggctgctgatttcaggaggaggctcatgaatattctatttgcagagaatatatcaggagttaacatcagcctcaatatttgtggacgaccagttaactaagccacctcttagtgtatttagatgggaaatcttagctgaagatattcaataatgaaccaacagtgactaaaaaaattcaatatttaagtatatttcattgtaattaatttga

SEQ ID NO: 350495 - DNA, 352 bp, Homo sapiens
tcatttcagttttgaacatcttgagttaaatcgtcctaacatatcttatgaatttgattttcttccctgggaagctaatatttcaaaaactgagagtatatagatttccaactkgtatccaatttataaaactatctctaggctgctgatttcaggaggaggctcatgaatattctatttgcagagaatatatcaggagttaacatcagcctcaatatttgtggacgaccagttaactaagccacctcttagtgtatttagatgggaaatcttagctgaagatattcaataatgaaccaacagtgactaaaaaaattcaatatttaagtatatttcattgtaattaatttga

SEQ ID NO: 350496 - DNA, 352 bp, Homo sapiens
tcatttcagttttgaacatcttgagttaaatcgtcctaacatatcttatgaatttgattttcttccctgggaagctaatatttcaaaaactgagagtatatagatttccaacttgtatccaatttataaaactatctctaggctgctgatttcaggaggaggctcatgaatattctmtttgcagagaatatatcaggagttaacatcagcctcaatatttgtggacgaccagttaactaagccacctcttagtgtatttagatgggaaatcttagctgaagatattcaataatgaaccaacagtgactaaaaaaattcaatatttaagtatatttcattgtaattaatttga

SEQ ID NO: 350497 - DNA, 542 bp, Homo sapiens
tttcttccctgggaagctaatatttcaaaaactgagagtatatagatttccaacttgtatccaatttataaaactatctctaggctgctgatttcaggaggaggctcatgaatattctatttgcagagaatatatcaggagttaacatcagcctcaatatttgtggacgaccagttaactaagccacctcttagtgtatttagatgggaaatcttagctgaagatattcaatwatgaaccaacagtgactaaaaaaattcaatatttaagtatatttcattgtaattaatttgaattgaagtagccatatacagttagtatttactacattgaacaatgcaaataagaggaaaaaattaataaccatctctaataccacatgccaaaatcctcatcaatttattctagctaaaggagttgatcagaagcagcagttgaaagcaccaactaaaccagctggggttagttcactgtcattctctcagaaccatctcttctctgaacaaaacaagtacaagagttcattgtgaatctgcattctc

SEQ ID NO: 350498 - DNA, 210 bp, Homo sapiens
tatccaagtttttgttaatatgaatttggggaaaaaagcatacttaattagctaagacttcttattctaggcttgaccctgtgttcracatctattgaatttgtagttgcatgggctgctctctgacactggttactgacctggaagctatattaacgttaggggaggtggtgtatgagcattagaggtatccttgcaaggaaggacttg

SEQ ID NO: 350499 - DNA, 210 bp, Homo sapiens
tatccaagtttttgttaatatgaatttggggaaaaaagcatacttaattagctaagacttcttattctaggcttgaccctgtgttcgacatctattgaatttgtagttgcatgggctgctctctgacactgsttactgacctggaagctatattaacgttaggggaggtggtgtatgagcattagaggtatccttgcaaggaaggacttg

SEQ ID NO: 350500 - DNA, 210 bp, Homo sapiens
tatccaagtttttgttaatatgaatttggggaaaaaagcatacttaattagctaagacttcttattctaggcttgaccctgtgttcgacatctattgaatttgtagttgcatgggctgctctctgacactggttastgacctggaagctatattaacgttaggggaggtggtgtatgagcattagaggtatccttgcaaggaaggacttg

SEQ ID NO: 350501 - DNA, 563 bp, Homo sapiens
ataaatgtcaaaagaggattaaagggagaaataaccatatcaactcacatggtaagggtatgcaaacatctcttagtaatggagaaaattgaaagaaaagaaaaaagagaaagggagaaagagaaacagagcgaaagggataatgaaggagagaaagaagaagagaagggaagaggaagaaaagtaaaaaggaggaggagggagagggaggaagaaagaaaggtgaaaagaaagaatgctaaagttttcaacaacataatttatccttccagaatatgaatgtcggtctrtttgatgatgtcccacagattccttagtctctgctcattttttatctgtttctcagagtcaatattttccattttcttatcttcaagctcatgacttcttctgtgtgtgcaaatatactcttaaatccctctggtgatttttaaatttttatcgttgtagttttccactccagaatttctgctatctctgttgatattcctactttttaatattttttctgaatcctttatttctttgtttatgttttccttgtgacatttgagtataattaa

SEQ ID NO: 350502 - DNA, 563 bp, Homo sapiens
ataaatgtcaaaagaggattaaagggagaaataaccatatcaactcacatggtaagggtatgcaaacatctcttagtaatggagaaaattgaaagaaaagaaaaaagagaaagggagaaagagaaacagagcgaaagggataatgaaggagagaaagaagaagagaagggaagaggaagaaaagtaaaaaggaggaggagggagagggaggaagaaagaaaggtgaaaagaaagaatgctaaagttttcaacaacataatttatccttccagaatatgaatgtcggtctgtttgatgatgtcccacagattccttagtctctgctcattttttatctgtttctcagagtcaatattttccattttcttatcttcaagctcatgacttcttctgtgtrtgcaaatatactcttaaatccctctggtgatttttaaatttttatcgttgtagttttccactccagaatttctgctatctctgttgatattcctactttttaatattttttctgaatcctttatttctttgtttatgttttccttgtgacatttgagtataattaa

SEQ ID NO: 350503 - DNA, 563 bp, Homo sapiens
ataaatgtcaaaagaggattaaagggagaaataaccatatcaactcacatggtaagggtatgcaaacatctcttagtaatggagaaaattgaaagaaaagaaaaaagagaaagggagaaagagaaacagagcgaaagggataatgaaggagagaaagaagaagagaagggaagaggaagaaaagtaaaaaggaggaggagggagagggaggaagaaagaaaggtgaaaagaaagaatgctaaagttttcaacaacataatttatccttccagaatatgaatgtcggtctgtttgatgatgtcccacagattccttagtctctgctcattttttatctgtttctcagagtcaatattttccattttcttatcttcaagctcatgacttcttctgtgtgtgcaaatatactcttaaatccctctggtgatttttaaatttttatcgttgtagttttccactccagaatttctgctatctctgttgatattcctactttttaatattttttctgaatcctttatttcttygtttatgttttccttgtgacatttgagtataattaa

SEQ ID NO: 350504 - DNA, 428 bp, Homo sapiens
catcttgaaaactttttctccacaaacccactgtgatctctcaagcaattggtaaggaatccaagagagtctgtatatgacacagatcagggagagcagaacacttgggaggtgaccaggtcttgggggccgagcccttatgaatcggattagtgcctttataaaagaagctcaatggagttcttgtgtgccttccactatgtgaggacatagaaagaaggcaccatctatgaaccatgaaatgggctctcatcaacactgaatttgkgagcatcttgacctgagatcttacagcctcaagaagtatgaaaaaagaaatatctgttgttttttagtcacccagtttatgttattttgttataagagtccaaatagaccaagatattccacttaatatgtaggggaaggcaacaaaaactgccacactt

SEQ ID NO: 350505 - DNA, 428 bp, Homo sapiens
catcttgaaaactttttctccacaaacccactgtgatctctcaagcaattggtaaggaatccaagagagtctgtatatgacacagatcagggagagcagaacacttgggaggtgaccaggtcttgggggccgagcccttatgaatcggattagtgcctttataaaagaagctcaatggagttcttgtgtgccttccactatgtgaggacatagaaagaaggcaccatctatgaaccatgaaatgggctctcatcaacactgaatttgtgagcatcttgacctgagatcttacagcctcaagaagtrtgaaaaaagaaatatctgttgttttttagtcacccagtttatgttattttgttataagagtccaaatagaccaagatattccacttaatatgtaggggaaggcaacaaaaactgccacactt

SEQ ID NO: 350506 - DNA, 470 bp, Homo sapiens
cttgggggccgagcccttatgaatcggattagtgcctttataaaagaagctcaatggagttcttgtgtgccttccactatgtgaggacatagaaagaaggcaccatctatgaaccatgaaatgggctctcatcaacactgaatttgtgagcatcttgacctgagatcttacagcctcaagaagtatgaaaaaagaaatatctgttgttttttagtcacccrgtttatgttattttgttataagagtccaaatagaccaagatattccacttaatatgtaggggaaggcaacaaaaactgccacacttagaatactcctgatgctgggagtatgaaaacaggaaaaacaaaaacaaaactgctcttgaaggtgaaggaggaatatcactgagctcaccaacacagccaggaaaagaacagaagtgtgagaaggctacattcctgagaccctgagaaaaagtaacctgcata

SEQ ID NO: 350507 - DNA, 470 bp, Homo sapiens
cttgggggccgagcccttatgaatcggattagtgcctttataaaagaagctcaatggagttcttgtgtgccttccactatgtgaggacatagaaagaaggcaccatctatgaaccatgaaatgggctctcatcaacactgaatttgtgagcatcttgacctgagatcttacagcctcaagaagtatgaaaaaagaaatatctgttgttttttagtcacccagtttatgttattttgttataagagtccraatagaccaagatattccacttaatatgtaggggaaggcaacaaaaactgccacacttagaatactcctgatgctgggagtatgaaaacaggaaaaacaaaaacaaaactgctcttgaaggtgaaggaggaatatcactgagctcaccaacacagccaggaaaagaacagaagtgtgagaaggctacattcctgagaccctgagaaaaagtaacctgcata

SEQ ID NO: 350508 - DNA, 593 bp, Homo sapiens
acagcctcaagaagtatgaaaaaagaaatatctgttgttttttagtcacccagtttatgttattttgttataagagtccaaatagaccaagatattccacttaatatgtaggggaaggcaacaaaaactgccacacttagaatactcctgatgctgggagtatgaaaacaggaaaaacaaaaacaaaactgctcttgaaggtgaaggaggaatatcactgagctcaccaacacagccaggaaaagaacagaagtgtgagaaggctacattcctgagaccctgagaaaaagtaacctgcataagacagagatgaaattacctactctakttatgattgaaatcccaaaaagaaaacagggaaaaataatggagcaaaagaaatatttttcaaaataactgccaaaaatattctaaaagaagtgacagaaaatcaaacttcagatataggaaactcagagaatgtcaaatagaacaaaaagaaataagaattccatcttgaaaaatctttgaaaaatctttaaaaaatcaagtctaaattttatatcttgctccaaatatatagagatataaataggttatcatcaagatatgga

SEQ ID NO: 350509 - DNA, 496 bp, Homo sapiens
aaacaaaaacaaaactgctcttgaaggtgaaggaggaatatcactgagctcaccaacacagccaggaaaagaacagaagtgtgagaaggctacattcctgagaccctgagaaaaagtaacctgcataagacagagatgaaattacctactctagttatgattgaaatcccaaaaagaaaacagggaaaaatartggagcaaaagaaatatttttcaaaataactgccaaaaatattctaaaagaagtgacagaaaatcaaacttcagatataggaaactcagagaatgtcaaatagaacaaaaagaaataagaattccatcttgaaaaatctttgaaaaatctttaaaaaatcaagtctaaattttatatcttgctccaaatatatagagatataaataggttatcatcaagatatggagaaagccatatcatggaaacactaaaataaggctgtggaaggactacattgatattagacacaacagagttcggaac

SEQ ID NO: 350510 - DNA, 496 bp, Homo sapiens
aaacaaaaacaaaactgctcttgaaggtgaaggaggaatatcactgagctcaccaacacagccaggaaaagaacagaagtgtgagaaggctacattcctgagaccctgagaaaaagtaacctgcataagacagagatgaaattacctactctagttatgattgaaatcccaaaaagaaaacagggaaaaataatggagcaaaagaaatatttttcaaaataactgccaaaaatattctaaaagaagtgacagaaaatcaaacttcagatatagraaactcagagaatgtcaaatagaacaaaaagaaataagaattccatcttgaaaaatctttgaaaaatctttaaaaaatcaagtctaaattttatatcttgctccaaatatatagagatataaataggttatcatcaagatatggagaaagccatatcatggaaacactaaaataaggctgtggaaggactacattgatattagacacaacagagttcggaac

SEQ ID NO: 350511 - DNA, 496 bp, Homo sapiens
aaacaaaaacaaaactgctcttgaaggtgaaggaggaatatcactgagctcaccaacacagccaggaaaagaacagaagtgtgagaaggctacattcctgagaccctgagaaaaagtaacctgcataagacagagatgaaattacctactctagttatgattgaaatcccaaaaagaaaacagggaaaaataatggagcaaaagaaatatttttcaaaataactgccaaaaatattctaaaagaagtgacagaaaatcaaacttcagatataggaaactcagagaatgtcaaatagaacaaaaagaaataagaattccatcttgaaamatctttgaaaaatctttaaaaaatcaagtctaaattttatatcttgctccaaatatatagagatataaataggttatcatcaagatatggagaaagccatatcatggaaacactaaaataaggctgtggaaggactacattgatattagacacaacagagttcggaac

SEQ ID NO: 350512 - DNA, 590 bp, Homo sapiens
ttctttctttctttctcacsttcttgctttctttccttttttctcccttcctcccgccctccttttcttccttcctccctcccttcctttcctctttttccctccttccttccttcgcctctttattttctttgtttcattgccttcctcccttttaccattctctcttcctccttttcttcctcccttcctcctttctttctttctctctttctctttctttctttctttccttccttctttctttcttgtgttcatgttttcttttttctcccttcctgcctttctcccttcctccctccctcccttccttccctcatttcctccttcttttccctcttttttctttatttccttccttctttccttccttctttttctttctttgttttcttttctttctttctctttactacaattcatattattttaaaaaaattaagacagggagacagaaaaataaagaacgctttaatctgcaggttaaatagattatgtctgctgtaggcaaaagaatggcctcccaaaaattttcatgtcctaattcccagagtctaacatacaaatatgttaggttgcacggcagtgtg

SEQ ID NO: 350513 - DNA, 590 bp, Homo sapiens
ttctttctttctttctcacgttcttgctttctttccttttttctcccttcctcccgccctccttttcttccttcctccctcccttcctttcctctttttccctccttccttccttcgcctctttattttctttgtttcwttgccttcctcccttttaccattctctcttcctccttttcttcctcccttcctcctttctttctttctctctttctctttctttctttctttccttccttctttctttcttgtgttcatgttttcttttttctcccttcctgcctttctcccttcctccctccctcccttccttccctcatttcctccttcttttccctcttttttctttatttccttccttctttccttccttctttttctttctttgttttcttttctttctttctctttactacaattcatattattttaaaaaaattaagacagggagacagaaaaataaagaacgctttaatctgcaggttaaatagattatgtctgctgtaggcaaaagaatggcctcccaaaaattttcatgtcctaattcccagagtctaacatacaaatatgttaggttgcacggcagtgtg

SEQ ID NO: 350514 - DNA, 590 bp, Homo sapiens
ttctttctttctttctcacgttcttgctttctttccttttttctcccttcctcccgccctccttttcttccttcctccctcccttcctttcctctttttccctccttccttccttcgcctctttattttctttgtttcaktgccttcctcccttttaccattctctcttcctccttttcttcctcccttcctcctttctttctttctctctttctctttctttctttctttccttccttctttctttcttgtgttcatgttttcttttttctcccttcctgcctttctcccttcctccctccctcccttccttccctcatttcctccttcttttccctcttttttctttatttccttccttctttccttccttctttttctttctttgttttcttttctttctttctctttactacaattcatattattttaaaaaaattaagacagggagacagaaaaataaagaacgctttaatctgcaggttaaatagattatgtctgctgtaggcaaaagaatggcctcccaaaaattttcatgtcctaattcccagagtctaacatacaaatatgttaggttgcacggcagtgtg

SEQ ID NO: 350515 - DNA, 590 bp, Homo sapiens
ttctttctttctttctcacgttcttgctttctttccttttttctcccttcctcccgccctccttttcttccttcctccctcccttcctttcctctttttccctccttccttccttcgcctctttattttctttgtttcattgccttcctcccttttaccattctctcttcctcctttycttcctcccttcctcctttctttctttctctctttctctttctttctttctttccttccttctttctttcttgtgttcatgttttcttttttctcccttcctgcctttctcccttcctccctccctcccttccttccctcatttcctccttcttttccctcttttttctttatttccttccttctttccttccttctttttctttctttgttttcttttctttctttctctttactacaattcatattattttaaaaaaattaagacagggagacagaaaaataaagaacgctttaatctgcaggttaaatagattatgtctgctgtaggcaaaagaatggcctcccaaaaattttcatgtcctaattcccagagtctaacatacaaatatgttaggttgcacggcagtgtg

SEQ ID NO: 350516 - DNA, 524 bp, Homo sapiens
gaggatagcaaattgatgccaaaataaygcaaatgcaaatcttacactcatttctatgtaggtttcatttaatctttgaaattaaagtgaaattaaaagattgtgatattttgatgaagttagactaaaatgaacaataaccaaataagaactcacttacattctttatatggtcaataaagaagtgatagtggaaaaaaacaagatcaaatgaaggtgatgatttaggaagttggaaagatagctgaaactacaaaatggtatataaccagtgaacacttagacacactgattgatgaacttcagcttttggcttggtgagagcataaaatgagagcagctgaggtttgcaaatttgtaatctccttgtggaaaaacaggggaaaacacatctcagcctaataagatttatctactaaagagtctagacttgatccatttgtccttgtaattcaaaagctaattcaaatactgatttgatgtattgtgtgaacaaccattgctgattatcatcgcatacctgg

SEQ ID NO: 350517 - DNA, 594 bp, Homo sapiens
atgctgttcttctgatagtgaataagtctcacaagatctgatggttttataaagaggagtttccctgcacaagctctcttgtcttgtctgctgccatgtgagacgtgcctttcascttgcgccatgattgtgaggcctacccagccatgtggaactgtgcgtgtattaaacctctttcttctagaaattacccagtcttgggcatgtctttaccggtggtgtgaaaatggactaatacagtagcacacctcatagggctgaacaaaatggggaagatgagtggggagcgggagagagaaaaggggtctgtgggactctagcttttattgggcccagaacattacccaaataagttttccacggggcactagtcggtggggtgagtgccagcaggcacatttcttgactcccgctgcaaccgagcaggtcactctggcgtgtgggggctgtccatgtgcgctgtgaggtctgtggggtgagtcaggtaggttgtatccaacggttccatagctggtagtcaccaggaggaggcaactgtgtagggtcaatatctgggccagccacactgaggaactgtgagggttagaactggaa

SEQ ID NO: 350518 - DNA, 594 bp, Homo sapiens
atgctgttcttctgatagtgaataagtctcacaagatctgatggttttataaagaggagtttccctgcacaagctctcttgtcttgtctgctgccatgtgagacgtgcctttcagcttgcgccatgattgtgaggcctacccagccatgtggaactgtgcrtgtattaaacctctttcttctagaaattacccagtcttgggcatgtctttaccggtggtgtgaaaatggactaatacagtagcacacctcatagggctgaacaaaatggggaagatgagtggggagcgggagagagaaaaggggtctgtgggactctagcttttattgggcccagaacattacccaaataagttttccacggggcactagtcggtggggtgagtgccagcaggcacatttcttgactcccgctgcaaccgagcaggtcactctggcgtgtgggggctgtccatgtgcgctgtgaggtctgtggggtgagtcaggtaggttgtatccaacggttccatagctggtagtcaccaggaggaggcaactgtgtagggtcaatatctgggccagccacactgaggaactgtgagggttagaactggaa

SEQ ID NO: 350519 - DNA, 594 bp, Homo sapiens
atgctgttcttctgatagtgaataagtctcacaagatctgatggttttataaagaggagtttccctgcacaagctctcttgtcttgtctgctgccatgtgagacgtgcctttcagcttgcgccatgattgtgaggcctacccagccatgtggaactgtgcgtgtattaaacctctttcttctagaaattacccagtcttgggcatgtctttaccggtggtgtgaaaatggactaatacagtagcacacctcatagggctgaacaaaatggggaagatgagtggggarcgggagagagaaaaggggtctgtgggactctagcttttattgggcccagaacattacccaaataagttttccacggggcactagtcggtggggtgagtgccagcaggcacatttcttgactcccgctgcaaccgagcaggtcactctggcgtgtgggggctgtccatgtgcgctgtgaggtctgtggggtgagtcaggtaggttgtatccaacggttccatagctggtagtcaccaggaggaggcaactgtgtagggtcaatatctgggccagccacactgaggaactgtgagggttagaactggaa

SEQ ID NO: 350520 - DNA, 594 bp, Homo sapiens
atgctgttcttctgatagtgaataagtctcacaagatctgatggttttataaagaggagtttccctgcacaagctctcttgtcttgtctgctgccatgtgagacgtgcctttcagcttgcgccatgattgtgaggcctacccagccatgtggaactgtgcgtgtattaaacctctttcttctagaaattacccagtcttgggcatgtctttaccggtggtgtgaaaatggactaatacagtagcacacctcatagggctgaacaaaatggggaagatgagtggggagcrggagagagaaaaggggtctgtgggactctagcttttattgggcccagaacattacccaaataagttttccacggggcactagtcggtggggtgagtgccagcaggcacatttcttgactcccgctgcaaccgagcaggtcactctggcgtgtgggggctgtccatgtgcgctgtgaggtctgtggggtgagtcaggtaggttgtatccaacggttccatagctggtagtcaccaggaggaggcaactgtgtagggtcaatatctgggccagccacactgaggaactgtgagggttagaactggaa

SEQ ID NO: 350521 - DNA, 323 bp, Homo sapiens
gggtcgttttctcacataaccttttttttttttccctgtgatccaagaccycattctttctgtaaacttcatgtggtagatgagcttctgcacgcatcgtgtgtctgggtcttcgttctaagggctccagtgtacacacattgcagaaacctgtatgccttttctactatttatctgcctcctattagtgattttcagggaaacttcagaaggcaaaagggacattctcctttagcccattctcagacaaaatcccccaacatttaactgattcctaatagcttaaaatcactttgaaaaatccatatatttataaccttttc

SEQ ID NO: 350522 - DNA, 323 bp, Homo sapiens
gggtcgttttctcacataaccttttttttttttccctgtgatccaagaccccattctttytgtaaacttcatgtggtagatgagcttctgcacgcatcgtgtgtctgggtcttcgttctaagggctccagtgtacacacattgcagaaacctgtatgccttttctactatttatctgcctcctattagtgattttcagggaaacttcagaaggcaaaagggacattctcctttagcccattctcagacaaaatcccccaacatttaactgattcctaatagcttaaaatcactttgaaaaatccatatatttataaccttttc

SEQ ID NO: 350523 - DNA, 323 bp, Homo sapiens
gggtcgttttctcacataaccttttttttttttccctgtgatccaagaccccattctttctgtamacttcatgtggtagatgagcttctgcacgcatcgtgtgtctgggtcttcgttctaagggctccagtgtacacacattgcagaaacctgtatgccttttctactatttatctgcctcctattagtgattttcagggaaacttcagaaggcaaaagggacattctcctttagcccattctcagacaaaatcccccaacatttaactgattcctaatagcttaaaatcactttgaaaaatccatatatttataaccttttc

SEQ ID NO: 350524 - DNA, 323 bp, Homo sapiens
gggtcgttttctcacataaccttttttttttttccctgtgatccaagaccccattctttctgtaaacttcatgtggtagatgagcttctgcacgcatcgtgtgtctgggtcttcgttctaagggctccagtgtacacacattgcagaaacctgtatgccttttctactatttatctgcctcctattagtgattttcagggaaacttcagaaggcaaaagggacattctcctttagcccattctcagacaaaatcycccaacatttaactgattcctaatagcttaaaatcactttgaaaaatccatatatttataaccttttc

SEQ ID NO: 350525 - DNA, 473 bp, Homo sapiens
tgcccttttggtgagctataagcacactcaatggtaggctgaaatacyagcttttatctatggcgaaatggaatcatatcagtgattttcttaaaaaggaaatttaactcttgctatggtttgaatgcttgccccttccaatctcatgttaaaatttgatccccaatgttgcaggtggggcttactgggaggtgtttggtcatggggttggaccttcatgaatggataataccctcccttagaaatctaaagctatcctccctcctcggtgccctcaggaatgagtgtaccattctttattcacctgtaatttccccacccatcctttttgagatattaattacatgtatgttacactgctgcatattgtctgacgtatcagtgagtttctggctttcttattttagtttaccctttgtcctttagtttgtaaagcttctatttttttctataaattttctgatgttagggta

SEQ ID NO: 350526 - DNA, 473 bp, Homo sapiens
tgcccttttggtgagctataagcacactcaatggtaggctgaaataccagcttttatctatggcraaatggaatcatatcagtgattttcttaaaaaggaaatttaactcttgctatggtttgaatgcttgccccttccaatctcatgttaaaatttgatccccaatgttgcaggtggggcttactgggaggtgtttggtcatggggttggaccttcatgaatggataataccctcccttagaaatctaaagctatcctccctcctcggtgccctcaggaatgagtgtaccattctttattcacctgtaatttccccacccatcctttttgagatattaattacatgtatgttacactgctgcatattgtctgacgtatcagtgagtttctggctttcttattttagtttaccctttgtcctttagtttgtaaagcttctatttttttctataaattttctgatgttagggta

SEQ ID NO: 350527 - DNA, 274 bp, Homo sapiens
atgatttctgaaaatagtggaatcgagtttgaatctagtaagtacatataaataaatgtcttaaaactcctcttatgttagctaattaagaaayattattgtaatagacattagaaaatattttaataaattgagtggatttcacacgctaaggaaatgatcttacttgcatttgatagttcaattagatagatatatacctataggtagtttaaaatatttgtaataaccttatatacttttaaaaagcattgatatctgttggcactatctg

SEQ ID NO: 350528 - DNA, 274 bp, Homo sapiens
atgatttctgaaaatagtggaatcgagtttgaatctagtaagtacatataaataaatgtcttaaaactcctcttatgttagctaattaagaaacattattgtaatagacattagaaaatattttrataaattgagtggatttcacacgctaaggaaatgatcttacttgcatttgatagttcaattagatagatatatacctataggtagtttaaaatatttgtaataaccttatatacttttaaaaagcattgatatctgttggcactatctg

SEQ ID NO: 350529 - DNA, 274 bp, Homo sapiens
atgatttctgaaaatagtggaatcgagtttgaatctagtaagtacatataaataaatgtcttaaaactcctcttatgttagctaattaagaaacattattgtaatagacattagaaaatattttaataaattgagtgsatttcacacgctaaggaaatgatcttacttgcatttgatagttcaattagatagatatatacctataggtagtttaaaatatttgtaataaccttatatacttttaaaaagcattgatatctgttggcactatctg

SEQ ID NO: 350530 - DNA, 274 bp, Homo sapiens
atgatttctgaaaatagtggaatcgagtttgaatctagtaagtacatataaataaatgtcttaaaactcctcttatgttagctaattaagaaacattattgtaatagacattagaaaatattttaataaattgagtggatttcacacgctaaggaaatgatcttacttgcatttgatagttcaattagatagatatatacctataggtagtttaaaatatttstaataaccttatatacttttaaaaagcattgatatctgttggcactatctg

SEQ ID NO: 350531 - DNA, 420 bp, Homo sapiens
aagaaaacaaatctgaagaatacgttttcttgagagaaaaaatatcatcaataatcttccactcggccctaaaattctatgattggtgacattaaagaacaacagcaacaaaatcagaaaatattccaggccaggccaccagggcaaatgcttgatctgttcatcgatggagggtctagcttgtctggatgtgaggctggacatgactcatacaactgatttttttttttccgtatcatatgggaagggtgtttaagggaagatcttcactttccaaggctctcttcccacaayatccacgtgaaaagatgtttcaagatgagctctcctcagcagagccagaaccatactggcttcagaccaaaaggaggactcctgtgttgtgtgagatggaatggactcatgttagaaaaattgaga

SEQ ID NO: 350532 - DNA, 455 bp, Homo sapiens
cctgtggtatattctagaagctttatggttggcctttttgcatctggaattggctttgtgtatgacataaggtcaaggtccagctttctccctatgactctccacaccatttattgattccacaccatttattgattccacaccacttattgattycacaccacttactgattacacactatttattgaaaacacagtcctttcccacactgcactacagcagcacctttgcagtaaatcaaattgtggaatatatgcaggtcagtttctagaatctctgctttgatccatgtatccttgaataccacactgttataactattgttggtcgatatgaatatcagataatatatgtcctctgacttttcccttgagggagtcttgagtcttgttggcctttggcatttccacataaatttccatatcagcttgtcaacctctcttacacagacaca

SEQ ID NO: 350533 - DNA, 455 bp, Homo sapiens
cctgtggtatattctagaagctttatggttggcctttttgcatctggaattggctttgtgtatgacataaggtcaaggtccagctttctccctatgactctccacaccatttattgattccacaccatttattgattccacaccacttattgatttcacaccacttactgattacacactatttattgaaaacacagtcctttcccacactgcactacagcagcacctttgcagtaaatcaaattgtggaatatatgcaggtcagtttctagaatctctgctttgatccatgtatccttgaataccacactgttataactattgttggtcgatatgaatatyagataatatatgtcctctgacttttcccttgagggagtcttgagtcttgttggcctttggcatttccacataaatttccatatcagcttgtcaacctctcttacacagacaca

SEQ ID NO: 350534 - DNA, 589 bp, Homo sapiens
ctcattacgtagaggaggggatgatgggtttccattggaggggctgttgtgctgagcccctggggcttgaacttgggccctgttgggaaccaagcagaggactctccttccccaccaggagtagctatctgctgaggaggctgcccagagagggccccgtgcaagttccctgtggggccagctgcctgatccccttggtgcaggcataggacagtcccttgtgcctctctggaaaagcggtcttccctggtggccatctcttgmggggtggtctattgctgggggcccttctcctcaggtcggagccatcatgggggtctctgtaggctcagttgctgttcccatccctgggtgtttcctctaagggacaatctgggatggactgaaccactgccccaggggcgggggacagtgtgattcacggaagggaagaggaagtacaaaggggccatgactcattgggtggcctggatgcgggaggacatcacaaagcaatgggcggggtggagctggggtctgcatccgccagccctgggctcagccttcagtctggccatgtccccgagtgggggccacgtcccccggtggg

SEQ ID NO: 350535 - DNA, 523 bp, Homo sapiens
atgctcattgcagcattttcaaaatagccaaaaggtggaaataacccatgtctgtcgatagatgaatggacaaacgcaatgtggtatatccattcaatggaacattattcctccataaaactaatgattactgatatatgctacaacacggatgccttaaaaacataccaagtgaaagaagccagacacaaaaggacaaatattttgtgataccatttatatgaagtatctagaatagacaaatttatagaggcagaaattagaatagatagaggttaccaggggttaggagaggcagggcggggtggggaatgggragtgactgtttaatggatacagaattcctacttggggtgatgaaaaagttttgaaaatagatagtgatgatagttgtatgacatcgtgaatgtatttaatgccactgaattctacacttaaaatgattaaaatgttatggtatatataatatctaacacaattttaaacaaaacaaaacaacaagtagtaaacctctcacttatcc

SEQ ID NO: 350536 - DNA, 523 bp, Homo sapiens
atgctcattgcagcattttcaaaatagccaaaaggtggaaataacccatgtctgtcgatagatgaatggacaaacgcaatgtggtatatccattcaatggaacattattcctccataaaactaatgattactgatatatgctacaacacggatgccttaaaaacataccaagtgaaagaagccagacacaaaaggacaaatattttgtgataccatttatatgaagtatctagaatagacaaatttatagaggcagaaattagaatagatagaggttaccaggggttaggagaggcagggcggggtggggaatgggaagtgactgtttaatggatacagaattcctacttggggtgatgaaaaagttttgaaaatagatagtgatgatagttgtatgacatcgtgaatgtatttaatgccactgaattctacacttaaaatgattaaaatgttatggtatatataatatctamcacaattttaaacaaaacaaaacaacaagtagtaaacctctcacttatcc

SEQ ID NO: 350537 - DNA, 541 bp, Homo sapiens
gcacagagtaggtgctcaatagctctgtgggtgaaagcttcaggagggacaactctttctatcctccctgaatggtaagatagcaccatgattaaatgmacagcttgcttgcttggagttcaaatcctgcctctgccacttaccagctacaggaccttaaataatctctctgtgccatagtttcctcaacataaatggggggaaacaatgggacccacctcatacagtgagtggggattgtacatgatgatgcaggtaccagggcttccatgggtgactggcacgcagtcacctgctcaaccaacattagctaacatcaccttccttccctccctccctccgtccctccctacctccctccctacttccctccttccctgtctatttccttccttccttccttctttccttccttcctcattccttccttcctcattccctccctccttcacttggtgcccaggatactattagtgcagagaggcatgtgggttgatttccaagagaaggggatataccagctgagttttgagggttgtgc

SEQ ID NO: 350538 - DNA, 611 bp, Homo sapiens
ggggagggaggggggaagaataaaaggagggcttcccatgctatagttagcagtcccgggttggcggtggcatcctgattgcagggcactgcctcctaaccagggcttcagaagggcagagctcagcgtgtaattaaataaaacccactgcacactgcggcccccttgtcactatcccactcttaggtttatttaataacctctgaactgggaggggagaatcatccaggaaacagggcttgggtcatttattttaaaattattggtacaaaaatatcctgggtggtgatttatgtgcagccaggggggaggaagtcagggactccccctccggcctagcgtccaggcctcatttgtctccggctctctaagttcctctcagtttccattatgatttcgagtcatagtagtgactttatatcrcaaataaatctccagaatagcacggaaatattatgtgtattaatagcgcctgtaaaaacatccgaaaacctcgtatccgctgcaagacgctcccccgggattgggaacagcctgggccggcctagcagatgtctccccaggggccgcgcaggggcccctgcccggcggcgcccccagccccagcccag

SEQ ID NO: 350539 - DNA, 580 bp, Homo sapiens
ggtacagctttcaataccttactatttaacatgccatttgttgtaggtttagtcatttctctttaatttgctaagagttcttatacacaggtgttaaattttaccaaatgctttttgtagcacctaccaagatgatcatttgggtttttttctcctttattttgttaatttttgagtattaaaccaaacttacatccctgaaataagttcagtttggtcataatattttaaccttgttaatggaattggtttgctggtatttttgtttaggatttataagatatatgtatatttataagaaatattgtctcatcttgtaatatccttttcaggttcaaattcattgggaaatggtctctctccctattcctggaagagtttctggaagattggtgttatttcttcctgaaatgtctagaaaattttaccaatggagctctatgtgcctagagttctctttgcraaaacaattttaattagaaatcaaatttatttgtagatataggacattgtgattgtttacctcttcttaggcaagtgttgggaagtggtgcttttctggaaaatggtccgttttctc

SEQ ID NO: 350540 - DNA, 538 bp, Homo sapiens
gttggatgagagattccattttcagcaacactcatggagtggctgctgggcctgctgtgtctcgcattgatcttgtcttacagggactcctgctcagtggaggtggggtgtctgagggccttcctggcatcaggggtgggcagggagactttggggtccactatatctatccgaccagccccatccttcatcccaaggtttatcgagtgaatgaatgaatggatgagcaagtgaggaagctgaccaccttcccctggccctgtgggaactcgggaacactggctggarcgtcctctcctgtagtacaaagcaggaggaggaggccattcttggtgcctccctgagagaggcctgagccaggggtggtggtgggtggggagctgccttcccagagaccccttgggccaaagcaggaacgacccccagggatgaccctctgcctctggggccctctggcctcctttggaagcaagttccaaaggcagaggcagacagggtgagcatttgcaaaaatgagcaaattcgctggaaaagaacg

SEQ ID NO: 350541 - DNA, 586 bp, Homo sapiens
aactcttggagcacataatatgcatcaatcacatacttggtgctgggaataccatatattgtgggtgaggcaaacaattattaataaataagccagtataatatagcaaagataacataaactcttccaacccacataattcatttattccatttccttaaatgaatacaaatcattataaatcccttcaagtgatgtcttcaacaaaaattgggtgtcataataccaggttgagtgcttcatgttgagtatcctaagtgtccagcagtaaacttgagtttacagtttggtgggcgctatagacagagaaacaggaaagtgtaagccagtatgatatttactgggggatgtgggaacataaattaagtatgtaacccaattttagagcccaggaaagctgcaagagaaggaartaacatctaagctgagatttgaatcccaatatatttgttcaggagaactgggaaaaggaatggtgagaaagagtaagtactaatcaaggaactgaataaaccttaatatgtattccaatcagaataaaggtaggtctgttctctctggttcctaattcaggctgtgctaatgt

SEQ ID NO: 350542 - DNA, 588 bp, Homo sapiens
gctgcattgcttagaacagatttacctggatttcttgaggttggagagttatttttaccatcacaggcatactgttactcaattctcttctagaacaaacaataacaataacaaaaacgaaaattctaaagagtggattaaaaaattatttaagtaaaascaactcattcactttttagagagttgcttatcattatgtggtgcatttttattttctataagaaatataagagcaacattattctatcttcaccatccaaccctcatccccacaattccccccaaaattgggaacatccagaataatctacttttaaactgaaatatctgtgcatgcaatagaggttttaagggcaggttctcaaaagaacatacgttccacagttcattctgaggcagtttttggtatttacaagtaggtgctgttcagttacttatgtaaagaactattctcagacagaatctaaaacaccctggggttaatagattgcagatactgtatggaaatcaacaattttgatggtccccaaatgtttccagaatgcattgccgtatttctgcaattctctagactaaaactaaatttta

SEQ ID NO: 350543 - DNA, 588 bp, Homo sapiens
gctgcattgcttagaacagatttacctggatttcttgaggttggagagttatttttaccatcacaggcatactgttactcaattctcttctagaacaaacaataacaataacaaaaacgaaaattctaaagagtggattaaaaaattatttaagtaaaagcaactcattcactttttagagagttgcttatcattatgtggtrcatttttattttctataagaaatataagagcaacattattctatcttcaccatccaaccctcatccccacaattccccccaaaattgggaacatccagaataatctacttttaaactgaaatatctgtgcatgcaatagaggttttaagggcaggttctcaaaagaacatacgttccacagttcattctgaggcagtttttggtatttacaagtaggtgctgttcagttacttatgtaaagaactattctcagacagaatctaaaacaccctggggttaatagattgcagatactgtatggaaatcaacaattttgatggtccccaaatgtttccagaatgcattgccgtatttctgcaattctctagactaaaactaaatttta

SEQ ID NO: 350544 - DNA, 561 bp, Homo sapiens
atataagttccataattaccaactgtatgttttccctgtctctactgtaaagttttcttctgttctatagtaaatactattaaagaaagtataatttattctaaaaataaagtttagacacaaattgaattcatcacacagaaagccaagactgtcaaatggaacactacataacacacagcaataattttagtctagatgtatacttttgcaaaataattagcttatgtagatgcctgaacatttctattcctcctttctctcataagttgctaaaattttatggggttttctataatagcctaatcaataataaataatataactagtgaagtccaatatactttcatatamatttatggaggcaagataatttgtttacacaaaataaaatatagcacatatatcgatataacaatatgccagttttgaatcagtgcttcacaaatgccataggaaaaaaataatcacaacactttcaacttatctggtgctcaaactcttcccagttcatgactaaagttattatctttacattataatttttattgttatggttcc

SEQ ID NO: 350545 - DNA, 575 bp, Homo sapiens
gagaaatgcctaagagcaaaagttgattakacataaaataagcagaggagaaatcaataaaaccaagtgctaattctttgaaaaaaaatctacaaaattggtaaaatgatacacaagcagataaagaaatagagaaattgcaaatgaccaatatcaagatagaatgagaagacatcactaaaggccctacagacattaataggataataacagaatagaattaataactttatgcaataaatttgacaacttagataaagtggacaaatttactgaaatataaaaatgctacaactgtctaagaaaatgtagaaaacgtgaaaagacctatattaaataaagaaattgaatttataattgaaaaccttaccttcaaagaaaagctaaagctcaaatgttctcattggtgaattatttcaaatattctagaaagacattataatgatctcttataaattctgtcagaaaataaaatggggagggataatatttcaactgaatttaggattccagtgttaacactgacctcaacattttttccaaacattgtggacatcacaagaagggagatccac

SEQ ID NO: 350546 - DNA, 485 bp, Homo sapiens
tgccacatatgtggatcatgttacctagagttgtccatcaaaaaaacagctcaaaygaaagcaaatacaccgcctagcatttttccttttctatttggagcttttattttaaattcatcattcatttccttaaccatagccttccatactgttatattaaccagattgtataatttctcaagtatgaagctctatttaggagttgtagtaatatggaacatttcccttgctactaaaaattggtagaaaatgtaatgcattaagtcaagcagagaaagacagattgcaaactgccagtgatttacatgatagaattaaagaatatacatagatatataaaaacacattctgcccaacttagaaattagaagcaccacaactaccagcaaaactataaatttataataagttatttattatctgttgagcaaattaataaaatagataacataaatagacattattttaatagtagtatctaaagt

SEQ ID NO: 350547 - DNA, 606 bp, Homo sapiens
tttgacgtttgccaatctgtaaaacattcaacacttttaaactaattttccttattcagtctcatttaatgtaggctatactacacttgaaagggtataggtaaaaatatcaggacgattgcagagtgagagaaaaagcattgtatatgacaatcatctgtgaattcaaatgcggggaaatagttcaccatttgctccagagacctcatcgcttkaactgtctgttctggtattacacttaggattccctattcagggaaattctcacaaaatatcagcaagaaaatgtatagctgacacgggggaaatttctaaatgtggacaaaaatatcaattgattgtctgaaagcaaatcttagcttgttaggcttcaatatgtgttgtataaaatatttctactgattattacttcaacatattacctaagtagatatttgaatgagatttatttatcagattgatttttttcaatgtgagaatacctcctaggaagtatgaagcttggaaataaattatgaaagttaaaattttttgtggctttacaaaacttttatttttttcaaaaatgtgagatgatttagttatatattcataccgaaactgata

SEQ ID NO: 350548 - DNA, 606 bp, Homo sapiens
tttgacgtttgccaatctgtaaaacattcaacacttttaaactaattttccttattcagtctcatttaatgtaggctatactacacttgaaagggtataggtaaaaatatcaggacgattgcagagtgagagaaaaagcattgtatatgacaatcatctgtgaattcaaatgcggggaaatagttcaccatttgctccagagacctcatcgctttaactgtctgttctggtattacacttakgattccctattcagggaaattctcacaaaatatcagcaagaaaatgtatagctgacacgggggaaatttctaaatgtggacaaaaatatcaattgattgtctgaaagcaaatcttagcttgttaggcttcaatatgtgttgtataaaatatttctactgattattacttcaacatattacctaagtagatatttgaatgagatttatttatcagattgatttttttcaatgtgagaatacctcctaggaagtatgaagcttggaaataaattatgaaagttaaaattttttgtggctttacaaaacttttatttttttcaaaaatgtgagatgatttagttatatattcataccgaaactgata

SEQ ID NO: 350549 - DNA, 606 bp, Homo sapiens
tttgacgtttgccaatctgtaaaacattcaacacttttaaactaattttccttattcagtctcatttaatgtaggctatactacacttgaaagggtataggtaaaaatatcaggacgattgcagagtgagagaaaaagcattgtatatgacaatcatctgtgaattcaaatgcggggaaatagttcaccatttgctccagagacctcatcgctttaactgtctgttctggtattacacttaggattccctattcagggaaattctcacaaaatatcagcaagaaaatgtatagctgacacgggggaaatttctaaatgtggacaaaaatatcaattgattgtctgaaagcaaatcttagcttgttaggcttcaatatgtgttgtataaaatatttctactgattattacttcaacatattacctaagtagatatttgaatgagatttatttakcagattgatttttttcaatgtgagaatacctcctaggaagtatgaagcttggaaataaattatgaaagttaaaattttttgtggctttacaaaacttttatttttttcaaaaatgtgagatgatttagttatatattcataccgaaactgata

SEQ ID NO: 350550 - DNA, 590 bp, Homo sapiens
cgcagcatccctagcagctgaaagggaaagagagagagagtgagagcgtgagaaaagagagagaaagaagaaccatgtgggataacacctttaggttccatggttaccccttaggctttcccaagggagattgtggatgggctattttaaagaaaacacatgagaagatggaacttatttgcaagattctatcatagttagcagctctgagatgtgttaggtttggggttagtaggataaacaggtgggctatatcacaaccaaccaaactgggagggcaagttttaactcagycaaaggtgatggggtgctactgcgtttcagaccacttatatcaggactaaaaagagatcccaaggcagtagcaactgtattcaacaaattttgaacaccttaatcctcacataagctctgtaatttggctgttgttacggtattgctatgaggctactgagactcaaagagttaagtagtttcccaaaatcatacagcaagtaaaaggcaaagttcaaatttaaataagtgtttgtccgaatccaaatcccatgcaccttttacgatgtaggaatttactctttttcgagagaaat

SEQ ID NO: 350551 - DNA, 663 bp, Homo sapiens
aaaaaacagcagtgtatgacccataggaaggaaaaggagagtcaacagaaatagtcttaaggaaacccagacacaagatttactagacaaaggccttaaatcagcctttataaacatgtttaaacaaataaaggaaaccatgtctaaacaattaaagaagtgtaaaaaataaaatctcatcaaatagaatatattaataaagaaatagaaaatatttttaaaaagaaccaaatggaaattctggagatgaaaaatacagtaactgaaatttaaaaatatagagaaactcagcaacattttgaactggcacaattaagaaacaatgaacttgaatataggtcaaatgatatctagttggaggaamaaaaaggaaaccataataacaagaaattaacagatgtttagcaacttgtggagcatcatcaagtaccggtatatgcacaatgggagttccagaaagaaaggagagcaatgagggagcagaaagaatattggaaaaaaaaaaaaaaaaaaaggctaacaacttgccaaatttgatgacaaacttgaatgtacatttccaagaaggtcaatgaaatctaagtaggataaactaaaaagttatacttgcaagcacaacataatcacataatttaaagcaaaagacaaagattattaaaagga

SEQ ID NO: 350552 - DNA, 590 bp, Homo sapiens
cgcagcatccctagcagctgaaagggaaagagagagagagtgagagcgtgagaaaagagagagaaagaagaaccatgtgggataacacctttaggttccatggttaccccttaggctttcccaagggagattgtggatgggctattttaaagaaaacacatgagaagatggaacttatttgcaagattctatcatagttagcagctctgagatgtgttaggtttggggttagtaggataaacaggtgggctatatcacaaccaaccaaactgggagggcaagttttaactcagccaaaggtgatggggtgctactgcgtttcagaccacttatatcaggactaaaaagagatcccaaggcagtagcaactgtattcaacaaattttgaacaccttaatcytcacataagctctgtaatttggctgttgttacggtattgctatgaggctactgagactcaaagagttaagtagtttcccaaaatcatacagcaagtaaaaggcaaagttcaaatttaaataagtgtttgtccgaatccaaatcccatgcaccttttacgatgtaggaatttactctttttcgagagaaat

SEQ ID NO: 350553 - DNA, 644 bp, Homo sapiens
gaaagtggagtgtaatttctcagcactctaataatcttataaaagtttgaggagtatttctgttattcataaatgtccttccaagtgatctatatgccatctctcagttaaatttatatttgcatttcatggaaactatcaatgatttcagtatgtttagagattctcacagataatgagttaatgtgtgacaatatctttaaccaatttcagtttgaactctttaaatattaaagatcattaaaatataaataaagatgcaaaaatcctggaaaaacaggtcctttttaatgatttgttttatgagatatggaaacaatccgatcagaatacaggtaaaaatctccaatatcaccaaagtaattatsaatttgccacttatatatgttaaagtatttattgttaacatgatgtttttcaaattatttacctgtgacaatctgaacttaaaatactatattatctgtgatattattgacttgtgcaaatgtctttgatatgagtttcaaatttcttactcactggtggcatagtctcattaaaaattaatctaggaacatatttaaaattcaaaaatatttgcgttaaatctggaatcttatataattctcctcaaaacaggtagaagggcaatattgtattga

SEQ ID NO: 350554 - DNA, 583 bp, Homo sapiens
ttatgaggctcatcataatttttggtacttacaacatgtccatgacttatttcttgaaaggcaaaaacaactgtcttacattttactaataactctcagtaagtttttagaaaatcacaagaaagagaaaatatatttaccrttaagtagaaatggatcatcatagaggtcgtcatctttattgtcttgaatttactatcggttgtgactatgagcatgtgtgaggagaaggatgatgggaaactagctggagcacatgtgaacagatgtgagggactcttcagtagcctggtttatcttcttttcagtgtgcttcttattcaaaagtagagctcattacgaaataacagaaagacacagaagactttggagtatgatctatgttaattttctatgtaatttaggggattgccgatatttttgagagggttggagctaagcatcagaagtagtcttcttcttaatataataagaacagagaaaagaaatgaagcatttttgacttaaaacatctgtttgtattcaaatgagcttttctgggatgtatatgagagacatatttttttcattaaaacacctattt

SEQ ID NO: 350555 - DNA, 583 bp, Homo sapiens
ttatgaggctcatcataatttttggtacttacaacatgtccatgacttatttcttgaaaggcaaaaacaactgtcttacattttactaataactctcagtaagtttttagaaaatcacaagaaagagaaaatatatttaccattaagtagaaatggatcatcatagaggtcgtcatctttattgtcttgaatttactatcggttgtgactatgagcatgtgtgaggagaaggatgatgggaaactagctggagcacatgtgaacagatgtgagggactcttcagtagcctggtttatcttcttttcagtgtgcttcttattcaaaagtagagctcattacraaataacagaaagacacagaagactttggagtatgatctatgttaattttctatgtaatttaggggattgccgatatttttgagagggttggagctaagcatcagaagtagtcttcttcttaatataataagaacagagaaaagaaatgaagcatttttgacttaaaacatctgtttgtattcaaatgagcttttctgggatgtatatgagagacatatttttttcattaaaacacctattt

SEQ ID NO: 350556 - DNA, 585 bp, Homo sapiens
aatccaaatgctaacaatcttagttttggggtacaaataaaaatccatcagtaggaggcaagtagaaatatattaccctttatcaaagaagaaacagacaaaaacatattgctatcccagtaggaacatttcaatttagatataagaatacctcacaaggtatatggacttttaaagtttcccacagattaagggttgcataattgcaatatttgaaagcttgggcagtaaaataaaataagatttataatctccaatatcaagtgtatcttaatgctaacccacaatctctcccattttccttggccagttcactttcccagggrttatttaaaatatcctttacttttttaaaacatcaactctatattccacagtaaatgacctcccacccaggcttcatcgataatgttagatagcatcttacttacttttcaatcacaaaattggttaaaacaacatttcatagacaaatttgtcagaaacatttatcaaattttattaacttgcagcaaagaaatcaaaatcatgacaaaaattttgtcatttcagagaatatgaaaatagggtaccatttcagagagg

SEQ ID NO: 350557 - DNA, 625 bp, Homo sapiens
ttaaaacatcaactctatattccacagtaaatgacctcccacccaggcttcatcgataatgttagatagcatcttacttacttttcaatcacaaaattggttaaaacaacatttcatagacaaatttrtcagaaacatttatcaaattttattaacttgcagcaaagaaatcaaaatcatgacaaaaattttgtcatttcagagaatatgaaaatagggtaccatttcagagagggtaggcaacatttcacttttataagtggctagttttgtttttcaggaagaaagttttgttttagttatctagtttaaaagaatgcatgtatgtgtgtatgagaaagagagaatatattttatatatccataaaagttattgaaaagactggtaacatgcttcaagatgacatcaatatcttctatcagaataataacagcatatagaaaaagcaaacgttaaagatatatctgtatatgaagttagaatttaaaagtttcacaccttagcattagtgcacaatacagtcaactaacaggaaaacataaaatggaatcagacagaaaacagaggtagaggaccaagcaataatatagttctaattttaaacatgccattattaaagattgt

SEQ ID NO: 350558 - DNA, 625 bp, Homo sapiens
ttaaaacatcaactctatattccacagtaaatgacctcccacccaggcttcatcgataatgttagatagcatcttacttacttttcaatcacaaaattggttaaaacaacatttcatagacaaatttgtcagaaacatttatcaaattttattaacttgcagcaaagaaatcaaaatcatgacaaaaattttgtcatttcagagaatatgaaaatagggtaccatttcagagagggtaggcaacatttcacttttataagtggctagttttgtttttcaggaagaaagttttgttttagttatctagtttaaaagaatgcatgtatgtgtgtatgagaaagagagaatatattttatatatccataaaagttattgaaaagactggtaacatgcttcaagatgacatcaatatcttctatcagaataataacagcatatagaaaaagcaaacgttaaasatatatctgtatatgaagttagaatttaaaagtttcacaccttagcattagtgcacaatacagtcaactaacaggaaaacataaaatggaatcagacagaaaacagaggtagaggaccaagcaataatatagttctaattttaaacatgccattattaaagattgt

SEQ ID NO: 350559 - DNA, 557 bp, Homo sapiens
tttttctgatcttacaaatgcaaataccttttccaatatcaccattgctctttctcttttgctaaatttaatatacacttatatctgtatttgtctagccacctatatatttatatataatttaacccttttattacttaatgatttattagcattgacaattcatgcggtttggctctgtgtctccacctaaatctcatttcgatttgtaatctccataagccccacatgtcaggtgaggatcaggtgggaggtgcttggatcatgggagccrtttccgtttcccccatgctgttctcatgatagtaagtgagttcttaaaagatctgatggttttataaggggctcttcccccttcattctcacacacactctcccacctaataaccaagttctctaacatcatctactaaaatctctacagtctgatctctgctaccatccctgcctctttatgggtcatggcttcctacccttgcccactcaagccacagtgtcctattaaaaatttcaggtagttgctataatcctttctatcacagaactgtttttcactt

SEQ ID NO: 350560 - DNA, 551 bp, Homo sapiens
ggcatggcttaaatgagtttaaacaatggccattagagcctcttacaaagtcagtgaacatgagctcatggtttttcccaaggatctatcatgactttatatggatagtcttaaaaagtttcatcttgtcttctgtctctttctactggttttatagtctcctcatagactaatctaaaaactctttgttcacctcttgcatactgttttcaatctgaccttgttctcctatgacagggaccattagttaggagtgtgttaatgagaataaatgccaagataaaaaggataacagaatctttattttattgccttataacagaatctttattttattgccttttctctgtcaatgaaaagagtcaaactctgtaaaatattygaagagacttattctgagccaaatatgagtgaccatgacctctgacgcagccattaggaggtcctgagaacatgtggccaaggtagtctgggtgcagcttggttttatacatgttagggaggcacgaggcatcaatcaaatacacttaagaaatacattggtttggtcc

SEQ ID NO: 350561 - DNA, 536 bp, Homo sapiens
agaatgaaggaatagggaactctgcaaaactatcaaatatcagattttttaaacattctatagattactccagatcatggaaaataaaagtagcttaattatgaaataagtatatcgttaatacctaaacctaaaggaaggcagtaccaagaatgcaactctaatacagagattatcaccakgaatgtcaactctgtaaggacattcggtagctaaattttctctgagaaaatctctcaggtctttgctgatgatgagaggctatgattttgttactttggaagaggataatgttttaattttgaagttaaaataagcctttcagatctaagcttaacatacacctttcctaaatacaagtcaaagcttctcaggataactataagaaactgtaatcacttttgaagtactgatcttcatgtaaacacaagaaatagctaattgttttacccatatttcacacttttaaaagggtaatgcaattatgtacagttggcgccacatattcatggattccacatcgtgaattcagtcaa

SEQ ID NO: 350562 - DNA, 598 bp, Homo sapiens
gaagaaaaactatctatcttcgytgacaatatgattctatacatagaaaatcctaaagactctgccaaaatggtcctataactgatgaatgatttcagtaaagtttcagaatacaaaatcaatatagaaaaattattagcatttctatacaacaataatattcaagctgagacccaaatcaagaagtaaccccatttatagtatctttgaaaacaaaataaaatatcaaggattacatctaaccacagaggtgaaagatctctacaagaagagctacaaaactgttaaaaaataatgtcaggtttttttatttgagatatttctttttttaaatgtaggaatttatcactataaaatttcctcttagaactgcttttggcttttggtgcatctcacaggttttagtatgtcgtgtttccatttctgtttgactcaagatatttttaattatcttgagaaatcagatattgaaagaaatcagagatgacataaacaaacgggaaaatattctatgctcatggattgaaagaatgaatatcattaaaatggccgtactgccccaaacaatctacatattcaatgttattcctatgaagct

SEQ ID NO: 350563 - DNA, 598 bp, Homo sapiens
gaagaaaaactatctatcttcgctgacaatatgattctatacatagaaaatcctaaagactctgccaaaatggtcctataactgatgaatgatttcagtaaagtttcagaatacaaaatcaatatagaaaaattattagcatttctatacamcaataatattcaagctgagacccaaatcaagaagtaaccccatttatagtatctttgaaaacaaaataaaatatcaaggattacatctaaccacagaggtgaaagatctctacaagaagagctacaaaactgttaaaaaataatgtcaggtttttttatttgagatatttctttttttaaatgtaggaatttatcactataaaatttcctcttagaactgcttttggcttttggtgcatctcacaggttttagtatgtcgtgtttccatttctgtttgactcaagatatttttaattatcttgagaaatcagatattgaaagaaatcagagatgacataaacaaacgggaaaatattctatgctcatggattgaaagaatgaatatcattaaaatggccgtactgccccaaacaatctacatattcaatgttattcctatgaagct

SEQ ID NO: 350564 - DNA, 598 bp, Homo sapiens
gaagaaaaactatctatcttcgctgacaatatgattctatacatagaaaatcctaaagactctgccaaaatggtcctataactgatgaatgatttcagtaaagtttcagaatacaaaatcaatatagaaaaattattagcatttctatacaacaataatattcaagctgagacccaaatcaagaagtaaccccatttatagtatctttgaaaacaaaataaaatatcaaggattacatctaaccacagaggtgaaagatctctacaagaagagctacaaaactgttaaaaaataatgtcaggtttttttatttgagatatttcttttttwaaatgtaggaatttatcactataaaatttcctcttagaactgcttttggcttttggtgcatctcacaggttttagtatgtcgtgtttccatttctgtttgactcaagatatttttaattatcttgagaaatcagatattgaaagaaatcagagatgacataaacaaacgggaaaatattctatgctcatggattgaaagaatgaatatcattaaaatggccgtactgccccaaacaatctacatattcaatgttattcctatgaagct

SEQ ID NO: 350565 - DNA, 564 bp, Homo sapiens
tctttcactatccattctgtattctctttaccttcatcagatatctgagctgatcatggtttttaccaagtggggtgatgcaaaagtttattcctaaaggatctgggccatgcatggtcctgctggattgggttgttgtcattttccaatgaccctaataacaggacacggtagcgcaaagaaactccctaagggagatccgatattccaaacacactcttctttacctccattgtgaagtagtagcccaatttccactcrgtaatcaggaacaatcaccccagtaaacatagtaactctttgcttgcctgttgaataagagacataaagagctcaaagtggctaagcaagagttttaatttcaaatttaatgaaattgctgttgtgtctcctggcggatggatttctccctttagaactgtgacttctaggtcagcagaacataaagttttgggaacagaaagcaaaaatgttgctagtaagtcactgggcataacaatgagtggttctactcccatttccaattcttagtttctagactcatgaatcctggctatgggagaa

SEQ ID NO: 350566 - DNA, 564 bp, Homo sapiens
tctttcactatccattctgtattctctttaccttcatcagatatctgagctgatcatggtttttaccaagtggggtgatgcaaaagtttattcctaaaggatctgggccatgcatggtcctgctggattgggttgttgtcattttccaatgaccctaataacaggacacggtagcgcaaagaaactccctaagggagatccgatattccaaacacactcttctttacctccattgtgaagtagtagcccaatttccactcagtaatcaggaacaatcaccccagtaaacatagtaactctttgyttgcctgttgaataagagacataaagagctcaaagtggctaagcaagagttttaatttcaaatttaatgaaattgctgttgtgtctcctggcggatggatttctccctttagaactgtgacttctaggtcagcagaacataaagttttgggaacagaaagcaaaaatgttgctagtaagtcactgggcataacaatgagtggttctactcccatttccaattcttagtttctagactcatgaatcctggctatgggagaa

SEQ ID NO: 350567 - DNA, 647 bp, Homo sapiens
atgaatcctggctatgggagaaatagcactgtgcattgcatgctgattcagagcatatagtcttctgggaaattttgtaccagtcctataaggtattactccctagctggcacagtaaataatgacttatttcctctttaggatgtggggaacatgataagacagtaaattccatgagcatggactcattactgcacttcttttgctatgaagtgaactacttgaccagatgctatgtgtggaatgtcaygacattagaaaaggcattctgtcagtccacagatggtagttttggcagaagcatggcatacagggaaggtgaatccatatctggagttagtgtcttttccactaagagcaacatcctattcttataagatagatagaggtggtcaattgtaatcagccttcaaccaggtagctgtctgatatcttcaggaaatggtgccagattggaaactcagaatttgtttctgatgcaggcagattgggcattcagaggtggccatagctaggttagtcttggcgagtggaaatctacttgcttattcaacatataacttcctcctagtgactatgatcactttgttcacaatccaactgagtgttaacagtagcggctggggaaagagaccaatgggtatcca

SEQ ID NO: 350568 - DNA, 583 bp, Homo sapiens
ttcaccactgtcctatagaaatatcccagaaaggggcagtagttgtcatgcagcctggcaggtcatgcccgcatatagcacagaaccatctgtaatccaagtttgtcttcttttgmtctggcaaatgaccatagaaaactcccatgaggggcaggatggaggagggagggcagtatagcaagagtggggaccatggatatttggactgcttcatgtaacttattcaggacttgctcaggacaaattacatatttaccatgttcatttgatgatggagtcttgctgtgcatgtacaactttatggctttgcgggtcagataataccctgtgcatgctgggctgctcaggtcacagggtaatttagtggcccatggtctctaagcctcagtaggaagccatacctgtttctcaaaataagagaagttatctgcagagaatggaagggctttgcttcaaaatcctaaaggcctacactgtattcatttataggagactgccaaaggctttaaacaacatccctatctgctgttgacatgtcaaaaaatattggatctgctggatcatattccccaagttgcagacc

SEQ ID NO: 350569 - DNA, 500 bp, Homo sapiens
ttgcagtgagccgagatcgcgctgctgcactccagcctgggtgacagagcgagactccgtctcaaaaaaaaaaaaaaaaaaaaaaagaaagaaattaaatacattgcacatgtattttaagttaattctgccattttttcaaaaagaaattgagccagatattaaataacaacaaaaactgtaggaattataaaaccttttgtgttttgttcactacaggttttgtcactgaagaactaaatgtaagtaggtatatgtacacagcacaatgatagtatctgctcaaaactgtatttggtaatagccatattgctctcttgagcaaaaattttagccatgcctaacaacactaatttgccagaaacattctaaagatcgattaaatgtatcaaaacatttggagcctagttgatatatgtgattatgagtyaatttaaactattacagaataacaacactggtttttaacaatacaaataaagcaaaaatgtacacaacag

SEQ ID NO: 350570 - DNA, 625 bp, Homo sapiens
catatctgtgtatatgtaggtcttgtcctcatacgtagcatcagcaacagcagaaagaaaatatattaaaaagctatattttaaattattaaaattttatataatttaagttatccaaattataataactttttctaaatattttcacaccaaaactcttccttagaggtaactatattaaaagmttttatgcatctaagacttttgtttcttaaagcaatatcatattgatgctaatacacaagtaggtagcatttagatggacaagaacatatatttttttttagaaaaggcgatcattcaatgcatattttctgaagtgttttaaaattaacaatagctatcacatactctttttaatatataaatattcatttttatagatattaatttattgatgattattacttattgggctgtttcaaaacattggaatcttaaacagagttgcagaaatattctttatgcacataggtttgtatgtatatatatctttgcatactcatgctaatgtatctgtaggaaaaattcttgatagtcctattagtgaaaaattaaaataagtatggattgaattaatttgtatagttaattaatcctgttctatgtatcagttgttcacaca

SEQ ID NO: 350571 - DNA, 534 bp, Homo sapiens
atgctacagtacaagccactagcccgcctctcagaacctctcatttcctttccatcgtggaaatctatcctcaaggaaataacttctcagtgttccatctgctaytctactacttctcagagattattcaggccccctcccttccctacacatcaagctcaaggatttgcccccgcctaggactggcaaattagctttactcaacatgccccaagtcaggaaactaaaatacctcttggtctagatagacactttcactggataggtagaggcctttcccacagggtctaagaaggccaccacggtcatttcttcccttctgtcagacacaattactcggtttggccttcccacctctacgcagtttgataacagaccagcctttattagtcaaatcagccaagcagtttttcaggctcttggtattccgtgaaatctttatatcccttacagtcctcagtcttcaggaaaagtagaacagactaaaggtcttttaaaaacacacctcaccaagctcagccaccaacttaaaaa

SEQ ID NO: 350572 - DNA, 534 bp, Homo sapiens
atgctacagtacaagccactagcccgcctctcagaacctctcatttcctttccatcgtggaaatctatcctcaaggaaataacttctcagtgttccatctgctactctactacttctcagagattattcaggccccctcccttccctacacatcaagctcaaggatttgcccccgcctaggactggcaaattagctttactcaacatgccccaagtcaggaaactaaaatacctcttggtctagatagacactttcactggataggtagaggcctttccyacagggtctaagaaggccaccacggtcatttcttcccttctgtcagacacaattactcggtttggccttcccacctctacgcagtttgataacagaccagcctttattagtcaaatcagccaagcagtttttcaggctcttggtattccgtgaaatctttatatcccttacagtcctcagtcttcaggaaaagtagaacagactaaaggtcttttaaaaacacacctcaccaagctcagccaccaacttaaaaa

SEQ ID NO: 350573 - DNA, 558 bp, Homo sapiens
cttggtattccgtgaaatctttatatcccttacagtcctcagtcttcaggaaaagtagaacagactaaaggtcttttaaaaacacacctcaccaagctcagccaccaacttaaaaaggaatagacaatacttttacctctttcttttctcagaattcaggcctgtcctcggaatgctacagggtacagcccatttgagctcctgtatagacgctcctttttattaagccccagtctcattccagacaccagaccaacttagactgtgccccaaaaaacttgtcatccctactatcttgtctagtcatactcctagtcaccgttctcaactactcatacatgccctgctcttgtttacactgccggtttacactgtttctccaagmcatcacagctgatatctcctggtgctatccccaaactcccactcttaactcttgaagtaaacaaataatctttgctggcaggactatgctgaatctccttaggcactctctaattagatgtcctgggtcctcccaattcttagacctttaatacctgtttttctcctcctctt

SEQ ID NO: 350574 - DNA, 612 bp, Homo sapiens
tttttgaaaagattatcaaaattgataaattgttaactacacagacttaggaaaaaagagaaaacaataattacaaaaatcaaaaatgaaggagagcatttcatttaattctcatagtaactctttgaagtaaatacattattgttcctattttacatattaagaaactgagttttatagctgttcaataaattaccaaactaatacatttgaaagaaatacaggacaactattatatgtcagttactattccaagcactagaaatagaatggtgaatgacaaaggcaaaactttctgttctcatagaacttatattctagccagggtaacaagaaaaaaaattgatagcataccttctctctctctctctcwcacacacacacacacacacgcacacacatacactagatcagaaagtaataagtggcataaaaataaataaagtagaaagaatagatactagaggtctgaattgggaatgcaatgtaatttcagataaagtcgtcagcagaaacgccgctgagacaataacatttaagcaaagattggaaggaagtgagcatgtgattcatgattatagtaggagaaataagtttccagcaggaaaaaaa

SEQ ID NO: 350575 - DNA, 621 bp, Homo sapiens
ttgatagcataccttctctctctctctctcacacacacacacacacacacgcacacacatacactagatcagaaagtaataagtggcataaaaataaataaagtagaaagaatagatactagaggtctgaattgggaatgcaatgtaatttcagataaagtsgtcagcagaaacgccgctgagacaataacatttaagcaaagattggaaggaagtgagcatgtgattcatgattatagtaggagaaataagtttccagcaggaaaaaaacaaactgaatttgtttctggcaatttttaggagagcaaaaaagaacagtgaaatggagtatatccagggaaaataagagaaataggttatattaaaaggttatgggagaaaactgatgatgtagagccttgtaatctagtggaaggttttaaggagatctataatacaatccgacttatgttttaatcgaatgatactgaattctctgttgaataggttgaagaatacagcaacacaggagattatgtgtcaagaaagtaagttaagagatcatctagagggcgatagcaacaatccaggtgagagataacggtggcttggagcaggatggtaggttggaagtgatgagaa

SEQ ID NO: 350576 - DNA, 589 bp, Homo sapiens
cctacaacaaactgctgtaaaacatattggcttaatagcaaaccattgtttgcttattgttcatggttgtctgggttgatgtgttaggctgggttctgcaggagtggcttgtttctactccatgtaatcayctgggctcctttatatctctggatctcatctggtaacagtggcatagctgaggcctctgctcacaaggtctcccatccttctggaggctaactttggattgtttccatggaggaaggtttccaatacagagagtgcaaactctgcaatgtttcctgaggtttatgctcagaactcctcaagaacatttctatcatatgctattggtcaaagttggcaacaagcacagttcagaaaaaagcacattggaaattaaaactgctttgcaaagagttacaagaaatgtgtgagaattctttgcaatctgccctatttagtgaagaaagtgcttcagcaaaaggaaatggcaaactgtctaatgttatatcaggtaagatgaaggtcacaagtacacttttcattaatacaattaaaagctcagcaaaattctctataaagagaattagatcatggggaatac

SEQ ID NO: 350577 - DNA, 570 bp, Homo sapiens
tacaatataaatgtatttttaaaaggcttaaaattttaaagttgagaaaaatataaaagatttgaatatataaaattacatttgattttactatttaaaaatatacttacatatgacttgaagagtagcaagttcacataaaagaacactaagtgattattttttccattaaggaaaaagatagataaattatttttaacactgttttttcaatcaagtgaaatttagtgtataataatgagagactcttagatggctattgctacaaaaagaagaaaaaaattacttttggaaaaatatcttctttcttacatttgtaataactagagacaaataatatcttgttataagattatcaaaggaagactactgtatttaagctatgaaaaataatcactatattagcactataatttttaaaactacgtacttaatatttcaaattakataaccaatactgattaaagtaaaaaatataaattaaacaatgcagataatgaaaaaaaattttaaaaaattccactcgtgccagataaccagtgataacattttaagtaaatcatttgaaac

SEQ ID NO: 350578 - DNA, 485 bp, Homo sapiens
ctaatatatttctgaacaacttcatcagagtaactgtcttatagatgttggctactgttactgccccatgtgcaagccacamatatcatgctaaattaattgaattatttttaggaacacctccttagattgaagcagcatctatcacaacaaaggtgtgcatcaaatcttagctattagcattttaaaactattattagtcttacaaataaagaaatttgctatgttgtaaaatcttagcaataaaaatatttttataggaaaatataattcctttcaacattaaacaaatcaactatttttgcagtatatatagaatctaataagcccttgaccctaaatattccactatacaatagttgccaatgttatcttatgagagctgtgagaaaaccatttctcgttgttcatcagaaaggtgagtgtgtgttcaacatgatttttgcataagtaaatgcccattgcagagtagaaactgtggattc

SEQ ID NO: 350579 - DNA, 485 bp, Homo sapiens
ctaatatatttctgaacaacttcatcagagtaactgtcttatagatgttggctactgttactgccccatgtgcaagccacacatatcatgctaaattaattgaattatttttaggaacacctccttagattgaagcagcatctatcacaacaaaggtgtgcatcaaatcttagctattagcattttaaaactattattagtcttacaaataaagaaatttgctatgttgtaaaatcttagcaataaaaatatttttataggaaaatataattcctttcaacattaaacaaatcaactatttttgcagtatatatagaatctaataagcccttgaccctaaatattccactatacaatagttgccaatgttatcttatgagagctgtgagaaaaccatttctcgttgttcatcagaaaggtragtgtgtgttcaacatgatttttgcataagtaaatgcccattgcagagtagaaactgtggattc

SEQ ID NO: 350580 - DNA, 485 bp, Homo sapiens
ctaatatatttctgaacaacttcatcagagtaactgtcttatagatgttggctactgttactgccccatgtgcaagccacacatatcatgctaaattaattgaattatttttaggaacacctccttagattgaagcagcatctatcacaacaaaggtgtgcatcaaatcttagctattagcattttaaaactattattagtcttacaaataaagaaatttgctatgttgtaaaatcttagcaataaaaatatttttataggaaaatataattcctttcaacattaaacaaatcaactatttttgcagtatatatagaatctaataagcccttgaccctaaatattccactatacaatagttgccaatgttatcttatgagagctgtgagaaaaccatttctcgttgttcatcagaaaggtgagtgtktgttcaacatgatttttgcataagtaaatgcccattgcagagtagaaactgtggattc

SEQ ID NO: 350581 - DNA, 616 bp, Homo sapiens
ctgggtgtggttgctcaggcctgtaatcccagcactttgggaggccgaagtgggcagaatgctttagctcaggagtttcagaccagcctgggaaaaatggtgaaatcctgtctgtattaaaaaataataatgattaaaaaaaagaaaaacaaataaggagtcacaagaaaagatcatgccttttctatcctgattcaggacaagtgttatccattgtctatgagtttctttttgaaacaaataatggagtttatcaggtgtttcaaattataatttatttaacatatcttgccaattcacttacacagaattgtttctaaaggttgaaagcctgaataatagaaattagttttaatgaaatgcaagtgttttccaaatgcaggacatggactacataaaatgatttgaagaggtcccaagtatgttgaattccagattttaggcctagactgtctgayatagtaggtctgtaataggttctgccaattgtatttttaaatatttccccaagggattctgataagcgttgaatttggtgaaccatttgaatgatgaatcttgaaatgtaggttataatgaagaaggagaggatttttgttttgtttttataataaat

SEQ ID NO: 350582 - DNA, 616 bp, Homo sapiens
ctgggtgtggttgctcaggcctgtaatcccagcactttgggaggccgaagtgggcagaatgctttagctcaggagtttcagaccagcctgggaaaaatggtgaaatcctgtctgtattaaaaaataataatgattaaaaaaaagaaaaacaaataaggagtcacaagaaaagatcatgccttttctatcctgattcaggacaagtgttatccattgtctatgagtttctttttgaaacaaataatggagtttatcaggtgtttcaaattataatttatttaacatatcttgccaattcacttacacagaattgtttctaaaggttgaaagcctgaataatagaaattagttttaatgaaatgcaagtgttttccaaatgcaggacatggactacataaaatgatttgaagaggtcccaagtatgttgaattccagattttaggcctagactgtctgatatagtaggtctgtaataggttctgccaattgtatttttaaatatttccccaagggattctgataagcrttgaatttggtgaaccatttgaatgatgaatcttgaaatgtaggttataatgaagaaggagaggatttttgttttgtttttataataaat

SEQ ID NO: 350583 - DNA, 612 bp, Homo sapiens
gctgcagccttctgctagaaaaaatgaccagaaaatcattctttatccttttcttctcaacaaacctaagtggataaggtttctctttcccttatgagctgccaggtggcccttttgttaatttctagagtttaaaaagaagccgttggyatttcacttgatttgtcctgtgttaaaatgttcaaatcaatgaggctgaataagaccctataggcatctctaaacttcaaattattgtagttaaggccttgaggtctattgtcatatgaagcgatgtaataaaaatatatacctagaaatgacttacaaagagagtaagtcaaatgtagaacactattcacttctcctgctaacaagcacttgacagttaaacctattctatagataaagccacaaattgtattatgatttaattcaaacaaaataaatagaaatttaaaaattagaaattttcacttatttgtaaaaactttatagtcagaaatttaacagtcagataagtatgtgcctcatgggcagaacatggcactgggaatcttaggcaaacaccgaagaagttaaagatatgattcataaatttaatgactcataatctagttggagaacaaccag

SEQ ID NO: 350584 - DNA, 612 bp, Homo sapiens
gctgcagccttctgctagaaaaaatgaccagaaaatcattctttatccttttcttctcaacaaacctaagtggataaggtttctctttcccttatgagctgccaggtggcccttttgttaatttctagagtttaaaaagaagccgttggcatttcacttgatttgtcctgtgttaaaatgttcaaatcaatgaggctgaataagaccctataggcatctctaaacttcaaattattgtagttaaggccttgargtctattgtcatatgaagcgatgtaataaaaatatatacctagaaatgacttacaaagagagtaagtcaaatgtagaacactattcacttctcctgctaacaagcacttgacagttaaacctattctatagataaagccacaaattgtattatgatttaattcaaacaaaataaatagaaatttaaaaattagaaattttcacttatttgtaaaaactttatagtcagaaatttaacagtcagataagtatgtgcctcatgggcagaacatggcactgggaatcttaggcaaacaccgaagaagttaaagatatgattcataaatttaatgactcataatctagttggagaacaaccag

SEQ ID NO: 350585 - DNA, 612 bp, Homo sapiens
gctgcagccttctgctagaaaaaatgaccagaaaatcattctttatccttttcttctcaacaaacctaagtggataaggtttctctttcccttatgagctgccaggtggcccttttgttaatttctagagtttaaaaagaagccgttggcatttcacttgatttgtcctgtgttaaaatgttcaaatcaatgaggctgaataagaccctataggcatctctaaacttcaaattattgtagttaaggccttgaggtctattgtcatatgaagcgatgtaataaaaatatatacctagaaatgacttacaaagagagtaagtcaaatgtagaacactattcacttctcctgctaacaagcacttgacagttaaacctattctatagataaagccacaaattgtattatgatttaattcaaacaaaataaatagaaatttaaaaattagaaattttcacttatttgtraaaactttatagtcagaaatttaacagtcagataagtatgtgcctcatgggcagaacatggcactgggaatcttaggcaaacaccgaagaagttaaagatatgattcataaatttaatgactcataatctagttggagaacaaccag

SEQ ID NO: 350586 - DNA, 603 bp, Homo sapiens
ggagcaaactttgctcttaatcttaaagccatggtataagagggaaataattgatggtataaaacaggtaagtttgaagaacttgtagagcacaggagaaagaaaaataccaagccctctggagtcgtgatgggggccctaaatgtataggttctgtgaaagcacacttggcaggtattaaaattataagatacatacttttggtgtttctgattatggcttctgaattccaataccctaattttgacatactttaattaagtcaagataaactgaagctgttttggaaataaactttaaggtgagaaggacttcagtacatccaagttgtaaccactggaaatgagtgataaagttatatctaatgaaactgaataatggattaattatgaatcataatattacttcttgcttgtatcttttcataaataacaaatctaaaatttaacatttattttctaagattttagcttttgatattttggaatgagggttttttagtatggcagtgatttacatctgcaattatacatctgtattaaaattttgacattaaygttaactagcataatttttgccatgtttctacaaattcagttttga

SEQ ID NO: 350587 - DNA, 466 bp, Homo sapiens
gtactattagaatgtactattctaaaactaatcttaaggtagcttgagtggctatattagtattagaaaaagtagattccagggcatatatgtatatagattacctattatacctaataaaatgtgcatgctatgtaatagttgttacactgtattgtttatggaataatgaccagaaaaataatctgyacatgttaagtgcagatgcaatttttttctgaaatattttcagttcaaaattggttcgtgttgtttttttcagtttttctcttacttcaagggtatggatcatacttctaaggatatagtcccatatatacttctaggatacttctatataccctatatacttctaggatatagtcccatacttctaggatatagctgagagcatagaatatttgccaagcctactcattcagttaactattgaaacgtgttcagtgctttcacacagtctaaactg

SEQ ID NO: 350588 - DNA, 612 bp, Homo sapiens
ctacttctgcagggttccacagaagtctccagtcttcaaatcttcagtgtatraaagcacagattcctgaaagaatggcctcaaatgaccaggagtaggagctctctatatccctgctcctgaaaaacaagctaactggagtctccatcacctgccaccagctatacacactaccaactacccaactgaactccatgactgatttgccagctaatcatgcccctgacccagcccacatggacatgggaaggacatcagtgaactgtgaaaagaggcagaggtgaggagacacctgccctgtgccacacatctatgtagttcagcaatttccagccccttagtactccaggggctctaagccacccctttgtaagtcaggatggaagtagatgacaccacatttctatctgctgtagacattcttcccagtgtctcaatatgttttggcatctttcagtaaaaatcttcaagtttgtcagtccttgatttaaaaaaaaaaaagcagcaaaatttttagagctcccttgaaccttctattttaatgtgcctttgtagataattcccaacatcttgtgtccttcatttttataatttatctttatcaaacttgtc

SEQ ID NO: 350589 - DNA, 612 bp, Homo sapiens
ctacttctgcagggttccacagaagtctccagtcttcaaatcttcagtgtatgaaagcacagattcctgaaagaatggcctcaaatgaccaggagtaggagctctctatatccctgctcctgaaaaacaagctaactggagtctccatcacctgccaccagctatacacactaccaactacccaactgaactccatgactgatttgccagctaatcatgcccctgacccagcccacatggacatgggaaggacatcagtgaactgtgaaaagaggcagaggtgaggagacacctgycctgtgccacacatctatgtagttcagcaatttccagccccttagtactccaggggctctaagccacccctttgtaagtcaggatggaagtagatgacaccacatttctatctgctgtagacattcttcccagtgtctcaatatgttttggcatctttcagtaaaaatcttcaagtttgtcagtccttgatttaaaaaaaaaaaagcagcaaaatttttagagctcccttgaaccttctattttaatgtgcctttgtagataattcccaacatcttgtgtccttcatttttataatttatctttatcaaacttgtc

SEQ ID NO: 350590 - DNA, 612 bp, Homo sapiens
ctacttctgcagggttccacagaagtctccagtcttcaaatcttcagtgtatgaaagcacagattcctgaaagaatggcctcaaatgaccaggagtaggagctctctatatccctgctcctgaaaaacaagctaactggagtctccatcacctgccaccagctatacacactaccaactacccaactgaactccatgactgatttgccagctaatcatgcccctgacccagcccacatggacatgggaaggacatcagtgaactgtgaaaagaggcagaggtgaggagacacctgccctgtgccacacatctatgtagttcagcaatttccagccccttagtactccaggggctctaagccacccctttgtaagtcaggatggaagtagatgacaccacatttctatctgctgtagacattcttcccagtgtctcaawatgttttggcatctttcagtaaaaatcttcaagtttgtcagtccttgatttaaaaaaaaaaaagcagcaaaatttttagagctcccttgaaccttctattttaatgtgcctttgtagataattcccaacatcttgtgtccttcatttttataatttatctttatcaaacttgtc

SEQ ID NO: 350591 - DNA, 616 bp, Homo sapiens
attctatccacagactcactcccgtttgtattatgaaaacacacgccaataggacataaaaagaagcaagagtactgggctttaccatgagttcaaatctcatttctgccaattcctatgtctaaaaaaaagcttcstaatctctttgagcctcacattctctatctagagaatcacttgaccagaatgttcaacgcagagaaaaatactagaaggtattttaattcattccaagattccttaaaattctgtaattctatgtcctcttgattctgtctatagaaaaacttggaatacatgggcagcagagtttgaaaaaataatagaacaaaagaaacaccaagaaaaacagagaagaaagttttaaaaaatgaagacaagattatataaaagtcatggaaaaagcaacaagactaaaaaatgtattatggaagtaagcagaaatacttgcctaaatggaaaaccaaactgggaagtcaaataatttgtctctaagacttgcctaaacttgctttggtaaaacttacagtcctatggccaaagctaagtcagatctgccctagagcctttgaaggtaaaaataagatactggttaccactgaaatcgtcaaattta

SEQ ID NO: 350592 - DNA, 616 bp, Homo sapiens
attctatccacagactcactcccgtttgtattatgaaaacacacgccaataggacataaaaagaagcaagagtactgggctttaccatgagttcaaatctcatttctgccaattcctatgtctaaaaaaaagcttcgtaatctctttgagcctcacattctctatctagagaatcacttgaccagaatgttcaaygcagagaaaaatactagaaggtattttaattcattccaagattccttaaaattctgtaattctatgtcctcttgattctgtctatagaaaaacttggaatacatgggcagcagagtttgaaaaaataatagaacaaaagaaacaccaagaaaaacagagaagaaagttttaaaaaatgaagacaagattatataaaagtcatggaaaaagcaacaagactaaaaaatgtattatggaagtaagcagaaatacttgcctaaatggaaaaccaaactgggaagtcaaataatttgtctctaagacttgcctaaacttgctttggtaaaacttacagtcctatggccaaagctaagtcagatctgccctagagcctttgaaggtaaaaataagatactggttaccactgaaatcgtcaaattta

SEQ ID NO: 350593 - DNA, 616 bp, Homo sapiens
attctatccacagactcactcccgtttgtattatgaaaacacacgccaataggacataaaaagaagcaagagtactgggctttaccatgagttcaaatctcatttctgccaattcctatgtctaaaaaaaagcttcgtaatctctttgagcctcacattctctatctagagaatcacttgaccagaatgttcaacgcagakaaaaatactagaaggtattttaattcattccaagattccttaaaattctgtaattctatgtcctcttgattctgtctatagaaaaacttggaatacatgggcagcagagtttgaaaaaataatagaacaaaagaaacaccaagaaaaacagagaagaaagttttaaaaaatgaagacaagattatataaaagtcatggaaaaagcaacaagactaaaaaatgtattatggaagtaagcagaaatacttgcctaaatggaaaaccaaactgggaagtcaaataatttgtctctaagacttgcctaaacttgctttggtaaaacttacagtcctatggccaaagctaagtcagatctgccctagagcctttgaaggtaaaaataagatactggttaccactgaaatcgtcaaattta

SEQ ID NO: 350594 - DNA, 616 bp, Homo sapiens
attctatccacagactcactcccgtttgtattatgaaaacacacgccaataggacataaaaagaagcaagagtactgggctttaccatgagttcaaatctcatttctgccaattcctatgtctaaaaaaaagcttcgtaatctctttgagcctcacattctctatctagagaatcacttgaccagaatgttcaacgcagagaaaaatactagaaggtattttaattcattccaagattccttaaaattctgtaattctatgtcctcttgattctgtctatagaaaaacttggaatacatrggcagcagagtttgaaaaaataatagaacaaaagaaacaccaagaaaaacagagaagaaagttttaaaaaatgaagacaagattatataaaagtcatggaaaaagcaacaagactaaaaaatgtattatggaagtaagcagaaatacttgcctaaatggaaaaccaaactgggaagtcaaataatttgtctctaagacttgcctaaacttgctttggtaaaacttacagtcctatggccaaagctaagtcagatctgccctagagcctttgaaggtaaaaataagatactggttaccactgaaatcgtcaaattta

SEQ ID NO: 350595 - DNA, 411 bp, Homo sapiens
acatgggcagcagagtttgaaaaaataatagaacaaaagaaacaccaagaaaaacagagaagaaagttttaaaaaatgargacaagattatataaaagtcatggaaaaagcaacaagactaaaaaatgtattatggaagtaagcagaaatacttgcctaaatggaaaaccaaactgggaagtcaaataatttgtctctaagacttgcctaaacttgctttggtaaaacttacagtcctatggccaaagctaagtcagatctgccctagagcctttgaaggtaaaaataagatactggttaccactgaaatcgtcaaatttattaggactaaccacattctaacaataaacttaaatgagagttcaaggtatttaaactctcattaatttagaagttaatcaaattaatgaa

SEQ ID NO: 350596 - DNA, 411 bp, Homo sapiens
acatgggcagcagagtttgaaaaaataatagaacaaaagaaacaccaagaaaaacagagaagaaagttttaaaaaatgaagacaagattatataaaagtcatggaaaaagcaacaagactaaaaaatgtattatggaagtaagcagaaatacttgcctaaatggaaaaccaaactgkgaagtcaaataatttgtctctaagacttgcctaaacttgctttggtaaaacttacagtcctatggccaaagctaagtcagatctgccctagagcctttgaaggtaaaaataagatactggttaccactgaaatcgtcaaatttattaggactaaccacattctaacaataaacttaaatgagagttcaaggtatttaaactctcattaatttagaagttaatcaaattaatgaa

SEQ ID NO: 350597 - DNA, 620 bp, Homo sapiens
attatggaagtaagcagaaatacttgcctaaatggaaaaccaaactgggaagtcaaataatttgtctctaagacttgcctaaacttgctttggtaaaacttacagtcctatggccaaagctaagtcagatctgccctagagcctttgaaggtaaaaataagatactggttaccactgaaatcgtcaaatttattaggactaaccacattctaacaataaacttaaatgagagttcaaggtatttaaactctcattaatttagaagttaatcaaattaatgaatcygattgatctgattcagacctatactttgatccaagggctgcacagatatctatcaatctatgctgaggagcaagagaaaggatttggaaggcagacaggctgatggtcaaactgtaggccagctactttgttaactatgggatcatgaggcaaataatcagctctaatccatagttgtttatttaacagtaggttataggaacacagatgttatgatggctttatgagatgataaatgcatagaacatattaggatgtctagcccagaatacaacactcaacagatattagtttcttccatctctcctttcttagttaacataattttttaaatc

SEQ ID NO: 350598 - DNA, 620 bp, Homo sapiens
attatggaagtaagcagaaatacttgcctaaatggaaaaccaaactgggaagtcaaataatttgtctctaagacttgcctaaacttgctttggtaaaacttacagtcctatggccaaagctaagtcagatctgccctagagcctttgaaggtaaaaataagatactggttaccactgaaatcgtcaaatttattaggactaaccacattctaacaataaacttaaatgagagttcaaggtatttaaactctcattaatttagaagttaatcaaattaatgaatctgattgatctgattcagacctatactttgatccaaggrctgcacagatatctatcaatctatgctgaggagcaagagaaaggatttggaaggcagacaggctgatggtcaaactgtaggccagctactttgttaactatgggatcatgaggcaaataatcagctctaatccatagttgtttatttaacagtaggttataggaacacagatgttatgatggctttatgagatgataaatgcatagaacatattaggatgtctagcccagaatacaacactcaacagatattagtttcttccatctctcctttcttagttaacataattttttaaatc

SEQ ID NO: 350599 - DNA, 620 bp, Homo sapiens
attatggaagtaagcagaaatacttgcctaaatggaaaaccaaactgggaagtcaaataatttgtctctaagacttgcctaaacttgctttggtaaaacttacagtcctatggccaaagctaagtcagatctgccctagagcctttgaaggtaaaaataagatactggttaccactgaaatcgtcaaatttattaggactaaccacattctaacaataaacttaaatgagagttcaaggtatttaaactctcattaatttagaagttaatcaaattaatgaatctgattgatctgattcagacctatactttgatccaagggctgcacagatatctatcaatctatgctgaggagcaagagaaaggatttggaaggcagrcaggctgatggtcaaactgtaggccagctactttgttaactatgggatcatgaggcaaataatcagctctaatccatagttgtttatttaacagtaggttataggaacacagatgttatgatggctttatgagatgataaatgcatagaacatattaggatgtctagcccagaatacaacactcaacagatattagtttcttccatctctcctttcttagttaacataattttttaaatc

SEQ ID NO: 350600 - DNA, 620 bp, Homo sapiens
attatggaagtaagcagaaatacttgcctaaatggaaaaccaaactgggaagtcaaataatttgtctctaagacttgcctaaacttgctttggtaaaacttacagtcctatggccaaagctaagtcagatctgccctagagcctttgaaggtaaaaataagatactggttaccactgaaatcgtcaaatttattaggactaaccacattctaacaataaacttaaatgagagttcaaggtatttaaactctcattaatttagaagttaatcaaattaatgaatctgattgatctgattcagacctatactttgatccaagggctgcacagatatctatcaatctatgctgaggagcaagagaaaggatttggaaggcagayaggctgatggtcaaactgtaggccagctactttgttaactatgggatcatgaggcaaataatcagctctaatccatagttgtttatttaacagtaggttataggaacacagatgttatgatggctttatgagatgataaatgcatagaacatattaggatgtctagcccagaatacaacactcaacagatattagtttcttccatctctcctttcttagttaacataattttttaaatc

SEQ ID NO: 350601 - DNA, 392 bp, Homo sapiens
tctagcccagaatacaacactcaacagatattagtttcttccatctctcctttcttagttaacataattttttaaatctatgaaatcttacctgactgcagattcatcagaaattccaacatctattaaagaaaaaggtaaaatgyattttaaatcaataataaatgtacagaatattaaaatcataagaatgcacagtgatgcatgcctctaatccaaactacttggaaggatgaggcaggaggatcacttgaggagcccagaagtttgagaccagcttgggaaacatagtaagactctaccttcgtaaaaaaattgtgcacacttgtgtgtatgctttagatcctgttttttgttgttgttgttttggtttggtttggttttttaaagca

SEQ ID NO: 350602 - DNA, 392 bp, Homo sapiens
tctagcccagaatacaacactcaacagatattagtttcttccatctctcctttcttagttaacataattttttaaatctatgaaatcttacctgactgcagattcatcagaaattccaacatctattaaagaaaaaggtaaaatgtattttaaatcaataataaatgtacagaatattaaaatcataagaatgcacagtgatgcatgcctctaatccaaactacttggaaggatgaggcaggaggatcacttgaggagcccagaagtttgagaccagcttgggaaacatagtaagactctaccttcrtaaaaaaattgtgcacacttgtgtgtatgctttagatcctgttttttgttgttgttgttttggtttggtttggttttttaaagca

SEQ ID NO: 350603 - DNA, 558 bp, Homo sapiens
tgatgagtcaacagtgtcaaagagcatgatttctggaccaaaatatgaggggccattacaacagagtatacactagtaccccttatccactatatgcgcagaaagacatacttgacacgtttttctctgctgtcacaccacagcaacaatcatcaacaaagaaggcttctgtaaccaaatgtgtggagagtttttccccaccaacaaacaagcaatcattcctgctgatgacacaattcaattctcacaccctatctacagataacatcagatttaatttaatttataaattaaactttgtcatagatatgtatgtatagggaaaaacagcttgtgattcagtaatattcatggtttcatgcatgcactgggggtcttgaaatgtatctcccacagttaagktgtagttactgcacttattttgttataacaccacacagcctctctagctcttcagttcaaactgtttagtttagaataaaacatgctatcgccagaaaccaacaaaacataggaatcagaccagaaacaggaatccttgcaaatactttccagcca

SEQ ID NO: 350604 - DNA, 471 bp, Homo sapiens
ctggctaatactcttctgggtaaggtgctgggtggtttccttagttgtagctatttgctctggcctacgtataacaagccccaaattcacctgccattttacctcccacagaaagaaccactggaaagatcactcctttaagagcttatccacattcagagagaagctgaataaacactggggaggtatggcaggctgtcgggcaatattatctgatgtgaaaaaatatatagaaagraaactatcaatgcccttttactaccagaatgttctaatgcttgcccatctccctagtaggagaaaaaaattttttcacctcgcataaagcaaaactcccttgtcatctctcatgacagaatctagttgtaggtgagtcatgtcatcataatacaggctgttgtcaacctcatccctcaaaggaagaggatcagtgaggaacttatgtatttacctaatagcattcactgcctg

SEQ ID NO: 350605 - DNA, 471 bp, Homo sapiens
ctggctaatactcttctgggtaaggtgctgggtggtttccttagttgtagctatttgctctggcctacgtataacaagccccaaattcacctgccattttacctcccacagaaagaaccactggaaagatcactcctttaagagcttatccacattcagagagaagctgaataaacactggggaggtatggcaggctgtcgggcaatattatctgatgtgaaaaaatatatagaaagaaaactatcaatgcccttttactaccagaatgttctaatgyttgcccatctccctagtaggagaaaaaaattttttcacctcgcataaagcaaaactcccttgtcatctctcatgacagaatctagttgtaggtgagtcatgtcatcataatacaggctgttgtcaacctcatccctcaaaggaagaggatcagtgaggaacttatgtatttacctaatagcattcactgcctg

SEQ ID NO: 350606 - DNA, 471 bp, Homo sapiens
ctggctaatactcttctgggtaaggtgctgggtggtttccttagttgtagctatttgctctggcctacgtataacaagccccaaattcacctgccattttacctcccacagaaagaaccactggaaagatcactcctttaagagcttatccacattcagagagaagctgaataaacactggggaggtatggcaggctgtcgggcaatattatctgatgtgaaaaaatatatagaaagaaaactatcaatgcccttttactaccagaatgttctaatgcttgcccatctccctagtaggagaaaaaaattttttcacctcgcataaagcaaaactcccttgtcatctctcatgacagaatctagttgtaggtgagtcatgycatcataatacaggctgttgtcaacctcatccctcaaaggaagaggatcagtgaggaacttatgtatttacctaatagcattcactgcctg

SEQ ID NO: 350607 - DNA, 494 bp, Homo sapiens
atgttttctaagtatgtaaatcatatctcatcagaatacatcattctttacaatgataaagaagcaaaagaaaaacaaaaggacaaagaacatcttaaatgactacattcaactgccatggagctttaatttyttaactactcaaaaagatatccactcttcttattccaactatatgactcttctgaaaaaagtaaaactatgaagacagagtaaacatcaatggttgtcacgagttgctagggagaaagggagagatgaacaggcatagcacagagaatttttagggcggtgaaactgttctgtcgataatattacagtaatagatacatgtcatgtcattatacatttgtccaaattcacagaatgtacagcatcaagagtgaggcctgatgtaaactatgaacttcaagtgattataatgtgtcaatgtaagttcatcagttgtaacaaatggaacactctctggtggaaaatactaataatgggggagg

SEQ ID NO: 350608 - DNA, 494 bp, Homo sapiens
atgttttctaagtatgtaaatcatatctcatcagaatacatcattctttacaatgataaagaagcaaaagaaaaacaaaaggacaaagaacatcttaaatgactacattcaactgccatggagctttaattttttaactactcaaaaagatatccactcttcttattccaactatatgactcttctgaaaaaagtaaaactatgaagacagagtaaacatcaatggttgtcacgagttgctagggagaaagggagagatgaacagrcatagcacagagaatttttagggcggtgaaactgttctgtcgataatattacagtaatagatacatgtcatgtcattatacatttgtccaaattcacagaatgtacagcatcaagagtgaggcctgatgtaaactatgaacttcaagtgattataatgtgtcaatgtaagttcatcagttgtaacaaatggaacactctctggtggaaaatactaataatgggggagg

SEQ ID NO: 350609 - DNA, 494 bp, Homo sapiens
atgttttctaagtatgtaaatcatatctcatcagaatacatcattctttacaatgataaagaagcaaaagaaaaacaaaaggacaaagaacatcttaaatgactacattcaactgccatggagctttaattttttaactactcaaaaagatatccactcttcttattccaactatatgactcttctgaaaaaagtaaaactatgaagacagagtaaacatcaatggttgtcacgagttgctagggagaaagggagagatgaacaggcatagcacagagaatttttagggcggtgaaactgttctgtcgataatattacagtaatagatacatgtcatgtcattatacatttgtccaaattcacagaatgtacagcatcaagagtgaggcctgatgtaaactatgaacttcaagtgattataatgtgtcaatgtaagttcatcagttgtaacaaatggamcactctctggtggaaaatactaataatgggggagg

SEQ ID NO: 350610 - DNA, 609 bp, Homo sapiens
tagctgggcatggtagctggcacctgtaatttcagctaccygggaggctgaggcaggagaatcgcttgagcctagaaagcagaggttgcagttaaccaagatcgcaccactgcactgcagcctgggagacagagtgagattctgtctcaaaaaacaaaaaagatattcactgtctatgcatcccaggatctccagaacaacaattaaaataaataaataaaaaagatggctgggggcagtggctcatgtctgtaatcccagcactttgagaggctgaggtgggtggatcacctgaggtcaggagttcgagaccagtctgactaacatggtaaaacctcatctctactgaatataaaaaattagccgggcatgatggtgcatgcctgtagttccaggtacctgggaggctgaggcaggagaatcatttgaacctgggaggtggaggttgcagtgatccaagattgtgtcattgcactgcagcctggtcaacaagagcaaaactctgtctcaaaaaaaaataagtaaataaaattaaaaataaagatattcactgaacctgttactatgatatatttaagcaagacacggtgaccctaaaaattagagatc

SEQ ID NO: 350611 - DNA, 609 bp, Homo sapiens
tagctgggcatggtagctggcacctgtaatttcagctacccgggaggctgaggcaggagaatcgcttgagcctagaaagcagaggttgcagttaaccaagatcgcaccactgcactgcagcctgggagacagagtgagattctgtctcaaaaaacaaaaaagatattcactgtctatgcatcccaggatctccagaacaacaattaaaataaataaataaaaaagatggctgggggcagtggctcatgtctgtaatcccagcactttgagaggctgaggtgggtggatcacctgaggtcaggagttcgagaccagyctgactaacatggtaaaacctcatctctactgaatataaaaaattagccgggcatgatggtgcatgcctgtagttccaggtacctgggaggctgaggcaggagaatcatttgaacctgggaggtggaggttgcagtgatccaagattgtgtcattgcactgcagcctggtcaacaagagcaaaactctgtctcaaaaaaaaataagtaaataaaattaaaaataaagatattcactgaacctgttactatgatatatttaagcaagacacggtgaccctaaaaattagagatc

SEQ ID NO: 350612 - DNA, 542 bp, Homo sapiens
gctgggcatggtagctggcacctgtaatttcagctacccgggaggctgaggcaggagaatcgcttgagcctagaaagcagaggttgcagttaaccaagatcgcaccactgcactgcagcctgggagacagagtgagattctgtctcaaaaaacaaaaaagatattcactgtctatgcatcccaggatctccagaacaacaattaaaataaataaataaaaaagatggctgggggcagtggctcatgtctgtaatcccagcactttgagaggctgaggtgggtggatcacctgaggtcaggagttcgagaccagtctgactaacatggtaaaacctcatctctactgaatataaaaaattagccgggcatgatggtgcatgcctgtagttccargtacctgggaggctgaggcaggagaatcatttgaacctgggaggtggaggttgcagtgatccaagattgtgtcattgcactgcagcctggtcaacaagagcaaaactctgtctcaaaaaaaaataagtaaataaaattaaaaataaaga

SEQ ID NO: 350613 - DNA, 570 bp, Homo sapiens
tgggggcagtggctcatgtctgtaatcccagcactttgagaggctgaggtgggtggatcacctgaggtcaggagttcgagaccagtctgactaacatggtaaaacctcatctctactgaatataaaaaattagccgggcatgatggtgcatgcctgtagttccaggtacctgggaggctgaggcaggagaatcatttgaacctgggakgtggaggttgcagtgatccaagattgtgtcattgcactgcagcctggtcaacaagagcaaaactctgtctcaaaaaaaaataagtaaataaaattaaaaataaagatattcactgaacctgttactatgatatatttaagcaagacacggtgaccctaaaaattagagatcattgaagaccaaagtaacaacatgtggtcattatttctcaaattgaagtatataaaatatataaaataagtaaatttaattgcatgcttaggtaagaaaatattgataaaaatgattgaatattttatcttatttcataattctaagcagggctttagcacaatatgaaaactagattattcatgtaatcc

SEQ ID NO: 350614 - DNA, 570 bp, Homo sapiens
tgggggcagtggctcatgtctgtaatcccagcactttgagaggctgaggtgggtggatcacctgaggtcaggagttcgagaccagtctgactaacatggtaaaacctcatctctactgaatataaaaaattagccgggcatgatggtgcatgcctgtagttccaggtacctgggaggctgaggcaggagaatcatttgaacctgggaggtggaggttgcartgatccaagattgtgtcattgcactgcagcctggtcaacaagagcaaaactctgtctcaaaaaaaaataagtaaataaaattaaaaataaagatattcactgaacctgttactatgatatatttaagcaagacacggtgaccctaaaaattagagatcattgaagaccaaagtaacaacatgtggtcattatttctcaaattgaagtatataaaatatataaaataagtaaatttaattgcatgcttaggtaagaaaatattgataaaaatgattgaatattttatcttatttcataattctaagcagggctttagcacaatatgaaaactagattattcatgtaatcc

SEQ ID NO: 350615 - DNA, 570 bp, Homo sapiens
tgggggcagtggctcatgtctgtaatcccagcactttgagaggctgaggtgggtggatcacctgaggtcaggagttcgagaccagtctgactaacatggtaaaacctcatctctactgaatataaaaaattagccgggcatgatggtgcatgcctgtagttccaggtacctgggaggctgaggcaggagaatcatttgaacctgggaggtggaggttgcagtgatccaagattgtgtcattgcactgcagcctggtcaacaagagcaaaactctgtctcaaaaaaaaataagtaaataaaattaaaaataaagataktcactgaacctgttactatgatatatttaagcaagacacggtgaccctaaaaattagagatcattgaagaccaaagtaacaacatgtggtcattatttctcaaattgaagtatataaaatatataaaataagtaaatttaattgcatgcttaggtaagaaaatattgataaaaatgattgaatattttatcttatttcataattctaagcagggctttagcacaatatgaaaactagattattcatgtaatcc

SEQ ID NO: 350616 - DNA, 578 bp, Homo sapiens
gagattctgtctcaaaaaacaaaaaagatattcactgtctatgcatcccaggatctccagaacaacaattaaaataaataaataaaaaagatggctgggggcagtggctcatgtctgtaatcccagcactttgagaggctgaggtgggtggatcacctgaggtcaggagttcgagaccagtctgactaacatggtaaaacctcatctctactgaatataaaaaattagccgggcatgatggtgcatgcctgtagttccaggtacctgggaggctgaggcaggagaatcatttgaacctgggaggtggaggttgcagtgatccaagattgtgtcattgcactgcagcctggtcaacaagagcaaaactctgtctcaaaaaaaaataagtaaataaaattaaaaataaagatattcactgaacctgttactatgatatatttaagcaagacacggtgaccctaaaaattagagatcattgaagaccaaagtaacaacaygtggtcattatttctcaaattgaagtatataaaatatataaaataagtaaatttaattgcatgcttaggtaagaaaatatt

SEQ ID NO: 350617 - DNA, 592 bp, Homo sapiens
gattgtgtcattgcactgcagcctggtcaacaagagcaaaactctgtctcaaaaaaaaataagtaaataaaattaaaaataaagatattcactgaacctgttactatgatatatttaagcaagacacggtgaccctaaaaattagagatcattgaagaccaaagtaacaacatgtggtcattatttctcaaattgaagtatataaaatatataaaataartaaatttaattgcatgcttaggtaagaaaatattgataaaaatgattgaatattttatcttatttcataattctaagcagggctttagcacaatatgaaaactagattattcatgtaatccaaataaaagacaatttttattctaattttaactcagaaattattttgcttatttaacaattttactgaaaggtaaatgagataaataggacagattataattacctaacattgctatggtaacttatgtacaaatagctgttcgtcaccgaaagtcaaaaaagtaaccagcgctgcaacttaagatggatcatacaacagaaattagtaccaagttaccttatcttataatatgttattaaaatgaaattt

SEQ ID NO: 350618 - DNA, 569 bp, Homo sapiens
tatataaaatatataaaataagtaaatttaattgcatgcttaggtaagaaaatattgataaaaatgattgaatattttatcttatttcataattctaagcagggctttagcacaatatgaaaactagattattcatgtaatccaaataaaagacaatttttattctaattttaactcagaaattattttgcttatttaacaattttactgaaaggtaaatgagataaataggacagattataattacmtaacattgctatggtaacttatgtacaaatagctgttcgtcaccgaaagtcaaaaaagtaaccagcgctgcaacttaagatggatcatacaacagaaattagtaccaagttaccttatcttataatatgttattaaaatgaaattttaaaacaacaccaaaaattaagttggggctatacaaagtgtgcagaaaagatttcatataacaggcaagagactgccatccttagaaaggcctgcatgcaaggctggcccttggctggtgtttaggaaattggaattgggagggtttccaccattccctgagaagagtggctcac

SEQ ID NO: 350619 - DNA, 592 bp, Homo sapiens
gattgtgtcattgcactgcagcctggtcaacaagagcaaaactctgtctcaaaaaaaaataagtaaataaaattaaaaataaagatattcactgaacctgttactatgatatatttaagcaagacacggtgaccctaaaaattagagatcattgaagaccaaagtaacaacatgtggtcattatttctcaaattgaagtatataaaatatataaaataagtaaatttaattgcatgcttaggtaagaaaatattgataaaaatgattgaatattttatcttatttcataattctaagcagggctttagcacaatatgaaaactagattattcatgtaatccaaataaaagacaatttttattctaattttaactcagaaattattttgcttatttaacaattttactgaaaggtaaatgagataaataggacagattataattacctaacattgctatggtaacttatgtacaaatagctgttcgtcaycgaaagtcaaaaaagtaaccagcgctgcaacttaagatggatcatacaacagaaattagtaccaagttaccttatcttataatatgttattaaaatgaaattt

SEQ ID NO: 350620 - DNA, 512 bp, Homo sapiens
gaagatgcaaacattttaagttgacagaagatataaaatgttcactatcaaaatgtcgcaactgataaaaatgttctcaaatatttctgtctcaaacttgcattgttcattaaggaagcaaaataggtgggacatacacagcaacaacatccctcaaaaaacaccttggctcattcctataagccaggcagcaaatacatcatccttacatatgttaattaccttccaatttcaaattctcaactgtgaaataaaggrccattttatttggctgcttctagttcaatatgactgtttttattaaaacatctctaacttgaaaaatatttggtgttttctaaaaaactgcaaattgccacaaatggccagataatttggaataaacaccctacagaaaaaaatatatattcaagttgcataagtcactttgagcaatcctttgaggatatttcatttatatctaaatgaaccacaggtttagctggcttttccggaaaaccagaagcaaataa

SEQ ID NO: 350621 - DNA, 564 bp, Homo sapiens
accctacagaaaaaaatatatattcaagttgcataagtcactttgagcaatcctttgaggatatttcatttatatctaaatgaaccacaggtttarctggcttttccggaaaaccagaagcaaataatgtatgattataatgaaaaccatctcaagtaattttgaaatgaagtaccacatgtcttatgctgtcccttccatgcacttgacaaaacagcctataacaaattgtttactttgagatttaacgggaaaattccatgaggtttaaaagagatgactactaataagccatctacctttgactctattccaattaaaaatgggttaggaaagtgctttgaaaatcaagtgtgttcatcagggaatcatttacctaagtcttcttaacactgcttagtgaatattcagcctgatatagtaaatacacgctaaccactgaattgaaggggaaagagggagaacaaagagacatgtaaagtacacttactttttctagtaggaaaaagccaattaaaactatcacctattagttttattggaatcagtcttacaggagttcaa

SEQ ID NO: 350622 - DNA, 530 bp, Homo sapiens
ttggagaaatgcacagattctgggtgccatgtgcatttgttttgggagtgataattgatctaacttatggaaataatactagatagttagcggatggattctgtatctgatgagagttttgggcaaaacgaattcctagtttctgagtcttatttttcccctgattcaagaaaactgtgaattatccagccagtaaaaaactctcacagctcyggatgtgagtttaggacactggatttctaccactcattttcttactacttttcttgtgcaaggatcatggcacaagttgcagtttccaccctgcccattgaagatgaggagtctgttgaagatgaggagtccttggagagcaggatggtggtgacattcctgtcagctctcgactccatggtcagaccttctgttctcacattctatagttcggtaggactgggcggtagataaggttgatttgtttttgtagaacttacaattttgtgatttttagttctaatgagtagacctttttcgtgaatagtagttacggt

SEQ ID NO: 350623 - DNA, 530 bp, Homo sapiens
ttggagaaatgcacagattctgggtgccatgtgcatttgttttgggagtgataattgatctaacttatggaaataatactagatagttagcggatggattctgtatctgatgagagttttgggcaaaacgaattcctagtttctgagtcttatttttcccctgattcaagaaaactgtgaattatccagccagtaaaaaactctcacagctctggatgtgagtttaggacactggatttctaccactcattttcttactacttttcttgtgcaaggatcatggcacaagttgcagtttccaccctgcccattgaagatgaggagtctgttgaagatgaggagtccttggagagcaggatggtggtgacattcctgtcagctctcgactccatggtcagaccttctgttctcacattctrtagttcggtaggactgggcggtagataaggttgatttgtttttgtagaacttacaattttgtgatttttagttctaatgagtagacctttttcgtgaatagtagttacggt

SEQ ID NO: 350624 - DNA, 530 bp, Homo sapiens
ttggagaaatgcacagattctgggtgccatgtgcatttgttttgggagtgataattgatctaacttatggaaataatactagatagttagcggatggattctgtatctgatgagagttttgggcaaaacgaattcctagtttctgagtcttatttttcccctgattcaagaaaactgtgaattatccagccagtaaaaaactctcacagctctggatgtgagtttaggacactggatttctaccactcattttcttactacttttcttgtgcaaggatcatggcacaagttgcagtttccaccctgcccattgaagatgaggagtctgttgaagatgaggagtccttggagagcaggatggtggtgacattcctgtcagctctcgactccatggtcagaccttctgttctcacattctatagttcrgtaggactgggcggtagataaggttgatttgtttttgtagaacttacaattttgtgatttttagttctaatgagtagacctttttcgtgaatagtagttacggt

SEQ ID NO: 350625 - DNA, 469 bp, Homo sapiens
ggctttagcaactgggaaaggcaagggaacatattctctccagaacctccagaagggatgcagtcctgctggcaccttgactttagccttaatagacctattttggacttctggcccccagacctcttagtgagtagatttgtggtgtattaagccactcaatgtagggtagtttgtaacagcggcaagaagaaatgaacaygaagccagaattggtggcccacacctataattccagctatttaggaggctgaggcaggatggttgctttggcccaggagttcacgataagtctgggcaacaaaatgataccctgtctacatgaaaaaaaaaaaaattagcgggtgtggtggcatgcacttgtagtcttagctactagaggccctgaggcaggacaatttcttgacctaggagctccaggtctcagtgcgttgtgatcgtgccatggcaccccagtctgagtgacaca

SEQ ID NO: 350626 - DNA, 432 bp, Homo sapiens
gccgtagctatggtgagggtgaggcaggaggatccccggagcccaggaggtcacrgctgcagttagctatgagtgcacccctgcattgcagccagagtgacagagtgagacccggtctcagaatacagatacaagtaaagaaatctcagctcagagcagtctgtttgtcactatgcagcctttgcaaccccatagctgcgcgattgggtttgtgttgctggaggtgaggagacccgtgcccaggtgttgttgcctgtctaatcagtttattttaaaatatattaatgaaatttatttcatcatactttatggcctcatacctgagtggttttttgaattctcctttgaatagcttgtaactattcaaacctcttattggttctataattaattctttttctaattagctttttaaaaatcagaattgatatt

SEQ ID NO: 350627 - DNA, 432 bp, Homo sapiens
gccgtagctatggtgagggtgaggcaggaggatccccggagcccaggaggtcacagctgcagttagctatgagtgcacccctgcattgcagccagagtgacagagtgagacccggtctcagaatacagatacaagtaaagaaatctcagctcagagcagtctgtttgtcactatgcagcctttgcaaccccatagctgcgcgattgggtttgtgttgctggaggtgaggagacccgtgcccaggtgttgttgcctgtctaatcagtttattttaaaatatattaatgaaatttatttcatcatactttatggcctcatacctgartggttttttgaattctcctttgaatagcttgtaactattcaaacctcttattggttctataattaattctttttctaattagctttttaaaaatcagaattgatatt

SEQ ID NO: 350628 - DNA, 579 bp, Homo sapiens
gattaacgtatcatgcaattcatttatcaaagtacacaattcaggccaggtgcagtggctaattcctataacgctaagactttgggcagctgaggcaggtggatcgcttgtgttcaggagtttgcgactagcctgggcaacatggcaaaacagcatctctagcaaaaatacaaaaattagctggtgtggtggctcatgcctgtagtcccaactacttggggacatgagactggaagatcacttgagcccagaagccataggttgcagtgagaccagatggcaccactgcactacagcatgggtgacaaaaggagaccgtctttaaataactaaagaaaaaaaagaaagtatacaattgagtggtttttagaatattcaaggagctgtgcatccatcaccacagtctttcttagaagtgatcacccacttgtgagttacccacttatgagtgagaaaccctcacctcttagccrctacctcctacgtaccccatgttcataggcaaccagtgatttattttctgtcattgtagttttgcctaatctggaccttttatagaaatagaattgtacaatgtgt

SEQ ID NO: 350629 - DNA, 579 bp, Homo sapiens
gattaacgtatcatgcaattcatttatcaaagtacacaattcaggccaggtgcagtggctaattcctataacgctaagactttgggcagctgaggcaggtggatcgcttgtgttcaggagtttgcgactagcctgggcaacatggcaaaacagcatctctagcaaaaatacaaaaattagctggtgtggtggctcatgcctgtagtcccaactacttggggacatgagactggaagatcacttgagcccagaagccataggttgcagtgagaccagatggcaccactgcactacagcatgggtgacaaaaggagaccgtctttaaataactaaagaaaaaaaagaaagtatacaattgagtggtttttagaatattcaaggagctgtgcatccatcaccacagtctttcttagaagtgatcacccacttgtgagttacccacttatgagtgagaaaccctcacctcttagccgctrcctcctacgtaccccatgttcataggcaaccagtgatttattttctgtcattgtagttttgcctaatctggaccttttatagaaatagaattgtacaatgtgt

SEQ ID NO: 350630 - DNA, 579 bp, Homo sapiens
gattaacgtatcatgcaattcatttatcaaagtacacaattcaggccaggtgcagtggctaattcctataacgctaagactttgggcagctgaggcaggtggatcgcttgtgttcaggagtttgcgactagcctgggcaacatggcaaaacagcatctctagcaaaaatacaaaaattagctggtgtggtggctcatgcctgtagtcccaactacttggggacatgagactggaagatcacttgagcccagaagccataggttgcagtgagaccagatggcaccactgcactacagcatgggtgacaaaaggagaccgtctttaaataactaaagaaaaaaaagaaagtatacaattgagtggtttttagaatattcaaggagctgtgcatccatcaccacagtctttcttagaagtgatcacccacttgtgagttacccacttatgagtgagaaaccctcacctcttagccgctacctcctacgtaccccatgttcataggcaaccagtgatttattttctgtcattgtagttttgcctaatctggacsttttatagaaatagaattgtacaatgtgt

SEQ ID NO: 350631 - DNA, 596 bp, Homo sapiens
attttacctgtattattgattataataaacaacgaataattttgtagtagagttgagtccccccaaaaagtatttattgtttaactgaagtagttttttttttaacctggatatatattttttcattttcactttatttttagtgtttatttttaaaaattatttatatgtatttttattttaataggtgtttgagaaacaggtggtgtktggttccatgaataagttcttcagtgttgatttctgaaatgtagtacccctcattactcattaaattatatattaagtcattataaaatcattaataaaccaaggactttagtaaaatgggaattttattttaacttgcaacctgggacgtaactgtcaaaacaattagagaaattaccacattaaggttttcaaatcttgaactgaaaaatgaaaaccttgatgcacctaagaaccaccagcccactggtcaaagtgaacaaaactaaatgaaaaaataaaaccaagaaaaccaaactcaggattattaggtattctgtaatgctattttatctttggactcacagaaaatagttattattattattactattattattattatt

SEQ ID NO: 350632 - DNA, 596 bp, Homo sapiens
attttacctgtattattgattataataaacaacgaataattttgtagtagagttgagtccccccaaaaagtatttattgtttaactgaagtagttttttttttaacctggatatatattttttcattttcactttatttttagtgtttatttttaaaaattatttatatgtatttttattttaataggtgtttgagaaacaggtggtgtttggttccatgaataagttcttcartgttgatttctgaaatgtagtacccctcattactcattaaattatatattaagtcattataaaatcattaataaaccaaggactttagtaaaatgggaattttattttaacttgcaacctgggacgtaactgtcaaaacaattagagaaattaccacattaaggttttcaaatcttgaactgaaaaatgaaaaccttgatgcacctaagaaccaccagcccactggtcaaagtgaacaaaactaaatgaaaaaataaaaccaagaaaaccaaactcaggattattaggtattctgtaatgctattttatctttggactcacagaaaatagttattattattattactattattattattatt

SEQ ID NO: 350633 - DNA, 596 bp, Homo sapiens
attttacctgtattattgattataataaacaacgaataattttgtagtagagttgagtccccccaaaaagtatttattgtttaactgaagtagttttttttttaacctggatatatattttttcattttcactttatttttagtgtttatttttaaaaattatttatatgtatttttattttaataggtgtttgagaaacaggtggtgtttggttccatgaataagttcttcagtgttgatttctgaaatgtagtacccctcattactcattaaattatatattaagtcattataaaatcattaataaaccaaggactttagtaaaatgggaattttattttaacttgcaacctgggacgtaactgtcaaaacaattagagaaattaccacattaaggttttmaaatcttgaactgaaaaatgaaaaccttgatgcacctaagaaccaccagcccactggtcaaagtgaacaaaactaaatgaaaaaataaaaccaagaaaaccaaactcaggattattaggtattctgtaatgctattttatctttggactcacagaaaatagttattattattattactattattattattatt

SEQ ID NO: 350634 - DNA, 596 bp, Homo sapiens
attttacctgtattattgattataataaacaacgaataattttgtagtagagttgagtccccccaaaaagtatttattgtttaactgaagtagttttttttttaacctggatatatattttttcattttcactttatttttagtgtttatttttaaaaattatttatatgtatttttattttaataggtgtttgagaaacaggtggtgtttggttccatgaataagttcttcagtgttgatttctgaaatgtagtacccctcattactcattaaattatatattaagtcattataaaatcattaataaaccaaggactttagtaaaatgggaattttattttaacttgcaacctgggacgtaactgtcaaaacaattagagaaattaccacattaaggttttcaaatcttgaactgaaaaatgaaaaccttgrtgcacctaagaaccaccagcccactggtcaaagtgaacaaaactaaatgaaaaaataaaaccaagaaaaccaaactcaggattattaggtattctgtaatgctattttatctttggactcacagaaaatagttattattattattactattattattattatt

SEQ ID NO: 350635 - DNA, 304 bp, Homo sapiens
ataacttattgtctgttccwatcaacatttagcataagctacagcttatattgttaataattcttctatgtttatgtgatgatttgcaaataaatgggcctatatagtctttatctagtgttggattgggatcaaaagcttcatgaaatcattgtttttagtatacgtacagatggataattgtataaataagtacagatgtgtataaatgtgtgagtatacatacatatattttctagctcctctaacaaaagggcctagaaacaacatcatcccagtaacaatgagaacaccactctccaat

SEQ ID NO: 350636 - DNA, 304 bp, Homo sapiens
ataacttattgtctgttcctaycaacatttagcataagctacagcttatattgttaataattcttctatgtttatgtgatgatttgcaaataaatgggcctatatagtctttatctagtgttggattgggatcaaaagcttcatgaaatcattgtttttagtatacgtacagatggataattgtataaataagtacagatgtgtataaatgtgtgagtatacatacatatattttctagctcctctaacaaaagggcctagaaacaacatcatcccagtaacaatgagaacaccactctccaat

SEQ ID NO: 350637 - DNA, 304 bp, Homo sapiens
ataacttattgtctgttcctatcaacatttagcataagctacagcttatattgttaataattcttctatgtttatgtgmtgatttgcaaataaatgggcctatatagtctttatctagtgttggattgggatcaaaagcttcatgaaatcattgtttttagtatacgtacagatggataattgtataaataagtacagatgtgtataaatgtgtgagtatacatacatatattttctagctcctctaacaaaagggcctagaaacaacatcatcccagtaacaatgagaacaccactctccaat

SEQ ID NO: 350638 - DNA, 490 bp, Homo sapiens
ttcacacacaaaaaaaatagtttaaactgaaagaaaattttttaaaaacttaataaaatgtgggatgcagataaatcgtttcttaaargtacatttatagatgtaatatattgaaaataaaaggcttcaatcaatgacctttaggttcttttttaagaggctaaaaaatgagcaaagtatatccaaattaagaagaaggaagatgataaagataaaaatgtaaaccaacaacatagcaaataacaaaaggtggagctaattaatatacccacaaattggttctttgaaaaaaattttttaataaacaatggctagcaagatttatctcgaaaaaaattacagaagctacataatgtagataatgggaattaaatagaggatgtaactacagaacctacagacatcaatataattatgaaaactttaggccaatacatttgacaattaaaataacatgggaaattatttgtaaaactaattcttaaaactg

SEQ ID NO: 350639 - DNA, 490 bp, Homo sapiens
ttcacacacaaaaaaaatagtttaaactgaaagaaaattttttaaaaacttaataaaatgtgggatgcagataaatcgtttcttaaaagtacatttatagatgtaatataytgaaaataaaaggcttcaatcaatgacctttaggttcttttttaagaggctaaaaaatgagcaaagtatatccaaattaagaagaaggaagatgataaagataaaaatgtaaaccaacaacatagcaaataacaaaaggtggagctaattaatatacccacaaattggttctttgaaaaaaattttttaataaacaatggctagcaagatttatctcgaaaaaaattacagaagctacataatgtagataatgggaattaaatagaggatgtaactacagaacctacagacatcaatataattatgaaaactttaggccaatacatttgacaattaaaataacatgggaaattatttgtaaaactaattcttaaaactg

SEQ ID NO: 350640 - DNA, 526 bp, Homo sapiens
aggggtgtacatcccctgcgatattgggaataatattctttctttccctggatattaggaataatatcacaaaggggttgtataccccccgtgacattttaattaatatcatcttccccactgaatattaggaacaaattcccagggggttgtacaccacctgcaatatggacagctatatcattgtctctcccccgaatataaggaacaatatcacaagggggttgtacaacccctgtgatattgggagtaactttwtaccctttccacatggatattaggaacaatatcacagggtgggtgtacacccactgcgatattgggagtaatatcatcctctaccccctgggtattatgaacaatatcatggggagggggtgtatgccctctgtgatattgggagtaatatcatcctgtcccctctggatattaggaatgatatcacagcggggctgtaccttttctgcactattgggagtggtatcaccctctacccctatggatattaggaacaatatcacaaagg

SEQ ID NO: 350641 - DNA, 526 bp, Homo sapiens
aggggtgtacatcccctgcgatattgggaataatattctttctttccctggatattaggaataatatcacaaaggggttgtataccccccgtgacattttaattaatatcatcttccccactgaatattaggaacaaattcccagggggttgtacaccacctgcaatatggacagctatatcattgtctctcccccgaatataaggaacaatatcacaagggggttgtacaacccctgtgatattgggagtaactttttaccctttccacatggatattaggaacaatatcacagggtggktgtacacccactgcgatattgggagtaatatcatcctctaccccctgggtattatgaacaatatcatggggagggggtgtatgccctctgtgatattgggagtaatatcatcctgtcccctctggatattaggaatgatatcacagcggggctgtaccttttctgcactattgggagtggtatcaccctctacccctatggatattaggaacaatatcacaaagg

SEQ ID NO: 350642 - DNA, 526 bp, Homo sapiens
aggggtgtacatcccctgcgatattgggaataatattctttctttccctggatattaggaataatatcacaaaggggttgtataccccccgtgacattttaattaatatcatcttccccactgaatattaggaacaaattcccagggggttgtacaccacctgcaatatggacagctatatcattgtctctcccccgaatataaggaacaatatcacaagggggttgtacaacccctgtgatattgggagtaactttttaccctttccacatggatattaggaacaatatcacagggtgggtgtacacccactgcgatattgggagtaatatcatcctctaccccctgggtattatgaacaatatcatggggagggggtgtatgccctctgtgatattgggagtaatatcatcctgtcccctctggatattaggaatgatatcacagcggggctgtaccttttctgcactattgggagtggtatcaccctctmcccctatggatattaggaacaatatcacaaagg

SEQ ID NO: 350643 - DNA, 485 bp, Homo sapiens
tctatagttgctcatcatgtatctcataagaagtgaacatacagaatacgtaaagaactcctacagagagactaccagaagcagagaggagcaaacacaytttcacactagggcacctcctatctctcctggattccaattagggcagagtaagtgctagttctctgccaacataggattaggccctgcagctgcagtgaaaataatcacagaagaaaactaagaaataaaaaatggagaaagtgagacatcaaactagaattactagaatcccctaggaagaaggaaaaaaaaacaaaacagaaaaacagtcaaaccagataattaaaccttggtgtgaccagaagatcagggtttcctaaaggagtggaaatttattgacttgaagatgatttattgattactgatttgaagaggaagaaaaaccatgaatggtctaaagcaaaagcctagtgtctgaagaagtcagtagggtgaaaacaaga

SEQ ID NO: 350644 - DNA, 485 bp, Homo sapiens
tctatagttgctcatcatgtatctcataagaagtgaacatacagaatacgtaaagaactcctacagagagactaccagaagcagagaggagcaaacacactttcacactagggcacctcctatctctcctggattccaattagggcagagtaagtgctagttctctgccaacmtaggattaggccctgcagctgcagtgaaaataatcacagaagaaaactaagaaataaaaaatggagaaagtgagacatcaaactagaattactagaatcccctaggaagaaggaaaaaaaaacaaaacagaaaaacagtcaaaccagataattaaaccttggtgtgaccagaagatcagggtttcctaaaggagtggaaatttattgacttgaagatgatttattgattactgatttgaagaggaagaaaaaccatgaatggtctaaagcaaaagcctagtgtctgaagaagtcagtagggtgaaaacaaga

SEQ ID NO: 350645 - DNA, 485 bp, Homo sapiens
tctatagttgctcatcatgtatctcataagaagtgaacatacagaatacgtaaagaactcctacagagagactaccagaagcagagaggagcaaacacactttcacactagggcacctcctatctctcctggattccaattagggcagagtaagtgctagttctctgccaacataggattaggccctgcagctgcagtgaaaataatcacagaagaaaactaagaaataaaaaatggagaaagtgagacatcaaactagaattactagaatcccctaggaagaaggaaaaaaaaacaaaacagaaaaacartcaaaccagataattaaaccttggtgtgaccagaagatcagggtttcctaaaggagtggaaatttattgacttgaagatgatttattgattactgatttgaagaggaagaaaaaccatgaatggtctaaagcaaaagcctagtgtctgaagaagtcagtagggtgaaaacaaga

SEQ ID NO: 350646 - DNA, 485 bp, Homo sapiens
tctatagttgctcatcatgtatctcataagaagtgaacatacagaatacgtaaagaactcctacagagagactaccagaagcagagaggagcaaacacactttcacactagggcacctcctatctctcctggattccaattagggcagagtaagtgctagttctctgccaacataggattaggccctgcagctgcagtgaaaataatcacagaagaaaactaagaaataaaaaatggagaaagtgagacatcaaactagaattactagaatcccctaggaagaaggaaaaaaaaacaaaacagaaaaacagtcaaaccagataattaaaccttggtgtgaccagaagatcagggtttcctaaaggagtggaaatttattgacttgaagaygatttattgattactgatttgaagaggaagaaaaaccatgaatggtctaaagcaaaagcctagtgtctgaagaagtcagtagggtgaaaacaaga

SEQ ID NO: 350647 - DNA, 596 bp, Homo sapiens
ccttggtgtgaccagaagatcagggtttcctaaaggagtggaaatttattgacttgaagatgatttattgattactgatttgaagaggaagaaaaaccatgaatggtctaaagcaaaagcctagtgtctgaagaagtcagtagggtgaaaacaagagctggccagaatgtccacagatggtgacaagtttgcaaagcctttactagactacttgtgaggctaactagaggccaaggagccaacactgcccctgtccttacagagagaccctacacaggattcccagatatacatggaaggacaacatcttatcaggtcctctctgtgcagatgtggttatcattccaaataatgagctccagcaccaagactgttccatcctcaattgctttgagtgggcaacgtaggctttccacacacgagctacatgtargttccttgggtacccagatgggagccgtgaaacacaaaccttccatggtcaggtccgtatctgtttcctgccttttccccagcaatccccaggcctcagcagcagtggtctacctctgctgattctcattcagaatctaaacttagaaacaattagaacctag

SEQ ID NO: 350648 - DNA, 547 bp, Homo sapiens
aagatgcaaagatgatataaaaatagccaacagatacatgagatatatgagaagatgtgtaacatcactartcattaaagaaatgcaaatagaaaccacaatgggacatcacttctaacccaacagatagtaacaagtgcaggtgaaactgaaacccttgaacactgttggtggaaatatgaactggctcctcaaaaaaaaataaaataaaatgaccatatgatccagccatccaacttctacagagacagaataactagtagcaggaactcaaacagatatgtgcacacctatgttcacaggagcattacacagccacaagtggaagaaaccaaaacgtccatccaggaatagatggataaacaaaaggatatatatatatagagagagagagagagaaaaatatatatatatatatatgaagaaatattattcagcaatagaaaggaagaaaatcctgacacttctgacacataacatggaacctacttacaaaacaacaaatattatataaccctaggtatataagccaaagttttagaaatac

SEQ ID NO: 350649 - DNA, 547 bp, Homo sapiens
aagatgcaaagatgatataaaaatagccaacagatacatgagatatatgagaagatgtgtaacatcactagtcattaragaaatgcaaatagaaaccacaatgggacatcacttctaacccaacagatagtaacaagtgcaggtgaaactgaaacccttgaacactgttggtggaaatatgaactggctcctcaaaaaaaaataaaataaaatgaccatatgatccagccatccaacttctacagagacagaataactagtagcaggaactcaaacagatatgtgcacacctatgttcacaggagcattacacagccacaagtggaagaaaccaaaacgtccatccaggaatagatggataaacaaaaggatatatatatatagagagagagagagagaaaaatatatatatatatatatgaagaaatattattcagcaatagaaaggaagaaaatcctgacacttctgacacataacatggaacctacttacaaaacaacaaatattatataaccctaggtatataagccaaagttttagaaatac

SEQ ID NO: 350650 - DNA, 547 bp, Homo sapiens
aagatgcaaagatgatataaaaatagccaacagatacatgagatatatgagaagatgtgtaacatcactagtcattaaagaaatgcaaatagaaaccacaatgggacatcacttctaacccaacagatagtaacaagtgcaggtgaaactgaaacmcttgaacactgttggtggaaatatgaactggctcctcaaaaaaaaataaaataaaatgaccatatgatccagccatccaacttctacagagacagaataactagtagcaggaactcaaacagatatgtgcacacctatgttcacaggagcattacacagccacaagtggaagaaaccaaaacgtccatccaggaatagatggataaacaaaaggatatatatatatagagagagagagagagaaaaatatatatatatatatatgaagaaatattattcagcaatagaaaggaagaaaatcctgacacttctgacacataacatggaacctacttacaaaacaacaaatattatataaccctaggtatataagccaaagttttagaaatac

SEQ ID NO: 350651 - DNA, 547 bp, Homo sapiens
aagatgcaaagatgatataaaaatagccaacagatacatgagatatatgagaagatgtgtaacatcactagtcattaaagaaatgcaaatagaaaccacaatgggacatcacttctaacccaacagatagtaacaagtgcaggtgaaactgaaacccttgaacactgttggtggaaatatgaactggctcctcaaaaaaaaataaaataaaatgaccatatgatccagccatccaacttctacagagacagaataactagtagcaggaactcaaacagatatgtgcacacctatgttcacaggagcattacacagccacaagtggaagaaaccaaaacgtccatccaggaatagatggataaacaaaaggatatatatatatagagagagagagagagaaaaatatatatatatatatatgaagaaatattattcagcmatagaaaggaagaaaatcctgacacttctgacacataacatggaacctacttacaaaacaacaaatattatataaccctaggtatataagccaaagttttagaaatac

SEQ ID NO: 350652 - DNA, 520 bp, Homo sapiens
ctcccttggactcccacagagctgagattatgagcataagccaacatgcccagcctataaaaaattatttcaaaaagccaaaagattaatcaaactggaatatttagaaatatttaacccaaaagaagttaggaaagaatatatagaagatcaaaasacagacgaaggccaggcatggtggctcatgcctgtaatctgaacaatttgggatgccaaggtgggtaggttgcttgagctcaggagttcaagatcagcctgtgcaacatggcaaaactctatctctacaaaaaatataaaaattagccaggtgtgttgccatgcacctgtagtcccagctactcagggggctcaagtgaggattggttgggcctgggaggcagaggttgcagtgagccaagattgcaccattgcactacagtctgggtgacagagtaagaccctgtcttaaaaaaataaacaaacaaatagaaaataagtagaaaaatggcagacctaaatccaaccttagcagtgattagtt

SEQ ID NO: 350653 - DNA, 520 bp, Homo sapiens
ctcccttggactcccacagagctgagattatgagcataagccaacatgcccagcctataaaaaattatttcaaaaagccaaaagattaatcaaactggaatatttagaaatatttaacccaaaagaagttaggaaagaatatatagaagatcaaaagacagackaaggccaggcatggtggctcatgcctgtaatctgaacaatttgggatgccaaggtgggtaggttgcttgagctcaggagttcaagatcagcctgtgcaacatggcaaaactctatctctacaaaaaatataaaaattagccaggtgtgttgccatgcacctgtagtcccagctactcagggggctcaagtgaggattggttgggcctgggaggcagaggttgcagtgagccaagattgcaccattgcactacagtctgggtgacagagtaagaccctgtcttaaaaaaataaacaaacaaatagaaaataagtagaaaaatggcagacctaaatccaaccttagcagtgattagtt

SEQ ID NO: 350654 - DNA, 520 bp, Homo sapiens
ctcccttggactcccacagagctgagattatgagcataagccaacatgcccagcctataaaaaattatttcaaaaagccaaaagattaatcaaactggaatatttagaaatatttaacccaaaagaagttaggaaagaatatatagaagatcaaaagacagacgaaggccaggcatggtggctcatgcctgtaatctgaacaatttgggatgccaaggtgggtaggttrcttgagctcaggagttcaagatcagcctgtgcaacatggcaaaactctatctctacaaaaaatataaaaattagccaggtgtgttgccatgcacctgtagtcccagctactcagggggctcaagtgaggattggttgggcctgggaggcagaggttgcagtgagccaagattgcaccattgcactacagtctgggtgacagagtaagaccctgtcttaaaaaaataaacaaacaaatagaaaataagtagaaaaatggcagacctaaatccaaccttagcagtgattagtt

SEQ ID NO: 350655 - DNA, 520 bp, Homo sapiens
ctcccttggactcccacagagctgagattatgagcataagccaacatgcccagcctataaaaaattatttcaaaaagccaaaagattaatcaaactggaatatttagaaatatttaacccaaaagaagttaggaaagaatatatagaagatcaaaagacagacgaaggccaggcatggtggctcatgcctgtaatctgaacaatttgggatgccaaggtgggtaggttgcttgagctcaggagttcaagatcagcctgtgcaacatggcaaaactctatctctacaaaaaatataaaaattagccaggtgtgttgccatgcacctgtagtcycagctactcagggggctcaagtgaggattggttgggcctgggaggcagaggttgcagtgagccaagattgcaccattgcactacagtctgggtgacagagtaagaccctgtcttaaaaaaataaacaaacaaatagaaaataagtagaaaaatggcagacctaaatccaaccttagcagtgattagtt

SEQ ID NO: 350656 - DNA, 561 bp, Homo sapiens
catccacagagacacaatttaaacacaaagacacaaacaaagtatgagaaaaaatatgctatgcagacactaatcttaaaaatatgctatccagacactaatcataaaaagcttcaacagagatgttaacactagatgaaagaggcttcagagcaaaatatatcaccagaaataaacagggtaatttaataaaaataaaataatcagagaggatgatgttacaattataaattgtgcctcaaagtgcacacaaattacacacacacacagagcctcaaagtatgtgaatcaaaaacaacagacaaaagcaggaaattgacaatccaaaattatagctggtgaattaatastgctctctcagtaactgatggaacaaccagataaaaatataggaaaaatatggatttaaatgacaaaatcctgacccaaatggtacttggcagtaccaagataaactgtatgtcgatcgattgagaaaaggttcaagcctgaaatagtatacaaagtatgttgtctgaacacttgaaattaaattagaaaccaacaacaaattgatatcca

SEQ ID NO: 350657 - DNA, 561 bp, Homo sapiens
catccacagagacacaatttaaacacaaagacacaaacaaagtatgagaaaaaatatgctatgcagacactaatcttaaaaatatgctatccagacactaatcataaaaagcttcaacagagatgttaacactagatgaaagaggcttcagagcaaaatatatcaccagaaataaacagggtaatttaataaaaataaaataatcagagaggatgatgttacaattataaattgtgcctcaaagtgcacacaaattacacacacacacagagcctcaaagtatgtgaatcaaaaacaacagacaaaagcaggaaattgacaatccaaaattatagctggtgaattaatactgctctctcagtaactgatggaacaaccagataaaaatataggaaaaatatggatttaaatgacaaaatcctgacccaaatggtacttggcagtaccaagataaactgtatgtcgatcgattgagaaaaggttcaagcctgaaatagtatacaaartatgttgtctgaacacttgaaattaaattagaaaccaacaacaaattgatatcca

SEQ ID NO: 350658 - DNA, 561 bp, Homo sapiens
catccacagagacacaatttaaacacaaagacacaaacaaagtatgagaaaaaatatgctatgcagacactaatcttaaaaatatgctatccagacactaatcataaaaagcttcaacagagatgttaacactagatgaaagaggcttcagagcaaaatatatcaccagaaataaacagggtaatttaataaaaataaaataatcagagaggatgatgttacaattataaattgtgcctcaaagtgcacacaaattacacacacacacagagcctcaaagtatgtgaatcaaaaacaacagacaaaagcaggaaattgacaatccaaaattatagctggtgaattaatactgctctctcagtaactgatggaacaaccagataaaaatataggaaaaatatggatttaaatgacaaaatcctgacccaaatggtacttggcagtaccaagataaactgtatgtcgatcgattgagaaaaggttcaagcctgaaatagtatacaaagkatgttgtctgaacacttgaaattaaattagaaaccaacaacaaattgatatcca

SEQ ID NO: 350659 - DNA, 557 bp, Homo sapiens
gccccagagctataatatggtgaggagggtgacagagcaagacgttatctttaaaaaaaaatggccaggggcagtggctcacgcctgtaatcccaacacttggggaggctgaggcaggtggatcacytgaggtcaggagttcagggccagcctgaccaacaaggaaaaaccccgtctctactaaaaacacaaaattagctgggcatggtgtgacatgtctctaatcccagctactcaggaggctggggcaggagaattgcttgaacctgggaggcagggggttgcagtaaaccgagatcgcatcattgcactccagcctgggcaacaagagggaaaatccacctcaaaaaaagaaaagaataatagatttgcctataaggttttatgaaaaagtgggtgacatttggctttctctctttaaagaagattttcagaaaatattaaaaaataatgggaagaggagccaagatggccgaataggaacagctcgagtctacagctcccagcatgagcgacgcagaagacgggtgatttccgcatttccttttgaggtactg

SEQ ID NO: 350660 - DNA, 557 bp, Homo sapiens
gccccagagctataatatggtgaggagggtgacagagcaagacgttatctttaaaaaaaaatggccaggggcagtggctcacgcctgtaatcccaacacttggggaggctgaggcaggtggatcacctgaggtcaggagttcagggccagcctgaccaacaaggaaaaaccccgtctctactaaaaacacaaaattagctgggcatggtgtgacatgtctctaatcccagctactcaggaggctggggcwggagaattgcttgaacctgggaggcagggggttgcagtaaaccgagatcgcatcattgcactccagcctgggcaacaagagggaaaatccacctcaaaaaaagaaaagaataatagatttgcctataaggttttatgaaaaagtgggtgacatttggctttctctctttaaagaagattttcagaaaatattaaaaaataatgggaagaggagccaagatggccgaataggaacagctcgagtctacagctcccagcatgagcgacgcagaagacgggtgatttccgcatttccttttgaggtactg

SEQ ID NO: 350661 - DNA, 501 bp, Homo sapiens
taatcccagctactcaggaggctggggcaggagaattgcttgaacctgggaggcagggggttgcagtaaaccgagatcgcatcattgcactccagcctgggcaacaagagggaaaatccacctcaaaaaaagaaaagaataatagatttgcctataaggttttatgaaaaagtgggtgacatttggctttctctctttaaagaagattttcagaaaatattaaaaaataatgggargaggagccaagatggccgaataggaacagctcgagtctacagctcccagcatgagcgacgcagaagacgggtgatttccgcatttccttttgaggtactgggttcatctcactagggagtgccagagagtgggtgcaggacagtgggtgaagtgcactgtgcactagctgaagcagggcgagtcattgcctcactcgggaagtgcaaggggtcagggagttagttccctttcctggtcaaagaacggtgtgacagacggcacctg

SEQ ID NO: 350662 - DNA, 501 bp, Homo sapiens
taatcccagctactcaggaggctggggcaggagaattgcttgaacctgggaggcagggggttgcagtaaaccgagatcgcatcattgcactccagcctgggcaacaagagggaaaatccacctcaaaaaaagaaaagaataatagatttgcctataaggttttatgaaaaagtgggtgacatttggctttctctctttaaagaagattttcagaaaatattaaaaaataatgggaagaggagccaagatggccgaataggaacagctcgastctacagctcccagcatgagcgacgcagaagacgggtgatttccgcatttccttttgaggtactgggttcatctcactagggagtgccagagagtgggtgcaggacagtgggtgaagtgcactgtgcactagctgaagcagggcgagtcattgcctcactcgggaagtgcaaggggtcagggagttagttccctttcctggtcaaagaacggtgtgacagacggcacctg

SEQ ID NO: 350663 - DNA, 501 bp, Homo sapiens
taatcccagctactcaggaggctggggcaggagaattgcttgaacctgggaggcagggggttgcagtaaaccgagatcgcatcattgcactccagcctgggcaacaagagggaaaatccacctcaaaaaaagaaaagaataatagatttgcctataaggttttatgaaaaagtgggtgacatttggctttctctctttaaagaagattttcagaaaatattaaaaaataatgggaagaggagccaagatggccgaataggaacagctcgagtctacagctcccagcatgagcgacgcagaagacgggtgatttcygcatttccttttgaggtactgggttcatctcactagggagtgccagagagtgggtgcaggacagtgggtgaagtgcactgtgcactagctgaagcagggcgagtcattgcctcactcgggaagtgcaaggggtcagggagttagttccctttcctggtcaaagaacggtgtgacagacggcacctg

SEQ ID NO: 350664 - DNA, 501 bp, Homo sapiens
taatcccagctactcaggaggctggggcaggagaattgcttgaacctgggaggcagggggttgcagtaaaccgagatcgcatcattgcactccagcctgggcaacaagagggaaaatccacctcaaaaaaagaaaagaataatagatttgcctataaggttttatgaaaaagtgggtgacatttggctttctctctttaaagaagattttcagaaaatattaaaaaataatgggaagaggagccaagatggccgaataggaacagctcgagtctacagctcccagcatgagcgacgcagaagacgggtgatttccgcatttccttttgaggtactgggttcatctcactagggagtgccagasagtgggtgcaggacagtgggtgaagtgcactgtgcactagctgaagcagggcgagtcattgcctcactcgggaagtgcaaggggtcagggagttagttccctttcctggtcaaagaacggtgtgacagacggcacctg

SEQ ID NO: 350665 - DNA, 508 bp, Homo sapiens
aataaaaaccggtggaaatgaatggaatggaatggaataaacccgagtgcaatggattggaatggaatggaatggaatggaatggaatggaagggaatggaatgaaatggaatggattggaatgaaatgaacacgagtggaatggaatggaatggaatggaatggaatggaatagaatggaatggaatcaacccgagtggaaaggaatggaatggaaaggaatggaatggaatggaatggaatggactagaatggaatcgaatggaatggaatgtaatggaatagaatggactggaaaggaatggaatggaaggaagtcaacacgattggaatggaattgaaagcaatggaagggaatggaatcaactggaaaggaatgaaatggaatggaatggaatggaatggaatggaatggaatggaatggaattaacccgaggggaatggaatggaatggattggaawgaacacgagtggaatggaatggaatggaatggaatggaatggaac

SEQ ID NO: 350666 - DNA, 473 bp, Homo sapiens
ttaaaatgttttcatagttctttacaactatatagaaatatagctcatttgcctatgtttgtttgcatcctgcctcttttattagttataatcggttttgtgttttgtttggagctttatacccataagatcatgtgtagatataattttacacctattttttatttctaatttagatgccttttatttctttgtcttgcctaattgctctggctagaactgccagtgctacgttgaatacaagtggcaaatgcaccatcyttttcttctagatgttaggaaaacagctttcagtgtttcatcactgatcatgatattaactgttgggtttttgtacatcccattgtcatgttgcagaagatcccttctatgcctagtttattgagtatttttattatagaagggtgttgtatttcatcaacgttttctctgcatcaattgaaataatcacgtgcttattcattttactgtta

SEQ ID NO: 350667 - DNA, 485 bp, Homo sapiens
gctctggctagaactgccagtgctacgttgaatacaagtggcaaatgcaccatccttttcttctagatgttaggaaaacagctytcagtgtttcatcactgatcatgatattaactgttgggtttttgtacatcccattgtcatgttgcagaagatcccttctatgcctagtttattgagtatttttattatagaagggtgttgtatttcatcaacgttttctctgcatcaattgaaataatcacgtgcttattcattttactgttacagcatattacactgattgattttttatatgttgaaccacccttgcattttggggataaatctcaaagggtgatagtttacaatcctttgattatacagtattgctgctgctagtattttgctagtattgctagtattttgctgagatttttgcttatatattcataagggatatagtgctgtatttctctcttttgtgctctctttgtctttggtat

SEQ ID NO: 350668 - DNA, 560 bp, Homo sapiens
tttacacctattttttatttctaatttagatgccttttatttctttgtcttgcctaattgctctggctagaactgccagtgctacgttgaatacaagtggcaaatgcaccatccttttcttctagatgttaggaaaacagctttcagtgtttcatcaytgatcatgatattaactgttgggtttttgtacatcccattgtcatgttgcagaagatcccttctatgcctagtttattgagtatttttattatagaagggtgttgtatttcatcaacgttttctctgcatcaattgaaataatcacgtgcttattcattttactgttacagcatattacactgattgattttttatatgttgaaccacccttgcattttggggataaatctcaaagggtgatagtttacaatcctttgattatacagtattgctgctgctagtattttgctagtattgctagtattttgctgagatttttgcttatatattcataagggatatagtgctgtatttctctcttttgtgctctctttgtctttggtataaggataatgctgtta

SEQ ID NO: 350669 - DNA, 560 bp, Homo sapiens
tttacacctattttttatttctaatttagatgccttttatttctttgtcttgcctaattgctctggctagaactgccagtgctacgttgaatacaagtggcaaatgcaccatccttttcttctagatgttaggaaaacagctttcagtgtttcatcactgatcatgatattaactgttgggtttttgtacatcccattgtcatgttgcagaagatcccttctatgcctagtttattgagtatttttattatagaagggtgttgtatttcatcaaygttttctctgcatcaattgaaataatcacgtgcttattcattttactgttacagcatattacactgattgattttttatatgttgaaccacccttgcattttggggataaatctcaaagggtgatagtttacaatcctttgattatacagtattgctgctgctagtattttgctagtattgctagtattttgctgagatttttgcttatatattcataagggatatagtgctgtatttctctcttttgtgctctctttgtctttggtataaggataatgctgtta

SEQ ID NO: 350670 - DNA, 595 bp, Homo sapiens
ttacaactatatagaaatatagctcatttgcctatgtttgtttgcatcctgcctcttttattagttataatcggttttgtgttttgtttggagctttatacccataagatcatgtgtagatataattttacacctattttttatttctaatttagatgccttttatttctttgtcttgcctaattgctctggctagaactgccagtgctacgttgaatacaagtggcaaatgcaccatccttttcttctagatgttaggaaaacagctttcagtgtttcatcactgatcatgatattaactgttgggtttttgtacatcccattgtcatgttgcagaagatcccttctatgcctagtttattgagtatttttattatagaagggtgttgtatttcatcaacgttttctctgcakcaattgaaataatcacgtgcttattcattttactgttacagcatattacactgattgattttttatatgttgaaccacccttgcattttggggataaatctcaaagggtgatagtttacaatcctttgattatacagtattgctgctgctagtattttgctagtattgctagtattttgct

SEQ ID NO: 350671 - DNA, 395 bp, Homo sapiens
ttcatcaacgttttctctgcatcaattgaaataatcacgtgcttattcattttactgttacagcatattacactgattgattttttatatgttgaaccacccttgcattttggggataaatctcaaaggktgatagtttacaatcctttgattatacagtattgctgctgctagtattttgctagtattgctagtattttgctgagatttttgcttatatattcataagggatatagtgctgtatttctctcttttgtgctctctttgtctttggtataaggataatgctgttatcaaaaaatgaattagcaagtattccttcttcatatattttgtcagaagagtttgagaagaaatggtattaattcttctttaaatgttaggttgactcacc

SEQ ID NO: 350672 - DNA, 275 bp, Homo sapiens
tacagcatattacactgattgattttttatatgttgaaccacccttgcattttggggataaatctcaaagggtgatagtttacaatcctttgattatacagtattgctgctgctagtattttgctagtattkctagtattttgctgagatttttgcttatatattcataagggatatagtgctgtatttctctcttttgtgctctctttgtctttggtataaggataatgctgttatcaaaaaatgaattagcaagtattccttcttcatatatt

SEQ ID NO: 350673 - DNA, 395 bp, Homo sapiens
ttcatcaacgttttctctgcatcaattgaaataatcacgtgcttattcattttactgttacagcatattacactgattgattttttatatgttgaaccacccttgcattttggggataaatctcaaagggtgatagtttacaatcctttgattatacagtattgctgctgctagtattttgctagtattgctagtattttgctgagatttttgcttatatattcatargggatatagtgctgtatttctctcttttgtgctctctttgtctttggtataaggataatgctgttatcaaaaaatgaattagcaagtattccttcttcatatattttgtcagaagagtttgagaagaaatggtattaattcttctttaaatgttaggttgactcacc

SEQ ID NO: 350674 - DNA, 625 bp, Homo sapiens
gtatttctctcttttgtgctctctttgtctttggtataaggataatgctgttatcaaaaaatgaattagcaagtattccttcttcatatattttgtcagaagagtttgagaakaaatggtattaattcttctttaaatgttaggttgactcaccagttaatgcagctatttggtcataaatgtttctttgttaatcgctttcgattactaattcaatctcctaggttataggtctattcagattttctctttcttcttgagccactttggtagtttgtgtctttctagcgattcatccatttcatccagggcacctagtttgttgctagacagttgttcacagtatactcctgtaatccttttgtatttctataaagttggtagtaatggctctgctttcatttattattttaataattagtcttccatcttttgctcagtcaatatagtgaaaggcttgatctttcaaagaatctacattttttcattctactgctctccaaccttctgttttattgatttatgctctaattatgctctttattatttctttccttctgctagctttggatttagtcttccacctggatttattttgagagtgatattgatgtaacttcatgga

SEQ ID NO: 350675 - DNA, 625 bp, Homo sapiens
gtatttctctcttttgtgctctctttgtctttggtataaggataatgctgttatcaaaaaatgaattagcaagtattccttcttcatatattttgtcagaagagtttgagaagaaatggtattaattcttctttaaatgttaggttgactcaccagttaatgcagctatttggtcataaatgtttctttgttaatcgctttcgattactaattcaatctcctaggttataggtctattcagattttctctttcttcttgagccactttggtagtttgtgtctttctagcgattcatccatttcatccagggcacctartttgttgctagacagttgttcacagtatactcctgtaatccttttgtatttctataaagttggtagtaatggctctgctttcatttattattttaataattagtcttccatcttttgctcagtcaatatagtgaaaggcttgatctttcaaagaatctacattttttcattctactgctctccaaccttctgttttattgatttatgctctaattatgctctttattatttctttccttctgctagctttggatttagtcttccacctggatttattttgagagtgatattgatgtaacttcatgga

SEQ ID NO: 350676 - DNA, 625 bp, Homo sapiens
gtatttctctcttttgtgctctctttgtctttggtataaggataatgctgttatcaaaaaatgaattagcaagtattccttcttcatatattttgtcagaagagtttgagaagaaatggtattaattcttctttaaatgttaggttgactcaccagttaatgcagctatttggtcataaatgtttctttgttaatcgctttcgattactaattcaatctcctaggttataggtctattcagattttctctttcttcttgagccactttggtagtttgtgtctttctagcgattcatccatttcatccagggcacctagtttgttgctagacagttgttcacagtatactcctgtaatccttttgtatttctrtaaagttggtagtaatggctctgctttcatttattattttaataattagtcttccatcttttgctcagtcaatatagtgaaaggcttgatctttcaaagaatctacattttttcattctactgctctccaaccttctgttttattgatttatgctctaattatgctctttattatttctttccttctgctagctttggatttagtcttccacctggatttattttgagagtgatattgatgtaacttcatgga

SEQ ID NO: 350677 - DNA, 625 bp, Homo sapiens
gtatttctctcttttgtgctctctttgtctttggtataaggataatgctgttatcaaaaaatgaattagcaagtattccttcttcatatattttgtcagaagagtttgagaagaaatggtattaattcttctttaaatgttaggttgactcaccagttaatgcagctatttggtcataaatgtttctttgttaatcgctttcgattactaattcaatctcctaggttataggtctattcagattttctctttcttcttgagccactttggtagtttgtgtctttctagcgattcatccatttcatccagggcacctagtttgttgctagacagttgttcacagtatactcctgtaatccttttgtatttctataaagttggtagtaatggctctgctttcatttattattttaataattagtcttccatcttttgctcagtcaatatagtgaaaggcttgatctttcaaagaatctacattttttcattctactgctctccaaccttctrttttattgatttatgctctaattatgctctttattatttctttccttctgctagctttggatttagtcttccacctggatttattttgagagtgatattgatgtaacttcatgga

SEQ ID NO: 350678 - DNA, 440 bp, Homo sapiens
ccaagttttatttttttctctgacccaaaaaacaatttggcagccggtgagaaactctcacagctctggatgtgagtttaggacactgcatttctaccattcaatttcttactacttttttgcacagggatcatggcacaagttgcagtttccaccctgcccatggaagatgaggagtccatggaagatgaggagtctgttgaagatgattccgtggagagcaggatggtggtgacatttctcatatcagctctcgagtycacggtgagaccttctgttctaacatgatataatttggtagaactaggtggtagataaggttgatttgtttttgtagaacttataattttatgatttgtagttctaatgagtagatctttttctggaatagtagttatggtcaaacacttctaaccaaatgtgccatgttgttcagtctg

SEQ ID NO: 350679 - DNA, 440 bp, Homo sapiens
ccaagttttatttttttctctgacccaaaaaacaatttggcagccggtgagaaactctcacagctctggatgtgagtttaggacactgcatttctaccattcaatttcttactacttttttgcacagggatcatggcacaagttgcagtttccaccctgcccatggaagatgaggagtccatggaagatgaggagtctgttgaagatgattccgtggagagcaggatggtggtgacatttctcatatcagctctcgagttcacggtgagaccttctgttctaacatgatataattkggtagaactaggtggtagataaggttgatttgtttttgtagaacttataattttatgatttgtagttctaatgagtagatctttttctggaatagtagttatggtcaaacacttctaaccaaatgtgccatgttgttcagtctg

SEQ ID NO: 350680 - DNA, 407 bp, Homo sapiens
gattccgtggagagcaggatggtggtgacatttctcatatcagctctcgagttcacggtgagaccttctgttctaacatgatataatttggtagaactrggtggtagataaggttgatttgtttttgtagaacttataattttatgatttgtagttctaatgagtagatctttttctggaatagtagttatggtcaaacacttctaaccaaatgtgccatgttgttcagtctggtctcaaaatatggggctcaagagacctgcccaccttggcctcccaaaatactgggattacaggtgtaagcccctgaatctggccagatatttttctttttatggctgaataatactctgtgtatgtatatattacattttctttatctattcacctactgatgggcattaggt

SEQ ID NO: 350681 - DNA, 407 bp, Homo sapiens
gattccgtggagagcaggatggtggtgacatttctcatatcagctctcgagttcacggtgagaccttctgttctaacatgatataatttggtagaactaggtggtagataaggttgatttgtttttgtagaacttataattttatgatttgtagttctaatgagtagatctttttctggaatagtagttatgktcaaacacttctaaccaaatgtgccatgttgttcagtctggtctcaaaatatggggctcaagagacctgcccaccttggcctcccaaaatactgggattacaggtgtaagcccctgaatctggccagatatttttctttttatggctgaataatactctgtgtatgtatatattacattttctttatctattcacctactgatgggcattaggt

SEQ ID NO: 350682 - DNA, 407 bp, Homo sapiens
gattccgtggagagcaggatggtggtgacatttctcatatcagctctcgagttcacggtgagaccttctgttctaacatgatataatttggtagaactaggtggtagataaggttgatttgtttttgtagaacttataattttatgatttgtagttctaatgagtagatctttttctggaatagtagttatggtcaaacacttctaaccaaatgtgccatgttgtycagtctggtctcaaaatatggggctcaagagacctgcccaccttggcctcccaaaatactgggattacaggtgtaagcccctgaatctggccagatatttttctttttatggctgaataatactctgtgtatgtatatattacattttctttatctattcacctactgatgggcattaggt

SEQ ID NO: 350683 - DNA, 288 bp, Homo sapiens
cattttacattccataaagcaatgcatacagcttccaatttctatatagcattgctgacagttaatattttctgtttatgtattgtatttttatagtgtttgaaattaatctgaggcttttcactgataccaaaatattaggaaaggttttccaaaaataatrctgcttattatagaggattttacgtgttacttgatgccctgtgatctgttttctaagtaagaagaggaacttcttggctgggcacagcagctcatgcctgtaatcctagcacttttagagaccga

SEQ ID NO: 350684 - DNA, 288 bp, Homo sapiens
cattttacattccataaagcaatgcatacagcttccaatttctatatagcattgctgacagttaatattttctgtttatgtattgtatttttatagtgtttgaaattaatctgaggcttttcactgataccaaaatattaggaaaggttttccaaaaataatgctgcttattatagaggattttacgtgttacttgatgccctgtgatctgttttctaagtaagaagaggaacttcttggctgggcacagcrgctcatgcctgtaatcctagcacttttagagaccga

SEQ ID NO: 350685 - DNA, 357 bp, Homo sapiens
ttctcaacataacatgtcaaaacttatacaccgttaaatattaaaaaataatacaatgtaagcaatattttaaatacaatatttaatgattagatacattaggtttattatattacttataacattccattatataaaaattcatttgtttatttattcagattaaacaactattaaggctgaatgtctcatgtctgtaaccccagcactttgagaggctgaggcgagcagaacacytgagcccaacagttaaagaagagcctgggcaacaaggcaaaaccctatctctacaaaactcagcccagcatggtgacacaggtctatggtgacatagctctattgtttcaactacttgga

SEQ ID NO: 350686 - DNA, 357 bp, Homo sapiens
ttctcaacataacatgtcaaaacttatacaccgttaaatattaaaaaataatacaatgtaagcaatattttaaatacaatatttaatgattagatacattaggtttattatattacttataacattccattatataaaaattcatttgtttatttattcagattaaacaactattaaggctgaatgtctcatgtctgtaaccccagcactttgagaggctgaggcgagcagaacacttgagcccaacagttaaagaagagcctgggcaacaaggcaaaaccctatctctacaaaactcagcccagcatggtgacacaggtctatggtgwcatagctctattgtttcaactacttgga

SEQ ID NO: 350687 - DNA, 402 bp, Homo sapiens
gctcctaactcagggtccccataaatcaaaccacctaaaatcaaatagattaaagaatgaattagataaagagtttacttgcttaactaagtgggtttttttgttaattccctacaaccaaatctttataatacaccatgttttctccacatgctgtaagtgttagcagctgcacagatacttaagataagtgtctcatgakagtagagaagtcttgatctgtgatcttgggaaaagctgttcacattaaggatgccatcttcttctggggggaactgtccttgttagctttaccttaagggttccaatgggcatatggttccgagtgtggagggacccttctgagttgtgagactatgaacccaaagtttaaggttttaaatttttgctgtcatgtggatg

SEQ ID NO: 350688 - DNA, 591 bp, Homo sapiens
gatctgtgatcttgggaaaagctgttcacattaaggatgccatcttcttctggggggaactgtccttgttagctttaccttaagggttccaatgggcatatggttccgagtgtggagggacccttctgagttgtgagactatgaacccaaagtttaaggttttaaatttttgctgtcatgtggatggcaagggcagtccttctctgatgttctcagaagatccagtcatcagattctagattttgaagggtttgactgtcctcagtgaaccataaaaggctttctttacctggtgaaaatacacttcagggtaatwatctactgttttaacatcaactctctcgcatggaagagtttttatacaatcagaaaacatgcactgaaaatgaaaactgaatgaaatccctttataaaacgtttaaatggcccatcagataaccaaatgtacctgaagttttgattgttttcctagaaatataggtttgacaaaccaaacattggttataaactattttagcagtttagaaatcaccacaccaatatatttaatttggatcattttctctttccatgatgagttatggaatgcag

SEQ ID NO: 350689 - DNA, 591 bp, Homo sapiens
gatctgtgatcttgggaaaagctgttcacattaaggatgccatcttcttctggggggaactgtccttgttagctttaccttaagggttccaatgggcatatggttccgagtgtggagggacccttctgagttgtgagactatgaacccaaagtttaaggttttaaatttttgctgtcatgtggatggcaagggcagtccttctctgatgttctcagaagatccagtcatcagattctagattttgaagggtttgactgtcctcagtgaaccataaaaggctttctttacctggtgaaaatacacttcagggtaataatctactgttttaacatcaactctctcgcatggaagagtttttatacaatcagaaaacatgcactgaaaatgaaaactgaatgaaatccctttataaaaygtttaaatggcccatcagataaccaaatgtacctgaagttttgattgttttcctagaaatataggtttgacaaaccaaacattggttataaactattttagcagtttagaaatcaccacaccaatatatttaatttggatcattttctctttccatgatgagttatggaatgcag

SEQ ID NO: 350690 - DNA, 591 bp, Homo sapiens
gatctgtgatcttgggaaaagctgttcacattaaggatgccatcttcttctggggggaactgtccttgttagctttaccttaagggttccaatgggcatatggttccgagtgtggagggacccttctgagttgtgagactatgaacccaaagtttaaggttttaaatttttgctgtcatgtggatggcaagggcagtccttctctgatgttctcagaagatccagtcatcagattctagattttgaagggtttgactgtcctcagtgaaccataaaaggctttctttacctggtgaaaatacacttcagggtaataatctactgttttaacatcaactctctcgcatggaagagtttttatacaatcagaaaacatgcactgaaaatgaaaactgaatgaaatccctttataaaacgtttaaatggcccatcagrtaaccaaatgtacctgaagttttgattgttttcctagaaatataggtttgacaaaccaaacattggttataaactattttagcagtttagaaatcaccacaccaatatatttaatttggatcattttctctttccatgatgagttatggaatgcag

SEQ ID NO: 350691 - DNA, 465 bp, Homo sapiens
tattggtattaagagtctctgcttctagaactggttatttgcaggaaaatacatgttattcaattagatgaagtgttttatataaactcttcatggacaactcataaatcacataaaaatccctttgcaatacaaatcttgagaacataaatttaaatttctacatttccacaatttatatttttaaatcagatacaatgttacccaggctgttctcaaactcctgtgttcaagcaatcttactgtctcaaactcccaagtagcagggactacaggtgtacaccaccaaactcagctatttttctacaacttttaatayttttttagtctcactacagaaccaataatataagtagagaaacaatctctcctaaaaactatatgacaccaaaatgataagtttccaagaacaaaagctatatgttatgtgctgaacatttctgccactaaaaattaccaggagga

SEQ ID NO: 350692 - DNA, 465 bp, Homo sapiens
tattggtattaagagtctctgcttctagaactggttatttgcaggaaaatacatgttattcaattagatgaagtgttttatataaactcttcatggacaactcataaatcacataaaaatccctttgcaatacaaatcttgagaacataaatttaaatttctacatttccacaatttatatttttaaatcagatacaatgttacccaggctgttctcaaactcctgtgttcaagcaatcttactgtctcaaactcccaagtagcagggactacaggtgtacaccaccaaactcagctatttttctacaacttttaatacttttttagtctcactacagaaccaataatataagtagagaaacaatctctcctaaaaactatatgacaccaaaatsataagtttccaagaacaaaagctatatgttatgtgctgaacatttctgccactaaaaattaccaggagga

SEQ ID NO: 350693 - DNA, 465 bp, Homo sapiens
tattggtattaagagtctctgcttctagaactggttatttgcaggaaaatacatgttattcaattagatgaagtgttttatataaactcttcatggacaactcataaatcacataaaaatccctttgcaatacaaatcttgagaacataaatttaaatttctacatttccacaatttatatttttaaatcagatacaatgttacccaggctgttctcaaactcctgtgttcaagcaatcttactgtctcaaactcccaagtagcagggactacaggtgtacaccaccaaactcagctatttttctacaacttttaatacttttttagtctcactacagaaccaataatataagtagagaaacaatctctcctaaaaactatatgacaccaaaatgataagtttccaagaacaaaagctatatgytatgtgctgaacatttctgccactaaaaattaccaggagga

SEQ ID NO: 350694 - DNA, 586 bp, Homo sapiens
aacactgctaagagggtatgaatgtccctcacatagtattccagaacactccttctgtggtctgaatgtttgttcctcacataggattcgagaacactcctgctgtggtctgaatgtttgtcccttacctaggattcgagaacattcacgctgggatgtaaatgcttgcccttaacataggatttcagaacactgctcctggggtctgaaagtttgtccctcacataggattccagaactctcctgctgtggtctgaaagtttgtaccgcacataggattccagaacactgctgctgtggtcggaatgtttttctgtcacataggattccagaacactgcggctgggttctgaatgtttgtccctcacataggatttcagaacgctgctacgagggtctgattgttggtccctcacataggattcctgaacactgctgctgggctctgaatgtttgtccctcacattggattgcagaacactactgctatggtctgaacgtttktccgtcacataggattccagaacgctcctgctgtggtctgaatgtttgtctgtcacataggattccagaacactgcggctgg

SEQ ID NO: 350695 - DNA, 650 bp, Homo sapiens
caagatcgtttcaaaatgtgttcaccagcatgaattgctgatttgtcaagaaagaagctgttaatttgggcactgctatctctctgtttctctgactcacacacacacacacacacacacacacaaacacacacacactttccattactcaagggaaaacattaattttccaaactagtacataaattttccaaactagtataatcaaagccacaattgataatattctattttttcacgtgcatcttcaaaatcagtatagctgtactcattagagtcatttttgagtcacctaacacagatttccagaatacaacatattccttgctttccaatatgtttgaatataccatttttcaaaaatctgagcttgatgtgttttttcartgaaaatgttctcagtaagaagtaactattttcttggtgatatgtaattgttatttatcccattaattttataggtatatcttcttaaattttgcaaagtcatcatgaatatattgctgtttacaataatctttgaaatcttctgaaataccaacttacaatggcatttaatatttgtaattgtgagttcatattttaagaaataattactaagtttgcattaactttttgtgcctctttttcaatcaattcactgaagagaa

SEQ ID NO: 350696 - DNA, 599 bp, Homo sapiens
catttttcaaaaatctgagcttgatgtgttttttcaatgaaaatgttctcagtaagaagtaactattttcttggtgatatgtaattgttatttatcccattaattttataggtatatcttcttaaattttgcaaagtcatcatgaatatattgctgtttacaataatctttgaaatcttctgaaataccaacttacaatggcatttaatatttgtaattgtgagttcatattttaagaaataattactaagtttgcattaactttttgtgcctctttttcaatcaattcactgaagagaaccscagagatatccacaagtagccttgctggaggatttttatttgtttattttactaactcacacttattttttcaaattaagtaattaaaacagcactctacaaatgaaaaaatcataaggacttttacataaggtaattttgtatcagtgagcttctgataggttttgcagtagtaacaagtaacattacaatctcaattgttcacagcaggcttatttcttattcacattatttgtcagttccatgctgtttttccaggtatcttcgttattctgcaatccagacaggtggagtag

SEQ ID NO: 350697 - DNA, 600 bp, Homo sapiens
ttaaatttttttagcctcagtttgcttatatttaaaataaatgtatcatttatttaacagcagttattgcacggttcaaaggaaattatgaactaaaggaaacyagcacctctttaataagtactacttgaaaagcagcatcagtgcatattcacaaatgttaaataatttaaaacaataatgaactacaaaaaatatacttactggtaaataaatacttctgcctaacaaagttttgccaactaaagtggcagcttacataatttaggaataaaatacataagcctttgctgcttttcatggtaatccagtttgtaaacttatagggcaggttacatttaagaatatattttctaaatattttcttctgtatgtttaacctctaagatattttatgaaaaaggcttccctggtcaggtaagtttgagaaacattgtacactatatatatttcattgagattcgaaatagtgcattaaaattctgagaattcctgccaaagaaatgttacatgtaggaaaattcagataataaacttcattgaggccctaaagacattttacataaaatcattataaacattctgaagtactgcaaaata

SEQ ID NO: 350698 - DNA, 608 bp, Homo sapiens
cccactgattcgagttccttatgtgctgccattatcccttgaggtgctatctccagtcattcttaacagccatgattgctgaccagctctcacagccctagaaccacgccctcctagagacacaggccttgaaggggaggctgcccacatgagcagacactgtggccttggctatagttgaatttagaggagggttgagaggacatgagataacaacagcttctgctgtaggaagtactatctgtttaaacatgggaggtagcgttatcacagaaaataaagtgattcacaaagaagytaatcaaaggaaggttttcataaatgtggctggaaatggatggcgagattaagattgcatagtattttggctatgaaacctgagaaccactgacatgctgtcttcagcttactcaacgtccagctggcaacaaagacaatgtaacgaacagtttgtaatacctaaagtttaactctctgtcaaaaacacatctgactagctcaggaaaaataatggcttagcagttccaattatatcagctagattttattatttcatacagttagagtcttgtgcctattgtaaattttattaaccccttaaacagaca

SEQ ID NO: 350699 - DNA, 608 bp, Homo sapiens
cccactgattcgagttccttatgtgctgccattatcccttgaggtgctatctccagtcattcttaacagccatgattgctgaccagctctcacagccctagaaccacgccctcctagagacacaggccttgaaggggaggctgcccacatgagcagacactgtggccttggctatagttgaatttagaggagggttgagaggacatgagataacaacagcttctgctgtaggaagtactatctgtttaaacatgggaggtagcgttatcacagaaaataaagtgattcacaaagaagctaatcaaaggaaggttttcataaatgtggctggaaatggatggcgagattaagattgcatagtattttggctatgaaacctgagaaccactgacatgctgtcttcagcttactcaacgtccagctggcaacaaagacaatgtaacgaacagtttgtaatacctaaagtttaactctctgtcaaaaacacatctgactagctcaggaaaaataatggcttagcagttccaattatatcagctagawtttattatttcatacagttagagtcttgtgcctattgtaaattttattaaccccttaaacagaca

SEQ ID NO: 350700 - DNA, 617 bp, Homo sapiens
ccctttgtccaacatattcacgatatataaatgatctgcccgttaaccacttagtggctacctcctttatcaaatcaaaaaaacatagtgtttatagaatttgtatcatgtgcacrtttcaggcattcactgggggtcttggaatgtatcccctgtggataaggtgggactattgttcttgtttgggccagacagtaatgttttctggctatgaagacagactccgtaaaggtaatcatgaggaagagtggaccatgggaagattagaggccactattattctaaaactggatccttcaacatccaccttcaagtataacttctttttttcagaaaatactttccatcctgaccctataacattactgcacaagatctggtattcagtttgaaagcacaagtgttgtatctcttattatgccttaaagcataatagatgttgctcatcttcttcttttcatttgtcctcatctctaaaaatcttaaaatatttagggaggggccaagatggccaagtagaaacagctgtggtctgcagctcccagcgagaccaacgcagaaggtgggtgatttctgcatttccagctgaggtgcccatttcgtctaattgggtaccc

SEQ ID NO: 350701 - DNA, 615 bp, Homo sapiens
gtactgtgatctgggctagactaggtcatgaggatttactagactaggtaataattttctagagttttaaagaaaattttattaaatattcatttaaccttaattcagagcagagtctgagcatacagggaggaaaattaaagaatyaggccatctagtgacagctctctaccggtattccactttgccaagcaagtatgcactggccccaaacttgtgtataccatccagccaaacaaaggtcatgaataaccagactcaactcccttagaaaaacatatacgaataacttatttttgctcaaggtttccccttgggagagtatctcaattgcgtcactactccactgtaaacagctttttacagcataccatccaaccagacatattgtactatccatgacagagactgctagaaaaagtcaccctactcattacatattcagtcttcttagtgtcccttatccataaggaccaggagtttgtgctactcttttaccaagttaagcactatttatgaaaaataattggaaaaattagaatcttatagttttaaaataacttattttattcaataaaaatacattgtaactttcttcaaagaatttaagagttg

SEQ ID NO: 350702 - DNA, 561 bp, Homo sapiens
ctttctctctgtcttgcaccctttctcactatgtgatatgcctgctcccgcctttgccttycaccatgattgtaagcttcccgtagcctgaccagaagcagatgctggtgccatacttgtacagcctgcagaattgtaagccaaataaacctcttttctttattaattacccagtctcgggtattttttttatagcaatgaaaaatggagtaacgcaagcataggaaggggcttgtctgtagtctatatatcaagagtctttctgatataccaggaaatagtacattataaaagaaagcatgagtcaaatttgggttaacattttagttttactgattatgaatcatctgattttgcacaagataattaacctacctgatctccattttccaatcctaaaaatgggaataattgtaatgtctacttcactagactggcatggaggtgaatgatatgacatatgaaaactgcctagccctcactgaatgtgtaataaaaattgaaacatctatcgctccttttctccttgcttcaggtttctttcctaatagaaaactcctt

SEQ ID NO: 350703 - DNA, 575 bp, Homo sapiens
tctctgaaaatatttttcatgtattcaaaggcatatggtttccctcagtgaacacccaaaatgttcacaaactagagaatttctttaatacaatttgaagcaggtagcaccctgccttttctgccttccaaatcccattttgcttcttagactttcctttaccttttctgtctcytacagtcaacattagggccttctacctgctggggaaccacccactgtacctctctctaccagtgcctctgcctcaccccggccctgccttggcctggccctctcacactcaagttgagcacttttctccagttgactctactaaatgagctctatactttatcctcgtctatataatctactaatgacccagaacagctattgcacctagataccaaccatatattttatctacatactactcaccatgctgcatactgtcaggcctctgagcccaagccaagccatcgtatcccctgtgacttgcacgtatacgcccagatggcctgaagtaactgaagaatcacaaaagaagtgaaaaagccctgccccgccttaactgatgacattccaccattgtg

SEQ ID NO: 350704 - DNA, 585 bp, Homo sapiens
ttcctaacgttcattataatgtatctgtagaatatttaaaattatttatgtggcttacatttctactggacagtaataaaattactcatctagtttcatactcatctagtcttgcatgacatctgtatttatacaagttcacggagagctgacacaagttattcaagaggcatgwgacttatagttatctataatttggttgttcttgctcctgttttattttttcctcaaatcagggaaacaaaagttatctgagaagagtcatcctggaaacaactgaattaattttttaatccgttaattgaatatatattcattgttatatatggttacatataacaatgaattatatatgccttatatatgtatcatggactacactttactaaagacatctgaatgtaaaaagacattatcctttattctaaagcgtactttatgcctttattttgtattttcactataaatttctctagatagttatttttacatttcaaatttagtatattaaggtctattatatataataaagtcaattcattttaaataaacagttcgactcacatcggcatatgaatataccaa

SEQ ID NO: 350705 - DNA, 533 bp, Homo sapiens
taaatggaacaacaaagcatgagtgacagcacatctgtttatagcatggtttgctgaatagtttaagcccattgtttaggcctaccgcttaaaaataaataaataaaaaagattctttcagaagattatgtcattggccatgcactttgttgcccaaggtctgtcatggagatgtacaaggagattagtgttgtttccgtgactgctaacatagcatacattctgtagcccagatcaaggagtaatgttgactttcaagtcctattatttaagaaatccatttcataaggcaataacttcaaaagatagtgatccctctgatggatctgagcaaaactgaaaatctgggaaggatttaccattctaaatgccrtgaagaacatttgtgattcatgggagaaggtcaaaatatcaacattaacaagtgtctgcaagaagttgattccaactctcgtggattattaccctgaggggttcaagacttcagtgaaggaagtaactgcacatatggtagaaataggaagaaaactaga

SEQ ID NO: 350706 - DNA, 631 bp, Homo sapiens
aaaattatgacatctggatgtagttgagaattgtacttaatttacaaattaatttgagttataattgcatttttatactatgaaaccattccttgagggaatgtgttatgaaaacaaaaggtgtagctattggttggtccgtatttctaaygggttttctagaagaaaaatatatggttggcatgtatttgtcatttaaacactaattatatatgtctatatctatctacctatctatctatatatatagtgtgtgtgtatatgtttatgtgtatatttaatcaatagttttgctccaaagcaaacatgttcatattatgactaagaatattgactattgggcacattctaacagacagatcaacagaataatacatctttgttggttttctcccacctataaagcatgtgccacttacaacttggctgtttttgccactatgttgattgaggagcaccaagtcactcaataatgatacacactaggctggacatggtagctcatgcctgtaatcccaacactttgggaagctgaggtgcgaggattgcttgaaaccaggagttcaagaccagcctgggcagcaaagcaataacttgcctttaaaaaaatttttttaaaggttagtaggac

SEQ ID NO: 350707 - DNA, 631 bp, Homo sapiens
aaaattatgacatctggatgtagttgagaattgtacttaatttacaaattaatttgagttataattgcatttttatactatgaaaccattccttgagggaatgtgttatgaaaacaaaaggtgtagctattggttggtccgtatttctaatgggttttctagaagaaaaatatatggttggcatgtatttgtcatttaaacactaattatatatgtctatatctatctacctatctatctatatatatagtgtktgtgtatatgtttatgtgtatatttaatcaatagttttgctccaaagcaaacatgttcatattatgactaagaatattgactattgggcacattctaacagacagatcaacagaataatacatctttgttggttttctcccacctataaagcatgtgccacttacaacttggctgtttttgccactatgttgattgaggagcaccaagtcactcaataatgatacacactaggctggacatggtagctcatgcctgtaatcccaacactttgggaagctgaggtgcgaggattgcttgaaaccaggagttcaagaccagcctgggcagcaaagcaataacttgcctttaaaaaaatttttttaaaggttagtaggac

SEQ ID NO: 350708 - DNA, 585 bp, Homo sapiens
ttcctaacgttcattataatgtatctgtagaatatttaaaattatttatgtggcttacatttctactggacagtaataaaattactcatctagtttcatactcatctagtcttgcatgacatctgtatttatacaagttcacggagagctgacacaagttattcaagaggcatgtgacttatagttatctataatttggttgttcttgctcctgttttattttttcctcaaatcagggaaacaaaagttatctgagaagagtcatcctggaaacaactgaattaattttttaatccgttaattgaatatatattcattgttatatatggttacatataacaatgaattatatatgccttatatatrtatcatggactacactttactaaagacatctgaatgtaaaaagacattatcctttattctaaagcgtactttatgcctttattttgtattttcactataaatttctctagatagttatttttacatttcaaatttagtatattaaggtctattatatataataaagtcaattcattttaaataaacagttcgactcacatcggcatatgaatataccaa

SEQ ID NO: 350709 - DNA, 580 bp, Homo sapiens
tgtggcaacacaaccaaagtatcctgagattgaactattgagtatcacagaaaacctgataccatcagtgtaatcatgttayggcaatgaaagaaaacataagttaaagaagaaatggggaaataaagccctaaaaatataagaccagatagactgaaaaatgccctgattagggagcacttgaggtgccattagctgtggacttttagagccagctagagaatattgcgtgctagaatctgacataaattctgttcaaagagcctgttgtatgggatttaagggagactttttcttgattacgtatggaaattgaagtatggagtcactgtataccttgtatgagtgttaatttttttttttattgtaacagtcctaaatgcccatgaaaacctgaatttaagaagtggtcggtaatacatcaggaaaattgataatgtctaaataggaaaaataagaccaaactcaagtatggaatttttacacttttgtctttaaacttgtagaaaaaaaagaatttactgtggatatttagctttctagaaggtgtgtatataaaatgcgccttaaaaggaggata

SEQ ID NO: 350710 - DNA, 588 bp, Homo sapiens
actataaagacacatgcacatttatgtttattgcagcattatttacaatagcaaagacttggaaccaacccaaatgcccatcattgatagactggataaagaaaatgtggcacatatacaccatggaatactatgtagccataagaaagaatgaaataatgtcctttgtagggacatggataaagctggaagcccttaccctcagcaaactaayacagtacttgtcttcatttctaggctccaagactattcatttttggcaattattctcaagtcagtgcctatgagaaaccctgtatccctgtattttatgacttttttttctacttcaagttctgggacacttgtgcagaacatgcaggtttgtgctctccctccacttgcccccccccaccccctgacaggtcacaggtgctttgttttctgttgttttctggagtaaaggaaaggaaatttctgaaatttgtcataatactgtcaaagtattcttatgttgccttctttgctaactaaagtttcaacggagtgtttactcatggctcaatattagtatcttctcaattgcattaaaacttacttctgctaact

SEQ ID NO: 350711 - DNA, 591 bp, Homo sapiens
catgtcttttatcaaattcacagttttcaggcattctttctttaaatattctttctgcccctttatctcyctatatttcttcttggatttctatgatgtatatattggtatgctaatggtgtcatacaagtttcatttttcttcatttttatgtctctctactcctcagattagataactttaattgacttgtattcaagttcactgattctttcttcagcccactcaaatctgccactggaaccttctagtgagtttgccacttctgttattgtattgttaagctccagattttgattggttctttttcacaattttaatctctttattgatattctctatttgttcagatattattctcttagttttctttaactctttgagatacttaattttttctagtaaatccaatgtcagggcttcctcggtttctgataatttcttctttgtgtcatagttttttatttgtacgctttgcaatttttgctgaaaactggacattttttacatataatgtagtaactatggaaatcagattcttctccctcttcaaggtttgtttttattgtttgctgtggactataactttgt

SEQ ID NO: 350712 - DNA, 591 bp, Homo sapiens
catgtcttttatcaaattcacagttttcaggcattctttctttaaatattctttctgcccctttatctctctatatttcttcttggatttctatgatgtatatattggtatgctaatggtgtcatacaagtttcatttttcttcatttttatgtctctctactcctcagattagataactttaattgacttgtattcaagttcactgattctttcttcagcccactcaaatctgccactggaaccttctagtgagtttgccacttctgttattgtattgttaagctccagattttgattggttctttttcacaattttaatctctttattgatattctctatttgttcagatattattctcttagttttctttaactctttgagatacttaattttttctagtaaatccaatgtcagggcttcctcggtttctgataatttcttctttgtgtcatagttttttatttgtaygctttgcaatttttgctgaaaactggacattttttacatataatgtagtaactatggaaatcagattcttctccctcttcaaggtttgtttttattgtttgctgtggactataactttgt

SEQ ID NO: 350713 - DNA, 545 bp, Homo sapiens
agaattctaccaaatgtttaaatagcaccagttctataaattgttattttaaaatttcaaagaaaatagaagtaaaagctatgttcgcacaaaaacctacacattaattttatatcagttttattcataacagccccagacatcttggtaagcaaccaagatgccyatcagtgtataaatggttaaaaaactgtgggatatccacactctggaatactactcagaaataaaaagaaatggattattagtacaacaacatagatgaatctcagtaattacattgtatgaaaaaagccaatccctaaagattacatactgcatgatatcatttacttaacattcttgaaattacaaaataatagagatggaggacagatgagtggttgctaagggttacagagtgagtaggggagggagaaaagtagatttgcctattaaagggcaacataaggtatccttgtggtgatagaaacgttctgtatcttgactgtcaatatcccaaatgtcaatatcctggttgtgatattgtactacagttttgcaaa

SEQ ID NO: 350714 - DNA, 536 bp, Homo sapiens
gagagaggctgtcttctttttgtggaatatctgaaacagtggtgctatgagcaggatgtgtagatgatatccaccactagcaggggtctttcttctcttgctttggcttgatgactggctctgctgcctgccagtggagcaatccttttgatcagctgcttgctggctagcaagctctttgagctgtgttgctgccttcaggcaagtttgtgccttcagctgtgctgcacagtgytgcatttgctgagctctacccagtctttgttatgagtcatatgaaattgaggccccctcttatagtggccttggcttgtgtgtctcagcctcagcctggacctattgtgtgtctcaatttcaacatacaccgtggcagaactttatgctgagaagaatgactctcatcctgtgactcttggttgtgtcctaaccgggcactggcttccattctatagagtcatcaggggaaagactgataccctataaaatatgtgggttcactttgagcagaagaggagctgttactaggtggcatgcca

SEQ ID NO: 350715 - DNA, 560 bp, Homo sapiens
ttattacatttatcatttttgctttggttgcctgtgcttgtggggtatgactcaataaatctttgcccagaccaatgtcctggagagtttttccaatgttttcttttagtaattagtagtttgaggtattagatttaagtatttaacccattttgatttgagtttttatacatgakgagagataggggtctagtttcattcttctacaaataaatatcacgtttttccagcatcatttattgaagagactgtcctttcctcagtgtgtgttcttggcagctttgcaaaaatgagttcactgtggatgtatgcatttgtttcttggttctctattttgttccaatggtctacatgtctacttctatgccagtaccaagctgttttggttactgtagctccatagtataatttaaattcaggtaatgtgattcctccgttttgtttttacttagggtaactttggttattgtgggtcttttgtgattccatataagttttacaattgttttttctaattctgtgaagaatgtcattggtattttgatagggatcacatttaa

SEQ ID NO: 350716 - DNA, 551 bp, Homo sapiens
gaggctcaaggctggcagaaggagggactgactcctcccggtttggttttttgctttctgcccttgtcagttgtgctgagcaatgtttctttattccaatagcagcagttccttccctagcagcatattaattcagtttgcaggtttttccagcacttgcagtaccagctatttgtgctcactgagagaaaccagcaccaggaggccagtaactcctcctcagagatctgcaccccagcccaatgaggcccctcctccaaggycccctcttcaaaacacagacaccatccagaacagtatttggctaaatatttgggtatactgtggcccagccaagtcgacacataaaattatctatcacactatctctcaacttataatgagaaatcataacacgtttcctacgattcacacagaatcatgaaagctgcttcattcttaccattttttttcattcacttacctatccatctatccattcttggctactgctgagtagccaagtagtgtcttccctttggagttctgcaccccatccccaagaggccccc

SEQ ID NO: 350717 - DNA, 539 bp, Homo sapiens
ttatatcacccatttaaataattcttatctttcaaggatcaattcaagtcccacattttcaaggaaacatctaagtgagagttccaaagtttaatattttcaaaaataaaaagtattttagaaaaacaaactccaattcaagctggttggtgatattgttggtaacattgtcagtgttacaaataaaatgttactggcaaacaatggagggggaaaccaggtaaaaggatccagaaaggcttcaatcgtgggttggtctttgagatgctatcctagaatgataggtagaatgaagatttgtggtaaatattaagaatgtgggatgaggagaagaaaagagcaaaggcaaaagagagcgacagaaaccaaacaacaacaacaaaaacccatcaagatatttggtccaaaaacgtsagagagaaaaccatcccttttttttttttttttttttttttaaagacagagtctcgctctgtcacccaggctggagtgcattggcacaatctcagctcactgcaaccttggcctcctggtttcag

SEQ ID NO: 350718 - DNA, 499 bp, Homo sapiens
gttatacttaaggagacttttttccctgaaatatacaatcatcaccctccctcccagcaggtggaaagttttcattaataaatctattatgagaatcatgacagaatagatttattaaaataagtatgttaattttctacgactttggcttgcatcataataagtgagctctccctttcttttatctttaaaatgtgctgaggtaaggttatctctctttgacctttcttaaaaacttttccacttaaaataatctgtttaaattttttttttataaatcagacatgtctttccaattattckgatctattttcctgtcattttccccattgagagctgattcctaattagacgtgaaaaagtcggtcagtcacaccctgcctcctccctggtttcctgtgatctccttttgtaggttcctggaggtgtttctgaacctggtcctgacagtgtgaatgaatgataattggaacatctagatgataccacatttgagttg

SEQ ID NO: 350719 - DNA, 592 bp, Homo sapiens
ctttcaacactgttattcaacatggttctggaagtcctgcayagagcaattagacaagagaaagaaataaaatttacccaaattggaaaggaagaagtcaaattgttcttgtttgcatataatatgatcttatatttagaaaaacctaaagattacaccaaaaaactattagcatatataaacaaactcagtacagttgcacaacctacaaatagtaacatttctatatgctaacagtgaataatatgaaaaaggaatcaagaaagtaatcccatttatagtagccacaaataaaaattaaatatgtaagaattaacttaaccaaagaagtgaaagatctctacaatgaaaactatggtacagtgatgaaaaaaattaaagacaccaaaaaatggaaagatattttatgtttatggattgaaaaaaattaatattgttaaaattttcacactccccaaagcaatctacagattcaatgcaatctctatcaaaataccagtgatattcttcacagaaatataaaaaaaaatcccaaaatttatatggaatcacaaaagactcagaatagctgaagccattctaagcaaaaaga

SEQ ID NO: 350720 - DNA, 379 bp, Homo sapiens
aatctgggaggaataaccaaggttttggcttggctgtgtgcttctttctcttgggacctgccatccctccaagaacacttcatatgctgtgaccctgcaggaaaatctgtacctcattctgggctttacttaccagacagtttactctacatcctacaacttaacctttttcmtgagtaaagaaatgatccttcatctgttgctcttaccacttctctccttgcaagatgcaaaggtgttatttattaagccctattacaccatgagatgaagaaatgtgtttcatggaaaaagaccagagagtgatttcctgggacaggaagtgaaccagagaaactgtcagtccagacattccagaatcaaccttgagtttccttta

SEQ ID NO: 350721 - DNA, 475 bp, Homo sapiens
tatacatgcatatttttaaaaactagaatggatgatgacacggtttcttaaaaccctgtaatacttttcgtggtatactgtgttttttctactcatggctccctaatttagttgatgactatatgtttctatattatytattcaaaacattgtactcagtgccaaatagagtatgggcactgagtacttgttgaataaacatttgtcaaatgcacaagtgagtgactttgtgcccatggattcaaggacttcttgcagtaggtcctgggttcttcccagaggtcctcagtccgtatcttttgaaaaatagttttgagacatacatagtttctgggaaaccaggtctgtttattccccacaacagagtcaccacacttcaattaaatggatgcaaaatactgcctttctattgagttttctaatggatacaactctagatatttctcagaaaaatgccgaggccagtagacctcta

SEQ ID NO: 350722 - DNA, 577 bp, Homo sapiens
ataccaatggtaagtgtaatattccactggattaacaagaatttggttcacagcaaggatttatagtcattctgataacaaatacggtacctctttttcttgtatatatatatataggagttacctgtgtatgtatgcattttctaataagaacttagatataaatttttagctgtcatacttccatatatttaaagtataggtaattgtcagcattgtctagaggacagagaaataggcattctcttaaattcttatctggtagcatatattgttagagccttttgacttttaggaaaatttggaaatagctattacatgaaaatgctcatatcctttgrccaaacagaaatgcttccataagcgttcaaatatatgtataagtattgtgtattgtaatttgcgatgacaaagacagtcagatatttacacacatcccaaagtgggaatttgatgaaatcaactgtggaatgtctgtctgtgctgtagaatgctgtgaaatgatcaaagagtgaagcagattgcctggctggtacacagttggtcgtatttgcaagcaagagtagcaaagctatct

SEQ ID NO: 350723 - DNA, 564 bp, Homo sapiens
gacaaagacagtcagatatttacacacatcccaaagtgggaatttgatgaaatcaactgtggaatgtctgtctgtgctgtagaatgctgtgaaatgatcaaagagtgaagcagattgcctggctggtacacagttggtcgtatttgcaagcaagagtagcaaagctatctgtttataagaaccaacctgaattatatcattaagtagaaaaaaagcaagttgtagttcaatttgtagaatatgatcccatttatataaaaattcagtaaatgaaaattacacacactcactttatgtgtggaaacaagtctgtatgaataactgcactgaataacctctggttatctctgaaggatgaaattataaaggactctcatttcctacctcctacattaktgtagtttaaaaaaaatttgatgatgacataaataatgacaactttttccgtttgtaattagaaataaacctgccagtttccttattgaaagtgcatttggagtttctgttggtcacattagatcatgaattctcatggaaaggtgtataccctaggcaacaagttgc

SEQ ID NO: 350724 - DNA, 604 bp, Homo sapiens
ttttgtatttttgtacagatggtcttttgccatgttgcccaggctggtcttgaactcctgggctcaagtgatctgcccgcctcggtctccaaaatgctgggatcacaggcatgagccaccaagtccagcatgttttatgcaaatatttctaaagaatttcactctcagaatcaaaattgtctgcttaaccattgagattctaggtgatggttgcctcctgagacaatctccaaagccagagggaaaaatgatctttaatacaaccaaaaaagatgccaaagaaatatggggaggttagagtcgggtgatttccgtgtacaaataatctttacacacaaatgtgttcattgaggaagctcttcatacctcagtttcctggaactgagaccccctaatatatcctagatagtttcttggctctgttcacaattatgcaattgcacgtygtttatcttcttcctcccactcactcccagtagtgggccattggcaccatgttccaggtcctgatttggggtaaatctgaattgccgtgactcagagaagcatccagtcatctgttaaaacatgctactgccagccgggcacagtggctcacacctgt

SEQ ID NO: 350725 - DNA, 505 bp, Homo sapiens
tcgattggttgatgatgccttgaacattgctcatttgrgcttgtgaaaaatgaagagtgcattaaacagcttccaactgtcagaattcaatttcaagctatctgagacgccagcactattttcctaaaattaaccttgactttatgaaccaggaaatcttctcactcttggctctgatttttagccagcaaaattaaacttctttcaaatgcagaagttcttttctctcatctcccattcagagaagatagttcaaaatacagtaggcagcgtactctatgaaatacactggcatgaaaattagatatgcccagatctctagaaaagtgtactttttttttctaagagagaactaaattgtaaaggtgagctatttggagagaagattctgagtggggatataaaccatgacacatttaatgaaactgcctccaatgatatgggtaagaagggctcacaaaaaaagtttgccatattttggtgcaaactggatcttacagagatc

SEQ ID NO: 350726 - DNA, 489 bp, Homo sapiens
ggatgggatgggatcagaagaaaacctggaaaaatgcataatgagtcccgtatacttgctgcaactctgattagaactggtctcattttatccctgagttgccacaatccttaatggtagaagaaaawtcaaaacttgtcatctctgggtaactccatctcttctagtttaaaacagtctgtaggtgagattcattctgtttagggtagatgttgggttaatgaaagatttgagcaccctttcatggaaggttgtttctctcctcttgaaccatctaatcccaccatactcggttaccccagttgtgtctgcatgcaggggaagaatatttcttctcaatggtagctgaaggagagggtccccagtatgcctgctgtctctggaggctcctctctggcttgggtggggggcccccgttgtgcagctctgctgcctgccaggattcacctgtatctggctggtcttttcaggatctgtgttggtctggcc

SEQ ID NO: 350727 - DNA, 553 bp, Homo sapiens
aggcaccaacccaaacaggggtattgttagaggtcttgaagaataatgcaagttgggaatttcaagagatcactgtgtgtatcaacatatgctctattcatggtcaatgctgtcagattcccaaagcacacaggatatggagaagtgtgggcaggtgcattggctgggtttgcagccagctatattcaggtctctttctgtggttttctgtgactccattctttttctttctttttttttaagacagggtctcactctatcactcaagctggagtrcaggggcagcatcacagtacattgtagcctcagtctcttgggctcaagggatcctcccacttcaacttccgaagtagctgggattacaggcacatgctaccacacccagttattttctttttaatttattgtagagacagggtcttgctgtgttgcccaggctggtcttgaactcctgggctcgagcaatcttcctgctttggcctctcaaaatgctggaattacaggcatgagccactgcactcagcctgtgactccattcttgataacaaatatg

SEQ ID NO: 350728 - DNA, 498 bp, Homo sapiens
tgggcactgggcttgctttgtgtcattaactaccatcaaaaacatgccaaaaagtgactgagcagatacgaggcaggctggggaaggctggctccctaaaggttgaaatcttttctgttaaaaagaacatcctttaaatttcacttaagtccttaagtggggacygttggtcagggctatatatggcaggcaggtgagttttcctctagcccagatccgtcattggctaattgttccacatctctctttggccctttgcttctcaaatcataagaaaaagaaaaaaaatgccacttatttccttcagcaagacatcatccataataggatggtattcattttaccatgctttgaatgccctacaaaaaagcaaaatacaaatacaaaatactttgaaagttacttcatcttaaagactaaacaacacattgctgttgctcttctcttggggttcagaacctgagatgatactcaataggcaaagacctgccaagcccc

SEQ ID NO: 350729 - DNA, 574 bp, Homo sapiens
ttcgcttctgacacaagcggcattatctgagaaagatgctgcctttgtttgggagacggggagagaagggagggatgcagacagcagacagggggacttcagcttatatgaaaattaagccaaatttccctcttgttctttgccttggttctcagccctcctgtgccttcctatttcttccttctgaccctctgtacaatggaaaaacaaacaaacaaaaaaggcattctttccttcagggggaataagatgtggctttgcttcagcaagaaagctttcaaccaagctgaattttgtaggaaaaaaatttctctgtacattgactgttgaccaatctttgagattcaaagaaagagagtgatacctaaggatgkcttggattcttatttctgaaagccacctgtgttggtcacgtgagacaatgaaaaggaagcatctccttggcaaacatcatcatttccaggcttcaatgtcagcatctgtgcctggtaccttgatgcaagccaacatatctccaacgaaaatatgctccttgcaataaaaagcactttgcttgactacgcggttcatacta

SEQ ID NO: 350730 - DNA, 574 bp, Homo sapiens
ttcgcttctgacacaagcggcattatctgagaaagatgctgcctttgtttgggagacggggagagaagggagggatgcagacagcagacagggggacttcagcttatatgaaaattaagccaaatttccctcttgttctttgccttggttctcagccctcctgtgccttcctatttcttccttctgaccctctgtacaatggaaaaacaaacaaacaaaaaaggcattctttccttcagggggaataagatgtggctttgcttcagcaagaaagctttcaaccaagctgaattttgtaggaaaaaaatttctctgtacattgactgttgaccaatctttgagattcaaagaaagagagtgatacctaaggatggcttggattcttatttctgaaagccacctgtgttggtcacgtgagacaatgaaaaggaagcatctccttggcaawcatcatcatttccaggcttcaatgtcagcatctgtgcctggtaccttgatgcaagccaacatatctccaacgaaaatatgctccttgcaataaaaagcactttgcttgactacgcggttcatacta

SEQ ID NO: 350731 - DNA, 492 bp, Homo sapiens
cgttcaagcgattctcctgcctcagcctgatgagtagctgggattacaggcatgcgccaccacgcccggctaatttggtatttttagtagaaacggggtttctccatgttggtcaggccggtcttgaactcccaacctcaggtgatccacccacctcagcctcccaaagtgctaggattacaggtttgagccaccgcacccagcctcctgctattttcaaaggaaatctgttcctctcttagcaatggtatagggatagaagattgtccataaagccccagtgtcactgccacacataatcggacataacatggttggctcattagcatttacatgtctccatttcaacatgaccacttgacactaagtgtttgtcccgttaraaatgtcagagagttgtcaggttttgactgaatttggtaaatgactactgtatctctagtgccccaaattggctcagaaagcctttcttctgttaggacttacatgttg

SEQ ID NO: 350732 - DNA, 614 bp, Homo sapiens
catctcttaccgtgaagaactgtctcatctacctcctgaatgattgcccaaggtttcactggacattcacaaaggtaaaaattgttcataattatctgagactataacctaaatactttcacatgtaagcaaatgatttaatgctcagggtgaatataaatggattttccagaaatgcaactgccaggtaagtcaagggataactgcaggctgttttgttccagactctattgttcaccatgccagaaaatcatgacaaagccacttaatgaaaccaagtcaccaacacaacacgtcttcatcagtcctcatttgcagatggcctgttaatggtgagtctactcacaggtgtaggcgtctgacttcttatattttccaatgtggttgtcctgagcattttcatgttaaaatgcatatttcaatataaattgttttcctttcattttgttttatattacagttgrgttattttagtgattttttaaaaaattacatgaatgggtaggttatattttctatgtatgtctttgcaggatggtaaagaagatgttaacaaaatgtttgttattaaaaaggggtatctaaaggtttatgaactgacatgatctcatctt

SEQ ID NO: 350733 - DNA, 563 bp, Homo sapiens
gttgactatttgggtaatgggtacactagatgcccaatccccaccagtatgcaatatgcccacgtatcaaacaagcacacataccccctaaatctaaaataaatttttaaaaaagactgaaaaagtttcccaaagtctgtgaagatcttcacaagtgatcctattgttgtaagtgacaataggttctcctattatcacttggtcattcatctcgattctctacctccatcaggatcaccctaaaagagtttctgtctttgatactgaaggttagactcttgcagggcctttcagctaagcacaaacaaagcatacagcacaatttattttgcttgcgagtagagtcaaagtacatatctgagtatataagtagatattttcytttatctccattgacaaaccacaaacacaggtggtgtcagggcaaacctacttataaacttgttggaatgtttactgtttcaggttctctttggctgggaaatttaaagagcattataaatagtacacatcggctgggcacagtggctcatgcctgtaatcccagaactatgggaggcaga

SEQ ID NO: 350734 - DNA, 590 bp, Homo sapiens
gtgacctgacttctttattttttatttttatttttgttttaagttctggaatacatgtgcaggatgtgcagatttgttacataggtaaacgtgtgccacggtggtttgctgtgcctatgaacccatcgcctaggtattaaccccagtgtgcatcagctagtttttctaatgctttcccttcctcttcctcatcccccaagagggccccagtgtgtgtttttctcccccatgtgtccatctgttctcatcgttcagctcccacttttaagtgagaacatgtggtgtttggttttctsttcctgcattagtttgctgaggacggtggcttccagctccatccatgtccctgcaaaggacatgatcttgttccttttaatggctgcatagtattccatggtgtatatgtaccacattttctttagacagggtctcactctgtcacccaggctggagtgcagtggcccaatcttagctgactgcaacctccgcctcccgggttcaagtgattctcaagtttcagcctcccgagcagctaggattacaggcatgtgccaccatacccagctaggttttgtacttttatcagagat

SEQ ID NO: 350735 - DNA, 593 bp, Homo sapiens
atagagactgtaagactgacaaaacagactctttgtagcaataagatatcaatgtgatagcagactttgaaagaaatcaaagtattttacccactaatatatttcttgacatattttgaaatggccctgcaaagctgtctctggtggggaaaatctacattctgtagagaatccccttccctttccaggtcttttcctgattgaggagagaattaactaagagcctggcaccattttatgtctgataaaaaacatttataatctatttacctaagcctctaggattcatctgtctagtaagaaccttgatttccacaaccccttatcttaactcacacattcctgtctatggagtccaggtctttaaataataactctttcaacaaattgccagtcagaaaatctttgaatctgcctatgacttggaaactcctgcttcaagttgttccgcctttccagacctaaccaatgtacatcttacgtgtattgactgacgtcatgtctccctaaaacgtataaaaccagcttgtagctggactaccttgwtgaccagttctcaagacgtcctggggctatgtaacaggtcatggtcc

SEQ ID NO: 350736 - DNA, 578 bp, Homo sapiens
tctaataccatccactgccttgaaacttatcggtgtccttagtttctttgtattattttaatatacagcctaagattattgtacaatagaatggattcattctaatttacctggcaaaaagatagtcacttaaatgccaacacaaaaatgtattgatgaatataactacaagatcatcacaaggcaataactttcaaagaaagttttttcccccctaaggaggataaacaatttcattttctaataccttgacagttcccttcatgttaacctcaatttcatasttgaaggaaatgcatagtttttctgttgtgagtttataagaacaatagaagaatcaaaacccctgcatatatttttctaattaataaaactaagtcatgcttattgcagtagatttggcaagtatcaacaaatgaaagaatgagactctaagatcatgagaacacacattttgtttcgtttgcctttggtgtcctcctatacagtacagtgcctagcacatggtaggttctcaaaattttatggtttgaattcaggaggaaataaatatcagtcacaatttcactgttattaaa

SEQ ID NO: 350737 - DNA, 601 bp, Homo sapiens
ttgcagtgagccgagattgcaccactggactccagcctgggccacagagtaagactccatctcaaagaaaaaaaaaaaagcattcttatctgtttttggtgtcatagattgctttgacaattctgtgacatttatgaatctttcctcagaataatgtttttaatttcctaaaataaaattcttaggaatcctgaggaatgcagctatattgaaatgcggctttcaaaacattttctaaattgtgataaggtattttatgagcttccttaatamaactctgaaaacaaagcctagcagcatgtgtaataactactgtgatttcaagtaagtgttcagggcagggtacattttgaaatatcttttacaaatccaatagactatgaagatcactgtggcttctgttggcgaaaagtcacagctactctggtagtccccgaggttcaacattgaaggacgtgctaaatttcagttccagggtaggaaaaataaagggctgtttttccccagccaagttcatagagccctgaattctaactccatccacaccagactaataaccccttccttaaaaggagctcggatttcttaaaacaggtaagac

SEQ ID NO: 350738 - DNA, 601 bp, Homo sapiens
ttgcagtgagccgagattgcaccactggactccagcctgggccacagagtaagactccatctcaaagaaaaaaaaaaaagcattcttatctgtttttggtgtcatagattgctttgacaattctgtgacatttatgaatctttcctcagaataatgtttttaatttcctaaaataaaattcttaggaatcctgaggaatgcagctatattgaaatgcggctttcaaaacattttctaaattgtgataaggtattttatgagcttccttaataaaactctgaaaacaaagcctagcagcatgtgtaataactactgtgatttcaagtaagtgttcagggcagggtacattttgaaatatcttttacaaatccaatagactatgaagatcactgyggcttctgttggcgaaaagtcacagctactctggtagtccccgaggttcaacattgaaggacgtgctaaatttcagttccagggtaggaaaaataaagggctgtttttccccagccaagttcatagagccctgaattctaactccatccacaccagactaataaccccttccttaaaaggagctcggatttcttaaaacaggtaagac

SEQ ID NO: 350739 - DNA, 517 bp, Homo sapiens
ccttatcatcctgagtctaaccagactaactatccctaacttgggataaacagtctgaaccactcatccaaccaatatgagagctatgcatagatccttcaaatgccttgcatgggagcctaggttttgaatcctccctgacagcaagcactgcttttcacttggcaacagagaccaatgtatgttctccagaactaatttcattcatggaacgctaggcatggaatctcagctgttcttcatagcagagggctcagagtttcttcatgtcacactaatagtttcactgattgaaaatccacagcagacaagaattgggactccccgagatagtgctggagttagaataatttatggagagcagtctagcacaacataagctatttaaagctgcataatatacccacaaactcttattaagggctgwggttttcaaccctatgagacagaaaccagttatcattatgcatcaccatgaaagaagattaaaattaaatcaatttgtttatctctgggt

SEQ ID NO: 350740 - DNA, 540 bp, Homo sapiens
tctaaaaaccttcttgaggaacattttacagtgaaacactgaaattttgtatagaatatactatgtattgattaattaattcataaaattcatgaaggacttgggcttcagctaaacaaggatttttccaaaatcccaggtatttgagtgtggataatccatctcagtggattttcatcatttcaccagatccaggtcatatctgggttcatgtgtttgaaaagtggcaatgtatttgcagattattccatagtagattgtaatggatttgaggcacactctactcttagtgaagaccagagtgttgctgcagaccaakttacccagctcgaacgccattccctactagcaagcatttttccttcacatcaggttattaaacagatcattttacaggtagataacctgtcaacagagaacagattcaatcagggaggttgtgaacaagccctgagtcactgcatggattctggaacctcatagaagggtataaatatctgtactcttacagaaggaagacccagactcaagatctagaga

SEQ ID NO: 350741 - DNA, 379 bp, Homo sapiens
gaccattgcttttgagtccattctatatgattccattccattcaagtccattacatttggttcaattccattccattccattcccttccattccattccatttgatatcaatccatwcgattccattccattcgagcacattccaatcgagtccattccattcgatgccattccatttgattctattccattagactccattcaattccttaatctccattccattccattctactccaactgattccattccattctattcctttccattccattccattccattccattccattcgcttccattccatttgtgtccattccactccagtccattccattcgtgtccattccattccagtccattccatttgtgtcca

SEQ ID NO: 350742 - DNA, 379 bp, Homo sapiens
gaccattgcttttgagtccattctatatgattccattccattcaagtccattacatttggttcaattccattccattccattcccttccattccattccatttgatatcaatccatacgattccattccattcgagcacattccaatcgagtccattccattcgatgccattccatttgattctattccattagwctccattcaattccttaatctccattccattccattctactccaactgattccattccattctattcctttccattccattccattccattccattccattcgcttccattccatttgtgtccattccactccagtccattccattcgtgtccattccattccagtccattccatttgtgtcca

SEQ ID NO: 350743 - DNA, 379 bp, Homo sapiens
gaccattgcttttgagtccattctatatgattccattccattcaagtccattacatttggttcaattccattccattccattcccttccattccattccatttgatatcaatccatacgattccattccattcgagcacattccaatcgagtccattccattcgatgccattccatttgattctattccattagactccattcaattccttaatctccattccattccattctactccaactgattccattccattctattcctttccattccattycattccattccattccattcgcttccattccatttgtgtccattccactccagtccattccattcgtgtccattccattccagtccattccatttgtgtcca

SEQ ID NO: 350744 - DNA, 378 bp, Homo sapiens
ttgattctattccattagactccattcaattccttaatctccattccattccattctactccaactgattccattccattctattcctttccattccattccattccattccattccattcgcttccattccattygtgtccattccactccagtccattccattcgtgtccattccattccagtccattccatttgtgtccactgcattccattccactccattccatattattccattacactccattccattctattactttcatttccattcagttccattccatttgattccattccactcggtttcactccatttgagtccattccattccattccattccattccattccattccgttctgttccattcca

SEQ ID NO: 350745 - DNA, 451 bp, Homo sapiens
cggtttcactccatttgagtccattccattccattccattccattccattccattccattccattccattccattccattccattccattccattccattccattccattgggtaccattccatattgttctattcgattccattcgaatccattccatttcagtccattccattcgattccattccattccattcgattccacttgattccactccattcccttccactgcattccattcgattccattccattgcattgcattccattccattggattgcattccattcgattccattccattcgaatcaattacatagcaatccattacattcgagtctrttctattccgttccattcgatttcgtaccaatccattcgattccattccattcgattccattccatactattgcattccattcgattaaattatactcgaataaattc

SEQ ID NO: 350746 - DNA, 451 bp, Homo sapiens
cggtttcactccatttgagtccattccattccattccattccattccattccattccattccattccattccattccattccattccattccattccattccattccattgggtaccattccatattgttctattcgattccattcgaatccattccatttcagtccattccattcgattccattccattccattcgattccacttgattccactccattcccttccactgcattccattcgattccattccattgcattgcattccattccattggattgcattccattcgattccattccattcgaatcaattacatagcaatccattacattcgagtctgttctattccgttccattcgatttcgtwccaatccattcgattccattccattcgattccattccatactattgcattccattcgattaaattatactcgaataaattc

SEQ ID NO: 350747 - DNA, 451 bp, Homo sapiens
cggtttcactccatttgagtccattccattccattccattccattccattccattccattccattccattccattccattccattccattccattccattccattccattgggtaccattccatattgttctattcgattccattcgaatccattccatttcagtccattccattcgattccattccattccattcgattccacttgattccactccattcccttccactgcattccattcgattccattccattgcattgcattccattccattggattgcattccattcgattccattccattcgaatcaattacatagcaatccattacattcgagtctgttctattccgttccattcgatttcgtaccaatccattcgattccattccattcgattccattccatactattgcattccattcgattamattatactcgaataaattc

SEQ ID NO: 350748 - DNA, 491 bp, Homo sapiens
cagtccagtgattaggagttgactgtgtatctagaatagtcttcatgtttgaggctgagtatcttttcaatatgtaaacctaaggttaaaaaaaacaaaaaacaaaaccaaaaacactttttctgatgagatacaagccaaagtaaaaatttccacatctaaacatcctttggtaaatattgaattaccgtttgatggaaagctaaatcctgctggattcgtggatccgcaaatccataactctcctcttcttttccsctcccttcgtggtcctagagggaaggcaatttgaagagtgttaatggtaggctaagttttttaaaaattccatctacacccacttgtaataacctgatgggaggagagtcagggctttcactcggtctttaattaagaaagttgttttggtaagctttaaataccagggtgttatggaggcctcttagcaccagcactaggaagggcaaaccctttgccattatagcatttgg

SEQ ID NO: 350749 - DNA, 503 bp, Homo sapiens
tcatttgctttcattcctctgtgcctttgcttatgctaacgcctgcccttggatggcctttctactgttttctacacagagaaatcaccaatgcactcgctctgacagtgtaactaattaatttcagtttgacttagtagaaacttcatgagttaaaagagactgaaagtgtgacaaaagcaagtacttactttctcttggcctaaatttcagagttgaaagtatcctcaatggtttggaaggctccattcaaattctgcttactctatactctcccttaaaattagcatttttttccctctgatattcatttagtaattatttaattctgcctattcatattatacttgcagcatttctttaaatttgtcttctctaratcacatatgctttttttgaggtcaaggacaagccttaggaaaaattcttttctttccagcatgccattagttttccacatagcagctgctcagtgaatatttattgaatcatcagcccatgat

SEQ ID NO: 350750 - DNA, 497 bp, Homo sapiens
acctccaaggcagcttttcgtgtcagtaatttacaaccaataactaagctcttacttattattcttttcctgtgtctttgcttagcagtgaaaactgtgtgtctagttgtttatttcacctgcccagacctgatggagggtgaaataaaagcaaacaggcagactcaaccagtggatgagcagatttgtgatctggcccggaaaatgtccattctgaagacaaagtcccagcataagggatgaaaagtgytatggtgggttgctgcatgtttgttgcctcatgctttgtccaggattctcttctttccctttggtctggaagttgctttttgcaggcatcttacaagtagaaagaatggtcttccaggagctccctcctaatgctctaaggatttgatttcttgctctcagacagtcattttcatgcacattttgcaaaacatggaaatagatgcatcggtctgcttctggaagtgctgccccttgggagggagctg

SEQ ID NO: 350751 - DNA, 431 bp, Homo sapiens
tatgatttttattccacccaaacctttcagttagcccaatctaccaataagtagtattcctcaagcctactatgtgaatgtctgtgtttatggcgggaatgtgctttcctgtgttctttgagatgtacccttcctccaaggagaagttccagcaccacttcctatgttaggtgtrccccaaacatccctgggatatgtccctcctcaaaatgtctaaaaccacacattgtccatctgtcctcttctgccccgactccaacaaggaccaaaatactttaccgagtgtgcactcaaagtgtgacttttggtaaagatagaatggagtcagtgagatatattgaatttcataatggtcaaacgggtgtggacatgcttttttttttttaatgtcagcaaacaaaattgatataattgaaggtaattattcatat

SEQ ID NO: 350752 - DNA, 431 bp, Homo sapiens
tatgatttttattccacccaaacctttcagttagcccaatctaccaataagtagtattcctcaagcctactatgtgaatgtctgtgtttatggcgggaatgtgctttcctgtgttctttgagatgtacccttcctccaaggagaagttccagcaccacttcctatgttaggtgtgccccaaacatccctgggatatgtccctcctcaaaatgtctaaaaccacacattgtccatctgtcctcttctgccccgactccaacaaggaccaaaatactttaccgagtgtgcactcaaagtgtgacttttggtaaagatagaatggagtcagtgagatatrttgaatttcataatggtcaaacgggtgtggacatgcttttttttttttaatgtcagcaaacaaaattgatataattgaaggtaattattcatat

SEQ ID NO: 350753 - DNA, 518 bp, Homo sapiens
catacctgcttcgtaggtgcttgtggtgaggggagttcacccagcatcgcgtcacrgcatcacctggagccatgagccgctttgggtacttttcttggggaactaaaggagagaggatgctggacgtgggaaacggcgaccgtgaacaggtggggcagagccagcaacagtagctatgctgtccaagccccacacgttctttctcctgtggctgccttgtcttggccgacatgccagttctgaaccaatgcatttttcaccacctcctctgctaccatcctccttctctgtaccactgcatggattcccaacagctccacctgcttccagaactttccatgacagctcttttcctacgcagcaggcagagtggtaattgtgcatccatcaggttatgttactcccctgcttcaaatcctcccgtagctttgcatcacactgccaagctgtggcaaaggtctttgatgttataaagacctgcataacccagccatgcctgcttctcccacctcatctcc

SEQ ID NO: 350754 - DNA, 580 bp, Homo sapiens
gtttttagctatgcagccagactctttgttgtacttgtttctggtaagactagtccattaccagttttaataatgttttgacatgcaaatagctcctactggggactgactttggttaaacaagccagtaagtgaaagtgtcagatttggcactgttaggtgattgatcatcctctggcgttatagggaaccaagagaactactcaccccagcagatccaacctgagtctccaatgccaagcaagggttgccttggtccatctttgccaccatgtgcccatgtgtgtcaagtccttgttacattttgtagccagctaagatgggtgaaaaagaggccaatgagttcaagctagtagcaaactgaaaacaaacaaaattactctgattagaaagtgtgaggaatgttaatgtagtagaatrggatagctttgggaattgccacttgaggtagcgagaacgagacaagtgattacaattctggtttatgttcacaatttcactgtaacgattttttttaaccattcttactttgtaactagtgcaatgcagacctctaattaccagaaagttatagtttgtt

SEQ ID NO: 350755 - DNA, 580 bp, Homo sapiens
ccctgtggaagcgacttgtaagacctgaagatgaggcagagatagctggctgaaaaaaagaggcgggtgtgtgggaaactttgagggtgagagaagagcttgttcacagtcactgaagagattgggaaggttaaataagctgcttctgtatgagttccgtccatagcccatgagcagtcactgttggttatgtggagaaggcccttggcactgttcttggatcatctgaatgaagcagctcagctttgttccatagccattagagaagggaagtcattctactcgtctgtatccataccagacctgggagtgactcttgacatgctttgatgtccacttttataactctgcattggattacttgttagttttgatagctgtaagactgggattaaatgttaaataaaatattctttgatttacttacaragatgctttgtaatatcaggatagtcttggtttcattttggttccattttctctttgaagagcttggaccacctctcaaaaaactgtagtagcaatccaccctaaaatacaaatcttcagtaagtggcaagtagttttcgtttgcctacag

SEQ ID NO: 350756 - DNA, 572 bp, Homo sapiens
gtctgctgcagttcactggaggtccaccccagaccctgtttagcctgggtatcaccagcagaggctgcagaacagcaaagacagctgcctgctccttcccctggaagcttcgtcccagaggtgcactggcctgatgctagccatagatctcctatgaggtgtctgtaaacccctgttgggaggtctcttctagtcaggaggtacaggatcagggacctacttgaggaggcagtctgtccctcagcagagctcaagcactaggctggcagaactctccttgtctggatcctctgctctcttaagagccarcaggcaggaatgtttaagtccactgaagctattcccacagccgcctcttcccccaggtgctctgtcccagtgagatgggagttttatctataagcccttgactaaggctgctgcctttatttcagagatgctctgcccaatgaagagaaatgtagagaggcagtctggccacagccactttcccgcactttgttgatttccacccagtcccaacttccaggcctttttagcatggtcggggaaaaccacctactcaagcctca

SEQ ID NO: 350757 - DNA, 613 bp, Homo sapiens
caattattttaataaacacatatcaaatgtaaactgtgcatcaaaatttcacatacatattatggagaaaaaatggtatttctatttaatatttatgttcaaaagggtacagaaaattatataacttatgataatgtggaaataaaattgaaaaatgatgtctttaggtaagaacttggatgttttgatggcaaatggctcgtaaaatataatatccttgaaatatatagaatgaatatagaaatgcatactactcatacatgttatttaaggttgagaactacttgttgtgacctgagtaatcatgttctttatctccacttcaggagtctgctgacaggctattatcaaataaactgtagtgcaagaacttgttagctttgaagtagggtaaattctcaaacccttcagagttcttgatagattatttgactttattttgtgtatgtgaccagagagatgtgcagttatattagaggcttactaaccacacctgtaaatgttacttattttccagcaaacatcccacctttgtgtgtgatgatgatgataacaacttayatttataatgcttgctatactttacaatactttacaagtgtatcccatttat

SEQ ID NO: 350758 - DNA, 531 bp, Homo sapiens
gggtctatctcagagatttcttattatgctgatttagtttatatttttacttctgtaagacttttaaagttatgattagaaatacttttctttcattgttttaaccttttatttcttcaattttattagtatgattttctttgtttctcttctgtagtatgtaattatttggctcacctttayttcccattttctgggttatttttaaattatttttgatttctggctttctaaaatgaggtattattttctctctgtaaataatatgtatagagattttattcatgtagattttttttctatagtttttgtatgccctgagatgagctgggagagtgttttcagcaactgaaaagttttcattgtaattccttatttttaaatatctttgatgttccttggttggcatgatggttaatactgaatgtcaacctgattgaatcgaaggatgcaaagtattgatcctgggtgtttctgtgagggtgttgccaaaaacgattaacatttgagtcagtgggctgggaaaggcag

SEQ ID NO: 350759 - DNA, 562 bp, Homo sapiens
cttcccagtgggcagaacttcragcagtgcacctggttgtgcactttgcatggaaggagaaatggccagatgtgctattaaatactgattcatgggctgtagccaatggcttggttggatggtcagagatttggaagaagcatgagaaaaactggtgacaaagaaatttggggaagagctatgtggatggacctttctgcgtggtcaaaaactgtgaagatatttgtatcccatgtgagtgctcatcaatgggtgacctcggcagaggaggattttagtaatcaagtggataggatgacttgttctgaggatactgctcagcctttttccagccacccctgtcatcacccagtggtcccatgaacaaagtgcccatggtggcagggatggaggttatgtacgggctcagcaacatggacttgtactcactaaggttgacctggcaacagccactgctgagtgcccaatttatcagcagcagaccaccactgagccctcaatatggcaccattcttctggatgatcagccagctacctggtagcagattgagtatattggccc

SEQ ID NO: 350760 - DNA, 562 bp, Homo sapiens
cttcccagtgggcagaacttcaagcagtgcacctggttgtgcactttgcatggaaggagaaatggccagatgtgctattaaatactgattcatgggctgtagccaatggcttggttggatggtcagagatttggaagaagcatgagaaaaactggtgacaaagaaatttggggaagagctatgtggatggacctttctgcgtggtcaaaaactgtgaagatatttgtatcccatgtgagtgctcatcaatgggtgacctcggcagaggaggattttagtaatcaagtggataggatgacttgttctgaggatactgctcagcctttttccagccacccctgtcatcacccagtggtcccatgaacaaagtgcccatggtggcagggatggaggttatgtacgggctcagcaacatggacttgtactcamtaaggttgacctggcaacagccactgctgagtgcccaatttatcagcagcagaccaccactgagccctcaatatggcaccattcttctggatgatcagccagctacctggtagcagattgagtatattggccc

SEQ ID NO: 350761 - DNA, 562 bp, Homo sapiens
cttcccagtgggcagaacttcaagcagtgcacctggttgtgcactttgcatggaaggagaaatggccagatgtgctattaaatactgattcatgggctgtagccaatggcttggttggatggtcagagatttggaagaagcatgagaaaaactggtgacaaagaaatttggggaagagctatgtggatggacctttctgcgtggtcaaaaactgtgaagatatttgtatcccatgtgagtgctcatcaatgggtgacctcggcagaggaggattttagtaatcaagtggataggatgacttgttctgaggatactgctcagcctttttccagccacccctgtcatcacccagtggtcccatgaacaaagtgcccatggtggcagggatggaggttatgtacgggctcagcaacatggacttgtactcactaagkttgacctggcaacagccactgctgagtgcccaatttatcagcagcagaccaccactgagccctcaatatggcaccattcttctggatgatcagccagctacctggtagcagattgagtatattggccc

SEQ ID NO: 350762 - DNA, 627 bp, Homo sapiens
gtgttacacttttagttaacagtaagaaacaaaattatagatgacatagatgagtagttaatatgaatgtttgctctctaggagttatatcagccaagaataaaagtgtcactttatgcaaacattattttgaagctgagttaggtgagcgagtaatttgtacggttttcctacaatattttcatcttagaggttcaatatgcttttcccaataatgataaaatggttacatagttcaataaagaactactaaggtcaaacctcatataataaagatactcaaattgttcttttaaagcttcttcttcttttatgatttttatttgtgctaggaattttamatcaaaaaccaattaaaataaaataaaatccaattttacgggccatagatatgatgcaatttcatttatcattacagagactctccacttagatcccttttgcacatttccttccaagaaaatatctttttctccagctgcatcagtaaactaaagatgtaacattgttcaatttttcttgtgtgtgctttgttttcacctgacatcaggtgatgtcagctgtcaatctgcaagctacaacgtgaacaaattcttgccatactgaatgtgttggcacagttattgt

SEQ ID NO: 350763 - DNA, 624 bp, Homo sapiens
tgtgttgtcgaagaattaaaaatatgtaataatctatgtttgcttttattctttgactcagcatagccacttatagaaattcatgtgaagtcatgcctctaaaaatccaaataagttaygcataatattatttattttaatattactatcagtattcagtagtaaaatattggaaaaagacaaatgccatccaagtaaaattgctttgataaattttggtgcatccacacgttcaagtactaaacagtcagaaagagtttgagcaagatctctctataaaatgatattaagagaaattttaaaagcaaggtgcaaaattgtctatatgatatgctttttctttcttaaaatgaagaacaatatacacacatatgtttacttatttttcaaaggaaacacaaaataatacaagatgaaaattcttgcctataagaggtgtcaaggaatagaatgagggtttatgagattaacctggtacttctgtaacttttcctttcttatatctttgaattttgtaccatgtaaatatttatattttcaaaatataaaatttaataaaatagattgcaaggagtaacaacaatcttcaaaataaagaaataaaagatgacagacaaatgttta

SEQ ID NO: 350764 - DNA, 624 bp, Homo sapiens
tgtgttgtcgaagaattaaaaatatgtaataatctatgtttgcttttattctttgactcagcatagccacttatagaaattcatgtgaagtcatgcctctaaaaatccaaataagttatgcataatattatttattttaatattactatcagtattcagtagtaaaatattggaaaaagacaaatgccatccaagtaaaattgctttgataaattttggtgcatccacacgttcaagtactaaacagtcagaaagagtttgagcaagatctctctataaaatgatattaagagaaattttaaaagcaaggtrcaaaattgtctatatgatatgctttttctttcttaaaatgaagaacaatatacacacatatgtttacttatttttcaaaggaaacacaaaataatacaagatgaaaattcttgcctataagaggtgtcaaggaatagaatgagggtttatgagattaacctggtacttctgtaacttttcctttcttatatctttgaattttgtaccatgtaaatatttatattttcaaaatataaaatttaataaaatagattgcaaggagtaacaacaatcttcaaaataaagaaataaaagatgacagacaaatgttta

SEQ ID NO: 350765 - DNA, 624 bp, Homo sapiens
tgtgttgtcgaagaattaaaaatatgtaataatctatgtttgcttttattctttgactcagcatagccacttatagaaattcatgtgaagtcatgcctctaaaaatccaaataagttatgcataatattatttattttaatattactatcagtattcagtagtaaaatattggaaaaagacaaatgccatccaagtaaaattgctttgataaattttggtgcatccacacgttcaagtactaaacagtcagaaagagtttgagcaagatctctctataaaatgatattaagagaaattttaaaagcaaggtgcaaaattgtctatatgatatgctttttctttcttaaaatgaagaayaatatacacacatatgtttacttatttttcaaaggaaacacaaaataatacaagatgaaaattcttgcctataagaggtgtcaaggaatagaatgagggtttatgagattaacctggtacttctgtaacttttcctttcttatatctttgaattttgtaccatgtaaatatttatattttcaaaatataaaatttaataaaatagattgcaaggagtaacaacaatcttcaaaataaagaaataaaagatgacagacaaatgttta

SEQ ID NO: 350766 - DNA, 525 bp, Homo sapiens
tggtgcatccacacgttcaagtactaaacagtcagaaagagtttgagcaagatctctctataaaatgatattaagagaaattttaaaagcaaggtgcaaaattgtctatatgatatgctttttctttcttaaaatgaagaacaatatacacacatatgtttacttatttttcaaaggaaacacaaaataatacawgatgaaaattcttgcctataagaggtgtcaaggaatagaatgagggtttatgagattaacctggtacttctgtaacttttcctttcttatatctttgaattttgtaccatgtaaatatttatattttcaaaatataaaatttaataaaatagattgcaaggagtaacaacaatcttcaaaataaagaaataaaagatgacagacaaatgtttataatagccttgcagtaatagccagcatttgaagacagcccaaaatttcaccaacagggaaatggtgtctctgggattttcagataatgtaatattattcggcaataaataggaacaa

SEQ ID NO: 350767 - DNA, 525 bp, Homo sapiens
tggtgcatccacacgttcaagtactaaacagtcagaaagagtttgagcaagatctctctataaaatgatattaagagaaattttaaaagcaaggtgcaaaattgtctatatgatatgctttttctttcttaaaatgaagaacaatatacacacatatgtttacttatttttcaaaggaaacacaaaataatacaagatgaaaattcttgcctataagaggtgtcaaggaatagaatgagggtttatgagattaacctggtacttctgtaacttttcctttcttatatctttgaattttgtaccatgtaaatatttatattttcaaaatataaaatttaataaaatagattgcaaggagtaacaacaatcttcaaaataaagaaataaaagatgacagacaaatgtttataatagccttgcagtaatagccagcatttgaagacagcycaaaatttcaccaacagggaaatggtgtctctgggattttcagataatgtaatattattcggcaataaataggaacaa

SEQ ID NO: 350768 - DNA, 604 bp, Homo sapiens
aggcattagaaaagtatatctctatatatttttttcattaatatatatctttcattcatatatatcttagtatatatattcatataacagtgaatttgcattaccactgttgtctgaatctcttaagtccttacagttcttaagttctagggtgaacaagataccagataaatattttcacttcagtcaatttatactagagatgagggaagttttactaatctagtgattttaacatcaatctaaccctataatagcaatcctagtgacaaatgtgtcttgattctacctactcacacctcagtgggaagtgaacatctatttagtgtcacaaaatgcaaagtctggtgagtgtaacagcattctagcggttgtcagtgtggagaaattattgtgaggctttcaattccaaagctttaaaaattgtactaaggaaagttataatggtatatactatttactcttttgatacattttctgcttccttttatttctgtactttattctataatagtartatttaacttttgtcttaggttcaggaaaatattgatgttgatacttaccaatttagacagcattcaggcaaaatttttaatttggt

SEQ ID NO: 350769 - DNA, 308 bp, Homo sapiens
actttggtgacttctcaaagaatttcaaacagagctaccattcgacccagcaatcccattatgggctatatccaaaggaaaaaaaaatagatcattatactaaaaaaaacaaatgtacttgtaagttcattgctacgctattcacaacagtaatgacaaggaatcgacttaggtgcccatcartgatggattggataaagaaaatgtggtatgtatacaacatggaatactatgcacccataaaaaatgaaatcatgtcctttacatcaatatggaggtagctgaaggctatgataataattaacaca

SEQ ID NO: 350770 - DNA, 308 bp, Homo sapiens
actttggtgacttctcaaagaatttcaaacagagctaccattcgacccagcaatcccattatgggctatatccaaaggaaaaaaaaatagatcattatactaaaaaaaacaaatgtacttgtaagttcattgctacgctattcacaacagtaatgacaaggaatcgacttaggtgcccatcagtgatggattggataaagaaaatgtggtaygtatacaacatggaatactatgcacccataaaaaatgaaatcatgtcctttacatcaatatggaggtagctgaaggctatgataataattaacaca

SEQ ID NO: 350771 - DNA, 511 bp, Homo sapiens
gtaggtatgattattattctgtttgatagaaaatatcttagatgtttagagaggttaaataagatttcaaagattaccaaactagtaagtgatgtctggtggtgtctaattccaaaacttcctagccaatatgtatactgcattaaatagttcatgatgcatattttcatatacaactgtgttaaaattaaagacctataataaayatcattatacattattataaaatactatatttaagtttttgaataagaaaataagcaataataaaataatataaaataaccagaaaataaaaagaaatccttgtctacaaacgaaacaactatagtatataaaaacaaatttatattatagcaattatatgttagaaacagaaatagaaagtaccttgttaaattagaaaaaaaagagtacatggtacataaaaaatttacaggaaagaaaagtaattgtatgattcaaactgtaaggtcttattgaaaggcctcaagggagattttaggaggaa

SEQ ID NO: 350772 - DNA, 511 bp, Homo sapiens
gtaggtatgattattattctgtttgatagaaaatatcttagatgtttagagaggttaaataagatttcaaagattaccaaactagtaagtgatgtctggtggtgtctaattccaaaacttcctagccaatatgtatactgcattaaatagttcatgatgcatattttcatatacaactgtgttaaaattaaagacctataataaacatcattatacattattataaaatactatatttaagtttttgaataagaaaataagcaataataaaataatataaaataaccagaaaataaaaagaaatccttgtytacaaacgaaacaactatagtatataaaaacaaatttatattatagcaattatatgttagaaacagaaatagaaagtaccttgttaaattagaaaaaaaagagtacatggtacataaaaaatttacaggaaagaaaagtaattgtatgattcaaactgtaaggtcttattgaaaggcctcaagggagattttaggaggaa

SEQ ID NO: 350773 - DNA, 648 bp, Homo sapiens
cttatttacatttgtatctatatacagctgggataaaataaaggtggtatactacatcatactatataaaaataatgtagagaaataatagaatatgggactataaaaataacacagtaagcaaaataaaatctggaaattattaataaaaatttggtttagttgactataaaaatgcaaacagctttgttaaagtataattgacatgcaacaaattgtacatattaaatgtataaaatttggtaagttttgacatatgtatgcatctgttgaaattatcaccacaatcaaggtcatactcatccattatcctgaacaattttcttatacgcctttgtaattccattctcttgcccttctgcttcccaggtaattactaactcctttctgtcatcaaatattagtttatgtctcccagactggcacataaattgaactatacgcatgcatttttttttttttrcctgtctttctgcactcaggatagttattttgagattaatctatattgctgcctatatcaataattcattcctcttcattattgagtctcattgtatggatatatcacaagttgtttattcactcacttgttgataaacatagggttgtttccaatcttaatcattttaaatttttcttgtcatg

SEQ ID NO: 350774 - DNA, 549 bp, Homo sapiens
gacctgaaactataaagccattagaagaaagcatgggggaaacattccaggatattggtctaagcaaaaatttatgaagacctcaaagcacaagtgaccaaagcaaaaataaacaaatggaatcaactcaagtttaaaagcttctgcacaacaaagaaaataataaacaaagtgaggaaayaacccacagaatgagagaaaatattttcaaactactcagctgatgagggattaatcaccaaaatatataaggaactcaaacaactgaatagaaaaaaaaatctgatttaaaaatgggtgaaggatctgagtagacattattcaaaagaagacatacaagtggcctacaggtatatgaaaaatgctcaacatcaccaatcatcagataaatgaaaattaaaactggaataagatatcatctcaccccagttaaaatggcttttatccaaaagataggcaataacaaacgctgctgagaatgtggagaaaggggaaccgtcatatactgttggtgggaatgtaaattagtagagccactgtagagaacaa

SEQ ID NO: 350775 - DNA, 549 bp, Homo sapiens
gacctgaaactataaagccattagaagaaagcatgggggaaacattccaggatattggtctaagcaaaaatttatgaagacctcaaagcacaagtgaccaaagcaaaaataaacaaatggaatcaactcaagtttaaaagcttctgcacaacaaagaaaataataaacaaagtgaggaaataacccacagaatgagagaaaatattttcaaactactcagctgatgagggattaatcaccaaaatatataaggaactcaaacaactgaatagaaaaaaaaatctgatttaaaaatgggtgaaggatctgagtagacattattcaaaagaagacatacaagtggcctacaggtatatgaaaaatgctcaacatcaccaatcatcagataaatgaaaattaaaactggaataagatatcatctcaccccagttaaaatggcttttatccaaaagataggcaataacaaaygctgctgagaatgtggagaaaggggaaccgtcatatactgttggtgggaatgtaaattagtagagccactgtagagaacaa

SEQ ID NO: 350776 - DNA, 549 bp, Homo sapiens
gacctgaaactataaagccattagaagaaagcatgggggaaacattccaggatattggtctaagcaaaaatttatgaagacctcaaagcacaagtgaccaaagcaaaaataaacaaatggaatcaactcaagtttaaaagcttctgcacaacaaagaaaataataaacaaagtgaggaaataacccacagaatgagagaaaatattttcaaactactcagctgatgagggattaatcaccaaaatatataaggaactcaaacaactgaatagaaaaaaaaatctgatttaaaaatgggtgaaggatctgagtagacattattcaaaagaagacatacaagtggcctacaggtatatgaaaaatgctcaacatcaccaatcatcagataaatgaaaattaaaactggaataagatatcatctcaccccagttaaaatggcttttatccaaaagataggcaataacaaacgctgctgagaatgtggagaaagggraaccgtcatatactgttggtgggaatgtaaattagtagagccactgtagagaacaa

SEQ ID NO: 350777 - DNA, 345 bp, Homo sapiens
accttttcctgtaatatttaataaytatagaaaagaaaaaataatttttacaattgaaaaaactgaaacatatcgaagttatctagtgagtaagaggatagattgaaagtgtatgccacctggtaagatatgagaaggacatagaatcactactgtaatatttttgctgaaggtacttggcatgaatataatcatgaagaaacatcagctaaatgtaaattaaggaacaatctgcaaaataaccggccagtaattttcaaactccaagaagttttagactagagtcaaaaacaaaaatggcatctaaatgcaatgactatgaaaacaaagactgataagtggggc

SEQ ID NO: 350778 - DNA, 345 bp, Homo sapiens
accttttcctgtaatatttaataattatagaaaagaaaaaataatttttacaattgaaaaaactgaaacataycgaagttatctagtgagtaagaggatagattgaaagtgtatgccacctggtaagatatgagaaggacatagaatcactactgtaatatttttgctgaaggtacttggcatgaatataatcatgaagaaacatcagctaaatgtaaattaaggaacaatctgcaaaataaccggccagtaattttcaaactccaagaagttttagactagagtcaaaaacaaaaatggcatctaaatgcaatgactatgaaaacaaagactgataagtggggc

SEQ ID NO: 350779 - DNA, 345 bp, Homo sapiens
accttttcctgtaatatttaataattatagaaaagaaaaaataatttttacaattgaaaaaactgaaacatatcgaagttatctagtgagtaagaggatagattgaaagtgtatgccacctggtaagatatgagaaggacatagaatcactactgtaatatttttgctgaaggtacttggcatgaatataatcatgaagaaacatcagctaaaygtaaattaaggaacaatctgcaaaataaccggccagtaattttcaaactccaagaagttttagactagagtcaaaaacaaaaatggcatctaaatgcaatgactatgaaaacaaagactgataagtggggc

SEQ ID NO: 350780 - DNA, 345 bp, Homo sapiens
accttttcctgtaatatttaataattatagaaaagaaaaaataatttttacaattgaaaaaactgaaacatatcgaagttatctagtgagtaagaggatagattgaaagtgtatgccacctggtaagatatgagaaggacatagaatcactactgtaatatttttgctgaaggtacttggcatgaatataatcatgaagaaacatcagctaaatgtaaattaaggaacaatctgcaaaataaccggccagtaattttcaaactccaagaagttttagactagagtcaaaaacamaaatggcatctaaatgcaatgactatgaaaacaaagactgataagtggggc

SEQ ID NO: 350781 - DNA, 591 bp, Homo sapiens
aaacaaaaatggcatctaaatgcaatgactatgaaaacaaagactgataagtggggcttaattaaactaaataacttctgtacagcaaaagaaaataccaacagaggtagacagataacctacagaatgagagaaaatatttgcaagctatgcatctgacaaaagtctaatacacagaatctataaggaacttaaaaattcaacagcataaaccaaataacctcgctgaaaagtgggcaaagagcatgaacagacarttctcaaaagaagacatccaagtggcaaacaaacatgaaaaaatgctcaacattgctaatcatgagaagagtgcaaatgaaaaccatgaaataccatctcataacagtcagcatagtaattattaaaaagtcaaaaaatagtagatgctggtgagggtggagaaacgggaacatttatatgcttttgatgagaaagtaaattagtttggccaccgtggaaaacagtttacagatttctcaaggaactgaaaacagaactactgttcaactcagcaattccattactggttatatattcaaaacaaaataaatcattctaccaaaaagtacatgc

SEQ ID NO: 350782 - DNA, 591 bp, Homo sapiens
aaacaaaaatggcatctaaatgcaatgactatgaaaacaaagactgataagtggggcttaattaaactaaataacttctgtacagcaaaagaaaataccaacagaggtagacagataacctacagaatgagagaaaatatttgcaagctatgcatctgacaaaagtctaatacacagaatctataaggaacttaaaaattcaacagcataaaccaaataacctcgctgaaaagtgggcaaagagcatgaacagacagttctcaaaagaagacatccaagtggcaaacaaacatgaaaaaatgctcaacattgctaatcatgagaagartgcaaatgaaaaccatgaaataccatctcataacagtcagcatagtaattattaaaaagtcaaaaaatagtagatgctggtgagggtggagaaacgggaacatttatatgcttttgatgagaaagtaaattagtttggccaccgtggaaaacagtttacagatttctcaaggaactgaaaacagaactactgttcaactcagcaattccattactggttatatattcaaaacaaaataaatcattctaccaaaaagtacatgc

SEQ ID NO: 350783 - DNA, 591 bp, Homo sapiens
aaacaaaaatggcatctaaatgcaatgactatgaaaacaaagactgataagtggggcttaattaaactaaataacttctgtacagcaaaagaaaataccaacagaggtagacagataacctacagaatgagagaaaatatttgcaagctatgcatctgacaaaagtctaatacacagaatctataaggaacttaaaaattcaacagcataaaccaaataacctcgctgaaaagtgggcaaagagcatgaacagacagttctcaaaagaagacatccaagtggcaaacaaacatgaaaaaatgctcaacattgctaatcatgagaagagtgcaaatgaaaaccatgaaataccatctcataacagtcagcatagtaattattaaaaagtcaaaaaatagtagatgctggkgagggtggagaaacgggaacatttatatgcttttgatgagaaagtaaattagtttggccaccgtggaaaacagtttacagatttctcaaggaactgaaaacagaactactgttcaactcagcaattccattactggttatatattcaaaacaaaataaatcattctaccaaaaagtacatgc

SEQ ID NO: 350784 - DNA, 601 bp, Homo sapiens
gactttttgttagaagaagatggatccttggtgccttatatttgtggtattcatgagaataagatttcacaagcttgtgatgactggtaatctccaggtaaaattttaaaaggaggagatagttataaatgcgtattgaaatcagtgcattcaatacactggaggtgaagttctgaaaataaaatgtgtcatcccccaaaaaagaaaataccaaagcatgtcatacaatggtcagggtgaggggaatattaaattttacattggaatttgtcttcattcaggactccattgcagtgactaaatattctagtgagtaaagtaacacttctcctcttgcactgctatcttatataagatgagatacttgaagaagtgttgctccaagggccctggaattatccattgttgtagtaygatattcccaaatgtagaatcaatgaataaaattaaatgaccttcatcattaaaaatagtcactcactttaaattataaaacttaaggaaaattatacatatttagtgcagtcctgcagacattctatatatactagctgagataagtcttttcaagaccactctcttgaaaaaataatttttacac

SEQ ID NO: 350785 - DNA, 583 bp, Homo sapiens
tcatcccccaaaaaagaaaataccaaagcatgtcatacaatggtcagggtgaggggaatattaaattttacattggaatttgtcttcattcaggactccattgcagtgactaaatattctagtgagtaaagtaacacttctcctcttgcactgctatcttatataagatgagatacttgaagaagtgttgctccaagggccctggaattatccattgttgtagtacgatattcccaaatgtagaatcaatgaataaaattaaatgaccttcatcattaaaaatagtcactcactttaaattataaaacttaaggaaaattatacatatttagtgcagtcctgcagacattctatawatactagctgagataagtcttttcaagaccactctcttgaaaaaataatttttacacagaatttcacacttaaatttttttaaagaaagtgtttattgtaaacatgctcttttctatgggtcatagcaattttttttctagaattacttttagcattccctagtggttctggcatagtgtagagtcaattccaagttttttcacctgttaagtggctacaataatta

SEQ ID NO: 350786 - DNA, 531 bp, Homo sapiens
gataaatgaaagcatttataagggaagaaaggtagatagatatatagatagatctatatataccacattgtgtccaaagttttttatagtctaaaagtataaaacagtttgtacaaaatctctttttgattttagttaggcttctagcccctctttccacctatccatcaaaaatgttcttgtcaagattactgtgttaaagtaaatggacaattattagacctacttatctaaaaatatatccaaataatgattacagtggtcactataatgataagcaatgatgagttcattatattatatgtagtgtgatcatcattaactctaaatttgtatgccctgcaagtatcaggagaaaaaacacacacacagacacaaaaaacctttattctctttgtcttggtgatgcaaacaggtaaaacagctgccccagtgtaygaataacagccttggtttttctatcatgtatacggtacaacatttccctttatgtaaaaccagatgcaattgatgttatgtggttctagtaat

SEQ ID NO: 350787 - DNA, 647 bp, Homo sapiens
cacgtgtgtgggagataaatagagtggaatacttctcattgcatttatacaatggaatattgattcccatgtttctaatgtgaagtctgtggtattctcagtgctgtccctttgtatggaatgtgtctttttccttctcctggctacctttaaaatctttattgcttttgtatttatcataactttttcacaatttgattttratcagccttgataaggggtgtgtgtgtgtatgtgtgcaagtgcaattgtgtgattttttaaatcatattttgttcccagccacaagtagttctctcttatacttacacagatcaccactaagtttgaaaaatcataaggaattttccactgacgtcatcctctttctctatttctctttctctttgaatctaccttctctctaggactctgctatgcaaatgctgcctatttctacctccctaaactatagtgtacatctgcaattctaacagaacacaggctttttttgcacactatccacaaacagtaagctaggaaaccacagggctccactcatttttattccatttaccaaagatcacagtcctacagtacctgttgtccaatgactaaaagcctctgtttcacatatactctccagcttctagttgtgtaagggtgaa

SEQ ID NO: 350788 - DNA, 647 bp, Homo sapiens
cacgtgtgtgggagataaatagagtggaatacttctcattgcatttatacaatggaatattgattcccatgtttctaatgtgaagtctgtggtattctcagtgctgtccctttgtatggaatgtgtctttttccttctcctggctacctttaaaatctttattgcttttgtatttatcataactttttcacaatttgattttaatcagccttgataaggggtgtgtgtgtgtatgtgtgcaagtgcaattgtgtgattttttaaatcatattttgttcccagccacaagtagttctctcttatacttacacagatcaccactaagtttgaaaaatcataaggaattttccactgacgtcatcctctttctctatttctctttctctttgaatctaccttctctctaggactctgctatgcaaatgctgcctatttctacctccctaaactatagtgtrcatctgcaattctaacagaacacaggctttttttgcacactatccacaaacagtaagctaggaaaccacagggctccactcatttttattccatttaccaaagatcacagtcctacagtacctgttgtccaatgactaaaagcctctgtttcacatatactctccagcttctagttgtgtaagggtgaa

SEQ ID NO: 350789 - DNA, 647 bp, Homo sapiens
cacgtgtgtgggagataaatagagtggaatacttctcattgcatttatacaatggaatattgattcccatgtttctaatgtgaagtctgtggtattctcagtgctgtccctttgtatggaatgtgtctttttccttctcctggctacctttaaaatctttattgcttttgtatttatcataactttttcacaatttgattttaatcagccttgataaggggtgtgtgtgtgtatgtgtgcaagtgcaattgtgtgattttttaaatcatattttgttcccagccacaagtagttctctcttatacttacacagatcaccactaagtttgaaaaatcataaggaattttccactgacgtcatcctctttctctatttctctttctctttgaatctaccttctctctaggactctgctatgcaaatgctgcctatttctacctccctaaactatagtgtacatctgcaattctaacagaacacaggctttttttgcamactatccacaaacagtaagctaggaaaccacagggctccactcatttttattccatttaccaaagatcacagtcctacagtacctgttgtccaatgactaaaagcctctgtttcacatatactctccagcttctagttgtgtaagggtgaa

SEQ ID NO: 350790 - DNA, 412 bp, Homo sapiens
taaaaaccatactgtattacaaataaatttatttagcatatattccctaattatctgccatgaaactagtgtaactgttaattaggagagctatttgactaaaaatgccatagaaatagatgtcttgaaaattctgatactgacaaaatgtgtccatatagaatgttttattgttcccacagatacaaaaacttgaactagaagaataggaaaactaccattgtattgctggaatctagagaattattctagtaatrtatttaaaatgataaagaacttccaaaacaaagttgaggattgctgacttctttattttacccactgaggaattatattagttaattctgccctcttcaggtttcccaaacatatagaaaaccaggccaagacctggagatagaacaagtgctac

SEQ ID NO: 350791 - DNA, 629 bp, Homo sapiens
tcacgatatatttttattagcactatgaactacataattgttaggagaatgaactacagcagtgctaataattctccaaatgcgggtgatttaataatataactttatattttgatgcattttcttgatgtattcagggagtttttataattgccccaaaactactattttaggctgtgtgtgtgtgtttgtgtgtgtgtgtgtgtgtgtgtgtgtgtgtagaaaagatcgtctattttaataaggaatgtcaagattccaattaccatccttttgtaaaagatcagaaaattgaaaatgtcatgcgcagggggcaacagttttccttagatcwcagaagtctctgaataaaaactaaaacttcattctctctcaatggtctgcctttatttacattaaaagtaaactaaattttaaattgttgcactttcttctagtaacaaattatttagataggctttgaagaggtctaaaaatagttaatattagtgtatcttaaaataaaacttcataagcaaataaaatatttacacagagagtctacatttaattatgtcggtagcattccattatattaacctaaaactgggtcaaaatttttcactgaggcatgagagcactatttcctt

SEQ ID NO: 350792 - DNA, 554 bp, Homo sapiens
tgaatacttaattataaggagttacaattgtagcaattgccatttcaaggamaaaatagttaaggttttaggatatgccctctatataacagaaaaagcagaaatacttacacagaagattttaatctgtcaaggccaggacaggacacagtatccctgttacattttaaacagggaaatattggtccacagataaagatgatgttaaaataaagaagccaaaaacccttgggatgcaacggccacccaagataagatggaatgacttgaaaatctcaaggtggatatgcagtttccatagaatggccctgtggtgccatttatttgtttattattcgtttatttcttgagtggtgatggtaacaggtagaagaggaattataaagcaaaaaagcacgacactaaaaaatgaaggtgagaaagagccaacaggacattttctaataagtggtatgaggacaatttttcctttcttggtaggaatttacatattggaataggtcaagaaataggatgggctcacatctatgttataggcacatttaaaacagaat

SEQ ID NO: 350793 - DNA, 554 bp, Homo sapiens
tgaatacttaattataaggagttacaattgtagcaattgccatttcaaggaaaaaatagttaaggttttaggatatgccctctatataacagaaaaagcagaaatacttacacagaagattttaatctgtcaaggccaggacaggacacagtatccctgttacattttaaacagggaaatattggtccacagataaagatratgttaaaataaagaagccaaaaacccttgggatgcaacggccacccaagataagatggaatgacttgaaaatctcaaggtggatatgcagtttccatagaatggccctgtggtgccatttatttgtttattattcgtttatttcttgagtggtgatggtaacaggtagaagaggaattataaagcaaaaaagcacgacactaaaaaatgaaggtgagaaagagccaacaggacattttctaataagtggtatgaggacaatttttcctttcttggtaggaatttacatattggaataggtcaagaaataggatgggctcacatctatgttataggcacatttaaaacagaat

SEQ ID NO: 350794 - DNA, 584 bp, Homo sapiens
ccaaggggcttttttttttttttcacaccaataacacattttcctctcttccaccagaacacactcagatcctgaaatcctcttgctgtcagacctctgtatggctctggtttccacctctttacttaaccataccttctctcagggcataaatattccactaataagggcccatcctttaatgccagtgattcactggcctgtcatccaccatccagcatatttacatcagcataaccactctccaatcacactttagggtcaattccaaatcttgttaggtccattgcaaaaagcccctcctggctggccttgtctttcccaactatttcacacaytgagtgctcaagcctgctcagttcagccctatcaaagaagtggaggagactgaagaactcaaaaacctagacacctaaacagatttatatttgcaaatagaacttcagttatatagaaggactggataaaggcaccatgaagctgaaattaaattttaggccagtggattgctgaagaccctttgggacaagaccctgccagtcctgccaagaacactgtttctttccaaagggaaaatgggaaaa

SEQ ID NO: 350795 - DNA, 584 bp, Homo sapiens
ccaaggggcttttttttttttttcacaccaataacacattttcctctcttccaccagaacacactcagatcctgaaatcctcttgctgtcagacctctgtatggctctggtttccacctctttacttaaccataccttctctcagggcataaatattccactaataagggcccatcctttaatgccagtgattcactggcctgtcatccaccatccagcatatttacatcagcataaccactctccaatcacactttagggtcaattccaaatcttgttaggtccattgcaaaaagcccctcctggctggccttgtctttcccaactatttcacacattgagtgctcaagcctgctcagttcagccctatcaaagaagtggaggagactgaagaactcaaaaacctagacacctaaacrgatttatatttgcaaatagaacttcagttatatagaaggactggataaaggcaccatgaagctgaaattaaattttaggccagtggattgctgaagaccctttgggacaagaccctgccagtcctgccaagaacactgtttctttccaaagggaaaatgggaaaa

SEQ ID NO: 350796 - DNA, 620 bp, Homo sapiens
agttcactgtaggtatgtgaatttgtttctggattctctattctgctccatttgtggaacagtgaactctttttccttaaaggtgccaagaaccaaaatcatgctgttttggttactatagctctgaagtattatttgaagtcaggtaatgtgattctttcagttttattctttttgctcaggatagctttggctattttgagtcttttgtggttccaaataaattttaggagkttgttgtttttatgaagaatcttattggtattttcatagggaatgcattggatttgtaggttgcattgggtaatatggacattttagcaatattgattctttcaatccatagacatggagtatctttccttttcatgtgtaggtgtccccttcaattcttcaatttcttttcttctttttttttttttttttttttgactgagtcacgctctgtcacccaggctggagtgtagtggcatgatctaggctcactgcaacctctgtcttctgggttcaagcgattctaatgcctcaacctcccgagtagctgggacctcatgtgcgcaccaccacgcctggctaattttttgtatttttagtagagatggggtttcaccacattggtc

SEQ ID NO: 350797 - DNA, 620 bp, Homo sapiens
agttcactgtaggtatgtgaatttgtttctggattctctattctgctccatttgtggaacagtgaactctttttccttaaaggtgccaagaaccaaaatcatgctgttttggttactatagctctgaagtattatttgaagtcaggtaatgtgattctttcagttttattctttttgctcaggatagctttggctattttgagtcttttgtggttccaaataaattttaggaggttgttgtttttatgaagaatcttattggtattttcatagggaatgcattggatttgtaggttgcattgggtaatatggacattttagcaatattgattctttcaatccatagacatggagtatctttccttttcatgtgtaggtgtccccttcaattcttcaatttcttttcttctttttttttttttttttttttgactgagtcacgctctgtcacccaggctggagtgtagtggcatgatctaggctcactgcaacctctgtcttctgggttcaagcgattctaatgcctcaacctcccgagtagctgggacctcatgtgygcaccaccacgcctggctaattttttgtatttttagtagagatggggtttcaccacattggtc

SEQ ID NO: 350798 - DNA, 629 bp, Homo sapiens
ggaatcaaagttatccattcatttgcttacttaatgacaaagaagtggaaggaaaatataaattcccaaacgtataaaacatttaccatagaatacattttatatgacattttattatacaaaagatagagtaatagaacaatgtaaatataacaatcagtgttaaaaatgagttttctaatatggacaaactatttttaaaagatgctccaatatcaatttctgagggtgatatatatttttaattgatattgtcataagtttccaatttttacctggcacattccagagcaacagagcctgcattagtgttgataattagaatccaagttccatttctattaatctttgtgtgtttatgttttccagtcaataaaataggccagtgaccatattcatccatgacggttgtgaagatagcattggttttagaactcttgacrgataagtgacagcaatctatgaaaccaactgatcctacgcataacatcaaaatcaacaaatcaaactcccttttatcaattacgtacctaatagctacaaagtccattttaatggtcattagagacttgccttggaataaaataaataatactcgtctcgacaaatggcatctgtttttaataatt

SEQ ID NO: 350799 - DNA, 560 bp, Homo sapiens
tatatttttaattgatattgtcataagtttccaatttttacctggcacattccagagcaacagagcctgcattagtgttgataattagaatccaagttccatttctattaatctttgtgtgtttatgttttccagtcaataaaataggccagtgaccatattcatccatgacggttgtgaagatagcattggttttagaactcttgacagataagtgacagcaatctatgaaaccaactgatcctacgcataacatcaaaatcaacaaatcaaactcccttttatcaattacgtacctaatagctacaaagtccattttaatggtcattagagacttgccttggaataaaataaataatactcgtctcgacaaatggcatctgtttttaataattattatcatttcctcttttttctcctaygaatgtattaaaaatctaaatttaattagcaatcctttaacaagtacttatagtttataaaaatcactgaccataagtcgttgagttgcttgttcaactttgacaaatggagaaaaaaataaaaccaaaaggaattca

SEQ ID NO: 350800 - DNA, 558 bp, Homo sapiens
atctgagacccagatcaaaggagaactaacataatggggctgagggtccagaaactgatgcccattttgggattgatcctggaaatactccttcatctcccagaatgattaagattcaagtagttttgtatttcacaaaattcacgaataaattttgtggtgattgcctcctgccttcacagtgggggaaaaaaactgattccattgggaaggaatagctgccagctgtcctctaagataccttttcaatcctgagggaggctgcagagactttgctgcttctctcagtgtagccatagtaaatttctatagaggtccagtaggtttcccttcctctgcctttatatgctctacaacagtagagaatcaaacacwtccagctctgtggtgtgtaggcatgcagcaggcagggaggctaatgaagctacccacctggactaagaaaaacgtatcaaagataaaatagggctgttaagaagtgtaaaagtttggtggtcatctgtaagatgtggtacagaatgtatcacaacaataaatgtcatgactactgtgttcctt

SEQ ID NO: 350801 - DNA, 558 bp, Homo sapiens
atctgagacccagatcaaaggagaactaacataatggggctgagggtccagaaactgatgcccattttgggattgatcctggaaatactccttcatctcccagaatgattaagattcaagtagttttgtatttcacaaaattcacgaataaattttgtggtgattgcctcctgccttcacagtgggggaaaaaaactgattccattgggaaggaatagctgccagctgtcctctaagataccttttcaatcctgagggaggctgcagagactttgctgcttctctcagtgtagccatagtaaatttctatagaggtccagtaggtttcccttcctctgcctttatatgctctacaacagtagagaatcaaacacttccagctctgtggtgtgtaggcatgcagcaggcagggaggctaatgaagctacccacctggactaagaaaaacrtatcaaagataaaatagggctgttaagaagtgtaaaagtttggtggtcatctgtaagatgtggtacagaatgtatcacaacaataaatgtcatgactactgtgttcctt

SEQ ID NO: 350802 - DNA, 547 bp, Homo sapiens
cacgtacattttggaacttggtgacagtttctttgcagcttataaaatgatgacattttctaaatgctctgtgggtccatgataagaatatcaacccttttgcaagccgaacacaatgtttattattaataaatcatttttgagtcaattattcatatcctccttatccttgttttatttagacctatatggccttattttatttatgaaatkatatctctaccattttaaaagatccttttgtactacatgaatttgagcagtcttaagttctttaggtaatagagtgcaattattaaaaaaaaaaaaaaatcctgtggtggattcttgctgaaaattgtttgtcatatatttatacttgaaataaaaattctatcaataatatcatttctcaatatattatgcagcttgttcttaattttcttgaatattattttttgaattttactttgtctaaaattcatgttgatatttttaattttttttcctgtgaagtttgctcattgttttatccttaccttgtatgtcattttgttttaggtattat

SEQ ID NO: 350803 - DNA, 502 bp, Homo sapiens
ttcccaggtaactagaggactctgggttgctgtcagagatgatgctcccttcccactgctcgtgggttggcattctggcatagtgttctaagaaggagatggtgcacggtgcaggagaagtcttcagggctgggtgtgggctcctgcacccctcaacttgggatatgaaggagttaacccccatttcagaattgaaccctaccctgacctcattagcagtgcaaggccctccataaacaatggaggagaaagctccctcaactgagaagaggaaaaaagtgtacatgtcttaggaagttggggggctcctaccctaggctcagaggctgcctagagaagccagagcttttcacacctgggttaataggcttcagctgggccctaatgggctgcagtgatcaaacatcgtctcaatstgtattttattccaaggcttaggtgtcttccttgaggccaggaaagcaaaatcacccacgatgttaaacagtttggatgagtcact

SEQ ID NO: 350804 - DNA, 555 bp, Homo sapiens
tgaggaggagagagtcaaagcagcatgaaataaataaaagtagatggctgaagacaaaaattgattattgtatttcatagtaytctgtggagtcaactctgttttgacctcacatgtttctccaagcccttccaaactgtattatttggtacacattgctcgactaaatgtttttcacatggctccataaacttctcatggctgcccattgactacatggactcagaggtcagagggagaacctgaaaaaaaaaaaaacacaacattttttcaattttgcaaaggtgcttatcatcagaaatatttctgatcacaatgaaaaattgctttttagaaatacaagttctttttatttctgtaaatcttatttactgttttctcattgaagacaagaggtgtggttttactggtgattaggaaattttaggactgggctaataaatatcatatatgaatattgccctaagatataatgcaagctattattgcaaacttatatgaacaaataattaagtggtaatatttaattcacagatgacacttacctaaagattt

SEQ ID NO: 350805 - DNA, 555 bp, Homo sapiens
tgaggaggagagagtcaaagcagcatgaaataaataaaagtagatggctgaagacaaaaattgattattgtatttcatagtattctgtggagtcaactctgttttgacctcacatgtttctccaagcccttccaaaytgtattatttggtacacattgctcgactaaatgtttttcacatggctccataaacttctcatggctgcccattgactacatggactcagaggtcagagggagaacctgaaaaaaaaaaaaacacaacattttttcaattttgcaaaggtgcttatcatcagaaatatttctgatcacaatgaaaaattgctttttagaaatacaagttctttttatttctgtaaatcttatttactgttttctcattgaagacaagaggtgtggttttactggtgattaggaaattttaggactgggctaataaatatcatatatgaatattgccctaagatataatgcaagctattattgcaaacttatatgaacaaataattaagtggtaatatttaattcacagatgacacttacctaaagattt

SEQ ID NO: 350806 - DNA, 555 bp, Homo sapiens
tgaggaggagagagtcaaagcagcatgaaataaataaaagtagatggctgaagacaaaaattgattattgtatttcatagtattctgtggagtcaactctgttttgacctcacatgtttctccaagcccttccaaactgtattatttggtacacattgctcgactaaatgtttttcacatggctccataaacttctcatggctgcccattgactacatggactcagaggtcagagggagaacctgaaaaaaaaaaaaacacaacattttttcaattttgcaaaggtgcttatcatcagaaatatttctgatcacaatgaaaaattgctttttagaaatacaagttctttttatttctgtaaatcttatttactgttttctcattgaagacaagaggtgtggttttactggtgattaggaaattttaggactgggctaataaatatcatatatgaatattgccctaagatataatgcaagctattattgcaaacttatatgaacaaatmattaagtggtaatatttaattcacagatgacacttacctaaagattt

SEQ ID NO: 350807 - DNA, 582 bp, Homo sapiens
ttattccacacaaattctactttctgaatgtcgtatttttttccattttttaaagtacatattaagtcatcaggaatagtaaatgatatgaagaaatctatttagctggaagtaaaaatgcataatcttagtgctgaaaaagtatatagcactattacttaattgcatttataaatgtaacatttttggattataagaaaaacaagaaaatgcagcacatttattttatctgcttaagttttattctagtacatgaatttttttgataagttacctatatttttattttcccctagaataaaaatgatttgtagtctactatagttgtgatacttttggtatttcctatcattatgcatacactgaataaaatgcatgtttctagaactcagattttgcattacaatagtcgttagctagcaaaacaatgttttayttctgcatcattgtatgtgtttgtcaattttacaacatctactcagacatttagcaattattttaataaacacatatcaaatgtaaactgtgcatcaaaatttcacatacatattatggagaaaaaatggtatttctatttaatat

SEQ ID NO: 350808 - DNA, 499 bp, Homo sapiens
aataggcagatgtgtgtaaagaaattaagtaaatcaagattacaacaaatgggcataaaaccacttgsacatagggaaagttgtagaggtgaagacagagtgctctgtcttaagtaaatgtcaggagggcccacagctgagtaagagcttagtgccgtggagaaatcctgaaaccattcccgctgtcatcctcacattgccctgaagacacaacccacactgtgcaccgtggggggaaatggaaaccatgaaattgaccacatcagccacgtagactaatcgctagactttgaacttgtaaatgttcctatgatgctctccaactttcttatctttttgtcatggaccttgtttgcctgcctagacttaaaaattgtaaatgattaactggtggaaatgaaattcctagtccttttggtggtttccccaaacagatactttcccttaacagccaatagtgggtttttgtgtgtggtttttttgtttgtttgtttgtttg

SEQ ID NO: 350809 - DNA, 595 bp, Homo sapiens
atagtgggcattagtaacaggacacagacagcaacaacagaatgaagtgtttctcagttgcagtgcagagttttttatgtagcatttaccttaaaatatctttaaggaagaataaattaactggaaggaactaggtggcatgtatggtcattatcctagtatcttgaatgggcagagcatgtaattcataccctgtagaatagaatggtgaccaaacagacctaattcgttttggatatttacactgatccatttggatcagtgtaaagatacactgatgtatttccccctaaaagkttgcaccatgtagaatacctacttaaagctcaaggctaatttgatttcagggtttaggataagtggtaagtaattcacatatttgactttctcatagctgccgctattttattctcctaagtgtgcttaatttaagaaaattctagactcttgagcattacctccagggaagttgttataaattcaaaactctaacctcaaaaagaattataggatcttaaggcaaattttcagccagaccttgactattagggttttccttcttcttcctccttttttttaattttaatttttattt

SEQ ID NO: 350810 - DNA, 615 bp, Homo sapiens
cctctctggtactctgtgctgtgaattctagcagctttggcctttgcaaactctgaattctgtctccttaactcagggagactcctaggctttgttttaattttttcttctggatcttggcctggaatttctctccagagagtatgctggggcagtcgtagggcttgcctcatttgtttctcttcttttatagatgaccactctatgttgtttattgttcagagtctgataactgttgtttcatatattttttttctggtgttctagttgtttaagtcaagaagataaatcccatttttggttgaaagcagttcagctataccgcttttgtaacaacttgtattatcttcttccttatgtagataaatttgtttgaagaaacattattgtttttttccttttaggagccttgcctcaatcctgaacttaaaggctgggaatcaattatagtccaaactgaatgagctcattagatagtttcaagaaataatgttcaaaccaaatctgtgccttaaaatgcccacagaagttggggctggcagatatggtctcrtgattaataagataatttcatttggggtaaaaaaaaaaggtgtctttacttccacctctttt

SEQ ID NO: 350811 - DNA, 563 bp, Homo sapiens
atggttgaagttgcatgatacaaggctttataaaaatatcttttactctgttagcactgacattacaagtgtgcgtcaaactacgatgatgatggttattatataatattggagttatagttgcacaagtagaatgttgtggaagaaataaatggaagagaactatataacaggaragggctaactcatgtcacttacacatgtagaaatattattcctgtaataataacaagaacattgagaaataaagccaggataaagaagggaactttaaagtttaagggaaaaagatatgtcgcatgaatgatgatattacagaaaacatgtgtttaatcgtactatctctaaaagccaagtaactaaattttaaccttaaccaaaaacaagtataatccctttttactgtgcaaaattctcttcagtgtctcctacttaagtgtttctatgcctaattctagtctgaagagccagctttgacagataaagttaaaaaaaaaaaagatgatgtgcaggaaatgaaaataaataatttctaagacaaatataccaagaacttgaggcca

SEQ ID NO: 350812 - DNA, 336 bp, Homo sapiens
tctgggagccacactaccagactctggttctccaacttgcagacgacctatcataagactttgccactgtgattgtttgagccaattccccctaataaatccactttcatatggatccyactggttctgtccctctgaagcagcctaatacgtggtttgtgccccatattaagcagtgagcaacttgaggcaagggactacatcttattcacctgtgtgtcagttaccagtttattgcctcttaggtccaaatacatccttcaatatatgctatgataaaccacagagttcctataagcatttctccttaaaagggaacatgatgtgaagccttct

SEQ ID NO: 350813 - DNA, 580 bp, Homo sapiens
ctgctttctgcagctttcacagctttgggttgattgtgtctggtgtgtgcaggagatgtactctatgggtggggagggctccatgcagccacctacctgttstgtaggatggagataggtagccctggagcttgaaaataactgtaagaattttacctacagggaagtcacagggctgttcagaaattgatgaaattaaagaaaggcctgaaaaggcaaaggaaggaacatttttggtcccaggggaaaataagacctctttaacatgtgcaatggcattcctggaatggatttttaatcaacaagagttctcatctagtgcaagatccagccaatgaatagactaacactactgacacattatggcctattcgtcagcttaagttgtctaaaattttcagctgccagcaaaggattaatattgattttcaggctgtctttgttaaatacctgctagagagtaccactctcttattctccttgccaactcttcccccagttgtcactagtattaaaatgaaacctacctattattaaatcaatcatgcctggcaaaactattcaaaaagaaggggagcat

SEQ ID NO: 350814 - DNA, 535 bp, Homo sapiens
agaagaggctttgaattttattcacagaacctgagaaaaggaaaagaacagcagccttttcctaggcgccttttctttcttaaaggttttctatttttcctttttgacccagaccaagactgcagtgaggttaaaacmaacgtagcatttctcatcctgtagcaccttacttcttccttagctcctcttcccctccctctaatacagagttagatgcattcaatctagggcaatgtgagagggaattagtgccaacagctggatcttgtgcattggtgctaaatgagaataacccgatgcctttggacatttattttgttccatctgacagcaaccagaggggtgcagggacaaactgcaagatggcattgccctctgccttctggtccaaggtgaagcactattacagagcagcctggatgatgctatagggcttaaagaaatgccattgaactgctctcaggcgatcgatcgggatattagggttttcgtttttccaatacttggctctttacaatccaattctataaagatt

SEQ ID NO: 350815 - DNA, 532 bp, Homo sapiens
gtgtaaaatatgaatataaatgaataaggctggctttcattatcagcttacaaatacttcgaatatagctacacagctgatccctcaagatagtcactattggaagacttctcttatgctcccaactgaagggatatttattcaaatttctttttaaacaaaactcccccaaacttattcagttatagatattgttttattatttaggatctctagtttgaaaatctgacaggtaatgcctgatgcttagcctctgaaacaaagcaacaaaaccttacagtgggcttttcttagtaatatctgtttctaaggtcatgaattgaaaagccagagttctaagttcaaatccacacaagctcaagtttaaggccagtgctgtaatgaacctgagtcatggagaagatgaaattaccaaaaagctgctttctgccctgagcaaagattttagaacgaaatcaacaacattgcatacatcatataatasagagaattatgagtttggtgtactgtttttaacctgggttctcagtga

SEQ ID NO: 350816 - DNA, 436 bp, Homo sapiens
agaggccacttgtgatgacaaggagtagggctaaggcatggaggatgtgcagccacaccttctttgggagggtttgtcataagcctgagtcaggcccactttaaagctgtgagaactggaaaatctgtggctattcattcgtcctacaaagtccgccattttgaccaaacttgcacattaaattggtgcttcattcaagagttgatgatgaattttagagcaagaacctaaaaccaagaaattggaacacatgtgcaggcaactagcagagaggttcagagatttaataattctgtgaaatgctcctaacaagggtggaagatgttcctgccataatgtaggaaatagactctccaggtttgtcttgctggtagctgaggtgggaccrcccagggtgggacggggttgtgttccactcttcccggttcacagaggg

SEQ ID NO: 350817 - DNA, 486 bp, Homo sapiens
attatgaaaatcaattttacctgagatctggaaatgaaacctccacgcataattccagagcagtatctgcttgggaggcaaatgaactcggccacaccacatactgtgaagggggttgaggcttgaaatgagggccaatccccggtaaaggcagcttctctaagccttatggaaaccagggacaggtgctgyggccttctttatcatttaaattagttttgtggctactaaggtgaacttgggttattgcttaaagcagagataacttgttggaaggccactgatgagtagaatttatgcatatgatgtttatgaaaaaactgaactcattgtcaataatttcaaataagtctagttgatacaaaagtatacattaagaaataacaagcgacagaagatctggaagcaatgggccttcaactggcatggcagccagtggggggagctgaggcctcacccctttcattatgtaagtgcttccacccg

SEQ ID NO: 350818 - DNA, 600 bp, Homo sapiens
tgttaaggagtacaataactgaaataggtccaaaaaactattttcactagatagaatacattaataaaatttaaatatagtgtatgaagaaagtattttcacaaacattcaatgtgcacttttactgtgtcagrcattgaagctatttagggatataaaatgaaatgcagcatctaacatttaggaatttgaagttaaaagacaaagttcaatgtgtatgcatgagtaaaaaagtacagtttaatataaaaaattacagtataatacaatatcttaaagccaaagttgcctacacaatgccaaagtaagttagagaaagaggcaattacatttggagaagaggtggacttcatagagaaggtgggatacacctgtatctgttgtgaaacaggaaattgcagaaggaagaaaaggcatttcagacaagggaaaagcatgtgtaaagtcacaagatttctctggactacaataattttttttgacatatatgaaacagtataaaatattactagtttgatttagaagagattggtaaataaaatagactgataaatacctgaatattatgtttcctgcacaggtatggtcatcatgacatta

SEQ ID NO: 350819 - DNA, 600 bp, Homo sapiens
tgttaaggagtacaataactgaaataggtccaaaaaactattttcactagatagaatacattaataaaatttaaatatagtgtatgaagaaagtattttcacaaacattcaatgtgcacttttactgtgtcagacattgaagctatttagggatataaaatgaaatgcagcatctaacatttaggaatttgaagttaaaagrcaaagttcaatgtgtatgcatgagtaaaaaagtacagtttaatataaaaaattacagtataatacaatatcttaaagccaaagttgcctacacaatgccaaagtaagttagagaaagaggcaattacatttggagaagaggtggacttcatagagaaggtgggatacacctgtatctgttgtgaaacaggaaattgcagaaggaagaaaaggcatttcagacaagggaaaagcatgtgtaaagtcacaagatttctctggactacaataattttttttgacatatatgaaacagtataaaatattactagtttgatttagaagagattggtaaataaaatagactgataaatacctgaatattatgtttcctgcacaggtatggtcatcatgacatta

SEQ ID NO: 350820 - DNA, 600 bp, Homo sapiens
tgttaaggagtacaataactgaaataggtccaaaaaactattttcactagatagaatacattaataaaatttaaatatagtgtatgaagaaagtattttcacaaacattcaatgtgcacttttactgtgtcagacattgaagctatttagggatataaaatgaaatgcagcatctaacatttaggaatttgaagttaaaagacaaagttcaatgtgtatgcatgagtaaaaaagtacagtttaatataaaaaattacagtataatacaatatcttaaagccaaagttgcctacacaatgccaaagtaagttagagaaagaggcaattacatttggagaagaggtggacttcatagagaaggtgggatacacctgtatctgttgtgaaacaggaaattrcagaaggaagaaaaggcatttcagacaagggaaaagcatgtgtaaagtcacaagatttctctggactacaataattttttttgacatatatgaaacagtataaaatattactagtttgatttagaagagattggtaaataaaatagactgataaatacctgaatattatgtttcctgcacaggtatggtcatcatgacatta

SEQ ID NO: 350821 - DNA, 549 bp, Homo sapiens
ataatttctcattttaaccctttcttgtgctggaggtactttctttaagggggttttaataactaactcaccttttcctgtccaaagtctgaataatatgaaatatagatccactgagacgtgtggatcatttgaggccaggagttcgagaccagcatggccaacatgctgaaaccccgtctctactaaaaccacacaaaaaaattagccaggcatggtggcgggcacctgtaatcccagctactcaggaggtcagctacttgggacaccattattactgataaggatttaattggagaaataattttagtgcaagarcacaaagggcctcataactgaatccaagaatttttaatcccaaagtccaagcaaggtgggcccaagctgacttcacacttccacttcctgctccagagaatagagatactcgtgggagagtggacaagagagagtagaaagatggagctaagccacatgtgcctaggtattactcccaaagttaccagtcaagtgattatcttcatttccccaagggtgaaataaatagtg

SEQ ID NO: 350822 - DNA, 566 bp, Homo sapiens
taattttggtaggagagctcttcataggaagagaaagtttagcatagcatagtagcaatagttgatggcaaaaggaactgacagagtaggaagcctttcctagtttgtatttaaggacacacacacacatatacacacacacacacacacaccctggaactaaaagtggttgtgtgtgggaggtagagaaaaatcaaaatgatgaaatacttktcactgcctccctttgggtaactgtggaagttcccaggagaaatggccaaaacaaccaagtgaggctcaggcagcttatgttagaaatagtttagcaaaataggaagagctgatccaggagttttcaggaaaggtctaaaatcaggtcaccaaattttgtgtgaatagaaaaacttgggagttgaagttaccttaacaggaatatttggagtgtgttattgagaatggcatattttaaagatgacatacagttattcttggatttcaaatgagtacttcagaaccatactttgaaatttacatagactatttgcttcagtagctgcttgatacctttaaaggttgatagtcta

SEQ ID NO: 350823 - DNA, 566 bp, Homo sapiens
taattttggtaggagagctcttcataggaagagaaagtttagcatagcatagtagcaatagttgatggcaaaaggaactgacagagtaggaagcctttcctagtttgtatttaaggacacacacacacatatacacacacacacacacacaccctggaactaaaagtggttgtgtgtgggaggtagagaaaaatcaaaatgatgaaatacttgtcactgcctccctttgggtaactgtggaagttcccaggagaaatggccaaaacaaccaagtgaggmtcaggcagcttatgttagaaatagtttagcaaaataggaagagctgatccaggagttttcaggaaaggtctaaaatcaggtcaccaaattttgtgtgaatagaaaaacttgggagttgaagttaccttaacaggaatatttggagtgtgttattgagaatggcatattttaaagatgacatacagttattcttggatttcaaatgagtacttcagaaccatactttgaaatttacatagactatttgcttcagtagctgcttgatacctttaaaggttgatagtcta

SEQ ID NO: 350824 - DNA, 646 bp, Homo sapiens
cttaaaattttttaaaatgcattattattgtttgtgtatgccctatatggatcaggagggcaaaaaaggcaaaaatgcagcagaaaggaaatacatctttacttcttataaaataaaaaagactaagttctaaaaatatcttgagactcaggctcgaaaaatcaattcattaatactttctttaaaaaaaaagtattaagtaatctctaattcaggcttcccggaatctttctcttaaatcttttgactttaaagtcgtccaaagtactgatctcaagatgattcacctctcccatcactctgatcataactctttccatctctaagatctttctttttttgtacaccatctgagttttggacttctgtagctcatttgttttaaccatggcctattgacatatgggtggttatcaacatcaaagccttagtcactttcatccttaattgtgtttatggactctttcaacttaaatcatctatacagtaagttaacaattcactggacaaarctgtccatgcctttctgaaggaaggattaactcataatcaggagggtgatttattgttcagaagcctcagttttgatgacattattttttattagaataatggactagtaatgtggaaaaggagagcaattggt

SEQ ID NO: 350825 - DNA, 501 bp, Homo sapiens
gattattgagctgcatagaaaaaaaaatggcagtgagggttgcagatattgaaatgcttagaatgtaaamcctgcaaaatagaactctcagttattgctgaatgtttccctgcatgaatttccccatttttaataatttccatccttaagattattttcaatgtaaattctaataaagaacggttaatactccttttacaaataaagattttctcttcaaaaattgacacacttttcttgtacacatttctcacttactgaaaagtatttattgcagagtagcagtaaagaattggaaaaattgaaaggaggagaactgagagtttggccgcaatgaagcaaaatacaacaacaggtttattaccagatgaacaaaattaataaacaagttattctctgccttattagtcaggaattagttgtatgtaaaagaccatattgcaaaattctacacacaaaggcaagctgaacagttttcctttggaaaatcagaaatacgtt

SEQ ID NO: 350826 - DNA, 501 bp, Homo sapiens
gattattgagctgcatagaaaaaaaaatggcagtgagggttgcagatattgaaatgcttagaatgtaaaacctgcaaaatagaactctcagttattgctgaatgtttccctgcrtgaatttccccatttttaataatttccatccttaagattattttcaatgtaaattctaataaagaacggttaatactccttttacaaataaagattttctcttcaaaaattgacacacttttcttgtacacatttctcacttactgaaaagtatttattgcagagtagcagtaaagaattggaaaaattgaaaggaggagaactgagagtttggccgcaatgaagcaaaatacaacaacaggtttattaccagatgaacaaaattaataaacaagttattctctgccttattagtcaggaattagttgtatgtaaaagaccatattgcaaaattctacacacaaaggcaagctgaacagttttcctttggaaaatcagaaatacgtt

SEQ ID NO: 350827 - DNA, 524 bp, Homo sapiens
atctctgctcgtgcccttgtcatttcacatctggtattccaaagcccattcttcaccacctgtcttagccttcccttcaatctgtccaaaatgttatagctaaaatcatcttttaaatctcttctttaaccacattactatcttccttaagattacytttcattgtaattatgatgtcttaaatcaacattttctgcggagacttggaggatattttagtaacatcttaccctcaaatgaaataattgcacctaataacacgtacatttttaaaaatcgtgagaaataatgatgtattgtacagtgtacaattaaaacataaaaatcagaacaccttttatgcatatagtgatcaaaagttttcaaaggtctttcattttattcattttgctacctcctattgttcatttgatagatttgattcttattttaagatggaaaacactgagacacagagagtttgagggcattatgtgaatccattcagggtcaaaatgaatatcagaactcagtttcctcgacta

SEQ ID NO: 350828 - DNA, 495 bp, Homo sapiens
tcttctttaaccacattactatcttccttaagattacctttcattgtaattatgatgtcttaaatcaacattttctgcggagacttggaggatattttagtaacatcttaccctcaaatgaaataattgcacctaataacacgtacatttttaaaaatcgtgagaaataatgatgtattgtacagtgtacaattaaaacataaaaatcagaacaccttttatgcatatagtgatcaaaagttttcaaaggtctttcattttattcattttgctacctcctattgttcatttgatagatttgattcttattttaagatggaaaacactgagacacagagagtttgagggcattatgtgaatccattcagggtcaaaatgaatatcagaactcagtttcctcgactatcaatccagcactttcttcacttcagtaaaatggtatgtgtcaygctgcctggtattcatgccactaagaaagtgtaccaaattactgcg

SEQ ID NO: 350829 - DNA, 459 bp, Homo sapiens
agtccaaccagggaacctctgcaatgaagaaccctgttgcagctaccattaatttctcaatcctacatctaactatacccatgttgttggctactgtattactcagttctcacactgctataaaggaatattcgagactgggtaatttataaagaaaagaggtttaastggcttatggttccacaagctgtataggaagcatgcctgggaggcctcaggaaacttacaattatggaggaagcgggagcaggcacatcttacatggacagagtaggaagaagagagagaagggggaggtgctacacacttaaacaatcagatctcatgagaacccactcacttttatgaaacaacgtgagaaaaatccgcccccatgatccaatcacctgccaccaggtccctcttccaacattgaggattacaattcgacataagatttgaatggggacacaaatttaa

SEQ ID NO: 350830 - DNA, 577 bp, Homo sapiens
ctactgctcttggcatcatttgcttctgatttaaggccaaggatgagtaatctgattggatgagattgcaatacaytatgctcacaaaggaaagtaactcagatgctttctgaaagttctaaagataaatattatcaacaagatgatatgaatgtttgacactgatacaattgtcctttttttttttacttcttattctctggttttgtgcaattcttccattttctgtcgtaagtctagaaagtacatcctattacaggatttaaagtcactttcccatctcgtaggacttgaatatatatgtattatatatgattaggttcacctacattgaacagcaaacctccaaaacagcactgatttaaacaagatggaagttttcttgtttatcagaaaggaattttggagataggcttcccagaatggatatcgtggctacataatcataataaaaacaagggtctctccttctattacaccatcgagggtacctcatggcccaagatggctgccagaactccaattatcacatctgttttgtaagccagcagagtaaaaaagtggaggagtcaaaatg

SEQ ID NO: 350831 - DNA, 603 bp, Homo sapiens
agaaggaaaccagagctcaccagaaatcacaatgtgggcacaaactaccttgacaagtcagtacagcatggttcagtgccctacgtgtacaaaacaaccttattaattaataacagaaggagcatccaagcactatgttcccaggagttggccaagggtyaaccacacaatcagttcctcctgaagatgtgctagcattgaacagccaagcctgaggtgttaactcttccctatttgatgatgcaggtatggatggtctccttcttggaaggaagatgagatgagtacattggatataggcctcaacataactttgtgggaagaagaatgcatacaaatgtggggtaattaagtggtaaaaagcagatgtttgcttctctagaatctttttcccctaaacaaaagctggatttcagagaaccatatctcagacataaatttttgcaggatagactgaccctttacttcagagttgaaccataaatggcttaacatcaccaggttatctcacttatctggccacaatgagtgtttcagagatggtcatgtgatcaaacttgtggcaagcaagagcttttcgtaggatatttctaggtaagaaag

SEQ ID NO: 350832 - DNA, 560 bp, Homo sapiens
acacttcccactttgtatgaagggctgtggtcccacaagtgatcgcataagtgatagagcccctttttacaaaattacacyttggttatgacttagctatagaatgacattccaaaatgcattttgacttttaaagacaggacctttcttgacttcaatgtaattactaactctaaggaaatatctctccccctctttatctcttcatttacatattgcctccagcttctgatagggatcttatgaggtggcatttgtccttctatattttattctatgctcctatgattttaaaaacagattctaccttggtattatcaatttcttaggtgtgcttttcttcttttcctattccttatgatattttctgcaatcctaattctgatgtctcccaactcacttgttgtattcttcaggaatcctttggttgaaagagatggaaaatttgatggaataaacaatgaagggagtgtggtaggctgaataacgcccctcctaaaattgtctatgccgtcatccccagaatctgtgaatatgttaccttatgtggtagaagggac

SEQ ID NO: 350833 - DNA, 487 bp, Homo sapiens
tggaagcaagaggttgaaagatgagaggaaggggctataagccaaaggatgtagatggtctttagaagctgaaaaaggaaagaaagagtctctcccctgaagactctaaaaaggaaaacagtcttgtagacatcttgattttagcccctgaactttagaattatgaagtaataaatgtgtgttgttttaagccactaaattgtggtaatttttacagcaacaataagaaaattatatagtttatttatttgcttatatctggttaaggtagaactgaatccagttttctttttctaatttgagataatacatttattcttgtattaatcttataatgaaacatctatgatttagtgtaaaatgatgcacaaacttgtgaaatcaacagacyacaaaaactttatggatgttttacttctgccctcatatttttagtgtctcatatatttctaattctacaggattttcttttatctagtcttcccaa

SEQ ID NO: 350834 - DNA, 577 bp, Homo sapiens
ttctgggtcttttgtaacgaattatcttgcaagatgtttagtcagcgttctctagagggacagtactaataggatagatgtatatatgaaaaggagtttattatggaatattgactcaaacgatcacaagatgaagtcccacaataggccacctgcaagctgtggagcaaraaagccagtccgagtcacaaaacttcaaaagtagggaagcttgcagtggagcctttagtctgtggctgaaggcctgagagcccatggtaaaacaatggtataggtccaagagacaaaggctgaagaacttggagcctgatgtttgagggcaggaagcatcctgcacggaaaaaagatggaggccagaagacttaaccagtctagtccttccacatttctcttcttgcttttatcctagccatgctggcagctgattagatggtgcccacccagattgagggtgggtctgcctctcctagtccactgactcaaatgttaacctcctttggcaatactgtcacagccacactcaggaacaacactttgcatccttcaatccaatcaaattaacattcaatattaacaa

SEQ ID NO: 350835 - DNA, 459 bp, Homo sapiens
accagtctagtccttccacatttctcttcttgcttttatcctagccatgctggcagctgattagatggtgcccacccagattgagggtgggtctgcctctcctagtccactgactcaaatgttaacctcctttggcaatactgtcacagccacactcaggaacaacactttgcatccttcaatccaatcaaattaacattcaatattaacaatcacacaagactagaaaattttttttaccaattatttatgtaaataggttttccaagcttttttgcatttgcttcttcctcagcaataccagtgatttataaatttcttcattttatgtaatcccatatttcttgaagactttattcattctttaatttttttctttttattttctggctagattaattcaaawgacctgtctctaagttctgagattctctcttctgcttggtctagttgattttt

SEQ ID NO: 350836 - DNA, 512 bp, Homo sapiens
ttaacagcatagtctgatatctgtgaggaaatttagtttatacataacaagcttgatgygacataataggttctcctcaaaaatatctggacatctgaaattcaggcagccagcattctatcaggctgtgtgctttggacatgtagcatttgtaatccaacttgctgatcacggaaatcagaatagaagtttaattggaacccctattctccatcatcaactgtaataagaaagaaaagtagcatctttcatgtaagatctttggttacaactaaatgaggctttgggctttgacaaacacaattcctttactatatttttaaaaaatcagagtcagtgattagatctctttctattaaaaaagtatcacatttgcaaactgcagtatgctactgagaaaatggcacaatttaataaaaaggagatagaagtaccccgctctcactattatcatcacatttgggtttctgtaatattttgtgcaatcattaaaagcaaggcaacggtaatat

SEQ ID NO: 350837 - DNA, 594 bp, Homo sapiens
aataataataaaagacaaatgtaattaagagacacattcaccagtgatcagataccagacagccatgtcatattcactttgattttcaaggcctctggtcatatagtttatttcacacagttcttctgctgagattccggtcattatacttcattccatttcctggtgctattcgcataatataatctctgctctaatggattaagaatcacctaagaataaagaaaagttttttctttatcatacccatggcaaattatwtaacctgctctggctttctcagcatggcattcactttccttcccttgcctatgaaatctgtgatttgaaatgttagacaggagtcatttgttttatcattagctaatgtttgccatgaaattaaaagcaaggagaagttataaaggggaagatacattaatcaaaacaaatcaataaccagtctgcagtttgatgcttattttattaaaaattgccagattaggaaaaatctcccccctcctaaaaataaaataaatgtgcattttcaaggatttgaggaagttagaatacccttgattctatagttttgggaaggaaagaaataaaagtaaa

SEQ ID NO: 350838 - DNA, 604 bp, Homo sapiens
aataaatagaaaagtatttcaagactattagttgatgatgaatagaaaatgatgagcaatatagtggtccttcaattttttcaaaaagagtaagatatgaaatgggtgagattttttaatctagtggctttctttatctttgttcttctaaattttctattttagtagtacctcggcaaacccagctccccacaatattgattgtttctgtcctttacttaaaaatctgatttcagaaatattgtataatatggaaagggcctgaatattgaactatgaaggaagacattaagacctggttttgtttcttaccaacagtgtgtcattggaccagtgatgggctgctaaatgtctaacaacgggctctttatggtggctgggggttgcgggggggagctttaagtgttttctgttcttactgtataaattctatcatggccaatttcaagctatcaaagagatatcactgtatgtagaattgagaagaaatgtggacaacyggctggcatgatcccatagcagctggcttcaccacatcactgttgtgaacagacatatcactcttctaactctattttctctcccataaaaatgaaataataat

SEQ ID NO: 350839 - DNA, 495 bp, Homo sapiens
ccctaggcactgattctagatgtttcctttttttagagaggcaagttttataaacaacatacactgtatctatatcgtgaaaaccaacaatcctccaatctctgtggcttaattcaagagaatttactcatgcttcattatgtcgctgcccaaaagagactgaaatataaatgawtatcatcattatgacagcaaaatcaaacaaaacagtaatatatgttggacatgtgctattaaatttcacaacctctccatggagtagatactagtaaatcgaggtatggatactgtggctaaataagattaagttactttctcaggtctttctaacttaacaagccttttatattagatatgttcactatcagaggctgacctgtttcctatttccaactcatgattgcctccttagactccctaaatttcattgcccaaagcaatattatagaaagatttcaactggcttgtcctcactcttcattcatcactttagca

SEQ ID NO: 350840 - DNA, 572 bp, Homo sapiens
atggttgtctgttcatttgtttgttttaatagataatttttcattgcacacaatatgagttggccatattgctacgataatgtcccttagtttttagatctccamaatcagtctgtaagttagcatctattattttatatattttctaataagaaaagtggctttgtaatacaggtcaagcatttgctgtgttttataaaactagtaaataacaaaccggatatgactcataattgttgtcagattttagaacttaaactcttagccactactacactaccataattattagaaagtggtaacaaagtaaaaatttaagagcttttgacttgggattcacattgcatattgagaatattgaataatgcatatttattattttatttcttttaataaaaactaaatatattgagcatccaacatgaagtagacctttttctgaacgagagacaagttagccagaaaaattgccctcaagggaggaattttgttgaatattcaagaaatattagagaaaagcttacagtgtcttcaatgctttgcaaaccccccagattacttaacaggaatat

SEQ ID NO: 350841 - DNA, 615 bp, Homo sapiens
tattttctaataagaaaagtggctttgtaatacaggtcaagcatttgctgtgttttataaaactagyaaataacaaaccggatatgactcataattgttgtcagattttagaacttaaactcttagccactactacactaccataattattagaaagtggtaacaaagtaaaaatttaagagcttttgacttgggattcacattgcatattgagaatattgaataatgcatatttattattttatttcttttaataaaaactaaatatattgagcatccaacatgaagtagacctttttctgaacgagagacaagttagccagaaaaattgccctcaagggaggaattttgttgaatattcaagaaatattagagaaaagcttacagtgtcttcaatgctttgcaaaccccccagattacttaacaggaatataatttttttcatttgaaattatttgtgtgaatatcttctgtaatatgtaacaggatatttaactgtgtgatttcagattgaaatgttttgacctgcttaacacagacagaaaataagaaaccacatttctccctaatgttggacttatatatctggccttggcctatattgggggctagatg

SEQ ID NO: 350842 - DNA, 615 bp, Homo sapiens
tattttctaataagaaaagtggctttgtaatacaggtcaagcatttgctgtgttttataaaactagtaaataacaaaccggatatgactcataattgttgtcagattttagaacttaaactcttagccactactacactaccataattattagaaagtggtaacaaagtaaaaatttaagagcttttgacttgggattcacattgcatattgagaatattgaataatgcatatttattattttatttcttttaataaaaactaaatatattgagcatccaacatgaagtagacctttttctgaacgagagacaagttagccagaaaaattgccctcaagggaggaattttgttgaatattcaagaaatattagagaaaagcttacagtgtcttcaatgctttgcaaaccccccagattacttaacaggaatataatttttttcatttgaaattatttgtgtgaatatcttctgtaatatgtaacaggatatttaactgtgtgatttcagattgaaatgttttgwcctgcttaacacagacagaaaataagaaaccacatttctccctaatgttggacttatatatctggccttggcctatattgggggctagatg

SEQ ID NO: 350843 - DNA, 530 bp, Homo sapiens
gcatatggaaaaaaagtgtaaaaaatcccaatttaaattttatgatgagtaattgctgctggtttttctttctggcagttaaattttatttgatttcacattcctataatgaggttcaacatttctaccactacatttgagtttctccaaacatatttgaatctatcatgatcttttctttttgttgacaaattccaaatatatccaacatgtgtaatttaagactttatttttrtaagctatgacataattttcaaaccaatgaatgtttccttaagtttgagtaaacagctcttctgcaatcctaaaagttactttttttgttgttctttataaacacacacacataacacatacatacatgcatacacatgcatgcacacacacatacagcatactacctgaactatggagcaagaagtcataaccttaagtcaacctgggccaattagagtgctgataatgcagacgtgttttgttggtatactctctcatggagtttcctaggaaagactaaattgcagcacatt

SEQ ID NO: 350844 - DNA, 566 bp, Homo sapiens
tatctctattctcagtttcaacaccacaaaagtatcctctctgcttttattcaataagagattacatagtttgttctcttttgtacctggcttcttttgctcaacattatattgatatgtccattcatatgcatgtgactacagagttttgattcttgttactatatttcattgtgtgaatatcccatgatttacttatttcaacttttggtgagaatttaaaagttttaaaatgtaatttttgaagagctgtaaataaaccactttacccaaatatacctttcctcattactcttcatgctgactggaaatccttgaaaattgtctttagctaaacacatarctataacctcacgagtaggtcttagtagttcctttataagccggcttttacttctccatttctcctatattgctacttcctcttactgtttttgctacagccacaatgaattactttaaatatttttttctctgtgcttttcacttggatagtttctattactaggtcttcaagttcactattttatttttactgtggtgtttaatctgatgttattctcatc

SEQ ID NO: 350845 - DNA, 583 bp, Homo sapiens
gttgtaaggacttagatgtgtatatataagttaagaaagaactgtatcttcaggccttgcccttgaaaccacacctgactgtacaccatagcagaggctcaaaaacccaaaaggcacagaaatggggagggagttgaggaaaggagagagaaacaacagagaacagggagytgttgaagagacaatgctttgttattttgctagggcttgcctgcttcttaaaaagagtcacttagcacatcatattcaaaatccatgatctcttaaggttggaagtcattttgagcatagctatattgctattccatcaatgtaaataacttacttagccaataaacttgcattttagtaatggagaaaattggcattttttttttttttttgagaatgcttgattctctttcctataatgtaaaacagcacagaatgagtggacatagtcaaattggaaagtggccatatgtcatacttacattaggcagtttaggtaattgttgttgattcttattgcctttccctttttactcaaaatgcaccagaatgaaaagaacattatgaatattactgtttttttttctgaaat

SEQ ID NO: 350846 - DNA, 583 bp, Homo sapiens
gttgtaaggacttagatgtgtatatataagttaagaaagaactgtatcttcaggccttgcccttgaaaccacacctgactgtacaccatagcagaggctcaaaaacccaaaaggcacagaaatggggagggagttgaggaaaggagagagaaacaacagagaacagggagctgttgaagagacaatgctttgttattttgctagggcttgcctgcttcttaaaaagagtcacttakcacatcatattcaaaatccatgatctcttaaggttggaagtcattttgagcatagctatattgctattccatcaatgtaaataacttacttagccaataaacttgcattttagtaatggagaaaattggcattttttttttttttttgagaatgcttgattctctttcctataatgtaaaacagcacagaatgagtggacatagtcaaattggaaagtggccatatgtcatacttacattaggcagtttaggtaattgttgttgattcttattgcctttccctttttactcaaaatgcaccagaatgaaaagaacattatgaatattactgtttttttttctgaaat

SEQ ID NO: 350847 - DNA, 526 bp, Homo sapiens
gggactctgaaaatgaactctacattaagatgggaacacctgtatgttaagcccagacctttggtgaaataggtagatgatctggaaaaaattccctttgttaattcagatctatctgtaacatgaacagtgttttattagtgatagtatttatctgtgattattactttatatgtatttaagtataggactctaattaaatacaaaaggattggtaagtrcttttataattaactggtatgagtactgatagcttttttttttttttttggagacggagttttttgttctttttgcccaggctggagtgcaatggcacaatcttggctcactgcaaccttcacctccggggttcaaacaattctcctgcctcagcctcccaagtagctgggattacaggtggatgccatcatgctcagctaatttttgtatttttagtagagacagggtttccccatgttggtcaggctggtcttgaactcctggccttgtgatccacccgcctcggccacccaaagtgctggaa

SEQ ID NO: 350848 - DNA, 569 bp, Homo sapiens
tctcacctcagcctcctgagtagctgggactacaggcacacaccatcacgcttggcttctgacctgattttaattcagatttggttattacagaatactggtttgccttggtttaataaatcccttccctcttccctacttgcctaccttcctggcttcttgccttcctgccttgctgctttattttagtcttccatcattttatccaataaatatgagggcccactcagactctgggctaggccctggtgacttaagagtgaaaaagacagatagagtcctttttcttayagctcttacatgtagcagacagagaccattataaacaaaataattttagatattaataaggattatcaggaaacaacactattctcagtgagaaaatagaatgccattttaaacagaattcccatggactgcatatctgaggaaatgctatttcagttgaaaactgaaggataagaaagaaagagccaaatacacttcaggggaagtgcttccatcagagggaacaacacgtagttgtcacagggaaggccactacagtgcaaatggtactttgtaag

SEQ ID NO: 350849 - DNA, 621 bp, Homo sapiens
aatgtcccataaggcttgttatgggtattaaatgagatagacccaaaactacttagttctgtggctgcacattatttgcagccaataaataggatattgttatttttataactaacctccacttctgtaggcaaaacataaagacctattagaaaattgatgtggaagaagacaggtaaaaacaaggagaagaggagtaaaggatgacaatacagtaagtcagcagtcagagttccttcatgaagttagtccttggtttcatccttcctttcttctatcctgatcaggccctacctctatcaatacctgaactgtttctgttttgcctgtgcttttcaacaarttactttggcacatttattttttattttcaaaattatgcaaattaatccaagtttgtttcttgccttagagttttaatttttatattttactctctttgtaatctttctaaaatgtacttctgagaagattatcagctgctgaacaacctgagcagactctctgtagtctacattgagtttaaaaaaatctctcagcctcttttctttggtctcctttcccctcactgttcctacacattctacaatccaaacataccactgtatttattttatacct

SEQ ID NO: 350850 - DNA, 579 bp, Homo sapiens
atacacatgatatatatacatacacatataatatatccatatatactatatatatatatgccacattttctttattcacttggctgatgggcttttaggctgattccatatttttgcagttgctaattgtgctgctatagacatgcatgtacaattgtctttttcatttaaagacctcttttttttctgggtagataccccttagtgggattgctggatcaaatggtagttctacttttagttctttaaggaatctccacactgtgttccacagtggttgtactagtttacattcccaccagcagtgtagaagtgttcccttttcaccacatccacrccatatgttatttttttattttttaattatgatcattcttgcaggagtgagacggtatctcattgtggttttaatttgcatttccctgataattagtgaggatgaacatttttgcatatgtttgttgaccatttgtacatcttcttttgataattgtcttttcatgtcctttgcccactttttgacaggattttttttattcttgctgatttgtttgagttccctgtagagcctggatatta

SEQ ID NO: 350851 - DNA, 579 bp, Homo sapiens
atacacatgatatatatacatacacatataatatatccatatatactatatatatatatgccacattttctttattcacttggctgatgggcttttaggctgattccatatttttgcagttgctaattgtgctgctatagacatgcatgtacaattgtctttttcatttaaagacctcttttttttctgggtagataccccttagtgggattgctggatcaaatggtagttctacttttagttctttaaggaatctccacactgtgttccacagtggttgtactagtttacattcccaccagcagtgtagaagtgttcccttttcaccacatccacgccwtatgttatttttttattttttaattatgatcattcttgcaggagtgagacggtatctcattgtggttttaatttgcatttccctgataattagtgaggatgaacatttttgcatatgtttgttgaccatttgtacatcttcttttgataattgtcttttcatgtcctttgcccactttttgacaggattttttttattcttgctgatttgtttgagttccctgtagagcctggatatta

SEQ ID NO: 350852 - DNA, 579 bp, Homo sapiens
atacacatgatatatatacatacacatataatatatccatatatactatatatatatatgccacattttctttattcacttggctgatgggcttttaggctgattccatatttttgcagttgctaattgtgctgctatagacatgcatgtacaattgtctttttcatttaaagacctcttttttttctgggtagataccccttagtgggattgctggatcaaatggtagttctacttttagttctttaaggaatctccacactgtgttccacagtggttgtactagtttacattcccaccagcagtgtagaagtgttcccttttcaccacatccacgccatatgttatttttttattttttaattatgaycattcttgcaggagtgagacggtatctcattgtggttttaatttgcatttccctgataattagtgaggatgaacatttttgcatatgtttgttgaccatttgtacatcttcttttgataattgtcttttcatgtcctttgcccactttttgacaggattttttttattcttgctgatttgtttgagttccctgtagagcctggatatta

SEQ ID NO: 350853 - DNA, 496 bp, Homo sapiens
accccatgttgatattggtagaacactgccaaagcagtatctagagggaagtaaagaactttaaatatatgaatgaagaaataagaaagattggcaacaaattaggtcaggatttgacccagaattcaccctttagctgttctgagatatagttcatacaagaaaagtaggataaatcctttacttttttatttaccagactttagaataattcattgataaaatactaacaattctctgatccctaggtagagtattatgcatgagttttcacttcatttatacttttatttctgaaattttttttaccaaacatattctaactttataatcagaaaaatacttttgaaaaaggagtcagggaataaagatatatttgcaacttagtaaagttcctctgatctcttgaagtattaaaacttttgaatacatgtgaaaaaaatttctaagacmactcatgaaatctgaaactgggatggtttctggaggttttcaa

SEQ ID NO: 350854 - DNA, 563 bp, Homo sapiens
ttatcagcaacatggaaagtatcatcatcaattgatatctatttatcagcaacatggaaagtatcatcatcaattgatatctatttatcagcaacatggaaagtatcatcaattgatatctatttatcagcaacatggaaagtatcatcatcaattgatatctatttatcagcaacatggaaagtatcatcatcaattgatatctatttatcagcaacatggaaagtatcatcaactgatatctatttatcagcaacatgraaagtatcatcatcaattgatatctatttatcagcaacatggaaagtataatcatcaattgatatctatttatcagcaacatggaaagtataatcatcaattgatatctatttatcagcaacatggaaagtataatcatcaattgatatctatttatctttaaacatctggatgaactaatcagacatgaatttaaaaacttattgtccttttagaaaaacgaaagccatattttcttgttataataaaatgttttaatgtttggttcttgtttagaacttgttctctctaccctggtggtt

SEQ ID NO: 350855 - DNA, 578 bp, Homo sapiens
caattctcagtaacattctttctttgcttaaataatacagccagatgtgcttagcacataactctatagaaaataataatttaaattagatttaaatagagatagatagacagacagacagatagacagatatttttgagacaaagtctcactttgtcctctaggctagagtgtagtggcatgatcatagctcactgcagccttaaactcctgggctcaagccatcctcctatctcatcctcccaagtatctaggactacaggcacatgcactatgcccagctaattatttttttaattttttgtagagatgtcgtcttgctacattgcmtaggttgctcatgaacccccagcctcaagtgatcctcctgcctcagcctcccaaaatgctaagattacaggcatgaaccactgcacccaaccaatattaatatttttaacaattgaaagagctcaaagaaataggttttaaatttagaggccctgttttgctgacagggaaaggcttttagctggaatcaagagtgctgttgtcttttcccttcaattagtcattccttttaagacttttaagattta

SEQ ID NO: 350856 - DNA, 310 bp, Homo sapiens
caagtaaattggaaaggaagaagtcaaatttagatgtgtgcaaatataatcttatgtttggaaaaacctaaaccctccatcaaaacactgttagaactgataaattcagtaaaatcacaggatacaaaatcaacatataaaaaccagcatcatttctatatgccaacagctaataatctgaaagagaaatcaagaaggtaatttcatttataaaagctacaaacaaaataaaatatctactaataaasttaaccaaagaagtgaaagttctctacagtgaaaactataaaacactgataaaataagttga

SEQ ID NO: 350857 - DNA, 519 bp, Homo sapiens
aaagttgaaagtgacgccattttgaaaaactgataatatcaagtgaagctgaattaaaatatgcacaactttttttccaaaaatttcactctaggtataagcccaacagaaaaaggtgcatatattcatcagaaaacatgtaaamtaatgttcatagcagcattaattcaataatcaaaaactggaaacaattccaaatcctatcaacagtaacagtgatttaaaaaataataataattcacttcaaggccatataatggatacaatacaaagtacaaatgggcaacttctaccaagaacatgaagattccacaagcatatgttgactgaaagcagccaggcccaaacactattatgctagcaagtaaatttgtcaaacattcaaaattattttggagttagatgccagaatagtatcacttttgggagaagggaagatgtattattgaatggggacatgagagcttctagggtgttgatagtgctgtatttcttggattgggtggtacttatgtgggt

SEQ ID NO: 350858 - DNA, 540 bp, Homo sapiens
taaacatctatccacacaagaaaacaccttcataagaaccaaaaatcaggtgagcaatcacagtacgtggttttaacatcatagcaaggaaaaaggtgctgaagaaggtaggaaagacagtctttaatcaactacaccaatgctccttcgtctcctggcagtgccacatrgtatggagagagaatctgtgtgcttgggggaggaaaagcaaagtgattatgggactttgcaatggaattcagtgcaaactgtcatagcagaaagcaacaaagggcaaaattcagctggtgcccatggagtgagcatttagaccagccctaaccagaggggaatcatttaccccagcggtcaaaaccctgagttcatctagccccaccaccatggctaaaatactctgggtcctaaataaacttggaaagccatctaggccataaggactataattcctgcacaagtcctggtgctgtgctgggcttagagccagtgcacttgggatgtgcatgacccagtgagaccagctggggtaaccaagggagtgcc

SEQ ID NO: 350859 - DNA, 540 bp, Homo sapiens
taaacatctatccacacaagaaaacaccttcataagaaccaaaaatcaggtgagcaatcacagtacgtggttttaacatcatagcaaggaaaaaggtgctgaagaaggtaggaaagacagtctttaatcaactacaccaatgctccttcgtctcctggcagtgccacatagtatggagagagaatctgtgtgcttgggggaggaaaagcaaagtgattatgggactttgcaatggaattcagtgcaaactgtcatagcagaaagcaacaaagggcaaaattcagctggtgcccatggagtgagcatttagaccagccctaaccagaggggaatcatttaccccagcggtcaaaaccctgagttcatctagccccaccaccatggctaaaatactctgggtcctaaataaacttgraaagccatctaggccataaggactataattcctgcacaagtcctggtgctgtgctgggcttagagccagtgcacttgggatgtgcatgacccagtgagaccagctggggtaaccaagggagtgcc

SEQ ID NO: 350860 - DNA, 622 bp, Homo sapiens
tgctgcttcttgggttccggggacgaggctctgttttgcattccctcctcctccgccccgccccgggagaccctcccggcccaacctcctccctctcgggatactgacggcagcaaggatgatgccacagtcgtcccgtgtcaactatcagatcagcgttcacsgggtcccgaaccccgcctagcgaggggtcgtgagggagagcgagctgggggtacaggagtatcatttcctgcggagattcgtgttcttcaacattttttttttctgaacttggaaaacttttaaggacgaattagagaacttctttctctttcctatgagtaactcgaactttggtaatacagttgtggatcatagattacatggattaattccagggttatgaaattcaagggtggacactcatttgttcctattggacatgctacccaagttgcattttaaaaatgtattttaaaaacccaataaatatttaaagaagaaataatatcaattcttcacaaactcttccaaaaaatagaagagtaaggatgatctcccaactcatgctatgaggccagtatcaccctgataacaaaaccagataaagacatcacgagactacagatcaatatttctt

SEQ ID NO: 350861 - DNA, 622 bp, Homo sapiens
tgctgcttcttgggttccggggacgaggctctgttttgcattccctcctcctccgccccgccccgggagaccctcccggcccaacctcctccctctcgggatactgacggcagcaaggatgatgccacagtcgtcccgtgtcaactatcagatcagcgttcacgkggtcccgaaccccgcctagcgaggggtcgtgagggagagcgagctgggggtacaggagtatcatttcctgcggagattcgtgttcttcaacattttttttttctgaacttggaaaacttttaaggacgaattagagaacttctttctctttcctatgagtaactcgaactttggtaatacagttgtggatcatagattacatggattaattccagggttatgaaattcaagggtggacactcatttgttcctattggacatgctacccaagttgcattttaaaaatgtattttaaaaacccaataaatatttaaagaagaaataatatcaattcttcacaaactcttccaaaaaatagaagagtaaggatgatctcccaactcatgctatgaggccagtatcaccctgataacaaaaccagataaagacatcacgagactacagatcaatatttctt

SEQ ID NO: 350862 - DNA, 617 bp, Homo sapiens
ccatggtcaagtgaggttgatgccagaaagcaagattagattagtttaccaaaaatcaattaatgttwgataggtgagtagggtgactgtagtttacagtaatctattgtatatttcagagtagctaggagaaaataacttgaatgtttctagcatgaagaaaagacaaatatttaaggtgatggatatgccaattgcactgatttgatctttatatgaatgcattaaattattgcatgtacctaaaaagtcctgtcactcgctgctgcctggggtcctggctgtcaggcgctggaatcatcggcgaggaggcagctccgaatttatagtgaggggcattaaattattgcatgtacctaaaaagtgtacatctattgtgtatcaataaaaataaaattaaagaagtaaaaaatggacaaagcctacatgattgtctaaaaaaatttttaaaaactattggacaaaattcaacactttttcatgctaacactcaacaaactaggaataggaacttcctcaaactgtgaagtttatttatgaaaaacttaactaatatcacacataataacggaagacaacgtttttatgtctaagatcaggaacaagacaaaatgtct

SEQ ID NO: 350863 - DNA, 617 bp, Homo sapiens
ccatggtcaagtgaggttgatgccagaaagcaagattagattagtttaccaaaaatcaattaatgtttgataggtgagtagggtgactgtagtttacagtaatctattgtatatttcagagtagctaggagaaaataacttgaatgtttctagcatgaagaaaagacaaatatttaaggtgatggatatgccaattgcactgatttgatctttatatgaatgcattaaattattgcatgtacctaaaaagtcctgtcactcgctgctgcctggggtcctggctgtcaggcgctggaatcatcggcgaggaggcagctccgaatttatagtgaggggcattaaattattgcatgtacctaaaaagtgtacatctattgtgtatcaataaaaataaawttaaagaagtaaaaaatggacaaagcctacatgattgtctaaaaaaatttttaaaaactattggacaaaattcaacactttttcatgctaacactcaacaaactaggaataggaacttcctcaaactgtgaagtttatttatgaaaaacttaactaatatcacacataataacggaagacaacgtttttatgtctaagatcaggaacaagacaaaatgtct

SEQ ID NO: 350864 - DNA, 549 bp, Homo sapiens
ataccttcatacattagtcatcatagacaaagagaaggcagagaaactgaagcagttctggcaccctggtttgttagagaaggagatgaaatcagacacactgatttgaactgtgttaaaaatttaaaaattcaaagataaaaacaattttacttactatagatcaaaagagtaaaaatactaagaaatgacctggtgtagtggctcactcctgtaatctcagcactttgggaggccgaggtgggtgaatcacaaggtcagggattcgagaccaggctggccaacatcgtgaaaccctgtctctactaaaaatgcaaaagaaaaaaaaaaaaaaaagccaggcgtggtggtgcatgcctgtagttccagctactcaggaggaggaggctgaggcagaagaatygcttgaacccaggaggtagaggttgctgtgagctgagattgtgccactgcactccagcctgggtgacagagtgagactccatctcaaaacaaaccaaccaaccaacaaaacaaaacaaaacaaaaaaaaccctaagaaataaattt

SEQ ID NO: 350865 - DNA, 600 bp, Homo sapiens
  misc_feature (1)...(600): n = A,T,C or G
ggcatttgccttatttgaacacagtttgaacaactgaccaccttagatatgctgaaactctgtgattggcacaagagtaggtttcagtcttttcagcatccagttaggttacagttcactacatrctgagaaacttttaggccaaatttaaaatacgtaaggaagcagctttaggataaacttaattctttaaatgggtgaactgtatagtatgtagagtatatataagtaaagctattttaaaaaggtaaaatatgaaatttgtgtagatgagtaaagacatgaatgtctgacttttgtttcttgcttccaagtttctgaagagagaagaggggctcagttcctatctttcatgcaatggctaacacctnctgtgctagaccacattgtggatcaggaaagtaatataaattattaataattaaaacctatttttaaaataaaggtttttatttagcaacataccatatgttgaaatgacttacatgttttgaattttcattaaattaaaaatggcaaatttacttaaatataatcaagcatgtagtaagcataggtttctgcaggagaactttctcagaatgcaaacctgaggaagac

SEQ ID NO: 350866 - DNA, 618 bp, Homo sapiens
acatcaatagatgaatggataaagaaaatgctaatcttatacatctataggtatatatacagctttataataatggaatattattcagcctttaaaaagaagaaaatcctgccatctgtgacaatatagatgaatctggaggatattatcataaatgaaataacccagatacacaaagcaaatattgcatcatctcacttatatgtggaatctaaaaaatttcaaacttacaaaaacagagagtataaggatgattaccaagggtcagggtagtgggagaaatgaggagatgttgttgaaaagatacaaacgtccaatttcaagaagaataagttctggagacctaaagtacagcatggtgactatagtaaataataatgtattggatacttgaaatttactaagccagtagacgttaagtattctcactacacacacacaaatggtaattatgtgagatgatagatatgttaattagcttgattgtcataatcatttcacaatatatgtataaatcaaaacatctcactgkacatcttaaatatatacttttttacttgtcaattataccttaataaagcagagggaaattaatataaacaaggttctatggttagg

SEQ ID NO: 350867 - DNA, 521 bp, Homo sapiens
aaaattgtcccagaaatccctcatatctgcaaatggtagcacatgtctattcctttattgatcactggcccaggggtgtgattgctctgatttgtattaaatactcagagctcaactcaggatgtgtgtgtgtgtgtgtgcacgtgtgtggtgtgtgtgtgtgtgtgtgagagagagagagagagagagagagagtgagagagagagaaaggggagggagataccaaaacaaaattaractattttaggatacaggaaggatgccagggagaaattcaacaacgtttactgcagcctttttttttttttttttttttttcactagcatgaggactttgaggctgggctggctatgctagaataatagtatcatagactcttagaactttagaattagaaggacctagagaaatggtttagtttgttgctcttttttacaaaagaggaaactaagttctctaaaggttaaatatcttacccttagtgacacagatagttaaaacagaactagtaataacatt

SEQ ID NO: 350868 - DNA, 519 bp, Homo sapiens
ggctgatcatgacaagacaattatcctacaaatgacatcatttgagcaggtctctgtgcacatgaggaggaattacctaaatacagtgatgtagcaagagttgcaattcaattttcctgagatcttaaccattagaagccaaaaagcccatctaattataaaaaaaatcaataaacatttatgtcaaacttcagaaataaaaaactacagggatatgactcactgtaacatagcctttaaatcaaaagatctctaaatacaagtaaatagatgaatatttaatkcaaatcttatttaaaatattaccactaaactctcttgcatgttacaaacttacttagaagtagggaaaaaagcagaatacaataaaaggggaatttaagctagaattagagtacctgggttactaatctaccgtctgttaactagatgtctttgaatacattgaattcttcatcctcatttttttatctgtaaattgttggtagtaacatcagacttatccgtcaaactgaatta

SEQ ID NO: 350869 - DNA, 534 bp, Homo sapiens
tttttccagaagctgagaataagagaagttagctttagtaatatttaattctaaatcattcctatactaggaagctttgtataataatcctttaagagtttaaagaccatgagatttacccttcaagcagtgtaataggaaaatatttatctatatgcacaagagaygtaaatttgatgaaaaaatgatgttaattttaaaactattaaaagccagtttgctattatgattattttgcttcaagtatccaaatgatgatgagccaaatatgcccctgagcccagttcttgattcattccacgtcctataaagattctttagaaaaattgaacaagatgagaaatagggatcctggctcaacctcccagtgagttgggatttatctcatggaactttttcccaagcttgatgaagttctgctgtgccatatggacatgtacagttgctaaatgataattttccaaaaataagcttcaattctccaaaatggcagatagaaagcagctggtgttactcaacagagataagccctcc

SEQ ID NO: 350870 - DNA, 546 bp, Homo sapiens
ggaggaaagaggaaagatgaggacccttgcagaccttactgatatttctttttaatgtaataacatggcattaagaacagagctagagcaacatgaagattggtaagtatcattcatcatcatatgaacttaggatggattcttaggaagatacaagaaaaagctgaagtattgccccaaagtttcaactccttattttcaacacctatactgggcagtatctgagattctccaataaataatcaatagataaatgaatagaaagtaggrttacaaagaagaaggaatttttacaattttttttaaatgttgaaacatgctggagttggggatccctaaatgtaaagaaagcccaaaaaaaaaaaaaaaaaaaaaaaagacaacatttatgaagtgcatactgtgtgctcggggcactaggataagttcccaaatgtaatttcctcctgctaaacatctctataaggtgaggaatactattggcattttacaaattaggacaccaaggctaggaaaggggaagtaacttgcccaaggtcatgcaat

SEQ ID NO: 350871 - DNA, 593 bp, Homo sapiens
aaaacgtgttcaagtcgccttttatgcctaaggcttacataaaaattcatcttgcctttctgcgtctatttccaagtttgaaggacctttctccctccaattagcaacatttcagcactgcacagggcttattaatgctcactgttgcaagtaacaccaaggtaatttgactttcttgtaggaacaatgtcgacgaaatcctacagaattaaatttaaatttccagtttamaaaaaaaaaccgtgaaagaacacttcattacctttattatctagacgtatctaatgacgttaagtaaaaactgcaccaaggctttgaaaccagaagaaaagtggagtttgtgaaatttaaccactccatgctttttattagtatttcacttatgagtatttcccgaggctcactgttttggcaggcacagtgctgttaacatctcttcctttctcaccattctttgctcatcgatgaaaagataacttcaaaatctctgacaggaatgcaggtgcaggaagtgcgacggaaacaaacaactttgcctccgcttcctacagctttcctctcctccccgcccttctagcccccatcccacccca

SEQ ID NO: 350872 - DNA, 593 bp, Homo sapiens
aaaacgtgttcaagtcgccttttatgcctaaggcttacataaaaattcatcttgcctttctgcgtctatttccaagtttgaaggacctttctccctccaattagcaacatttcagcactgcacagggcttattaatgctcactgttgcaagtaacaccaaggtaatttgactttcttgtaggaacaatgtcgacgaaatcctacagaattaaatttaaatttccagtttaaaaaaaaaaaccgtgaaagaacayttcattacctttattatctagacgtatctaatgacgttaagtaaaaactgcaccaaggctttgaaaccagaagaaaagtggagtttgtgaaatttaaccactccatgctttttattagtatttcacttatgagtatttcccgaggctcactgttttggcaggcacagtgctgttaacatctcttcctttctcaccattctttgctcatcgatgaaaagataacttcaaaatctctgacaggaatgcaggtgcaggaagtgcgacggaaacaaacaactttgcctccgcttcctacagctttcctctcctccccgcccttctagcccccatcccacccca

SEQ ID NO: 350873 - DNA, 594 bp, Homo sapiens
cgagcagagtcagaggcaatgagtccactgtgggacatgtggacttgaaggagctcaagaggcagtggtaaacaggactctggagttcagaaaaagaggcctagaaacagagattggaaggtcattagagagaggtggtgggtaacgtcccacccagagagggtaacgtgaattagaagagggtgagaaatacgaytgcaaaagacagctattgaaaggggaaagagatggtgtcccaggaagcaaggaggaagatcaagaatagagaagtaaacactgaaatgctgccaaaaagttaagtaagtgcatcctcggatttgtcaattagaaagtcatggtgagaagggtcacagtgttattcatgggagctccactgcgggggctgaagagtgaatgggaagtgagaaggctgctggggaagcagggagaagtcactggacaaagcagtcccatgaggtccccttgatatgctcttcatacagatttttaaaaaataagaaatttgtccaaggtccctcaaccagaaagtcagaaagctggatttcagttccttgccttctggccccagaaccaacgctctttccatcatacact

SEQ ID NO: 350874 - DNA, 536 bp, Homo sapiens
  misc_feature (1)...(536): n = A,T,C or G
nnnnnnnnnnnnnnnnnnnnnaatgataatacatatgccttttaactggtgtggcttcactaagatggagactgcagaggcactgagcattgtgcgtaggactcagtaaaagttaattccattcctcctctctgccaaaagcaactatttcttaaaatgataattttacaagaaactaacacctgcatagtgcttatcacatgcattatctcatttagttttcacagcaatcctgtgaattaaatatgaatttttgcctcgtttatccccactaaggcttaraagtttaagtcctttgcctaatgccatgcaacaactgagtggggagctgtggctctagtgtaggattgcagacccttagtcatatataattataactctatttggagaacttgcagaaaaggatgaggtcaactttaattctctatgctatttgtgtatttggaggttgaaggaagtataagaaattgcaaaagggaaatattaattttttttttttgagaaaaagtctcactccgtcacccaggttggagtgc

SEQ ID NO: 350875 - DNA, 547 bp, Homo sapiens
ctttttttttcttttttactagcatcttggaagacaaccagtcccaggacctataaacagtgcttcccttcagacacagcttttatcttgattgggcagagaaagacagactgttcccttgctgataaagggctttttgaagacttttacataacttctgcaattcactggaaaataacacccaggaaaaggctgggtgttgggggtggataataaacttttactgctatatgaaaagttacatttttcagagtaatatggtgattacagataaaataacaaaataaattttaataacaccacattgccgagtcatcaaagaattgggcactggtccagtaacttctgggagaatttgcacctgttgcctctttccccaaggatggaggaggttgccgaaaccacctcctcctgggagggctacctgaagctccagtaagcawtagcactggctaggtcatcgtctcttccagttctgccaccaacgaactcattccaagaaaatgtgggaaataatgccttatcttgaagtaagtcagaagctgtc

SEQ ID NO: 350876 - DNA, 494 bp, Homo sapiens
ggcacaatgttaatatgtattagttctagggtagggagtggtccacgagttcttgttttattactctctgtacttttctggatggaaaaaaaaagaaatgagaacatgtttgaagggtaaaaatccttcctttaacacttcttgcataatgtgtgaaattgagtagaaaccctataattacttcttaccattactgtttgccagtttcagaggcaatgctcctgaaatcatcataagcatttgcgctcctgttatatttatacatgaaggccaaggaggtgctggtaaacacagcctagattgtctctttcacattctcyttctttattcgattgcatcactaccgtatgctcctctctgattttttttttcctcaaaagtactgcctgaaagaaggattagtaagacagtctccacatgcttcaaggaagattggccctgtggttcattgccccacccaccccctgctgctattctagaactgtttggtcaac

SEQ ID NO: 350877 - DNA, 583 bp, Homo sapiens
tttcctcccgttctcagttccccctccttagcacctgtctgtgttccttcctctgctcagctcatcctttctcagggtggagcagcagtgtttttttgttgtttatatctaatatagtttttcttttttgagatggagtctcgctccgtcacccaggctggagtgcartggcgccatctcagctcactgcaacctctgcctccccctccttgggttcaagcgattctccagccttagcctcccaagtagctgggactacaggcatgcgccatcacgcccggctactttttgtatttttagtagagacagggtttcaccatcttggccaggctgatctcgatctcctgacctcaagtgatccacacacatcagcctcccaaaatgttgggattacaggtgtgagccaccacacccggccttatagctaatatagtttaggggtttttttgtggattaaaaaaagcatattagttaaacatatactgtttatctagtcttccattgcgtgtagctcttgtagagggtgatttaataccctgattggcctgggacaatctcaatttgtgtcagtggtcccaacagt

SEQ ID NO: 350878 - DNA, 601 bp, Homo sapiens
gaagtggttggggctacgggtgtgtgccaccacgcctggataatttttttaatttttaattttttgtagaggcagaggtctcactatattgcccaagcttatctcgaactcctgggctaaagcaattctcccacttctgcctcccagggtgctggaattatagacatgagccaccgtgcctggccccacttgaattctgacactttgcacgaggctgccaatgtcactctccactcctcttctactcctccccctgctgtctctgatgtaccccatgctgggctgccacagcctgccctccctaccctaccctcacactcagccacaggrtgcccccctcacttggttccacttaatgatttaatgatcttggactcagtttttcaggaagaaaaagaagaaggaaaagaggaaaataaaggcagaaaggaagacaccatctacatttttaagtgaaaaaaaaagtcatactcacatatttgggggaaaatctgtacaagcaaagagaaaaatctggacatgcctatgctaagattatccacagtgactgtcgctgggagactaggtcttgggtttactttctttcctctttttgctggac

SEQ ID NO: 350879 - DNA, 605 bp, Homo sapiens
tggtacctaatcaatactgctaatcttgttttgcagatgaaaaaactaaggacctaactagggtctgtctcatatgcatgactgactgctattattgaagaaaatttggcttgctttcttcctctgacttttgtaaacatctctttttaagtatgagagttagagcttyttgtttcctaattcacaacacatctttttctcttaaagaatgggtatctaaatattgccatgtaaaagttttaagagaatgtggcatgtagagtgtctaaatcatgtaagagcagagcttaactacagccaattgaattatgagtgtttagatgttcacattctcgttcattgattaaaaacttgatttcaacatttcaacttgatttcaactgtgcctagctgtgcagctaacatctcaaattatctcttattatttttaagttgtggtaaatatatgcaacataaaatttaccacattgaccattttaagtgtacatttcagtggcattaagtatattcacaatgttgtacagccttcaccatcatccatctcgagaatcttttcattatcctacacagaaaatgtaccattaaataagtagctcctcattctc

SEQ ID NO: 350880 - DNA, 605 bp, Homo sapiens
tggtacctaatcaatactgctaatcttgttttgcagatgaaaaaactaaggacctaactagggtctgtctcatatgcatgactgactgctattattgaagaaaatttggcttgctttcttcctctgacttttgtaaacatctctttttaagtatgagagttagagcttcttgtttcctaattcacaacacatctttttctcttaaagaatgggtatctaaatattgccatgtaaaagttttaagagaatgtggcatgtagagtgtctaaatcatgtaagagcagagcttaactacagccaattgaattatgagtgtttagatgttcacattytcgttcattgattaaaaacttgatttcaacatttcaacttgatttcaactgtgcctagctgtgcagctaacatctcaaattatctcttattatttttaagttgtggtaaatatatgcaacataaaatttaccacattgaccattttaagtgtacatttcagtggcattaagtatattcacaatgttgtacagccttcaccatcatccatctcgagaatcttttcattatcctacacagaaaatgtaccattaaataagtagctcctcattctc

SEQ ID NO: 350881 - DNA, 605 bp, Homo sapiens
tggtacctaatcaatactgctaatcttgttttgcagatgaaaaaactaaggacctaactagggtctgtctcatatgcatgactgactgctattattgaagaaaatttggcttgctttcttcctctgacttttgtaaacatctctttttaagtatgagagttagagcttcttgtttcctaattcacaacacatctttttctcttaaagaatgggtatctaaatattgccatgtaaaagttttaagagaatgtggcatgtagagtgtctaaatcatgtaagagcagagcttaactacagccaattgaattatgagtgtttagatgttcacattctcgttcaytgattaaaaacttgatttcaacatttcaacttgatttcaactgtgcctagctgtgcagctaacatctcaaattatctcttattatttttaagttgtggtaaatatatgcaacataaaatttaccacattgaccattttaagtgtacatttcagtggcattaagtatattcacaatgttgtacagccttcaccatcatccatctcgagaatcttttcattatcctacacagaaaatgtaccattaaataagtagctcctcattctc

SEQ ID NO: 350882 - DNA, 605 bp, Homo sapiens
tggtacctaatcaatactgctaatcttgttttgcagatgaaaaaactaaggacctaactagggtctgtctcatatgcatgactgactgctattattgaagaaaatttggcttgctttcttcctctgacttttgtaaacatctctttttaagtatgagagttagagcttcttgtttcctaattcacaacacatctttttctcttaaagaatgggtatctaaatattgccatgtaaaagttttaagagaatgtggcatgtagagtgtctaaatcatgtaagagcagagcttaactacagccaattgaattatgagtgtttagatgttcacattctcgttcattgattaaaaacttgatttcaacatttcaacttgatttcaactgtgcctagctgtgcagctaacatctcaaattatctcttattatttttaarttgtggtaaatatatgcaacataaaatttaccacattgaccattttaagtgtacatttcagtggcattaagtatattcacaatgttgtacagccttcaccatcatccatctcgagaatcttttcattatcctacacagaaaatgtaccattaaataagtagctcctcattctc

SEQ ID NO: 350883 - DNA, 650 bp, Homo sapiens
ttccttgttatagaaggaagaagttgaggccaggagagagattgtgaagtgcactctggccgcacagctaattagtggcagagtagagataagacccaggatgagacccacaggctaaaatttgctatttgagttatttccccctcataggctttcaggaatgaaaccatccagaaatgagtgggaagacctaagaaacgtccacgttttatttttttaatgaagatcttacaattcaaattatttccagttctgtagaagcttgaaatgaagtcagtggttttaggaaaataataacaatgcactgtgaaaatatattgaatttcacattgatgtgaaattatgtagggagattttgttggagcttaacattattgtgaacaatgttgggtgctgttcaaatactagaatctctcagcatccaaatacaaagtgagcagaggaggagtgagctgtagatggggggcctgtgctgcctcatgacccctcagcatctgtctccggggcttgttgaatggaaagggtctgggcygttttgcagacatggggcctctgtgtgccatctttgctgcagaggcagcatggaacaaacttttggggaccttatgcattagtgcattggatcattttagaaaataacctgcagtatt

SEQ ID NO: 350884 - DNA, 615 bp, Homo sapiens
actacttcagtgtgtggctcttacagtgttccagacccgtatagttagctccatcttacagcagaggagctgaggcttaaagaggctgagtcactagttcacagccacaaggctaggaagcaggcatggaatgtcatggcttgggtcagctgtcgatgtcccctaggccgtctgtgaatgaaagtcaagcctgcgttatcgtcagggctgtggagctgcaggactgggtgctgccccactcagtgggccaggctgttaaccacctgtggagttagttgtttggtctaacaggcctagtgattttcttaagttcttttctaatgagaaggcaaktggtgtttgtttttgttttgttttgtttgttttaagaaattgggccctgtttgattagtggtattttcccttttggtccaaatgaccctggtagctgaggttggctgtgttgtcaaaaacagtgagatctagaagccctgctcagcggtgtttgggaggaggcctgtgcatcgttggctgaaatttatggggaacttcccaggaacccagcttgacccctttgctcaccacctgctgcctggagcattacccccacactcagacctatctgttttctccttc

SEQ ID NO: 350885 - DNA, 602 bp, Homo sapiens
tatgaattgttctcctcaccctgatctcaaagatcttaccaatcaactccatctatttccctaaattacccattgaggaaagcagcccatgggaagacacagggcttcaagaaggccccaccgatgtctccagggaccaaatactgatctagtcagagagttgttcactctgggggtgtcaactggccatgtgtaaaatgggaaatgaacacctacttcagagggatgttttgagaggagggctgtgagattgatgactcctataaagtagattctaaacggtaaattgtaccttgcaaaccacaacacggatgtaagaaactgattatttgtcatcctgtaagtcagtggctgtttatgtgttctcagaaacttgattctttttcctctgagggttatacagtatctgcttcagtcacttttccatttactgacttctacaagaaattgkcctggaagtgtcagccattgaaaaacagcaataatttttgcttcatgatctacagttgtaatggacatagtaataatagtattgtctttatgtagtctttttctttataaggagtaaagatcaaagactagagttgataataggtgaatgg

SEQ ID NO: 350886 - DNA, 602 bp, Homo sapiens
tatgaattgttctcctcaccctgatctcaaagatcttaccaatcaactccatctatttccctaaattacccattgaggaaagcagcccatgggaagacacagggcttcaagaaggccccaccgatgtctccagggaccaaatactgatctagtcagagagttgttcactctgggggtgtcaactggccatgtgtaaaatgggaaatgaacacctacttcagagggatgttttgagaggagggctgtgagattgatgactcctataaagtagattctaaacggtaaattgtaccttgcaaaccacaacacggatgtaagaaactgattatttgtcatcctgtaagtcagtggctgtttatgtgttctcagaaacttgattctttttcctctgagggttatacagtatctgcttcagtcacttttccatttactgacttctacaagaaattgtcctggaagtgtcagccattgaaaaacagcaataatttttgcttcatgatctacagttgtaatggacatagtaataatagtattgtctttatgtagtctttttctttataaggagtaaagaycaaagactagagttgataataggtgaatgg

SEQ ID NO: 350887 - DNA, 593 bp, Homo sapiens
tcagatgtaaatataaagtgaaacttgacacctacctcacgctatatacaaaatttaatttgagatggatcacacacctagacaaaaaagccaaaactatcttcctgatctttggaataggaaaagatttcttaggatccagaaagcaccaaatattgagaaaaatagttgtaaaattgttaaattttcaaaattaaaaatttctgttaacgaaaaaagcaccactaataaaataaataggtatgttacagactgggagaaatgtatttatgtattcaaaaatacatgtatctggcaaaaaggactggtacccaaaatatgtaaagaactcctacaaactgatatttttaaaaaaagcaaaacaaaaaacctgagtttgaatagacacttcacaaataggataaatgaatggctaataagaaaatgaaaaaagtgttcaatatcattagtcatcaggcaaattaaaattaaaaccaccaagagatacaactacaatacccaccagaatgactacagttaaaaagactgacataacatgaaatgttggtaaggatatggarcaacccagactctcatactttcccagtggaaat

SEQ ID NO: 350888 - DNA, 442 bp, Homo sapiens
ttcctttagtgtaaattatgattttctttaaaaagaaaaaaaaaggctgagcatggtggctcacgcctgtaatcccagcaccttggaaggccaaggcggacagattgcttgagtccaggagttcgagtctagcctaggcaacatgccagaaccccatctctactaaaaatacaaaaaattagccaggaatggtggtgcacrcctgtagtcccagctactcaggaggctgaggtgggagaatcatctgagcctgggaagtcgaggctgcagtgagccaagattgtgccactgcactccagccttggcaactggagtggacaccctgtcacaaacaaacaaacattctccagaggtgaatgtgatgtgtagccagggtgagagctacagataaaacagtgccttcctgagcatcttcaaaattcacctctgaattaggatgata

SEQ ID NO: 350889 - DNA, 442 bp, Homo sapiens
ttcctttagtgtaaattatgattttctttaaaaagaaaaaaaaaggctgagcatggtggctcacgcctgtaatcccagcaccttggaaggccaaggcggacagattgcttgagtccaggagttcgagtctagcctaggcaacatgccagaaccccatctctactaaaaatacaaaaaattagccaggaatggtggtgcacacctgtagtcccagctactcaggaggctgaggtgggagaatcatctgagcctgggaagtcgaggctgcagtgagccaagattgtgccactgcactccagccttggcaactggagtggacaccctgtcacaaacaaacaaacattctccagaggtgaatgtgatgtgtagccagggtgagagctacagataaaacagtgccttsctgagcatcttcaaaattcacctctgaattaggatgata

SEQ ID NO: 350890 - DNA, 523 bp, Homo sapiens
acttcagtaaagtttaacactcattttcaagacaacatagttgcaaagtagaccagtaggaaacatttttcatctaaaatgtgttatgtatcaaagcctgacgcagacattgctcttaatagtaaggctttaaaattatttccattaaagtcaggcacaagacaggwataaccactacatcttctattcacattgcattggtcctaggcaatgcaataattcaagaaatagaaaatggatatataagaattgaatgttcatgcatttaaaagggctgaaaaaaaagaagaacttaatgaaagagacaaaagttaccttatctgtagatgttgactatacataaaatattcaaaagaatcttggaaaaactattaaaatatgggagttcaatatggttggtggtttcaacatcaatctaaaaaatgaataattgtcttaaatcctgtgataatctattataaaatgtaatagaataaaatatccaatttatagtagcaacaacgaaaaaaatgcctggaaacag

SEQ ID NO: 350891 - DNA, 523 bp, Homo sapiens
acttcagtaaagtttaacactcattttcaagacaacatagttgcaaagtagaccagtaggaaacatttttcatctaaaatgtgttatgtatcaaagcctgacgcagacattgctcttaatagtaaggctttaaaattatttccattaaagtcaggcacaagacaggtataaccactacatcttctattcacattgcattggtcctaggcaatgcaataattcaagaaatagaaaatggatatataagaattgaatgttcatgcatttaaaagggctgaaaaaaaagaagaacttaatgaaagagacaaaagttaccttatctgtagatgttgactatacataaaatattcaaaagaatcttggaaaaactattaaaatatgggagttcratatggttggtggtttcaacatcaatctaaaaaatgaataattgtcttaaatcctgtgataatctattataaaatgtaatagaataaaatatccaatttatagtagcaacaacgaaaaaaatgcctggaaacag

SEQ ID NO: 350892 - DNA, 523 bp, Homo sapiens
acttcagtaaagtttaacactcattttcaagacaacatagttgcaaagtagaccagtaggaaacatttttcatctaaaatgtgttatgtatcaaagcctgacgcagacattgctcttaatagtaaggctttaaaattatttccattaaagtcaggcacaagacaggtataaccactacatcttctattcacattgcattggtcctaggcaatgcaataattcaagaaatagaaaatggatatataagaattgaatgttcatgcatttaaaagggctgaaaaaaaagaagaacttaatgaaagagacaaaagttaccttatctgtagatgttgactatacataaaatattcaaaagaatcttggaaaaactattaaaatatgggagttcaatatggttggtggtttcaacatcaatctaaaaaatgaataattgtcytaaatcctgtgataatctattataaaatgtaatagaataaaatatccaatttatagtagcaacaacgaaaaaaatgcctggaaacag

SEQ ID NO: 350893 - DNA, 562 bp, Homo sapiens
tctttccctcctatcagagtctcagaatccactcttctatttccatttgactaaatcataggcatctaagagggagccacctccgccccctactaactagcagaataagactgaccagtttccaactaatcaattacttgagttaccatgtccggcagatttctactttgctgtatctctcaactctgttgccttgttcatttccagcaccactctgccagtccaggctttgatccgcacatagctggactaactgctcatctacctaatgtggctcattctccatagcactatcagattaattttcctaatgtggcacttgacccctmctactttctgcttaaagcactgccttctaaatagctaagtgccaacctctccatctggcatttaagctgctcacatgatggctccaaactatcacacaatcattgaagaaaacacttagagcacactgatggttctggggacatagtggcaaacaggacagcaagttgtccctgtcatccatcatggatcttatattctaatgagggagatagattttaaatagattatgatg

SEQ ID NO: 350894 - DNA, 387 bp, Homo sapiens
catacacaaaaactgagattggtgcctggtacagagcgagtactatttaaatgttagtcattattactattatttatatacaagtccaaagctcaaagaagtctgggctgctcatataaacttggggcttgttcataaatagtaagtgaagacacatgtggggacaaggctgtcttgggagtgcgtatagagtgagggaggaaaagggcccagttcaggtctccaggaatctgggagtggactgaggagggtaagcgagccaaggcgctggggacttcgtggamcagagaaagggagagaggagaaattcagaagcagacagaagagtgtgttttgaggagtagagagttattagcagtgtcaaatgctgctaggagtgccttaatg

SEQ ID NO: 350895 - DNA, 519 bp, Homo sapiens
cacacaacaagaaacacacatttccaacgactcctagaaagccatcttatggtactttctattcattctcccaactagggtagtcattatcctattgtctagttttgcctggttttaagctttagataaataaaatcatacagtatttactctttcatgtctggcttctttcattttacattatatgtgtgagtttcatacctgttgcatgtacatgcagtttggtcactttcatagcagtataatattctattacataaatatactacaatttatccmttctattgttggtgggcatttgggtagcttccactttggggatatcacaaatactgctacaatgaacattctactacttgtcttttgggaaacatatgtattcatatctattgggcgtatacctaggtgtggtaaagctggtcatatagtatgtatagtgttccaatggtagataccaatcatttaagtgctttacatgtatcaactcatttaatcctcataatagtcctaataatgtag

SEQ ID NO: 350896 - DNA, 536 bp, Homo sapiens
aatgcgtgcttgtggttacaacgtgggcccgggagggggagacgggaggaaccacgccagacatgctgaaaggaagaaacgcaaagcatcgcgagtcacacagacacactgcagagacagctccgaactctgtccctgcatacgcccgcccctcacgaacccaccgcgttctctgccgcgagccctcgtgggcgccgggttgccacgggaagcggtgcgcatgcgcggggacgcctaacggggcaggascccgccaggtcccctcgttactcctggaaaccaccggagccttggcgattggaggggaaaaggccaggcgattcaagatggcggaggacctggacgagctcttggatgaagtcgagtccaagttttgcacacctgaccttctaagacggggtatggtcgagcagcccaaaggctgcggcggcggcacccacagtagcgaccggaaccaagccaaggcgaaagagacgctcaggttaaccgggcgggaggggtggactgttctggtaaagccctgctccaggccctag

SEQ ID NO: 350897 - DNA, 604 bp, Homo sapiens
ataaccaatatttattatcatagttattatacccgtcattgtaaagaaatccatttccactctggtttcagcatgatttaaggcagtccctcagtacagtatagcagttatgactccagagccaggctgcctaggtttaaatcctggctctgtccacacttgctctgaaaccttatatactgccacttacttgctatgggacctcaggcaaaaacctcatttctctgaggcactttgtttcctcatctgtaaagtgggataattaacagagcctacctcatagggctgttgagaacattaaattgagtaatacatctaaagtacttcaagtagtgcctacctgcagtaagggttatatggtagttattattactgcctggaarttaataaaatgttgaagactgtaaaactaagagacagtcctgtacctataaggactgagttaaccttaagccctgcctcactagcagacccaaactgagaaatgggccagcttctgagacttctcttgcccccaagtccctatagaattggtatttgttctgcttgttgagtttttaaaaagggccacaaaccaatgctaagttttgcccttcaacattaa

SEQ ID NO: 350898 - DNA, 588 bp, Homo sapiens
tagtcttattcaatctaagcataggattcaaagactacagcaagttcatgatgcctcaagcgacagcttgcactgggcagtccatccagacaggtagagtcctgcaggggtactcaaacagagagaaaatctgggggtcagccaggcaagcaaatgccaatcagaatacccacwcatggccataggacaggcttgagtcaagaccttcatcccagaaagcgagcctcaaaaaaggaaggcaggtaccagggtctgcaatcactcagcctgaccacatgaccaagagaacctcaacaaacttagagcacaggaatcatatctggcagtgttcaactggaggaaacaaaaccactctagcaattttcaggaaaaaaaaagaattcaacatagggaaatcctgcctggaatatcattggaaagctggaagtttgggctctaggatgagaatccagaagtaactccaggaacactgccaaactggcccaccaaaggagctgctccctctgccataaaggaggaggtgtggaatcaagaagcatctaccaactacactatcaccaccacaacttcttggccccacaaagctac

SEQ ID NO: 350899 - DNA, 561 bp, Homo sapiens
gtctgcaatcactcagcctgaccacatgaccaagagaacctcaacaaacttagagcacaggaatcatatctggcagtgttcaactggaggaaacaaaaccactctagcaattttcaggaaaaaaaaagaattcaacatagggaaatcctgcctggaatatcattggaaagctggaagtttgggctctaggatgagaatccagaagtaactccaggaacactgccaaactggcccaccaaaggagctgctccctctgccataaaggaggaggtgtggaatcaagaagcatctaccaactacactatcaccaccacaacttcttggccccacaaagctacggagtgggcattggatgctgctgcagtcagggcaatctgtaccaaactactgcaaatgtccctacaaccttcccatgaccctcacggataccagagcactgctgcagaaaaagccaacatctcctctatcttgcttrgcaatagaaaataaccagtgttccaaatatcacactagggtatctgattggtggaaatggattctcatccagaatcccagtgggct

SEQ ID NO: 350900 - DNA, 562 bp, Homo sapiens
ttaaaatgaattaagtgtacaatacattattgttgactataggtacaatgttgtacaacagatctgagaactcatttgtcttgttaactaaacttttatgcccagtgattagtaatcctcatttccctcttcccccagcccctaktaattaccgtactactctttgattctttgaatttgactattttagatatctcatacaagtggaatcttctgtgactggctcattattgtacttagcattatgtactcaaggttcatctatgtggtcatatagtgcagaatttccttctttattaaggctgagtagtatcccactgtatatatatacattttcttcatccgtctctcaatggacactaagtttgtttccaccttttttgctgcaataaacactggagtgctactatctcttcaagattctcatttcaactgttttggataaacacccagaagtgggattgctggatcatatggtagttctagtttttagtttttgaggaacctccacactttctcttagcagctacaccattttgcattcccacctacagtgtacaag

SEQ ID NO: 350901 - DNA, 562 bp, Homo sapiens
ttaaaatgaattaagtgtacaatacattattgttgactataggtacaatgttgtacaacagatctgagaactcatttgtcttgttaactaaacttttatgcccagtgattagtaatcctcatttccctcttcccccagcccctagtaattaccgtactactctttgattctttgaatttgactattttagatatctcatacaagtggaatcttctgtgactggctcattattgtacttagcattatgtactcaaggttcatctatgtggtcatatagtgcagaatttccttctttattaargctgagtagtatcccactgtatatatatacattttcttcatccgtctctcaatggacactaagtttgtttccaccttttttgctgcaataaacactggagtgctactatctcttcaagattctcatttcaactgttttggataaacacccagaagtgggattgctggatcatatggtagttctagtttttagtttttgaggaacctccacactttctcttagcagctacaccattttgcattcccacctacagtgtacaag

SEQ ID NO: 350902 - DNA, 650 bp, Homo sapiens
caaaggagacaagtaagagagtgaaaaggcaacctatggaatgagagagaatacttgcaaaccatacatctgatacagggttaaactccagaatacctcagaaccctctacaactgaattttttttttaaagtaacctgatttgttctttttgcttagaattgctttggttattacacacatacttggttttatataaattctagcactgtttttttctaattctgtgaaaaaaacacattggtaatttgataattgcattgaatttatagattggtttgtgtagtacacttattttaaaaatattggttcttttgaaaaaaaaactgggctaagaacttgaatagacatttctccagtgacatatttataagattgggaagagggaaaaaaaggaagaaattagtgctgtaacaaaatattcaccaggtatcagtttttttcttatgagcctttgcacagcctctataggctggccacatccacaggggttctgtgcctgggaggcatggaaaacactctaaaacagtgtcctggtagccatttaaaaaagggtggacttagaaaacagcaataatgaagtgtgattccccattactgcagccctrccaggccctataaaccatctgagagctcctagcacctgtggca

SEQ ID NO: 350903 - DNA, 597 bp, Homo sapiens
cagagccttctaaatgatgggacatgctgaacatgccaaagagaaaggtcccattgggatggcattggagggtattttccccctttacttgtaatgattcaaacactgatggatgccatgcaaaattgaggaagcagtggggggaagggggatcttgatggagctcatgtatgcaacatatggaacaagttattgaagaaagtgcttctaacagagtttatraaagttaagaagaggcagttatgcttcttttagagacagcaaagattaagggcgtggtgaaaaaaatagcgaaacaggattaagataaagcaaaacagaggagaaatattggaccagatgaactttcaccttccctaaaatgatttatgtacttatgaagagctagactggacttgatttcagggggtgagagttgctggtgaacctgcatgtacccagtatttctgcagaaattctggacaaatctacacttctacaggcaaagccaacactgaacatgcatggtgatgaggttctctatttaaataggacaaacacttacttgagcacctcattcagagtaacaaagagagaaggaaataaaaaaggaaacag

SEQ ID NO: 350904 - DNA, 597 bp, Homo sapiens
cagagccttctaaatgatgggacatgctgaacatgccaaagagaaaggtcccattgggatggcattggagggtattttccccctttacttgtaatgattcaaacactgatggatgccatgcaaaattgaggaagcagtggggggaagggggatcttgatggagctcatgtatgcaacatatggaacaagttattgaagaaagtgcttctaacagagtttatgaaagttaagaagaggcagttatgcttcttttagagacagcaaagattaagggcgtggtgaaaaaaatagcgaaacaggattaagataaagcaaaacagaggagaaatattggaccagatgaactttcaccttccctaaaatgatttatgtacttatgaagagctagactggacttgatttcagggggtgagagttgctggtgaacctgcatgtacccagtatttctgcagaaattctggacaaatctacacttctacaggcaaagmcaacactgaacatgcatggtgatgaggttctctatttaaataggacaaacacttacttgagcacctcattcagagtaacaaagagagaaggaaataaaaaaggaaacag

SEQ ID NO: 350905 - DNA, 598 bp, Homo sapiens
tttaattcagagggggtatatgtgggtgtgtgtagtgtttctgtgtactgggtcattatataatgactcaaaaaagtttgaaaccactgataaaagaggctcaaataaaaatagaggaggaggaaagaaagtgttataaaataggaaaaaccctgagatcactacacctctggatttagatgtgtctataactttccttattgtattaccttccttattgggtcaggttttctattgcttgatgctgactaaatcacaaggtagcaaggctgaagtgaagattcaattagataatctggagttggacatggtagctcacacctgtaatcccagcaccttgggaagctgaggcgggaggatcatttgaggccaggaattggagaccagactggggaagatggtgaaatcctgtctccacaaaaaatttaaaaattagccagacaagccatatgcagaaaactgaaaccggaccccttccttatatgttatacaaaaattaactcaagatggattaaagacttaaatgtaagacytaaaaccataaaaaccctagaggaaaacctaggcaatactattcaggacagaagcatgggcaaag

SEQ ID NO: 350906 - DNA, 631 bp, Homo sapiens
tgttgccactaccatgtccatctacttttatacatatgacaataagaaaagaaatggagctccatggtgggactgaagatgatcacgtattctttgtcattccctccaccatgaggtggcatctagttctccatcccattgcatctgggttgggtcagaggctctttgatcaatggggcacagtggaaataacactttgcctgctccaggctctacctttcatagaactggcagcttctatgttctcatttttggaatttgtgctcttgagatgcatactcttggaacacagttgccgtggagaagcccaagccatgtggagaggccacatgtgggctctctggtcaaaagcaacctcaactaccaaccatgtgacattaatgcttccrttcaattgggccttcagatgactgcagccctggctagcatcacatggaagagaagacctgcccagctcagcccagaattataagagatggtaaaatagttgtttatttaagccactaatatgtgggtcagtttgctgtgcagccatagataatcaaaacaagccccaagaggaacattctagacaccaggccagggtgaaggtggtatttttgatctttgggtttttctagagcctttgaaa

SEQ ID NO: 350907 - DNA, 422 bp, Homo sapiens
ttaaattcttatttgccagaaggaattcttttgacttttgatgaggttttccctgactctaccaccagtaacccctaatacaaatgatctccaccttctctgttcatcacctaaattatacaagatattttcatactttggccattgtgagartcactttgggaccttggtaaaaatgcaaatacttgagtgaatctcagataaactgacttgacattttgggttggtagccttgtcatctggagtttctaaaagacttcaagatgattgcaatgcacaattatctgagaagtactaacttacataaacatattaatagtgcttacaccattttgcaattgctctacttgtttacatgtccttactcttaattagtctaaaaatattttaaggctagatgttacacaaatttgcagcaccta

SEQ ID NO: 350908 - DNA, 579 bp, Homo sapiens
atgcaaacaattgaattaatcaatgaattaagtaatcctttatcctgggtgaggaggacattttctatgtttcttccagatacttatttaccatatttatttaccaaggtattagcttaatcattaaccaaatgtttgcttagttgatcactcctccattcttggaaaaaatgtgggtaagcatcratcttgacacagtcctaagcatttagacattcatatgcagctgggagaagctagtccaggagttatcttacagccaagataaggagtatggagccacaaactctggactgacactttgagattagaaaggaatgaggaggcctaaatgcttcattttagcctcttcccagttcctcttcacctattccctgctcctaaattcctcaactttactctggcctggcattctctacattttagacatttagataaaactctggataagatgagaaattacatttcttgaacatttaaatttgtgatatgagaactgtatcatttcatataagagctttaaaagacatttctccgtagaattaactgaaatatcattctgcaggaaatatgggtcac

SEQ ID NO: 350909 - DNA, 626 bp, Homo sapiens
gtgcttattgcagttaattaatgaaacctgagttccacaaactgctgctactaagtttcctctgtctggtgattgcccttcacacctatttgctaaattctaaaacttaccaagttatctcccttcatttttgctgatttctgctataattttctgtggatttcctgtttgaaaaataaggtccacattcatagttcttacctacttataaagcatataaktagatattttctttcagttctctactgctcatttttcttctataatatttcaaacataatccttttccacattttttttccggcttccaaattttgttttacatttactgaggaaattatgtgttgtctggatgtacttccaaataattccagtgtagaactcaggtggtcagagtatagggctagtgtggtttatatgaataaaactagaccattgataaataaaaaattttgctgtgttaattttttaatcagctgaacttccagcagcattttcaaaaatatgagacaaaaaataactataaaatttatgccttcctttttttttaaatcccagcttgcatcatctacagttgattgaggaattgccatgagacagttttcccactgaggcaacatgctgtg

SEQ ID NO: 350910 - DNA, 626 bp, Homo sapiens
gtgcttattgcagttaattaatgaaacctgagttccacaaactgctgctactaagtttcctctgtctggtgattgcccttcacacctatttgctaaattctaaaacttaccaagttatctcccttcatttttgctgatttctgctataattttctgtggatttcctgtttgaaaaataaggtccacattcatagttcttacctacttataaagcatataattagatattttctttcagttctctactgctcatttttcttctataatatttcaaacataatccttttccacattttttttccggcttccaaattttgttttacatttactgaggaaattatgtgttgtctggatgtacttccaaataattccagtgtagaactcaggtggtcagagtatagggctagtgtggtttwtatgaataaaactagaccattgataaataaaaaattttgctgtgttaattttttaatcagctgaacttccagcagcattttcaaaaatatgagacaaaaaataactataaaatttatgccttcctttttttttaaatcccagcttgcatcatctacagttgattgaggaattgccatgagacagttttcccactgaggcaacatgctgtg

SEQ ID NO: 350911 - DNA, 614 bp, Homo sapiens
cttacattatgatggaagaagtagcagccaaatgataagaactagcccaagggaatgtcaaggagacctgtaacaggaggctatcaaaactgaaacccggcccattgcccagtctccacagagaaaacatgattttcataatctggttttcgaaagcaaaaagcctccagtaaaccctgaaagcaaactatattgaagtcattttatgcaaatttaatatatgcaattataaacttgtgctatatgaacatattgaaaagaccaaaagtgtacaaaaataatgaaaaacctaaaaactacaaaaatcagcaaacctatttcattctgaagccttcatgccataggtagaaatcagatgagcaactgctccagtatgttgtaaataggactgaatgctaatctattcttgcatgtaaattttaaaatgcctttagcagtatgtcttaaagtgtgaactgctttcataagaattacttggctgcctatttaaagtaaaaattyttatgtgcatttaagtttgagagtcagctgatttataaatcctatataatgtgattgattattgtcaccctcaagttttggcaatatcagcatgccactgtgctagagttagt

SEQ ID NO: 350912 - DNA, 624 bp, Homo sapiens
atttttcagaaattttctatagtttccaaatgatcattgacagtaaaatttgaaaagttattttctatgtttaatatttttttctagctaaattagatttttctaattctaaattacataatactaatttatatggttctaaattctaatatgatacagtgaccctttctcctaaatttcctataaacttccatgccatcaatcactttttctctctttggaacaattaatcccaaagtagttattactctatttattccttttgccttctgatagatgaaccataaatgcaagtcaaaaattaaccagctgttctggtaatgatggaccaatcagaagatgtctaccatttctttgtttcttataacaatattttgaagtaaaaaatgttaatcatctctatttcatagatgagacaaaataaatccagagaagggtaagtcagaaattgggcacatgtaattcttataagtgaatacattctacaactaggaaaaattactatgtgtattagatatcaaaaattgtcatttattttcactgaaattaatagtaaaaaatgcaatttatatcatagmccaattcaaacacttgaatgcatgcaggtaaatatatacacagagg

SEQ ID NO: 350913 - DNA, 398 bp, Homo sapiens
aaatagatgagctttttcattgagttcatgtccagaggtgagaatggatacaagttttgtgtgtactaaagcttattacttggggagccctcattaagaaaamgaatttgttaaagtgtttttttgcaaattttataaaacaatgtatccttgtgaacacattgatggttcctttctagggtcttagaaggagcctgtgcgaggtaggagctttgttaacttcacagtaaatttacgtctgccaagtggaattacgtgattttgttttcttctctcttctggaagactttacaatcttattctgggaaaaagcaaagtacaaatattaataacaatacagcattttagatggtattatgtggcatagattataagtactgaagagttcataaaggaga

SEQ ID NO: 350914 - DNA, 547 bp, Homo sapiens
taggtgccacaagctccttgtgccactccccagtactcattggttctcaggaccttatgtgctgcttctcatgaaacacctgcacacaaatattgccaagggctgaggaactgtttgagatgtcgtattctgtatgggaattgtttcaaaggaaatcaatgatctctgcattctaacaatattttaaggagaaaaagagaaggagaccagcaaggagtcttgcttcagaggagcagtatatgtgcagccatttctctgcccagcagcgtgtgccccatatccatgtgggctaggccctcacctctgcccacttcctctcatgggctggagaacagcagtgagatccccagtaggaggccaggggaaatctgggcagctgcatgttttctgagcatcttctccatccttgctccttttctaccctaaattttaacttcattgatcaaatcaacccagcccagaagtggtctcttccttctctgaattctggtatcatttcstttttacctgtctcaatgcctatatcttcattcattcaacaaatatt

SEQ ID NO: 350915 - DNA, 557 bp, Homo sapiens
gtactctacccatctttgatttgaatccttctttatttctgttctgtcagtactgtggatgcacatgtgcattttcatctgtgctgtgttggtaataaaatgaaaattgagcaaaacaggggtgatacaatttttaacaaagtggcaaaccagctcagttcctaatataggcatcaaaataaaccctgaaatacaaaacaatgtgtagattttgcaaaaggagtagtaagcatgttgagaatcaaacakagatttaataggaatttatgatattttctaatttccttttctgcaccgacttccttctatgtggaactatttcttttgtgatgaagttgaaacagaaggaattaagattgagggagtaaacaaaaacaaaggtagaatgcactctcaccttgctccccttttcttagccccaaaagaaagctgataattacattttcctttttcatccaaaaggatagaatgtaaaatcaagtagacagagaagtgcatagccatcttgaagtcttaagacaaactaagcttgattaaaatagctggagtactcatct

SEQ ID NO: 350916 - DNA, 557 bp, Homo sapiens
gtactctacccatctttgatttgaatccttctttatttctgttctgtcagtactgtggatgcacatgtgcattttcatctgtgctgtgttggtaataaaatgaaaattgagcaaaacaggggtgatacaatttttaacaaagtggcaaaccagctcagttcctaatataggcatcaaaataaaccctgaaatacaaaacaatgtgtagattttgcaaaaggagtagtaagcatgttgagaatcaaacatagatytaataggaatttatgatattttctaatttccttttctgcaccgacttccttctatgtggaactatttcttttgtgatgaagttgaaacagaaggaattaagattgagggagtaaacaaaaacaaaggtagaatgcactctcaccttgctccccttttcttagccccaaaagaaagctgataattacattttcctttttcatccaaaaggatagaatgtaaaatcaagtagacagagaagtgcatagccatcttgaagtcttaagacaaactaagcttgattaaaatagctggagtactcatct

SEQ ID NO: 350917 - DNA, 587 bp, Homo sapiens
cttcctaaatctgctcagctataagtgctgataatctttaggttgcttcatccattcttctatgcaacaaagagggcttgtcatttggcaagctttgattggcactgtcattgtcaccattcattaatttggcactatccttctgactactagagttgcttccagagagacctgctgcccttactccaccaaatttgaagacttttatrtcaaaacaggtttacaggtttaaaccaaagctgaattcactacaacctcttacgtattttaattttaactctccatcaccttctacataggatttgaatctcttcccttaaccatgccccagtctaagtctcagttttttttttctgacactgtcatgccattaggatactcagagaattattcccctctgagaaaaaaatgacaaacaaattgaaatattaatttacataaattcaattttcatttttaattcaataactccaatcctgatcattgaattatggtaatcatgtccatatttgtttcattatcctcgtttcaagttaattaattgctaaatcagtgaacctctatataatgtaacagctagttatttt

SEQ ID NO: 350918 - DNA, 624 bp, Homo sapiens
tccaaaatgatcttctttgacttcatgtctcacatccaggtcacgctgatgcaagaagtgggctctgtcagccttgggcaactccacctctgtggcattgcagggtaaaacccccatcctggctgctttcatagactggcattgagcatctgtgacttttcctggtgcacgatacaagctgtcagtgaatctaccatctggatctggaggacggtggccctcttctcatagctccactaggcagtgccccagtgggtactctgtgtgggagctctgatcccgtatttcccttccacagtgccctagcagaagttcttcatgatggctccaccctgcagcaaacttctgcctggacatccagacatttccatacatcttctgaaatctaggtagaggttcccaaacctcagttcttgacttctgtgcacccacaggctcaacaccgtgtgaaagctgccaaggcttgggacttgcaccctttgaagtaatgrctcaagctgtaccttggttccttttagccacagctagagccgaagcagctgggtgcagggcaccatgtcctgaggctgcacagagcaggggagccctgagccagcccaggaaaccatttttccctcctaagcc

SEQ ID NO: 350919 - DNA, 483 bp, Homo sapiens
tgaagaacagagcattgaatcaaagagattcttcttgaatttyaaggttttggtcctgcttaagatctgttacccctttcttctgccctgtttttcttttttaagaatggaaatatctgtcccgtgcctgtctcatcattgtgttttgaaagtagatagtttgtttgattttacagactcatagccggaggtgagtttgcctcaggatgaatcatatcttaaagtgtcacccatatgtgattgacatgatatttagatgagactttgaacattagacttatggttgatgctggaacaaattataacttgtggggctatagggatggaatgaatgtattttgcatgtgaggacattaattttgggggccagcagcagaatgctgtagtctgaatgtttgaatcccccaaattcatatgttagaatcctaacccataagatgatagtattgggggcagggattggaaggtagttatgagggcaga

SEQ ID NO: 350920 - DNA, 571 bp, Homo sapiens
gatttaatttagagtaaaatcaagccaaccacttcagctctaagtactgtattcaagaggaaatcattttcacagccttccctccttttccttttttttttttttttttttttttttttggagaaggagtctttttgtcacccaggctggagggcagkggcgcaatctcggttcactgcaagctccgcctcccgggttcacgccactgtcctgccttagccacccgagtagctgggactacaggggcctgccaccacgcccgggtaattttttgtatttttagtaaaaacgggggtttcattgggttagccaggatggtcttgatctcctgacctggggatccgcccgcccaggcctcctatccttttcctttttttgggaaaaggctcaataaagatttgtaagcaaaatattggtttccattcatatgggaaaagttcacattttacacattagatgtggccttattttatcctaaaagaatcaagacaaaaaatggagaagtaaaaataagtaaaaagatgcccacaaatttgaaaatgtagggagttcgtaaatgtgcttgtcttgg

SEQ ID NO: 350921 - DNA, 571 bp, Homo sapiens
gatttaatttagagtaaaatcaagccaaccacttcagctctaagtactgtattcaagaggaaatcattttcacagccttccctccttttccttttttttttttttttttttttttttttggagaaggagtctttttgtcacccaggctggagggcaggggcgcaatctcggttcactgcaagctccgcctcccgggttcacgccactgtcctgccttagccacccgagtagctgggactacaggggcctgccaccacgcccggstaattttttgtatttttagtaaaaacgggggtttcattgggttagccaggatggtcttgatctcctgacctggggatccgcccgcccaggcctcctatccttttcctttttttgggaaaaggctcaataaagatttgtaagcaaaatattggtttccattcatatgggaaaagttcacattttacacattagatgtggccttattttatcctaaaagaatcaagacaaaaaatggagaagtaaaaataagtaaaaagatgcccacaaatttgaaaatgtagggagttcgtaaatgtgcttgtcttgg

SEQ ID NO: 350922 - DNA, 571 bp, Homo sapiens
gatttaatttagagtaaaatcaagccaaccacttcagctctaagtactgtattcaagaggaaatcattttcacagccttccctccttttccttttttttttttttttttttttttttttggagaaggagtctttttgtcacccaggctggagggcaggggcgcaatctcggttcactgcaagctccgcctcccgggttcacgccactgtcctgccttagccacccgagtagctgggactacaggggcctgccaccacgcccgggtaattttttgtatttttagtaaaaacgggggtttcattgggttagccaggatggtcttgatctcctgacctggggatccgcccgcccaggcctcctatccttttcctytttttgggaaaaggctcaataaagatttgtaagcaaaatattggtttccattcatatgggaaaagttcacattttacacattagatgtggccttattttatcctaaaagaatcaagacaaaaaatggagaagtaaaaataagtaaaaagatgcccacaaatttgaaaatgtagggagttcgtaaatgtgcttgtcttgg

SEQ ID NO: 350923 - DNA, 494 bp, Homo sapiens
ttaaaaccttattacattcttaccaattcttcctatatttgtgtaattatttattgatggttttatgttactggtaatattttcagctgagttagggttcaggaatagtatgtacgctcttttccttaaaagaaaaggatgagcaataataattaaaaattagactgtgctttgaattgtgtgctatgaagtcatgaaaataaccaggtaaatgctacaaggtactgttaaatgagaataaagagaatacagaattatttctatgaaatgaataaaattatataaaattagtgtatacatgtttaacaagaccagaaataaataaaatagaagtcttatatttttatrtaagatgttgacttgtttttaaaatctgttagatttattaaggtttttattttttgagatgtagtctcgctctgtctcccaggctggagtgcagtggtgagatctcagctcactgcaacctctgcctcctgggtccaagcgattct

SEQ ID NO: 350924 - DNA, 635 bp, Homo sapiens
gtgacatcaattgtaatgcctacttttttattataagtgtttttaaattgcgaaaaagcaactagatgctgtagaaattttaaaactggaattaaagtggctactcttgacatagaaaatgtacattcatctcccaaattcctgcaaaacttttcatcataaaaatagattagttctcctgttaaacaactatatgaaacattgtgtcatttcacacataaaattatcacaaatgtaattaggtgagtgtttgggtaactgtggtttttcttacactctacttaaaatgcaaactccagaagacaaaaatctttcatagcagtttaccatatcctttagagtgtttttgtgtctttaacactgagtatagatcctgaaacttaccaaacaattaaaatatacttgttgaatgagtaaatgaataaatggacatagcacctagaggtagaagataatgracatataatgttggtatatatatcattaacattagtatacctacactgatgctggtgtccataatggggtttagaatctaggtgtgcatatgttttgtaattgtgctggcttctgcttcccactgagtattagctcctcaacatcacctcattcaggccacttagttcctcactgaa

SEQ ID NO: 350925 - DNA, 604 bp, Homo sapiens
tatggccataccaccatgaacacgctgatctcttctggaaagttggatattcagtcagacaacttttattccggctgttttttttaaaaaaataatttatttgcctttcctactgagttgatcattaatgctggcagtttgcagatatagcctaaggctgaaacaatagaattattactttgatagaaaatcataattcgggaactaatacataatcattaagataaaaaaatgaattagttgccaaactatattatgtacattttatctccacatggatttctgcctcaatattttttatcattttatgtactgcttgaaatcataaagaaaggactattcattgatgaactataaatatccacaagataaccctataggaagtataaaatttttataaatttaggagacatttcaagggaaaaatattatcaaaggaaaggatgtcagtgttgtgtgtgtgtgtgtgtgtgtgtgtatgaracaaaatttgaacattcatataaaaatatgtggataatagatatacataaacacaaaatcttagtgtggatttaaatatacacatatatgaatatataaacatatatcctcatttcaaaat

SEQ ID NO: 350926 - DNA, 519 bp, Homo sapiens
taaggtgcaaaaaaattgccagagcctaatgaagcctactgtttgaatcaacagctatggagattctacccaaattttaaaataaacttgaagtttgggagcatagccagagttcatgttaaaaattgactgatactttaaatttctctagcctaataggataatttttctaaagcactgctttcattcmtacctgccttttcaagaatgcatgaggcctacattaaatctaatttaaagctaccctataatccagttcactgattgttactctgcagtccctacacaacttcagtcaggttggttttctcactgcctcctgaacttccattcttaaatctcatcttcatctccatcataaatactcttggtttcttaactcatcttcagttatttaagtctttttatgttaagtcccatttcctccacttcttgataatttgaactcatggtgatcactgccatcacttctatgattacacttactctttttaccaaacttttgaaaacttaattaca

SEQ ID NO: 350927 - DNA, 612 bp, Homo sapiens
tagtaaccctataaggtaagtattattatcttcattttaataatgaacaaactgagtaaaaaaccrgataacctacataaagccagagaactaataagtagaagggctggctggagttcaaaataggtctgcctgacttcaaagaatgatccctttttgaaaaatcaaaacaacaataacaacagctaaaattcattgtattcttattaagtgccagacaatgttctaagctggtattatctcatgaatagattatatttaatggtatataaacctaattgttctttaaaaatttagtcaaagtgattttcatttttagcaatgtgatgggtcatctcattttctcaaatacgcctcctaattataacttgaagctttaagcttcttattgcttcatttacccaagatctacaaagtagtgacagtacattatagatttatcacagctcaatgtattctttatagtttctaaaatgtgcctgtgggcactgtgccaagagaaaaaattttattgagatctggcttatgtcactcaaaataaccaggcgactagagtatagccaaaatatgtatttactaatttaataccgaaattattttatggtgtttaag

SEQ ID NO: 350928 - DNA, 612 bp, Homo sapiens
tagtaaccctataaggtaagtattattatcttcattttaataatgaacaaactgagtaaaaaaccggataacctacataaagccagagaactaataagtagaagggctggctggagttcaaaataggtctgcctgacttcaaagaatgatccctttttgaaaaatcaaaacaacaataacaacagctaaaattcattgtattcttattaagtgccagacaatgttctaagctggtattatctcatgaatagattatatttaatggtatataaacctaattgttctttaaaaatttagtcaaagtgattttcatttttagcaatrtgatgggtcatctcattttctcaaatacgcctcctaattataacttgaagctttaagcttcttattgcttcatttacccaagatctacaaagtagtgacagtacattatagatttatcacagctcaatgtattctttatagtttctaaaatgtgcctgtgggcactgtgccaagagaaaaaattttattgagatctggcttatgtcactcaaaataaccaggcgactagagtatagccaaaatatgtatttactaatttaataccgaaattattttatggtgtttaag

SEQ ID NO: 350929 - DNA, 556 bp, Homo sapiens
gcttaattaagcaaattggatgaagtctcaggtattaaatgaatgtgaccaaaggaaaaaggattcgacagggtttgatagagaatagaaaacaaatgcwtattgaaacagttaaatgaaaatttatgttatgcaaactttctcagtcaatggaaccctacctctcaatcttatttggatggatacttcaaaaattagatgtcaaataaagcttgctttgtctacaagaaagagtagatagatacactgccttgtctcattctgaatttattcatgggggagaaaatgaactaggaaaatactttaaaattgggataaaggttatagcaatgtgatataaattagttttcctctaagtgatttctccagacttttaaagtgatttttttaaaatctaagttatagatttattaaaaatgtggtcgagaactccacgaatgttgccattagagattagtaggtgctttgctttgaagaatggatttaattgatcagtatagcaatactcttcatggaaatatgtacccaaagttccctattgttggtttataattaa

SEQ ID NO: 350930 - DNA, 605 bp, Homo sapiens
ccataaaagcagtgacttgatagagttatgattagattagaaagtcaggcagtaaagatcaggagtaaastggtcatttgggaatacatttgaggcagtcttgaattagataaggagagtctgtacattgcaatcccaatgcccagtgccttaattagttaggtctccaagcatgcatcatgttctattcctttttgtagtattgaatttatggacctaggaaaacttggttactattaaattgtgacctaattttaaatgtttaagggtttacaactttcttctccaactagattttggaatctaagaagagatagaaattgccttccctgtgtattaatcttacttaatacccgttgataagcctcacacatcaaattcatctgatttcatagagtcttcatcagaaactaccgaatacaaaaatagtgaactatgatataaacatgtatgctttgtctatacaatttcaccttcctttggtacaattttagtttcttgggagtcctgaacagtaaatttattactcttcaccagtaaggacattcttgcaatcattctcactgagaaggccaaattttgtacacattcatttctcttccttt

SEQ ID NO: 350931 - DNA, 503 bp, Homo sapiens
tatgtatctatttattgaaaatgcagaccaaaaatattggttttgcatttatgtgagaaagaaacaaaagttaaatcatgtgtctttgcactaaaggtggtatttagtgatagtaaagatctttttattccaaatatgttgcatgtctttgattttcatcttttctctaaattgtggatacaagacaactattatgtttatgttgatactacctttaagggttttaaaaagatataccaaaattatcatttsacattccacatctatcattataaagataagagttcaagaataatgtagacatttgtggtaatcaaacggtgaacccaatatgagttggtgtactattaatagtttgaagacttgtagaaaactgctttggtaaacatgcagatatttttctggcttaaggtacctcagaatcaattgattaatctactaaacaaatattttgtcaaatacctaatcatgtaacaagtaacttcatgaatgtttgtggataa

SEQ ID NO: 350932 - DNA, 503 bp, Homo sapiens
tatgtatctatttattgaaaatgcagaccaaaaatattggttttgcatttatgtgagaaagaaacaaaagttaaatcatgtgtctttgcactaaaggtggtatttagtgatagtaaagatctttttattccaaatatgttgcatgtctttgattttcatcttttctctaaattgtggatacaagacaactattatgtttatgttgatactacctttaagggttttaaaaagatataccaaaattatcatttcacattccacatctatcattataaagataagagttcaagaataatgtagacatttgtggtaatcaaacggtgaacccaatatgagttggtgtactattaatagtttgaagacttgtagaaaactgctttggtaaacatgcagatatttttctggcwtaaggtacctcagaatcaattgattaatctactaaacaaatattttgtcaaatacctaatcatgtaacaagtaacttcatgaatgtttgtggataa

SEQ ID NO: 350933 - DNA, 539 bp, Homo sapiens
ttgtaaaaatgtatattatgaaaaaaaattacgcatagatttccttttttttttttttttttttttttaccaaatggacttctaccatcttcttataacatgtttgaatagaatctactttcakgcaccaagaaggataaaatactagtttgaaaaaattcccctatcagagcaacatgaattctgcaaaaattacatgaagaacaaacatcaaacttatggtgaggtttgggtggaagaatggtgaaattcattgatgctttacaaaaagtgtatgggaacaacgcacccaaacaatcaggagtttacaaatggataactcattttaagaaggaatgagagaagaagatgaagcctgcaaaagcacaccattcacatcaatttgtgaggaaaaatatcatctcgtttgtgctctaattgaagaggatcaatgtttaacagaagaaacaatagctaattgcctagacatctcaactgattcagcttacacaattccactcaagggatgccaaaacttttgtgcccagatcagctgcaga

SEQ ID NO: 350934 - DNA, 539 bp, Homo sapiens
ttgtaaaaatgtatattatgaaaaaaaattacgcatagatttccttttttttttttttttttttttttaccaaatggacttctaccatcttcttataacatgtttgaatagaatctactttcatgcaccaagaaggataaaatactagtttgaaaaaattcccctatcagagcaacatgaattctgcaaaaattacatgaagaacaaacatcaaacttatggtgaggtttgggtggaagaatggtgaaattcattgatgctttacaaaaagtgtatgggaacaacgcacccaaacaatcagkagtttacaaatggataactcattttaagaaggaatgagagaagaagatgaagcctgcaaaagcacaccattcacatcaatttgtgaggaaaaatatcatctcgtttgtgctctaattgaagaggatcaatgtttaacagaagaaacaatagctaattgcctagacatctcaactgattcagcttacacaattccactcaagggatgccaaaacttttgtgcccagatcagctgcaga

SEQ ID NO: 350935 - DNA, 600 bp, Homo sapiens
ggggtgatgggaatcccagcaacaacttgccctcaaataattccgttaaaaaaaaaaagctctttgtacagtacttgcaacttttctggatgcttggatttcataataaaattactttgaaaaaaatatctacttgagatagtgccataaagaagcaagaacagagaaatctctactattctgttatacagcttggtgccctaccattaatgatccttaactttagatcttcaagcatatttaagtctctaggccttggatgaccatgcaggggrttgtgcagcaataaggtcaaccttagtagctaagagagagagagaaaggcagatcatactaatcaagttaagcagtttacacaaaactacaatgtgagttgtcactatttccatttttcaggtgcaaaaattgaagctcagaaaggggaaggaagttggccaagatcacacagtaaacattccagctggaattaaagaccccaaggtctgtgcgctcgacagccctttagcagggtttatctttctcgtggtaaattaaaagccaaagggctacttacgggtagttgtctggtgaggaaagccaagggagtatatgcccaggata

SEQ ID NO: 350936 - DNA, 600 bp, Homo sapiens
ggggtgatgggaatcccagcaacaacttgccctcaaataattccgttaaaaaaaaaaagctctttgtacagtacttgcaacttttctggatgcttggatttcataataaaattactttgaaaaaaatatctacttgagatagtgccataaagaagcaagaacagagaaatctctactattctgttatacagcttggtgccctaccattaatgatccttaactttagatcttcaagcatatttaagtctctaggccttggatgaccatgcagggggttgtgcagcrataaggtcaaccttagtagctaagagagagagagaaaggcagatcatactaatcaagttaagcagtttacacaaaactacaatgtgagttgtcactatttccatttttcaggtgcaaaaattgaagctcagaaaggggaaggaagttggccaagatcacacagtaaacattccagctggaattaaagaccccaaggtctgtgcgctcgacagccctttagcagggtttatctttctcgtggtaaattaaaagccaaagggctacttacgggtagttgtctggtgaggaaagccaagggagtatatgcccaggata

SEQ ID NO: 350937 - DNA, 577 bp, Homo sapiens
tattattaaagtttgtcagtaaagaaaaaaggtttaagtaaattatgaagagttgtaaagctacttctttataaaaaggaaaatattgacacactcaaaaagagaagccaaacagcaaaagatttttaaaatgaagcagcggcacagaagacataagaaaataagaggtgaagagagaaaggcaaacacatccgtaacatcaaataagggatgaactgctttattaaaaggaaaaaatgattttcagattgactcawaacccatgtaaaagctgcatataaaaacaaataacagatgacaaaatggcacaggacatttgagatgacagaagatgggcaaacaactagggaaacaaaatcagaagaaagcaaggtggcaataaaaatatcaggaaagatttaatgtggggcaaagagcattcagtgagcagggtcgtttgataatgataaaaggtacaatttacactgtacaatgccctctatacctatatataccatctatacatgcctcctatacctatatatgttttgatatgtgtatacattgtggaatggctaaatcaagctatttatcatat

SEQ ID NO: 350938 - DNA, 511 bp, Homo sapiens
ctgggagacagtagcctaacagatagtatagtaaatttaagtaaaatacttgtcgacaaactttggttttgaacccaagatggataattctaaaattgttttgaatcatgttagatgaatttaacccatttataattattatgataactcatatrtgttatctatttattcagtcttattttatgttttctgtttatgttgctttattttaaaattttctttcttttctttcacatcttttgatatgtttccttttaaaaatcatattattcagtaacttgtaaattagatagctaattctattatactgtgttacctacaaattagaatagcaatgataactacttatttaaaattatatttcttttcaatggcaataataaaattggataggatgctactcccaccaaagaacagagggctctgttttaaagaaattatgctaaaacataattggaaaataatatgtattctagtctgggagtctgtgtaccatgtctttctcattttg

SEQ ID NO: 350939 - DNA, 511 bp, Homo sapiens
ctgggagacagtagcctaacagatagtatagtaaatttaagtaaaatacttgtcgacaaactttggttttgaacccaagatggataattctaaaattgttttgaatcatgttagatgaatttaacccatttataattattatgataactcatatgtgttatctatttattcagtcttattttatgttttctgtttatgttgctttattttaaaattttctttcttttctttcacatcttttgatatgtttccttttaaaaatcatattattcagtaasttgtaaattagatagctaattctattatactgtgttacctacaaattagaatagcaatgataactacttatttaaaattatatttcttttcaatggcaataataaaattggataggatgctactcccaccaaagaacagagggctctgttttaaagaaattatgctaaaacataattggaaaataatatgtattctagtctgggagtctgtgtaccatgtctttctcattttg

SEQ ID NO: 350940 - DNA, 581 bp, Homo sapiens
caagtgaaataaattctgtaacactggtgtattagtcaaggctctccagagagacagaaccaacggaatatagatagatagatagatagatagatagatagatagatagatagatagatagacagatgagaggggggtttattcaggaaattggctcacgtgattatggaggctaagaagtcccaccacaggctgtctgcaaggtcaagaccctgggatcctggtagcgtggctcagcccaagtcccgaggcctaagaatgagggaagccgggggtgtaactctcaatccgaggccaaaagcctcrgaacccagggggccattactgttaagtcctggagtccaaaggctggggatcctggagttgttgtccaaggacaggagaggaggagtgtgtcccgatgccagcagctaggtggacacatgacccctttctctgtttttcttctttctgaggccccggcagattgcacggtgtaccttccacactgaaggcagagtttgcccacctagtccacacagagacacactctaacctcctctggaaacaccctcacagacacacagacacacccaaaaaca

SEQ ID NO: 350941 - DNA, 556 bp, Homo sapiens
cttctgtgtggcaaacaagaaattgcagccattctgagcttcaatgagagtaggtagaaaggggttgctgtgctggatagtgaaaagccaagatgaccatctgaaggtcagtcaaaggcttcttgtcaagaagcttccaggtttcctgatgagatgtagcttgagagtcacttcctttccaatggacaaagtgatggaacaagtgacctattgtagaattagtctgagggtttcacctacatttgccattatcctggcacaccctctccatctcagggctgcgccacctttttgtgtctgtctgatacaggctaattgctctctgtrtacataggcagaacaggttactgtaacaagtagagactgctatggagatttcattaaggttgacacattcatttcaactggccaggagcgtcagaccatatcccagaacactcaggcattctcaagtactaacaaataatccctgtaaatcactcacttccacaaaagtttaaaataaaaatagaggtagaggaatctttctccaactttttcctgatgctcttttcta

SEQ ID NO: 350942 - DNA, 556 bp, Homo sapiens
cttctgtgtggcaaacaagaaattgcagccattctgagcttcaatgagagtaggtagaaaggggttgctgtgctggatagtgaaaagccaagatgaccatctgaaggtcagtcaaaggcttcttgtcaagaagcttccaggtttcctgatgagatgtagcttgagagtcacttcctttccaatggacaaagtgatggaacaagtgacctattgtagaattagtctgagggtttcacctacatttgccattatcctggcacaccctctccatctcagggctgcgccacctttttgtgtctgtctgatacaggctaattgctctctgtgtacataggcagaacaggttactgtaacaagtagagactgctatggagatttcattaaggttgacwcattcatttcaactggccaggagcgtcagaccatatcccagaacactcaggcattctcaagtactaacaaataatccctgtaaatcactcacttccacaaaagtttaaaataaaaatagaggtagaggaatctttctccaactttttcctgatgctcttttcta

SEQ ID NO: 350943 - DNA, 582 bp, Homo sapiens
gattatggtgtggtgtagcagcaaggggctcacctcgtgcctaggaatcacactagtttattttaaacactggcatggacagtgttaagtagtgtacagctttagtagaaattgaagattaatgaaaatactgcagaaaacacacaaatagatcatgtgctatatatgcaatcatcggcctgtaggccctaagcaaacactgctcctcctgggggcagygcctgggagggaagtaacatggccccaagaagttcgacaggcctttgatgctatgcaggacagcacaaagctcgccagtttcctccatctaggtagagagccaagacgggagtggctgaagtaatgactgcctgctgaaatgagaattctttcatttggtaaatcaataattacaagcacactggggaaattaagcaaagaaaattacatcactctagtgttgcactagaatcatacatgcctacaaataacaaatcgggaattcccccagcagttataaataaaccacacacattgcacacttgcaaagggatgtgagtaagcagagtgtttgctcctcatcaatgataacacacatgtgag

SEQ ID NO: 350944 - DNA, 582 bp, Homo sapiens
gattatggtgtggtgtagcagcaaggggctcacctcgtgcctaggaatcacactagtttattttaaacactggcatggacagtgttaagtagtgtacagctttagtagaaattgaagattaatgaaaatactgcagaaaacacacaaatagatcatgtgctatatatgcaatcatcggcctgtaggccctaagcaaacactgctcctcctgggggcagcgcctgggagggaagtaacatggccccaagaagttcgacaggcctttgatgctatgcaggacagcacaaagctcgccagtttcctccatctaggtagagagccaagacgggagtggctgaagtaatgactgcctgctgaaatgagaattctttcatttggtaaatcaataattacaagcayactggggaaattaagcaaagaaaattacatcactctagtgttgcactagaatcatacatgcctacaaataacaaatcgggaattcccccagcagttataaataaaccacacacattgcacacttgcaaagggatgtgagtaagcagagtgtttgctcctcatcaatgataacacacatgtgag

SEQ ID NO: 350945 - DNA, 590 bp, Homo sapiens
aatggccaactctttaaagacgtttggctgtgaagagaaggagagagatggggtagtagctagaagagtagatgaagcgaagagatgttttcctaagatgggagaactaatggcatgtgtatatgtggaagagaaatagaagcaatcagaagaaacatccacagactcttacattyacccatcagtctgcacctacctgtgtgctctgcctcctcttctgttacttcagatgaactttttcagttcccagctaacacccgtgtttccacttgcataaaagatcctgtcctctctcctctactcaagaaatcagcaattccttctctcccaccaaagtttccttgtctcccactaaaatttctctctttacctactattttgacattgaaataaaaagtcaggtcaatagttggatgggggatcgaaggtttgagaagagaggagaagatgtaaaataatcatttagaaaaagagtagaggaagtgaacttggaaaatatgcagtgacttcagggtagcagtagaacccactggagggtcacaattacaaagttaaagtgaaaacagtcagcaaggttgcatatattttgg

SEQ ID NO: 350946 - DNA, 543 bp, Homo sapiens
tgacttctaaatctcctgtttgaaaatccattttagaacattttcattaccccacaaggaaaccccatactccttagttgaagtcattcttgactcctctctttcacatcccacatccagtccatcagcaaatcccataggctcaactttcgggaacacattgggaatcttaccacttgttaccatctctgctgcttgaccaagttgccatcatctcttgcctgggttattgtaacrgcctcttagctgatgtccctgcatcctccctgaccccctttcaatctattctcaatccagcagctagaatgatcttattgtaatataagtctgatcacatctctttgctcagtggttcccattccacccaataaaagcccaacgtcctcacaaagacacgtaagacttgacgaggtctgtcttctgggtttgctctgacctcatagtttacgcctcatctctcttttgcttcagtctcactgtctttctttccttctcacaccaaactttctccctcctcagcatcattcttttggcctggaaagt

SEQ ID NO: 350947 - DNA, 543 bp, Homo sapiens
tgacttctaaatctcctgtttgaaaatccattttagaacattttcattaccccacaaggaaaccccatactccttagttgaagtcattcttgactcctctctttcacatcccacatccagtccatcagcaaatcccataggctcaactttcgggaacacattgggaatcttaccacttgttaccatctctgctgcttgaccaagttgccatcatctcttgcctgggttattgtaacagcctcttagctgatgtccctgcatcctccctgaccccctttcaatctattctcaatccagcagctagaatgatcytattgtaatataagtctgatcacatctctttgctcagtggttcccattccacccaataaaagcccaacgtcctcacaaagacacgtaagacttgacgaggtctgtcttctgggtttgctctgacctcatagtttacgcctcatctctcttttgcttcagtctcactgtctttctttccttctcacaccaaactttctccctcctcagcatcattcttttggcctggaaagt

SEQ ID NO: 350948 - DNA, 543 bp, Homo sapiens
tgacttctaaatctcctgtttgaaaatccattttagaacattttcattaccccacaaggaaaccccatactccttagttgaagtcattcttgactcctctctttcacatcccacatccagtccatcagcaaatcccataggctcaactttcgggaacacattgggaatcttaccacttgttaccatctctgctgcttgaccaagttgccatcatctcttgcctgggttattgtaacagcctcttagctgatgtccctgcatcctccctgaccccctttcaatctattctcaatccagcagctagaatgatcttattgtaatataagtctgatcacatctctttgctcagtggttcccattccacccaataaaagcccaacgtcctcacaaagacacgtaagacttgacgaggtctgtcttctgggtttgctctgacctcatagtttaygcctcatctctcttttgcttcagtctcactgtctttctttccttctcacaccaaactttctccctcctcagcatcattcttttggcctggaaagt

SEQ ID NO: 350949 - DNA, 543 bp, Homo sapiens
tgacttctaaatctcctgtttgaaaatccattttagaacattttcattaccccacaaggaaaccccatactccttagttgaagtcattcttgactcctctctttcacatcccacatccagtccatcagcaaatcccataggctcaactttcgggaacacattgggaatcttaccacttgttaccatctctgctgcttgaccaagttgccatcatctcttgcctgggttattgtaacagcctcttagctgatgtccctgcatcctccctgaccccctttcaatctattctcaatccagcagctagaatgatcttattgtaatataagtctgatcacatctctttgctcagtggttcccattccacccaataaaagcccaacgtcctcacaaagacacgtaagacttgacgaggtctgtcttctgggtttgctctgacctcatagtttacgcctcatctctcttttgcttcagtctcactgtctttctttccttctcacaccaaactttctccctcctcascatcattcttttggcctggaaagt

SEQ ID NO: 350950 - DNA, 498 bp, Homo sapiens
tatgttctcactgcccagaaaggccccacctgtcacctttctggcagaagagtgaagggaagtaaaaggtgaaagtgcacaaggaagttgcaacctcagtgaaccacaaaaccatccccacaggcaggcagttgatatatgaaaattccattgctatttggtcatttttaagaataattttcttaactgtttttacttaaattttttcaaaatcagttataaactttccttatgggccgggcaccatggcttatgcctataatcccagtactttgggaggccaaggcaggaggattgtgtcagctcaggagtttgagaccagcctgggtaatatagtaggacctctgtctcttcaaaaaaaaaaaataacataattagctagcatcaaggcacacgcctacagtcccagctrcttgggatgccaaggcaggagaattgcttgaacccaggaagttgaggctgcagtgagccatgatcacgccactgcactccaggctg

SEQ ID NO: 350951 - DNA, 583 bp, Homo sapiens
cttccccctctctctcatttcaaaggtaatcaggaagtctcctaggataaggttattatattcaagtcctgccaaaaaatgtaagaaaagaagctcctatttgagtggaccaaaaagaacaattatacctcctaaaaataaaatgaacctaagctaagaaaatgaaaaggtttctaaagaaggtcagtacttcttttttggtctcctttcatcactgtgtgatttactttaatagtaccctgtcaaactagatgactcagtggcctcatcayagcttacagagcatttcatctgtggtcattcatcctgcctatgaagaaattgacatgtagtcactacagagcaacactgctcaccaatggttgttcaccaccataccctcctgatccttgcctaatcaaacagagagatgctatcctgcttttacctacacagaaaaagaaagaagataaaacaatgttagggggttgtggctcattgatggtcagatatgaaaagctgcttcaaatgctgtcccatcagttcctaaaactgcaacatgaaaatgcatcatcatgactaccctttacctatctcccaagcg

SEQ ID NO: 350952 - DNA, 583 bp, Homo sapiens
cttccccctctctctcatttcaaaggtaatcaggaagtctcctaggataaggttattatattcaagtcctgccaaaaaatgtaagaaaagaagctcctatttgagtggaccaaaaagaacaattatacctcctaaaaataaaatgaacctaagctaagaaaatgaaaaggtttctaaagaaggtcagtacttcttttttggtctcctttcatcactgtgtgatttactttaatagtaccctgtcaaactagatgactcagtggcctcatcacagcttacagagcatttcatctgtggtcattcatcctgcctatgaagaaattgacatgtagtcactacagagmaacactgctcaccaatggttgttcaccaccataccctcctgatccttgcctaatcaaacagagagatgctatcctgcttttacctacacagaaaaagaaagaagataaaacaatgttagggggttgtggctcattgatggtcagatatgaaaagctgcttcaaatgctgtcccatcagttcctaaaactgcaacatgaaaatgcatcatcatgactaccctttacctatctcccaagcg

SEQ ID NO: 350953 - DNA, 551 bp, Homo sapiens
aaacaatgttagggggttgtggctcattgatggtcagatatgaaaagctgcttcaaatgctgtcccatcagttcctaaaactgcaacatgaaaatgcatcatcrtgactaccctttacctatctcccaagcgtgaaattgttttccccagtaaaagtttaaggaaatgaagtaattgctgtttggggcaggaatgctatgagtattaccatgcagttttttccttaaatgtttaattagaaggaagtatggcattcttacagctattttttaattaagccagcagactctaccaagaatctgatcccctctctaagcagataattacagtgacaagtgactttcaagtttatgcccatatatactcctagacttctgatgtgccccagaaggacgttaccattcatgttctgagtgctggcctctgggcctgaccctgtctgcctggattcggaactttgactttccttaacttgtgacttgcccccctagatcccagcctgtccttgacctctggcaacagcaaactcgttaacacctgctccgcatgca

SEQ ID NO: 350954 - DNA, 557 bp, Homo sapiens
tcagtacttcttttttggtctcctttcatcactgtgtgatttactttaatagtaccctgtcaaactagatgactcagtggcctcatcacagcttacagagcatttcatctgtggtcattcatcctgcctatgaagaaattgacatgtagtcactacagagcaacactgctcaccaatggttgttcaccaccataccctcctgatccttgcctaatcaaacagagagatgctatcctgcttttacctacacagaaaaagaaagaagataaaacaatgttagggggttgtggctcattgatggtcagatatgaaaagctgcttcaaatgctgtcccatcagttcctaaaactgcaacatgaaaatgcatcatcatgactaccctttacctatctcccaagcgtgaaattgttttccccartaaaagtttaaggaaatgaagtaattgctgtttggggcaggaatgctatgagtattaccatgcagttttttccttaaatgtttaattagaaggaagtatggcattcttacagctattttttaattaagccagcagactc

SEQ ID NO: 350955 - DNA, 557 bp, Homo sapiens
tcagtacttcttttttggtctcctttcatcactgtgtgatttactttaatagtaccctgtcaaactagatgactcagtggcctcatcacagcttacagagcatttcatctgtggtcattcatcctgcctatgaagaaattgacatgtagtcactacagagcaacactgctcaccaatggttgttcaccaccataccctcctgatccttgcctaatcaaacagagagatgctatcctgcttttacctacacagaaaaagaaagaagataaaacaatgttagggggttgtggctcattgatggtcagatatgaaaagctgcttcaaatgctgtcccatcagttcctaaaactgcaacatgaaaatgcatcatcatgactaccctttacctatctcccaagcgtgaaattgttttccccagtaaaagtttaaggaaatgaagtaattgctgtttggggcaggaatgctatgagtattaccatgcrgttttttccttaaatgtttaattagaaggaagtatggcattcttacagctattttttaattaagccagcagactc

SEQ ID NO: 350956 - DNA, 521 bp, Homo sapiens
accgccatgccacaccccacccattcacttttgtctgcttctgttatatgctgtcattgtccttcttaaagtatggggtgggggacatcagagcatccagaagcaaatactaagaaggcgagagggagtatcaccttctctcccctgttctgagcattattcttcrttaatgcagcccacttatgaattagcatttgaagaacagtcatatcacatcattgaattactgcatgtttatcttacagttttttccacgtgtggacattaagcaacacctcttctattccgggttgtttaatcagggtttttattccaagtataaaaccttacagtttatccctgttggatttcatcttgttaatgttgaaatatcctataagaaaagtccgaagcaaaaaggaatcagtaatgggtcttaaaggaaaaagaaataggaagtagtcccagaaatgcaaggagttaactaggaagcctagctgagggactactaaattaagagggcagatggaaccctgtgttta

SEQ ID NO: 350957 - DNA, 336 bp, Homo sapiens
ttatcatcaattaaaaataccaatatgtagacctgtacaggctttttaattctctgagaaggacctggatactctggagaatacaaatctgtgaggaataatgagttgattaatrtcaactttcccaatccagattcgcctaaaagaaataagggaaaatatctgttaaactcacccactttactcaaccttaaatattcaacagatgctgtaattgaacttgctttatgcaagtatttcttggtgagacaatgaaatgacattagaaaatatgctacaaagaataagtaacttgtcctcagtttcttagctatcaaattaaactcacatttccaa

SEQ ID NO: 350958 - DNA, 336 bp, Homo sapiens
ttatcatcaattaaaaataccaatatgtagacctgtacaggctttttaattctctgagaaggacctggatactctggagaatacaaatctgtgaggaataatgagttgattaatatcaactttcccartccagattcgcctaaaagaaataagggaaaatatctgttaaactcacccactttactcaaccttaaatattcaacagatgctgtaattgaacttgctttatgcaagtatttcttggtgagacaatgaaatgacattagaaaatatgctacaaagaataagtaacttgtcctcagtttcttagctatcaaattaaactcacatttccaa

SEQ ID NO: 350959 - DNA, 336 bp, Homo sapiens
ttatcatcaattaaaaataccaatatgtagacctgtacaggctttttaattctctgagaaggacctggatactctggagaatacaaatctgtgaggaataatgagttgattaatatcaactttcccaatccagattcgcctaaaagaaataagggaaaatatctgttaaactcacccactttacycaaccttaaatattcaacagatgctgtaattgaacttgctttatgcaagtatttcttggtgagacaatgaaatgacattagaaaatatgctacaaagaataagtaacttgtcctcagtttcttagctatcaaattaaactcacatttccaa

SEQ ID NO: 350960 - DNA, 522 bp, Homo sapiens
tgggcaagtggctaccatattggacagtgtggatacacaacaattccatcatctcagaaagtgttattggatagtgtggctacagacttttcttgctcagcaatcttagtctccgcatgttagtctcttcatgcattaggtagcatctataaaacatgccaaaaggaaataggctatctctaaaagtgtcccaaactttttgtcttgtaaattagcttatcagcatacttggagcctcttgccttaaaaaggacttgatataaatgtgtatcaggagaaagcctatcttatgaaggaattattccctttttatttgaatccatgtttgctttatcttsggctcctgaaaactgatactttgcatttaacagcagcatatgcccaggatgaatgataatacatctcctgatacagagcttgaggttacagaatatcttaaattgttccaggaactgttgttatcatttaagtccaataatcagtaagatttcaccctaccagaatacacttttttttattaac

SEQ ID NO: 350961 - DNA, 459 bp, Homo sapiens
atcttagtattttataaataactttaattttgtttgaattyacattgtttttgaggtatttttctgtcaactcttaaaactcctaagttcatcatgaagtttttatattatttaagtaatctctcatttgaaatttgaaactgaatataatcgttttcatattatgaagtgtgttattaatacacttactagtgccaatagtatgctaataatttagctgtgtttcaacaataaatattttctttcatttggaaagttttgaaataatgaataaagatttattcaacacaatttatatttttgaatctttatatagaataacttgacatatcttccattggttaattcattttgcctatttgaaaatattgattattgtcctttaacagtcatcagttaattcatatgtagaattgcaacttaattgttttgtttatttgcattctatagctggcagcc

SEQ ID NO: 350962 - DNA, 459 bp, Homo sapiens
atcttagtattttataaataactttaattttgtttgaattcacattgtttttgaggtatttttctgtcaactcttaaaactcctaagttcatcatgaagtttttatattatttaagtaatctctcmtttgaaatttgaaactgaatataatcgttttcatattatgaagtgtgttattaatacacttactagtgccaatagtatgctaataatttagctgtgtttcaacaataaatattttctttcatttggaaagttttgaaataatgaataaagatttattcaacacaatttatatttttgaatctttatatagaataacttgacatatcttccattggttaattcattttgcctatttgaaaatattgattattgtcctttaacagtcatcagttaattcatatgtagaattgcaacttaattgttttgtttatttgcattctatagctggcagcc

SEQ ID NO: 350963 - DNA, 459 bp, Homo sapiens
atcttagtattttataaataactttaattttgtttgaattcacattgtttttgaggtatttttctgtcaactcttaaaactcctaagttcatcatgaagtttttatattatttaagtaatctctcatttgaaatttgaaactgaatataatygttttcatattatgaagtgtgttattaatacacttactagtgccaatagtatgctaataatttagctgtgtttcaacaataaatattttctttcatttggaaagttttgaaataatgaataaagatttattcaacacaatttatatttttgaatctttatatagaataacttgacatatcttccattggttaattcattttgcctatttgaaaatattgattattgtcctttaacagtcatcagttaattcatatgtagaattgcaacttaattgttttgtttatttgcattctatagctggcagcc

SEQ ID NO: 350964 - DNA, 555 bp, Homo sapiens
attttctttaaatctctacattcctatttcctgtctttttgtcattttgctccactttctgggaaatttcttcaactgtatctttcaaatctttcactgagattttcatttctgctaataatctctaaatatccttatttcttgaatgcaatatcttcttatctttctaaggttattaattacagttttgtgrtgtcttattttctctgcagtctgtttcctccaagttaggtgttttgttttctgtttgttgtggtctgtttatcatactggaggtttgcctcagatgcttggtgagtcttagatagctacttatattcaagagaggcactcttgcaggctgtttggaagatctgagcatgtgggtggggcttatttgtgggcttcattgtatgatgatctggggttgggggatggtttcaggatgaaactggttccacctcagatcatcagacattagattctcatagggagcacacaacctagatccctcacatgtgcagttcacaacagggttcacacctttatgtaatctaacgctcctgctgatctgac

SEQ ID NO: 350965 - DNA, 555 bp, Homo sapiens
attttctttaaatctctacattcctatttcctgtctttttgtcattttgctccactttctgggaaatttcttcaactgtatctttcaaatctttcactgagattttcatttctgctaataatctctaaatatccttatttcttgaatgcaatatcttcttatctttctaaggttattaattacagttttgtggtgtcttattttctctgcagtctgtttcctccaagttaggtgttttgttttctgtttgttgtggtctgtttatcatactggaggtttgcctcagatgcttrgtgagtcttagatagctacttatattcaagagaggcactcttgcaggctgtttggaagatctgagcatgtgggtggggcttatttgtgggcttcattgtatgatgatctggggttgggggatggtttcaggatgaaactggttccacctcagatcatcagacattagattctcatagggagcacacaacctagatccctcacatgtgcagttcacaacagggttcacacctttatgtaatctaacgctcctgctgatctgac

SEQ ID NO: 350966 - DNA, 555 bp, Homo sapiens
attttctttaaatctctacattcctatttcctgtctttttgtcattttgctccactttctgggaaatttcttcaactgtatctttcaaatctttcactgagattttcatttctgctaataatctctaaatatccttatttcttgaatgcaatatcttcttatctttctaaggttattaattacagttttgtggtgtcttattttctctgcagtctgtttcctccaagttaggtgttttgttttctgtttgttgtggtctgtttatcatactggaggtttgcctcagatgcttggtgagtcttagatagctacttatattcaagagaggcactcttgcaggctgtttggaagatctgagcatgtgggtggggcttatttgtgggcttcattgtatgatgatctggggttgggggatggtttcaggatgaaactggttccacctcagatcatcagacattagattctcayagggagcacacaacctagatccctcacatgtgcagttcacaacagggttcacacctttatgtaatctaacgctcctgctgatctgac

SEQ ID NO: 350967 - DNA, 514 bp, Homo sapiens
gcctataccattacaacagtcctattctagcccaaatacactataaatattcttctgtctaccagtatttataaacatataatatctagaggtatattaataaggctgtgggtattttattaaacatataagtactattttaagtattctatatttttacaagtccgtctcaatagagatcttgtttacaatgacctttgtgttcaaaacataatcatctgacttctgaaaaaccatataatctttttttttttttttttgagacagtcttgccccatcacctggactgatcacagctcatgggactataggcatgygcacagctaattttttaattttttgtagagacagagctcacagtgttgcccaggctggtctcaaactcctgtccctagacagtcttcccacctcggcctcccaaagtgctggcaccgtaggtatgagccaccacgcccagccaaaaaacaaattcttgtgttgaattaaccctttcatttgcccttaaacagttttg

SEQ ID NO: 350968 - DNA, 514 bp, Homo sapiens
gcctataccattacaacagtcctattctagcccaaatacactataaatattcttctgtctaccagtatttataaacatataatatctagaggtatattaataaggctgtgggtattttattaaacatataagtactattttaagtattctatatttttacaagtccgtctcaatagagatcttgtttacaatgacctttgtgttcaaaacataatcatctgacttctgaaaaaccatataatctttttttttttttttttgagacagtcttgccccatcacctggactgatcacagctcatgggactataggcatgcgcacagctaattttttaattttttgtagagacagagctcacagtgttgcccaggctggtctcaaactcctgtccctagacagtcttcccacctcggcctcccraagtgctggcaccgtaggtatgagccaccacgcccagccaaaaaacaaattcttgtgttgaattaaccctttcatttgcccttaaacagttttg

SEQ ID NO: 350969 - DNA, 421 bp, Homo sapiens
ggtggttgatgactgtattacacagtgtctcctttgtgggagcctacaggaaaaattttcttctggtttcaactagggataatatattttttttcctgtgcaactactttctttaatcttttgagagcactgtggaccatgtaattgatcatatatattttttctttgcctggaatcttgaacattcagagttaactttgtaatttctatctctccggtgaataaaccctcatagctttcattttgctctgagcttcattctatttttttaatttttatattctccttgttccaatttactcmattgattttattttaattatgacgtactgtagaattattgagatactttatatcctcttttgtaacaatgacatatgaatagtagttaaaccttaggggaagcaactctttgaaagtg

SEQ ID NO: 350970 - DNA, 421 bp, Homo sapiens
ggtggttgatgactgtattacacagtgtctcctttgtgggagcctacaggaaaaattttcttctggtttcaactagggataatatattttttttcctgtgcaactactttctttaatcttttgagagcactgtggaccatgtaattgatcatatatattttttctttgcctggaatcttgaacattcagagttaactttgtaatttctatctctccggtgaataaaccctcatagctttcattttgctctgagcttcattctatttttttaatttttatattctccttgttccaatttactccattgattttattttaattatgaygtactgtagaattattgagatactttatatcctcttttgtaacaatgacatatgaatagtagttaaaccttaggggaagcaactctttgaaagtg

SEQ ID NO: 350971 - DNA, 498 bp, Homo sapiens
agcctgctatacattaacatgtgtcttggtaactcacagatatgctgcatgatagaackctgtgccctctcacagataggtcccacctccagccttcccctgctgccatctaacatcctaaactccagctctgaatgtctgtctcctgctctgaatcttcagtgacttcgaaactcaagtcaggacacctctcagtttggcctcactgctcaagattgagctgaattcatgaccataattcaagcattcagattcatgggctgttttgtgggttttgctatctcttattttgtttttgcacatcttacccactgaaacgttgggctgcaaaaatttgatcactatgtaggcaatgctggatactgggctgttatttacacatttgtatcaccttttatttcataagatagcattgtcagagtaatttagtatttcaacataatcaacaagtaaaattaatgagaatgatcttactttgagtatttgtgtcatttctaa

SEQ ID NO: 350972 - DNA, 498 bp, Homo sapiens
agcctgctatacattaacatgtgtcttggtaactcacagatatgctgcatgatagaactctrtgccctctcacagataggtcccacctccagccttcccctgctgccatctaacatcctaaactccagctctgaatgtctgtctcctgctctgaatcttcagtgacttcgaaactcaagtcaggacacctctcagtttggcctcactgctcaagattgagctgaattcatgaccataattcaagcattcagattcatgggctgttttgtgggttttgctatctcttattttgtttttgcacatcttacccactgaaacgttgggctgcaaaaatttgatcactatgtaggcaatgctggatactgggctgttatttacacatttgtatcaccttttatttcataagatagcattgtcagagtaatttagtatttcaacataatcaacaagtaaaattaatgagaatgatcttactttgagtatttgtgtcatttctaa

SEQ ID NO: 350973 - DNA, 514 bp, Homo sapiens
ccctcttaaataccagaagggtaaaagcaaataaaatagaacaaggtggttccctgttatctgtgatgtaaaaaatggacttggctcacctattaaatggaaaacagtcttggattggctcacaaagcaaaatcaaacaccatactrcatataagatatacagctataaaaggctgggaaaatatatagagaatttataggactcagaaaaaaagtaactgtcacaggaaactttatagcattaaatacctatatcaatacaaatttaaataataaaaataaattatttaaacatataactgaaaaagccagaaaaagaataagtgaaccaaaagaaaggggtgaattattacaaatgaaagcagatattattaagtagaaaaagaatagaactaagaagtaaatccaaaagctggctctcaagagaaaataatcaaccaaaacaaaccactaggtatctgattagaaaaaaaaaaataagaaagttacaagtgctaacagaagaaaatttaaa

SEQ ID NO: 350974 - DNA, 514 bp, Homo sapiens
ccctcttaaataccagaagggtaaaagcaaataaaatagaacaaggtggttccctgttatctgtgatgtaaaaaatggacttggctcacctattaaatggaaaacagtcttggattggctcacaaagcaaaatcaaacaccatactacatataagatatacagctataaaaggctgggaaaatatatagagaatttataggactcagaaaaaaagtaactgtcacaggaaactttatagcattaaatacctatatcaayacaaatttaaataataaaaataaattatttaaacatataactgaaaaagccagaaaaagaataagtgaaccaaaagaaaggggtgaattattacaaatgaaagcagatattattaagtagaaaaagaatagaactaagaagtaaatccaaaagctggctctcaagagaaaataatcaaccaaaacaaaccactaggtatctgattagaaaaaaaaaaataagaaagttacaagtgctaacagaagaaaatttaaa

SEQ ID NO: 350975 - DNA, 514 bp, Homo sapiens
ccctcttaaataccagaagggtaaaagcaaataaaatagaacaaggtggttccctgttatctgtgatgtaaaaaatggacttggctcacctattaaatggaaaacagtcttggattggctcacaaagcaaaatcaaacaccatactacatataagatatacagctataaaaggctgggaaaatatatagagaatttataggactcagaaaaaaagtaactgtcacaggaaactttatagcattaaatacctatatcaatacaaatttaaataataaaaataaattatttaaacatataactgaaaaagccagaaaaagaataagtgaaccaaaagaaaggggtgaattattacaaatraaagcagatattattaagtagaaaaagaatagaactaagaagtaaatccaaaagctggctctcaagagaaaataatcaaccaaaacaaaccactaggtatctgattagaaaaaaaaaaataagaaagttacaagtgctaacagaagaaaatttaaa

SEQ ID NO: 350976 - DNA, 560 bp, Homo sapiens
actgccttttccttttaattttattaactgatctttggaaggagctgggtgagcaattatgctgttactatgtatgagtaatatctactttccctgggcaacccaacctccctagtgccscacccggagagggatcaggcctgaacctggaggcctttcctcccgtctccaaggtcctctaggagctcaggggtggagggcgatgggtcgggaagctggagagtaggacagttcctgggtccgcctgaagctctggctgcctatagtggtcagggatgctctgggataggtggaacagctgcgcctgcagccagctgggccgggcccccgtagctctctagagctctcaccaggagtaggcaggtggatcctgtctctgaggcagggtgggagcctgggctgggctcaggcagctcttggcagcaagcggattttcaggttgtggcagctggtgccgggtggggacaggtcggctgctggagcatgctccccctgaaacctggaaaggagcagtgcctgaggccttgggaggagttctttagggatggtgggctgataag

SEQ ID NO: 350977 - DNA, 503 bp, Homo sapiens
aagacttagatggttaacagtactagtagggatttcaacaccccaaagagagcattagacagatcatcaagtcagaaaactaacaaagacattttagacttcaattcaacacttagccaatgggacctaatagacatctamaaaacattccacccatcaaccacagattatacattcttctcgtctgtgaacagaacatactctatgattgaccatatgcttggagataaagcaagtctcaataaattcaaaaaattgaaatcataccagccatactttcagaccacagtggaataaaagtagaaatcaataccaagaagatctctcagaagtacactattacatagaaattaagcaacttactcctgaatgactttggggtaaacaataaaattaaggcagatatcaaaaaaaaatttgaaataaatgaaaacagagacacaaccaacatgccaaaatctctgagatgcagcaaacacagtattatgaggaaaacttatagt

SEQ ID NO: 350978 - DNA, 581 bp, Homo sapiens
agataaggggtgatgaaaaccaaggttcttattatgtagataaagtctcataggtggctgcccttacagacaatagatggcaattgtttcccattcatacctgtaaagggttctagtctctcagttcatctcttcaggattggaagggactgaaaagggaaagatttggttatattcttcatattcttgacagatgtaaattttccctcacaacagaaggctttgtagggccactcaaagtatgtcaaagagacatattttggggtaaaatattttgattttcttctttatctgtcatttgatgttacgccagagtaaggttggaaagtaagcttgtcatataggataaaataaaacccatctggtgagattttatggtttgtaggatgttattccccaggcctcttaggaatttgggcaagacagaaaaaaggtcagagtttagtcctcacacctccagaaggtagtgatgaaaatatgaatttttaaaaaagaagatttgttgaaattctgtttaaaatacrattagaatatcagatccccttgccaacttgatgctgcaggtgaatactcccacaccc

SEQ ID NO: 350979 - DNA, 499 bp, Homo sapiens
aaaagcattaaataaatgtttatccacttgcactcttatttagctaccagtccccacacaggaggctggacaagtctactctgttatctgcacaacctaaagagtctgacatgagggcatttcccagcacgatgggcaaatgggatcaccttacaacaaaccccatcacgtgcagaacacactgttaaaaaaaaaaatcatgagccaaactaaatttaacggagtttaattgagcaaagaacaaatcatgagtcargcagcctctcaagccagagtaggttcacagactccagcacaggcatgtggttggaagatttgtggacagagaaagtaaagtgatgtacagaaaatggaagtgaggtacagaaacagcctgattgggtacagcccagcatttaccttaatttaacatggtttgaacagttggtctcctttgattggccaaaatgtggtgattagcacaagagtaggttacagtctgcttatgcctccatttagg

SEQ ID NO: 350980 - DNA, 479 bp, Homo sapiens
atgtgcatactcacttgaggcattcttcccttaccagctgaatgtccctagaaggtcacataagagacattaaaaattggccattttgcctcttaatgtacatgcttgagcccactcacccaaatcctgagatattgggaaactgctgatcacgagtttcaggtttttttctatcttttgggagactgtctttccctggcactggctgcaaccaattattattttagagagacagttaacaactgcytgaccatcacctgacattcctggtgatgggaaggagatgcctgccctgctcatgtctgcctgactacctactgtaacaccaggttgtctaaatgtgccatgagcaaacagacaagttgtatattttgggtcgtgattgagtcttccaggttcttaaaaccacagcctttaatttaccataaaaaattttaaaaagaagttaccaggaggataataaaaattattatgtgtac

SEQ ID NO: 350981 - DNA, 602 bp, Homo sapiens
cactgatgaagacatacccaagactgggcaatttacaaaggaaagaagtttaatggagaactcatagttgcacatagctggggaagcctcatgacagtggcagaaggtaaggaggagagagtcacatcttatgtggatggcgacaggcaaagagatagcttgtgtagggaaactccccttttttaaaccatcagatctcatgagacttatttactatcaggaggacagcacaggaaagacctgccctcttgattcaattacttcccaccaggtycctcccacaacatgtgggaattcaagatgagattcgggtggggacacaaccaaaccatatcattccacctttggcccctcccaaatctcatgtcctcacatttcaaaaccagtcatgcctttccaacagtcccccaaagtcttaactcattccagcattaactcaaaagtccacagtccaaagtctcatctgagacaaggaaggtcccttctgcctatgatcctgtaagataaatggcaagttaattattccttaaatacaatggaggtacaggcactgggtaaatacagctgttcaaaatgggagaaattggccaaaacaaaggggc

SEQ ID NO: 350982 - DNA, 602 bp, Homo sapiens
cactgatgaagacatacccaagactgggcaatttacaaaggaaagaagtttaatggagaactcatagttgcacatagctggggaagcctcatgacagtggcagaaggtaaggaggagagagtcacatcttatgtggatggcgacaggcaaagagatagcttgtgtagggaaactccccttttttaaaccatcagatctcatgagacttatttactatcaggaggacagcacaggaaagacctgccctcttgattcaattacttcccaccaggtccctcccacaacatgtgggaattcaagatgagattcgggtggggacacaaccaaaccatatcattccacctttggcccctcccaaatctcatgtcytcacatttcaaaaccagtcatgcctttccaacagtcccccaaagtcttaactcattccagcattaactcaaaagtccacagtccaaagtctcatctgagacaaggaaggtcccttctgcctatgatcctgtaagataaatggcaagttaattattccttaaatacaatggaggtacaggcactgggtaaatacagctgttcaaaatgggagaaattggccaaaacaaaggggc

SEQ ID NO: 350983 - DNA, 583 bp, Homo sapiens
gtattattattgttgtgattatgctttgaattcttaagtaaccaatgtattctctgtctctggatctgtttctagtgtcaaaacccttgttagcaggaattagatcagattatattaataattatgtagtggatatcttacttttgcatattttctcatcagacaatacacgtctatattatcttttatctcagtgtgtatgaataaatgtcagagctatttgggtcataatttgctatgcggctgttttgtcttgttatatatttcactgtaataacagtgagttatgattcacaaagtttgcctccttttataaaaggtgtattttaatttgatgttagaaacaacgaactttaaaaatgtaattggccttaatatctttttagattcctttgaagatatacttascacaaaaatatgctccttgggaatttgacaattgagctgataataggatatatcatttttagtttacaggcaaaagcaaatgcttcattattttgttgttatttactacatcataaaagaaatttaattttagctagctgtgtgcatctaagtccagatatcatttgataaaatg

SEQ ID NO: 350984 - DNA, 587 bp, Homo sapiens
ttgggaggaaaggaaaaataaagagtgagaaggatttttgaaggccgtggcaaatttagtctgcatgaaaagcagaactttcagaatagaaattcactctgaaaagaggcatttacagagatagtggaggcccctcttatagaaatatttactgttgtttttaacttagcacctaagtatgcttttgaatcataacacttgaatgagttctggaaagttaaatgctccaagactgtggcaaaaaaacctaccagctttcatcttcctcctttccattcccaactttctctagtactattcaaaaactccctaattaggaattcctttgggaaattccaatatcagagttaactagccaacctattattgctaatcatttattcctaccctctatataaagatgaccagcatgtgtgcacacacacacacccagacacacatctccctatrccgttttctttttttcgttcattttctttaaatttcccattatactttttaaaaagtaatattgtccaaatttatagcactgtagttcttggattgtttcttattacttttgcatcaagcaaggaatgatattcaga

SEQ ID NO: 350985 - DNA, 598 bp, Homo sapiens
aaaataacaaggtaattattaatactctatatccaaataaagacataaaggaagaaaaacatcatatgaaaaattagtgacagtccgaaataattagctaccaatggccccaggactttatagcacatataatacgaaatattccctcccctacttttctgttgctacatggcagaaaactatgtgagtctgtatttatgactggttgaattgttttgatgaatattttatttaagtaattgctatgaccactgaattcaatgatatcactgttacatcgagatattaatctttatgccatgttttacagaaaattgtattattttccacatccagagtactctgactccmtttactactcattgttagagaattataatataaataaactctataaagagcaactattttctttattctattgatcttactcttattgaggtcaaaatagaatacagagacaaatctctaaatttaacattttatttgtgaatcacagaattgcaatttggggcacacatacagatcaggcagtcatcagcatgtctaaagaacaaagaaaatgttggggtatttattttaaagaaatgttacatat

SEQ ID NO: 350986 - DNA, 523 bp, Homo sapiens
ttttttaaaaatcctctgcagctcatattaaaaagggttaatctttctagtacaagagtacatatagatcaataaggcaaaaataaaaatctaagaaaaatggccaaaggatacgaatagaccttttacagaaaagaaaaacaagtagttcttaaaagttaaaaagaaaatctctccagttactaataatataaatacaaattaaaactacattgcgataccattgttcacctctcagattgacaaaaatacaaaagtctgattatgtactctattggtgtgactgtgggtaagggctaactcccatgtattactttgagagtataatgtgatgcacctctgtgaaaataaatgagcaatagctaccaaagttataaagataaacaccattgacctacgaaattcatttctggaaatttaatctccaaaagtatttraataagtatgaagtaaattatgtataattatactcagtgcatctttttagtaacagtccaagatcgaaaggaacctataaattgtc

SEQ ID NO: 350987 - DNA, 483 bp, Homo sapiens
ataaaagatcaacaaaactaaatgctgkggtttttttaaagataaacaaaattggcaaacttttagccagactaagaaaaaagaagacccaaataaataaaaacacaaactgaaaagggaatattacaactgataccacagaaatacaaaggataattacagactatataaacagctatatgcaacaagttgaaaaacctagaagaaattaataaattcctggatgcacatgatctaccagggttgaactatgaagaaacagtaagaagattgaagcaataataaaaagcctcccattaaagaaaatccaaagacgtgatggattcactaataaattctaccaaacacttaaagaagaactaataccaattctactcaaactatttcaaatatttaagaggagggaatactttcaaactcattccatgaggccagcattaccctgataccaatagcagacaaggacatagcaacagaaaaaga

SEQ ID NO: 350988 - DNA, 632 bp, Homo sapiens
cacatttcccttgggatacttttcttctgagcttttttgaatgggcaagaatggggccgactgacaattttgataaaaatacttgaattttaaatcatgccaacacatttccataatcagctagaggtatttgattgaaagttttaaacagtgatgacattttaaaggccttattaagggcttgaattatctcctttattgtaaagagtaatttgctggtgaaaaagaaccagttgaaaaggctggctgacttcagtgcatggttaagaaataagagttgttactatttggcaacaacattagaaaaacaatatgcatcaaacaattcccaggaaagtcccagaaagaataaaaataaacatccagaaatttcagcaaaaagacttaaaaaattataactttataccatgcttgtcccaactgtacagttaacattgtatgaagagatcgtcttttgcacatttgttcaggggaacactgacttatatatttcacttccatatgcttttccaggcaacagttgagaatgccrtagcccaaaacttatctataatttaaatcctgttttagttttctaatgatgccttctgaattactacttatcaagtccctatctagtaccagaataaggc

SEQ ID NO: 350989 - DNA, 589 bp, Homo sapiens
ttctttaacttaaaaaatatagtaaatgcctaccaagttagtctcatagaactctcagtcaaataaatgaaggtaggaatgagcagctttaagtgtaactatgaagaagcaatcaatactatgggaatcaaatggggatatagcagatgtagatttatccattatcamgattattctaacaaatttttaccctcttgctgtagttcctcctattatcaaccaaggtgaggcaaagttctttgaaatgtagacttcgataggtctctctggtggtctggtcatctgtgaataaaactgaagagagaggcagagaagaaattaaaggtgtcaatcaagaaagagataggaaattctaagaacaaagggcatgacacagtcactggtagatttggacatgtgaggcaaaaaaacgttttcagaaataaagcatggtgggaatacaaaatgatggtgggatggagcaatgagagtcaatcaggaggttctgaggtaaaatcttcatagtcatgtgataaggaagaagaaacagaaattgtgaaaaatattttaatttaagaaatgtatgtataccaaaaacagcatgaatcat

SEQ ID NO: 350990 - DNA, 606 bp, Homo sapiens
ttagaaaagggaggacaagtctataaagcagaccaaaggccaactaaagaaggtcccactaagccatttagctttgccctgaagacccatggaaagccattgaaaggttttagccattcaaagagccatatttatattaattttacaaagaaatatcctgcatatggtgatgagaatagattggaatgaaatacaggtggacgaaaagaggcaattgcagtatctttgcaagaatttgaaaactctctgttgcgtgggcgccgtagctcacgcctgtagtcccagcactttggaagcctgaagcaagtggattgcgtgagcctaggagttcgagaccagcctgagcaacatgttgaaacatcgcctatataaaaaattaaaatayagctgggtgtgattgtgtgtgcctgtagtcccagctactcaggaggctgaggtgggagtatcacttgagctcaggaggtggaggctgcaatgaaccaagatcacaccattgcactccagcctgctggacagagtgagactctgtctctaaataaataaataaataaataaatatgctctgtcattatgatacagttcaaaagatgaaggtatgaaaggaca

SEQ ID NO: 350991 - DNA, 600 bp, Homo sapiens
cctcaccctgggtgaccacacatacacacagcatgggggacaccccagaatagttactgcttggttccactcaagtgatgttgagaaacaagcaaaccttgctggagagatggaagagtggttgccatgggtagcctgatgggaggggaacaggggagcccctgggtgatgcagagattctagatcgagatctgggaggtggctcctggtgcccatttctttcattgtaaatgggataataaaacatgactttggagttcttatggactgagtaaagtgatggacatcagggctcagcactgtgcagggtgagaagtaccccagacagggtgcagggcaagtatttgtttcttcatatcctctagtccttagtcaaaaggagagggggtagaatatggagtccagarcctgaatgtgggccagattggtagatggagcctcctgcagttccgtagccagagaagtcccaggagcatctatccctgcagctccagaatgctttgcagctaggggagctcaggtcccttaattagcccaccctccctgaccagcccccaggactgccaccaccagaagctaaggcgagtctcctctcagcca

SEQ ID NO: 350992 - DNA, 484 bp, Homo sapiens
agaaagtaaatgatgaggtcttatctgctgtccattttatagaagttaagctgaatgacctccacctagataagtggcaatgtgtgtgtccaatcttatatctgttttacctatatttatacatatatatttcatatgttaatttgtcttaattatctgtacacctaaatgcattcatgccttctattaagtctattcagtaaagggaaaggagtgagagaattgagtgtctcccttgtcctggatgttttatacagatgatagcactttattctcacagtcacattaaagcagggctctcatatctgagctggcccatccaaatgacctgggggcttcttaaaacacaactttctagaccccagtcctaggtttctgattcagcaggtgtgggttgaggtgtgagaaggtggattrctgatgagtttccaggtgaggctgtagcgtctggcccagggaccccactttgagaagcacagtttta

SEQ ID NO: 350993 - DNA, 548 bp, Homo sapiens
tatatcagatttttgaagagaattataccggatttttttacagaagtccgatatatacatyttcacaggtagtgggtaacttataacagagtagtcccaatttcttcctcccatgcaagcaagaagaggtgaagtggaatatttaaattattgaaagaaaaaaaaaaaacccatcaacctaaaatcctgtgtactgcaaaattattcctcaaaagtaaaggagaaataaagacattttcaggcaaacaaaaattgagagaatttgtctccagtagacttgcattgcctgaaatgttaaaacaagttcttcaaagaaaaaaaaagtcagaaattttgttctactgaaagaaataaaacattagaaaaggaataaataagggtaaaattttaaggttttgttttttattcttaatagttctaataaataattattcacatagtaatagcaacagtgcattgggtgactagcttagcggtaagtggtataaatgtttgaaggcatgccagaaagaaattgggactactctgttataaggtacatgctacct

SEQ ID NO: 350994 - DNA, 518 bp, Homo sapiens
tgtacccacttttggagattttttttactgcttgagtggtcaaaaacattcttgactgtttgcatttttttcactttgttgtttgtttttgcttctgcctgcctggygtccacctcatcttctggtaacagctccctaattttgtgctggaggccctttctccatagggtagctttctagtggggctgtcaaccaagttgtcctaacctgctcccatctttgctgaccaataagtcaggatgggaccaagccaggtcaatccactgttctctccttggaatttttgtctgagaggagaaactggaagtgcgattgccctgggcttccgttcgccccagtaactgcaccccaaaggcagaggccatcatcaattcaagtcctccacatccctgaactatcctgagtcctgagtcttgtcgttttggaagtctggtccttctatttctattttttgaatctctcatagcctttcaattaaaaatgcttttgctttcataagccatggttgttttctgttg

SEQ ID NO: 350995 - DNA, 632 bp, Homo sapiens
gctataaatcttctagtagaaaacggaggagaaaatcttcatgctcttgagtaaggcaaagattttttcaagatactataccaaaagctcaatctataaaataaaaatraaatgggtacattgaactcattaaattaaaacttctgctcttcattgttgatggaatgaagacagaccacaatctgggagaaaatatttgcaaataaaatatccaaaaaaagacttaatatcctaaataggtaaagagctctcaaaactcaataataaggaaaaacaactaaatgtgcaaaagatgtgaacagacatctcaccacagaaggcataaatatgcaaataagcacatggaaatatgctcagcttttcaggaaaatgtaaatgaaacccacaaagataccactacacagctatttgagtgactaaaatgaaaaagacagcataccaagtgttgacaggaatgtggagaaactggaactcttctacacattggaaaatggtttgctaggctcctaaaaaagttaaatatatgcctgtaacataatccatccgttccactcctgtatatttatctaacataaatgaaagcatatatccatacaaagatttatacatcaatgttcacagcagctttattt

SEQ ID NO: 350996 - DNA, 609 bp, Homo sapiens
ctggaactcttctacacattggaaaatggtttgctaggctcctaaaaaagttaaatatatgcctgtaacataatccatccgttccactcctgtatatttatctaacataaatgaaagcatatatccatacaaagatttatacatcaatgttcacagcagctttatttgtagtagcccaaactggaaacaatctaaatgcccactggtagattaacggataaacaatctgtggtatatacatacaatggattatgacttggcaacaagagtgaactatactgagtaaaataagccagaccaaaaaaaaaaaaaaaagcgcacactgtatgatccattgacttgcattcagcatyccctatcaatctatgtgctatgctcccctgtgacaaatctcctgtggacagtgataacagtcaaagtaaattttcagttcctggactcaattacatttctttggtgcctctgagaaattctgttgaaatatttatcttcactatttatttcccaaattcccaagccaactctctccacaggggtccccagaaaattttactaatgaaattaaacagaggattgtccaggaaacatgctggctgtatttcacatgtt

SEQ ID NO: 350997 - DNA, 642 bp, Homo sapiens
catgtataaagtctgacatggtctgattatacttgcctctttttctgtgcgtgtctaatcaaattctacatttgttttagagacagaaccaaagtgggggtaactgagattgtgtgcctacttttgtggatgaacatccctgacaaggtggtgctatctgtgaaaggttggtgtggccactttgcacatccttgcgaggtacatcttggggcaaggtggggctggggcttcacctcctctggcttctgcccactgggagagttttctgttcagtcgccacctaggaatgacttcacatgattgtcttgattatagtgcttagataggcttggatggcaaattgaaggcttgagtaacaaaggtgtttccctaaccttggaggacagtccagccttctttcctctcagggtacagttacacattcacacattttgtaaatcccactctgcccagcttgtctgtgtctgttttaatttgctgcagggcttaatctcagtccttttaaatctctctgggcaactgtgaattctaasaacaaatcctaataaataataggagttgagaatctcttatctgaaatgcttgggaccagaaatgttttgaattttgggtattttggattttggaatacttgcatgagac

SEQ ID NO: 350998 - DNA, 599 bp, Homo sapiens
gaaaaaacaacttcattgaagatgagctgacaatcagaattaaaaacccaccacaaagaaaatgatccaccatgagggagagtcaacaaatgcaataaacagaatcagcaccttcaaaactgcagagtgcattaatctgaaaagaacaatgaaataaaaagatttcgaagtatgaaagacataagagaataaatgaaaaccatactcaaagcattaatcagtgtagaaagtgatttgaaagaaggccacaaaagttctttaggtgaaaagtatagtcattgaaaaataaaagctcagtggcagagcaaaacacagatgaagcactgctgagggactggtgaacaggaagatggttccgaggatgcaaaagagaatgcagcacagaaagaaagagacgcagcagctgagagwcatggagaggacggaggttgggtccttgaaacaggaattccaggagagaacaaagaaaaaggaagaccagcaatatttaaagagataaaggctgaggatcttcagatttaaagaaaatacgcatttttattttagggaagcacgggagttctggagaagaatgaataaaaatagaactacaccagatg

SEQ ID NO: 350999 - DNA, 619 bp, Homo sapiens
tctatttcctaagggattcaagtcactccctgagttctagatgtggttcagccttggaaatgtgggaatttctcaagatgccctgctttgtacttaatttaagttgcgaaatactttattgggcccttgggttctgtgctayactttgggcttattttgtttgtttttcaagttgttcttcttaaggttttcattttcttttttttttttccaatgttttccttggtgtctcctagaagtctctcctttgacatccaatcattttctttgagtctctgggcaatgagattttctcatgcaggatgccagtaaagacaaggactatgtgcaagccatttctgatatgccaatctttgtggaggtctactttataatactgggagaagcatttgaaaatgaaagtgatgaatgtatagtaaccagcctatagcagccgctcactaaatatgtgcagaatggtaaagtgttttgtgagtttcaagatgcctttacaattttggctaataacaccccactccacccctacagcatctcctgcccataccattgtggcatgtaccctctgtgctgtagctatcaatggacttgtcagtctcctcaagcaaacaaggtgcctgag

SEQ ID NO: 351000 - DNA, 619 bp, Homo sapiens
tctatttcctaagggattcaagtcactccctgagttctagatgtggttcagccttggaaatgtgggaatttctcaagatgccctgctttgtacttaatttaagttgcgaaatactttattgggcccttgggttctgtgctacactttgggcttattttgtttgtttttcaagttgttcttcttaaggttttcattttcttttttttttttccaatgttttccttggtgtctcctagaagtctctcctttgacatccaatcattttctttgagtctctgggcaatgagattttctcatgcaggatgccagtaaagacaaggactatgtgcaagccatttctgatatgccaatctttgtggaggtctactttataatactgggagaagcatttgaaaatgaaagtgatgaatgtatagtaaccagcctatagcagccgctcactaaatatktgcagaatggtaaagtgttttgtgagtttcaagatgcctttacaattttggctaataacaccccactccacccctacagcatctcctgcccataccattgtggcatgtaccctctgtgctgtagctatcaatggacttgtcagtctcctcaagcaaacaaggtgcctgag

SEQ ID NO: 351001 - DNA, 619 bp, Homo sapiens
tctatttcctaagggattcaagtcactccctgagttctagatgtggttcagccttggaaatgtgggaatttctcaagatgccctgctttgtacttaatttaagttgcgaaatactttattgggcccttgggttctgtgctacactttgggcttattttgtttgtttttcaagttgttcttcttaaggttttcattttcttttttttttttccaatgttttccttggtgtctcctagaagtctctcctttgacatccaatcattttctttgagtctctgggcaatgagattttctcatgcaggatgccagtaaagacaaggactatgtgcaagccatttctgatatgccaatctttgtggaggtctactttataatactgggagaagcatttgaaaatgaaagtgatgaatgtatagtaaccagcctatagcagccgctcactaaatatgtgcagaatggtaaagtgttttgtgagtttcaagatgcctttacaattttggctaataacrccccactccacccctacagcatctcctgcccataccattgtggcatgtaccctctgtgctgtagctatcaatggacttgtcagtctcctcaagcaaacaaggtgcctgag

SEQ ID NO: 351002 - DNA, 619 bp, Homo sapiens
tctatttcctaagggattcaagtcactccctgagttctagatgtggttcagccttggaaatgtgggaatttctcaagatgccctgctttgtacttaatttaagttgcgaaatactttattgggcccttgggttctgtgctacactttgggcttattttgtttgtttttcaagttgttcttcttaaggttttcattttcttttttttttttccaatgttttccttggtgtctcctagaagtctctcctttgacatccaatcattttctttgagtctctgggcaatgagattttctcatgcaggatgccagtaaagacaaggactatgtgcaagccatttctgatatgccaatctttgtggaggtctactttataatactgggagaagcatttgaaaatgaaagtgatgaatgtatagtaaccagcctatagcagccgctcactaaatatgtgcagaatggtaaagtgttttgtgagtttcaagatgcctttacaattttggctaataacaccccactccacccctacagcatctcctgcccataccaytgtggcatgtaccctctgtgctgtagctatcaatggacttgtcagtctcctcaagcaaacaaggtgcctgag

SEQ ID NO: 351003 - DNA, 625 bp, Homo sapiens
tttgaaaatgaaagtgatgaatgtatagtaaccagcctatagcagccgctcactaaatatgtgcagaatggtaaagtgttttgtgagtttcaagatgcctttacaattttggctaataacaccccactccacccctacagcatctcctgcccataccattgtggcatgtaccctctgtgctgtagctatcaatggacttgtcagtctcctcaagcaaacaaggtgcctgagctatataaggcaagaaaatagcctttgttcctggtcacacatctcctacacctaccacagagccaggaaggagaaataaaaacagttatgtccttagcaatactataataaaagatctgtaaartatagtctttgagaggatctgaaatatcttagccacaaaactgagttactacttctcggagtagcccaacattttgtattttcttctccctagcgagatatttatggtgttactcctcatagagcgttaccatggagatttatatttaaagatcttatttccaagggaaagaattataaacatcccaaggtgaaaagatccagttgtattttacgaatttgtataatggtccatttccagaaccttgtaggttgattaccaaaggaatcc

SEQ ID NO: 351004 - DNA, 559 bp, Homo sapiens
atttctcatacctcttttagtattttattaaccataaacaatatgccaccacatctgacctagcttatatgaattttgtgttcaaatatatttataatagtgttatttttaatgagataaaatttacctaaatataaaatagcagtgcaacaaactgtacygcaaggttaatcattaaagcatcattaaaatattctaaaataacatgtaactacatgggcaaagttctcattgtgagcataagtgaaaataacagaatgcatcgttctttatgtataattatcccaattgtaaagtatgtgcttatactcattccctcatttaacagttatttatgaaacttctactatggaccaaaaactatttagagtgttgaagttacaacagttaacaaagcatgcagaaacccctgccctcatgggacaccctcatgggatgtctcagtgtggggacagccagtggtatcttagaactggctcaaacgggttcgcaagaccaaattgtgaaattttcaagaattttgcaagctgattgttgaacatagctattcttgcaaatt

SEQ ID NO: 351005 - DNA, 559 bp, Homo sapiens
atttctcatacctcttttagtattttattaaccataaacaatatgccaccacatctgacctagcttatatgaattttgtgttcaaatatatttataatagtgttatttttaatgagataaaatttacctaaatataaaatagcagtgcaacaaactgtactgcaaggttaatcattaaagcatcattaaaatattctaaaataacatgtaactacatgggcaaagttctcattgtgagcataagtgaaaataacagaatgcatcgttctttatgtataattatcccaattgtaaagtatgtgcttatactcattccctcatttaacagttatttatgaaacttctactatggaccaaaaactatttagagtgttgaagttacaacagttaacaaagcatgcagaaacccctgccctcatgggacaccctcatgggatgtctcagtgtggggacagccagtggtatcttrgaactggctcaaacgggttcgcaagaccaaattgtgaaattttcaagaattttgcaagctgattgttgaacatagctattcttgcaaatt

SEQ ID NO: 351006 - DNA, 481 bp, Homo sapiens
ggaaaagtttttcgaggaggcactttccaggaggaaagccctgtctgctgtgcaggtgagaggtgtcaagtggaggcagcatacgaaaccacagcagggacaggaggtgcccacatctccaggaaactccttgttagcatcaccacacatcctgtaagaagaagagatctcaytgtcctcggcttctagctcctttcttttccagaataaggtgattgttctgggataagcaacctttgtctgcaggaaattgttaaagagctaccgttgtgtggactcatttctctcatgctttgaatttgaaagagtaaatcaattagaagcaagagctcgggctgcctgatggaaattatccctgagaggactgaacagatcaccaaaaccagtactcagggctatctgtagggcaatgaatgaatgcatcagacccacaccagtgtggaagcagttctgggaccatatgaaatgtggctagtaagcc

SEQ ID NO: 351007 - DNA, 481 bp, Homo sapiens
ggaaaagtttttcgaggaggcactttccaggaggaaagccctgtctgctgtgcaggtgagaggtgtcaagtggaggcagcatacgaaaccacagcagggacaggaggtgcccacatctccaggaaactccttgttagcatcaccacacatcctgtaagaagaagagatctcattgtcctcggcttctagctcctttcttttccagaataaggtgattgttctgggataagcaamctttgtctgcaggaaattgttaaagagctaccgttgtgtggactcatttctctcatgctttgaatttgaaagagtaaatcaattagaagcaagagctcgggctgcctgatggaaattatccctgagaggactgaacagatcaccaaaaccagtactcagggctatctgtagggcaatgaatgaatgcatcagacccacaccagtgtggaagcagttctgggaccatatgaaatgtggctagtaagcc

SEQ ID NO: 351008 - DNA, 492 bp, Homo sapiens
tgacagtacaagaaaaaggcgaattgcttgatatataccatagactgaggtctgaagctgtggttgctyttcgcttcaggcagataattcatcttgtaaacagatgacataaacttatggtattgataaatacagtacactactgtaaatgtattttttcttccttatgattttcttaatgaacttttcttttctctaccttttttattgaagaatacagtctataatacatataaaatatgtgttaattgactatatcatcagcaaggcttcaagtcaatgccagatttttagtagttaagttttgggggagtcaaaagttataacatggattttcaactgcatgatgagttggtgcccctcagttccgtgttgttctaggttcaaatgtaaatacttcttgagtaaaataaaaaaaatttgagtgagatgtactaaaaggaattgaactggcttgggtttaaaagagttttaaagagttaaagccatcaa

SEQ ID NO: 351009 - DNA, 552 bp, Homo sapiens
aattttcaggattaataatttcccatcaatttcatgcataacrctaacatatcttttcagcttctcaatggctcaaaaattaaattgcttctgttattaagaaaacaaaaccaagaacaaaattagttttcccctgctagtccccatggatctaagtaccacacaataattctttccaatctgcaaaacaaagaacacacaaatagatgggctaaggaagaaagatcaaaacaaagaaacaaatttaaaaaaaaaaattcccctttttctttagcaatcaacaaaataacaaaaaagaaaaagtggaaaagtcaccaagaatatatgaccatgtaagcatgggcactcttgcagaaaaccaagtctgcaaccgaaagccatgggaaatttaaattagagcaaacggccacaataggcagagaatctgtatggataaaaagggactgctgaggttgcaggtatactactaaagatcttttgagatttccaaacaaattttattagttttaataaattctaaaaataagaaataagtatgcgcattatactata

SEQ ID NO: 351010 - DNA, 552 bp, Homo sapiens
aattttcaggattaataatttcccatcaatttcatgcataacactaacatatcttttcagcttctcaatggctcaaaaattaaattgcttctgttattaagaaaacaaaaccaagaacaaaattagttttcccctgctagtccccatggatctaagtaccacacaataattctttccaatctgcaaaacaaagaacacacaaatagatgggctaaggaagaaagatcaaaacaaagaaacaaatttaaaaaaaaaaattcccctttttctttagcaatcaacaaaataacaraaaagaaaaagtggaaaagtcaccaagaatatatgaccatgtaagcatgggcactcttgcagaaaaccaagtctgcaaccgaaagccatgggaaatttaaattagagcaaacggccacaataggcagagaatctgtatggataaaaagggactgctgaggttgcaggtatactactaaagatcttttgagatttccaaacaaattttattagttttaataaattctaaaaataagaaataagtatgcgcattatactata

SEQ ID NO: 351011 - DNA, 628 bp, Homo sapiens
ctgctctgtaaaatggagattaaaatatctctaaccacatggaagtgttatgggaattaaatgaggtaatccatatggtatttaaaacaatgtttggcatattgcgactcctccatgatatttgttatccttcttataattattgctattaatattcattggtagcactcttactgtttagaggcactgctttcatggattttgtgtagtaagtcaaaattatggtttaaatgatagctggctcaagaatatttctctctcattctccattctagggctttaactacagcaagtgagaataggttgagttcaggataagctagaaattaagaaattgaatttaccaactaaatatccatattccacagaaaggaaccatagcattaaattaagtaggttgccttgagtagcaagcaaaaaatcctgcacaaattagcttaagmtggaaacttaagaattggttcacatagcacctgtccaactgtagggtgggcttcagggttggttgattcagtgattcattgataccattgtggtcttaggttctttccatctctcccctctgccctcaataacactggcttcttcccaagtctagttccccctgtaataagatggtggctgctaa

SEQ ID NO: 351012 - DNA, 561 bp, Homo sapiens
ggaatccaggctctgaaactcacttgctgtgtgagtctgggcaaagatcttcccctctgagcctcagtttcccaccaattgtggcagtatctacttggtattcatgccatatggattatatgagctaacatcatgtaaaaatgcttaggcagatgatgctcagtaaatgtgcgtttcttcattcccaaggggacagctggttgacagaaggacttgaatagagagaggaagaacatgaggacatgccagaagggagtaccctttgggcatcaggatgctggaggggacacacttctctaacccccctgagaactgggctgctataaatggcatgagtagacctctcctttgggctggcaaaaagactcagatggctggctccctccctccccaacctttctgggcccagggcatgggagaggatggtaatgacagagcagaaaggagtccaaacaacagtyataaatgtcagcacatctggattttggctctggctctagcatttattagccatatgactttggacaagccctcgtgatctccctgagcctcagttcccca

SEQ ID NO: 351013 - DNA, 517 bp, Homo sapiens
ttatcaccaagaatttatcaaagagcacaagaacagctgaagtgtgaagttcaatggggaaaaatgtgttattaattacaaggtgggaaatcattgttttcacaggcattgatgcagtgtaggccctgttacccccattttacagttaaggaagctgaggcgcagagtgctgaaacaacttgctgagaaacacacagcagtgagtggtgtgaagccaaaacttgagcctaagtctcactggatccaaggtccattttctttcaactacattatacacttgcttatagaatctttggctgctcttggtgtcctcagatcatatccttcatccttgcaggcacaaggctgacaaaagttaargattggacaaaaatgacaataagggcatcgttacccagtcttccttgaaattgggtgtttggagggtgggttagggtagggacagagattcatggttggggcaggtggtgaggcttagacaaggaaagaagtactgaaatggtccacatgaacactc

SEQ ID NO: 351014 - DNA, 591 bp, Homo sapiens
gctgtaattttttaaaataaaacacgaatttaataaaatatgggaaaggcacaaaccagaagtcggcatttgtgaaaagtccctccagatttctatcacattggtctctaatttcccaagacttgtattttttttttatttcaaattataacacttttttttcccccagaagtgggtgtttcatgttgctactctggtgtgtcctaagatatcctaactggccagtgtaaatgctattctttctaaataagattatttggaaacttccttcaaactgcaggagggtgagcttgagggaggaagctaaactagctgcttttatgaaaaagagtgccagtctttggtcatctctaaacaaggcttatcaccaatggagacagaaaactctagttcaagagctgtacctcctttgaatcccagccctactttgaaatargtggtactatttccatttagcctttgagcaaatcacttaatctcaaagcgttgtggctctaagattaaacgactttcccacataattagagccagtctgcagtgggccctacacttttgctgggtgtgcacaggctgttttcctaagacttttac

SEQ ID NO: 351015 - DNA, 580 bp, Homo sapiens
acttctgagtcactgaagtgctttgacggaagtgaccttggtgatcacctgtgacctaaccccgcatttcacacatgaaaagagcaagtgaattctcaagattaatgtttctgtagcacagctggaaccagaaagcctcattgtttcaagagtcacttttaaaaactcacttgtctgcctgsaaaataaaggatccagtgggcaactgaacaaagcagactccctgaaaaagccccttactccatcagaatgttgcttctggatgatattgaggtttctgcattaattcaggactgtgacttcttgcactttatggcatttataatttgcaaagcgttttcacacatataatctttgagccattgacttactggaagtaacccaaatgttgacaaacctgaggtcaaatcttattcctttgggtcaggaagtcacttacctcccctgtttcctcattagttaaatgaaactataaatccctctctcgctattatgaatattaaatgaagtaattgatatgagcgtctgaaacaatctggtgcttagtgaaagtttcatgtactttaaattgtttagatta

SEQ ID NO: 351016 - DNA, 580 bp, Homo sapiens
acttctgagtcactgaagtgctttgacggaagtgaccttggtgatcacctgtgacctaaccccgcatttcacacatgaaaagagcaagtgaattctcaagattaatgtttctgtagcacagctggaaccagaaagcctcattgtttcaagagtcacttttaaaaactcacttgtctgcctgcaaaataaaggatccagtgggcaactgaacaaagcagactccctgaaaaagccccttactccatcagaatgttgcttctggatgatattkaggtttctgcattaattcaggactgtgacttcttgcactttatggcatttataatttgcaaagcgttttcacacatataatctttgagccattgacttactggaagtaacccaaatgttgacaaacctgaggtcaaatcttattcctttgggtcaggaagtcacttacctcccctgtttcctcattagttaaatgaaactataaatccctctctcgctattatgaatattaaatgaagtaattgatatgagcgtctgaaacaatctggtgcttagtgaaagtttcatgtactttaaattgtttagatta

SEQ ID NO: 351017 - DNA, 580 bp, Homo sapiens
acttctgagtcactgaagtgctttgacggaagtgaccttggtgatcacctgtgacctaaccccgcatttcacacatgaaaagagcaagtgaattctcaagattaatgtttctgtagcacagctggaaccagaaagcctcattgtttcaagagtcacttttaaaaactcacttgtctgcctgcaaaataaaggatccagtgggcaactgaacaaagcagactccctgaaaaagccccttactccatcagaatgttgcttctggatgatattgaggtttctgcattaattcaggactgtgacttcttgcactttatrgcatttataatttgcaaagcgttttcacacatataatctttgagccattgacttactggaagtaacccaaatgttgacaaacctgaggtcaaatcttattcctttgggtcaggaagtcacttacctcccctgtttcctcattagttaaatgaaactataaatccctctctcgctattatgaatattaaatgaagtaattgatatgagcgtctgaaacaatctggtgcttagtgaaagtttcatgtactttaaattgtttagatta

SEQ ID NO: 351018 - DNA, 649 bp, Homo sapiens
tttagcataggtgtggaggtaaggagtgagaatggcgagagttttggttaaagggtagagtatatgaagatgttcattatgaaagcaatacacattctgtcaactaaaggctgtagaaggtgtaaaggaagtgaaaatctaccttaaaagcagtattccctcatttattgatcrtcaactttccagtctttatgcaaaacctacaaattttttttaaaaacccaacagaatcatactgtatatctttaacttctataattctcattgaggacatctttccatgttggtgcctaaagtctattcatcctttacagtaagtacatagtattctgcagtatatatttgtcttaatttatttgatctgttttcagttgaacttcaggttgtttccatttttctattaaaaatatattttttcttttacacagttaatacttctcagaagagtcatagaaccttagttgctagatcaactatgcagcctttatattttgttagtatctgcagaaaaatttttattcctataagctaattttccttagagtagtacaggcatattctgtcttgttacagaaccagtttgaactcaggcacctaaatgataatcatttaggtggcaaagtacaagaaatagtaaatccaatgcagg

SEQ ID NO: 351019 - DNA, 649 bp, Homo sapiens
tttagcataggtgtggaggtaaggagtgagaatggcgagagttttggttaaagggtagagtatatgaagatgttcattatgaaagcaatacacattctgtcaactaaaggctgtagaaggtgtaaaggaagtgaaaatctaccttaaaagcagtattccctcatttattgatcgtcaactttccagtctttatgcaaaacctacaaattttttttaaaaacccaacagaatcatactgtatatctttaacttctataattctcattgaggacatctttccatgttggtgcctaaagtctattcatcctttacagtaagtacatagtattctgcagtatatatttgtcttaattkatttgatctgttttcagttgaacttcaggttgtttccatttttctattaaaaatatattttttcttttacacagttaatacttctcagaagagtcatagaaccttagttgctagatcaactatgcagcctttatattttgttagtatctgcagaaaaatttttattcctataagctaattttccttagagtagtacaggcatattctgtcttgttacagaaccagtttgaactcaggcacctaaatgataatcatttaggtggcaaagtacaagaaatagtaaatccaatgcagg

SEQ ID NO: 351020 - DNA, 649 bp, Homo sapiens
tttagcataggtgtggaggtaaggagtgagaatggcgagagttttggttaaagggtagagtatatgaagatgttcattatgaaagcaatacacattctgtcaactaaaggctgtagaaggtgtaaaggaagtgaaaatctaccttaaaagcagtattccctcatttattgatcgtcaactttccagtctttatgcaaaacctacaaattttttttaaaaacccaacagaatcatactgtatatctttaacttctataattctcattgaggacatctttccatgttggtgcctaaagtctattcatcctttacagtaagtacatagtattctgcagtatatatttgtcttaatttatttgatctgttttcagttgaacttcaggttgtttccatttttctattaaaaatatattttttcttttacacagttaatacttctcagaagagtcatagaaccttagttgctagatcaactatgcagcctttawattttgttagtatctgcagaaaaatttttattcctataagctaattttccttagagtagtacaggcatattctgtcttgttacagaaccagtttgaactcaggcacctaaatgataatcatttaggtggcaaagtacaagaaatagtaaatccaatgcagg

SEQ ID NO: 351021 - DNA, 425 bp, Homo sapiens
ctgtctaccaaacacatctctaagtccacatgttgtttcctgcccctggggcctcccaccaggacctgaaatctaagccagaacccaagctcttccctgtgacctgttgccaatcctctctaacaggccttgtcaagtttctccagagccctgcgcatccagagccaaagtcctgctttatccaggcacattcatgatcaacaaaggcagttagaatagccaacatcatcttcacttcaccctggargacctgggcggatgactcaggggtaagagaaggaaacatttcttactggagacgactgctccataattactcctaaatgaatttcaacctgaaggttaagcccagatctgacctgtctttctggagctctctggagcacataaaagcctgatgatttcttccttatgtcaatagatat

SEQ ID NO: 351022 - DNA, 425 bp, Homo sapiens
ctgtctaccaaacacatctctaagtccacatgttgtttcctgcccctggggcctcccaccaggacctgaaatctaagccagaacccaagctcttccctgtgacctgttgccaatcctctctaacaggccttgtcaagtttctccagagccctgcgcatccagagccaaagtcctgctttatccaggcacattcatgatcaacaaaggcagttagaatagccaacatcatcttcacttcaccctggaggacctgggsggatgactcaggggtaagagaaggaaacatttcttactggagacgactgctccataattactcctaaatgaatttcaacctgaaggttaagcccagatctgacctgtctttctggagctctctggagcacataaaagcctgatgatttcttccttatgtcaatagatat

SEQ ID NO: 351023 - DNA, 581 bp, Homo sapiens
aatcgttcctgatttaggttctctggggaagggaagggtgtcttagatcagataacaacagacagggggctctaatagctgtcttggccttcaccrtgaagttgggcctatgttgtgagtagaaatatatcacttaagaatatactggagaatattcttataatacttgcctttcaagcaatgcacaaaaatcagaagccacaagggaaaaatatttttcccttcatggtaaaaaaaaattaaacaattaaaatccataatacataaagaaccccttaaagacaacaagattgaaacattcaatggcagcaggtcacctacatgcttttccatagactggtgtgttgtacgtgctctatcttctgtcaagagcatttccactctagcctacctggaaaccctctattaatatcttaaccctcttagtaatgtatcttcttgatgtgttgcctgattttctctctgtggtggatactgaggtgcatggccagattgtccttcagggtcagggggccagtctctccagctgccaaggcagctgagtcttgtacctctacagaaagaagctggtatccaatgat

SEQ ID NO: 351024 - DNA, 486 bp, Homo sapiens
aatatactggagaatattcttataatacttgcctttcaagcaatgcacaaaaatcagaagccacaagggaaaaatatttttcccttcatggtaaaaaaaaattaaacaattaaaatccataatacataaagaaccccttaaagacaacaagattgaaacattcaatggcagcaggtcacctacatgcttttccatagactggtgtgttgtacgtgctctatcttctgtcaagagcatttccactctagcctacctggaaaccctctattaatatcttaaccctcttagtaatgtatcttcttgatgygttgcctgattttctctctgtggtggatactgaggtgcatggccagattgtccttcagggtcagggggccagtctctccagctgccaaggcagctgagtcttgtacctctacagaaagaagctggtatccaatgattagttatccaatgactggtaactataggagtacaaatacctgg

SEQ ID NO: 351025 - DNA, 486 bp, Homo sapiens
aatatactggagaatattcttataatacttgcctttcaagcaatgcacaaaaatcagaagccacaagggaaaaatatttttcccttcatggtaaaaaaaaattaaacaattaaaatccataatacataaagaaccccttaaagacaacaagattgaaacattcaatggcagcaggtcacctacatgcttttccatagactggtgtgttgtacgtgctctatcttctgtcaagagcatttccactctagcctacctggaaaccctctattaatatcttaaccctcttagtaatgtatcttcttgatgtgttgcctgattttctctctgtggtggatactgaggtgcatggccagattgtccttcagggtcagggggmcagtctctccagctgccaaggcagctgagtcttgtacctctacagaaagaagctggtatccaatgattagttatccaatgactggtaactataggagtacaaatacctgg

SEQ ID NO: 351026 - DNA, 552 bp, Homo sapiens
taggtgaggatactgaggctcaaatggattaagaaacttgctcacccctgggaatggggctgaactagaactctatctcagacctgtctgctatcaaggagcatgattttatccacttgtctmtgctgcctccacaattttcaaaggattcatttattcaatcaatttaacaattttcttattgttaattagtgtcaggcactattttaggtgctggggatacaatagagaataaaataaagtccctgtttgcacggagcatacattctgaagacaggaaaacagataacgaataaactaataaatatatcatgtatcaggtactggaaagtgctatgaacaaaggtagagagtatgacagacagcactatttaaagagtagatatacaggctgggtgcggtggctcatgcctgtaatcccagcattttgggaggtcgaggcaggcagatcaggtcaggagttcgagaccagcctggccaacatggtgaaaccctgtgtctaccaaaaatacaaagattagccgggcctgtaaaatacaaaaatacaaagag

SEQ ID NO: 351027 - DNA, 591 bp, Homo sapiens
ttaataaatggtcctaggacagtgtattattcatacacatacaagtaaataaacaaaattaattctctactttacctcatttgtaaaaataaattacaaatagagtaaagaaaataacctataaaactttttgaagacaatatatttatgagattagagtaggaaaagattactaaaataggacataatgcataaatcataaagattgataaaataaaactatcaaatgcaaaatttggtacaagacaccaaagatacttgtcttagtccattttttgttactataacagaatacctgacactgggtaatttttaatgaacaaaaatttatttagctcacagtttgggagsctgggaagtccaggagcatagtgccagcatctggcaagggtcatcccatggtagaagggcagaaggtacaagtgagcacaaaggacagagagagaggcaccaggggccagactcgctttataacaacccagtctcatgataactaacctggtcccacgatgacaacattaaaccatttatgaccaaatcacctcttattaggtcctacctcccagcactgtggcattatggattttttct

SEQ ID NO: 351028 - DNA, 437 bp, Homo sapiens
ctgcctgggcccccagttctctgtgatatactttaaaatcttggtataggaagccatgcccccaccactcttgcattctgcatgcctgcagacctagcagtatgtggacattgccaagatttgccacttctaccttccagagcagtgggtcaagccacacctgtagttgtttgagccatagttggggcagccaagagcactgcccaagcaagatgcaggatgcagagacccaaggcagccatgggcagtaagcccrtgaagggaaccctaggcccatcccccagaaccattctgccgtcctagaactcttggcttgtgataggagaggaacccttgaagatttctaaaatgccttctgggtctttctaccattgtcttgatgaacagagctgtcttccttctatccatgctaatctctttagcaaaaggttgtttga

SEQ ID NO: 351029 - DNA, 549 bp, Homo sapiens
caggctggagtgcagtggcatactcatgactcaakgcagccttgatctcctgggttcaagcgatcttcccacttctcacctcaacctccacaagtagcttggaccagaggtgcattctaccatgtttggctaatttttttttattttttgcagaaatagtgtctccctgtattgcccatgccctgtattacctcaaactcttgggctcaagtgatactcccacctaggcctcccaaagtgctgggattgcaggcatgagtcactgtgcctggccaaattaatctttttcttttctgcattcttttctgtgtctcttcattcttttctgcatctctgacttccaatctggaatctggtttccagccctaaatttcctggcttcagcactggcaaattctattttcccagggaggggaaaaaaagtacctgaccaggcccaaagacttcatttattttcttcattattttatttacctctataggggctttttccaagtcaccctcaatgggatttcctttactctatcttctgtaacagccagagcacat

SEQ ID NO: 351030 - DNA, 465 bp, Homo sapiens
gcctcaaaccacttatccaaaaatgaatggtatctagaatatatgaggaattcttaaatctcaaaacagctacaatacattgaaaatatattaacagacatttcagtgaataggacatacaggtaaaaaaataagcaatgagaaagtaattaacatsagcattaggtaaaataaaggaaaagcaaagcgaaattcactacctacctattaagatgagaaaataaaatatgatgcatatcatatttaagtttttatttctcaattaaattaatacattttaaaaattagtgacagcagcaaattcaaggcaagaagggagaagctggatctctaatactttactggtggaaatgtaaaatggtacagacactctgagaaacaatttggcaatttcttatcagaataaacatgcaattaccatatgacccagaaattgcacccttaggcatctatcccagagaaata

SEQ ID NO: 351031 - DNA, 522 bp, Homo sapiens
atcatcctacatattactatattttccaaaagtattcaaatatgtctccaaattataatttataactattcaaatttacaagttaaaataataattgttaaatattgaaggtaataatattaaagacctttaaaatataaataaaatgttactttagataaactattttttcttaacatttattttaggttctggggtacatgtgcaggtttgtattacaggtaaactcatgtcatgggagtttgttgtacagattatttcatcacccaggtattgaacctagtacccaatggctgtttttttctgctcctctccttcctcccatcctccaccctcaagtaggccctgctgtttattgttcccttctttgtgttcatgagttcttatcatttagtttccatgttttcttaacatatctggcatattcttaaatattaaggatttttttccctttactttctctattattaatgttctttgtcaaagtaagaaagtcaaayttttatatttcttttaaattca

SEQ ID NO: 351032 - DNA, 594 bp, Homo sapiens
gtggttgtaagtgtatggctttatttctgttgctttttttttttccattcgtctatgtatctgtttttgtaccagtactatgctatttgggttactgtagccttatagtatagtttgaactttggtagtgtgacrtatccagctttgttatttttgcttaggacggccttggcgatttgggctcttttttgggtgcatataaatttttgaatagcttttcctaattctgtaaaaaatgatatatgtagcttgataagaatagcactgagtccacagattgctttgggcactatagcattttaacaatatttgcccagagtcaccccacagccccactgggacataagccatgcaccctctaccaccaccctataagaattctttcacccatggttccaaggcctatgtgctggtatgcttttgctggcagcccctgataaagtgctgttgccagcagactgggggtaccttggatctgactagcacagctggtgctcaaccttaaggggtcagagaacaaagcagcatgcctggtctcagttccccaaggttacagcatgtagcctaggaatgctgggctgagtcttagcactc

SEQ ID NO: 351033 - DNA, 594 bp, Homo sapiens
gtggttgtaagtgtatggctttatttctgttgctttttttttttccattcgtctatgtatctgtttttgtaccagtactatgctatttgggttactgtagccttatagtatagtttgaactttggtagtgtgacgtatccagctttgttatttttgcttaggacggccttggcgatttgggctcttttttgggtgcatataaatttttgaatagcttttcctaattctgtaaaaaatgatatatgtagcttgataagaatagcactgagtccacagattgctttgggcactatagcattttaacaatatttgcccagagtcaccccacagccccactgggacataagccatgcaccctctaccaccaccctataagaattctttcacccatggttccaaggcctaygtgctggtatgcttttgctggcagcccctgataaagtgctgttgccagcagactgggggtaccttggatctgactagcacagctggtgctcaaccttaaggggtcagagaacaaagcagcatgcctggtctcagttccccaaggttacagcatgtagcctaggaatgctgggctgagtcttagcactc

SEQ ID NO: 351034 - DNA, 594 bp, Homo sapiens
gtggttgtaagtgtatggctttatttctgttgctttttttttttccattcgtctatgtatctgtttttgtaccagtactatgctatttgggttactgtagccttatagtatagtttgaactttggtagtgtgacgtatccagctttgttatttttgcttaggacggccttggcgatttgggctcttttttgggtgcatataaatttttgaatagcttttcctaattctgtaaaaaatgatatatgtagcttgataagaatagcactgagtccacagattgctttgggcactatagcattttaacaatatttgcccagagtcaccccacagccccactgggacataagccatgcaccctctaccaccaccctataagaattctttcacccatggttccaaggcctatgygctggtatgcttttgctggcagcccctgataaagtgctgttgccagcagactgggggtaccttggatctgactagcacagctggtgctcaaccttaaggggtcagagaacaaagcagcatgcctggtctcagttccccaaggttacagcatgtagcctaggaatgctgggctgagtcttagcactc

SEQ ID NO: 351035 - DNA, 614 bp, Homo sapiens
acggccttggcgatttgggctcttttttgggtgcatataaatttttgaatagcttttcctaattctgtaaaaaatgatatatgtagcttgataagaatagcactgagtccacagattgctttgggcactatagcattttaacaatatttgcccagagtcaccccacagccccactgggacataagccatgcaccctctaccaccaccctataagaattctttcacccatggttccaaggcctatgtgctggtatgcttttgctggcagyccctgataaagtgctgttgccagcagactgggggtaccttggatctgactagcacagctggtgctcaaccttaaggggtcagagaacaaagcagcatgcctggtctcagttccccaaggttacagcatgtagcctaggaatgctgggctgagtcttagcactctgaaagtatccagaaatgaagccaattgactgaacccaacttataccacagtcaaaccctcaagggcatgaaagaacattaaaactaaaaaactaaaagccccatccaaagaacagcaacttcaaaggttaatgaaattcttgccagcacaaatgttctggcaactctaaaatccagagtgc

SEQ ID NO: 351036 - DNA, 539 bp, Homo sapiens
atggaatactgcatgaaacttgcacagaatataaatcattctcacctgcacatggaacatattatatgttcaaccattgaacataagcaattctcaataaatataaaaaattgaagttatccaaatcaaagtctgagaccacaaggcattcaaaatagaaatcaatatcaggaagctctctcaaaactacacaaatacaagaaaattaaacaacttgctcctgaataatttmaatgaacaacaaaattaaagcaaaaatttaaaaaaattaaaattaatgaaatcaaaggcacaacttaccagaatatttgggatgcagtacaagaagtgttaagaggaaagtttacaaagttaaatgccttcatcaagaagttaaaaaaatctcaagttaactatctactactgcatttaaaggaactagaaaaagaaagagaaaactttgtccaggcctgatggctcatggctcatgcctatattcccaacactttggagtaccaaagctggaggatcacttgagcccatgagttcgagaccaacct

SEQ ID NO: 351037 - DNA, 590 bp, Homo sapiens
acccactctcactacttttattcaacatagtattggaagtcctagccagggaaattaggcaggagaaacaaataaaatgcattcagataggaaaagaagaagtcaaactatctctcttagcagatgatatgtsattctatacctagaaaaccctaaaaactcagccaaaatgggcctggaactgctaaacaacttcagtagagtttcagaatacaaaatcaatgcacaacaaccagtagcatttctatacacgaataatgttcaagctgacagtcaaatcaagaatacaatctcatttacaatagtcagcaaaaaatgaaatacctaggaatacagctaaccaaggaggtgaaagatttctacaaagagaaatataaaacattgctgaaagaaatcggggataacacaaacaaatgaaaaacattccatgctcatggattggaagaatcaatattgcatgacttttatgtagtaagtataacaggttcattttgtatatttaaatgcaatactttatatttatatgtcataataaaataatttgcatagattcaggggatttatttcaattggtaaaattttcatacctt

SEQ ID NO: 351038 - DNA, 595 bp, Homo sapiens
agataggtctcagttaatttagaaagtttattttgccaaggttgaggacatgcacctgtgacacaggcttaggaagccctaatgacatgtgcccaaggtggtcagggcacagcttggttttatacatcttaggcagacatgagacatcaatcaatatatgtaaggaatatattggttcaatctagaaaggcagaacaacttgaaacaatggcagaaagacttgacatgggaagggagctgtcagatcacagataggtgagagatgatcacttgcattcttttgaattttctcattagcctttccaaaggaggcaatcagatatgcatttatctcaatgagcagaggaataattttgaatagaatggyaggcaggtttgccctaagcagttctcaccttgaattttcccttgccttagtgattttcgggtctcaagaaatttcctttcatacctccaacaagaatcagattatcctttgaagctttgaagttttgaagccaggcattaacttcctctatgttgctaggaaagtcctagatttcatcttctttcaatataaaactttttcatctacactaatatctgtttagtgtag

SEQ ID NO: 351039 - DNA, 619 bp, Homo sapiens
gtctaaaaacaaaagagaggcagaacaaatacttctgtgccttcaaggaattttaatccattaagagagctaaaatatactccaatttaattgctagagaaaacaagttgaaatgtagaatttatgttttaactgagtacagagaactgttgagtggacattaaggtaatccaaggaacaaattatagtggactcctctatgacatgaatttacacctgtatattaaagaaaagagggacccaaatgatctgattgagaaataaaaatatttcaatactgagaattttatatgttaagactyaaagtgaaatacacaatttcataaagttggtaaaaggaaggtaaccccctaatttgacattacaggggagaatgggaaacagaaaatattgaattttaaaaataaagttgatggatttatgttcatacttacatatcataaatcttagtcatcttatacaaatacaggcataacttataagttatgcctgtatttgtatttgcatttacagtattccccttttatggtcaatcaagatctaaaagtattcaatggaaaattccagaaataaacaattcatgattttacattgtgcaacattgtaagtagagtgagga

SEQ ID NO: 351040 - DNA, 619 bp, Homo sapiens
gtctaaaaacaaaagagaggcagaacaaatacttctgtgccttcaaggaattttaatccattaagagagctaaaatatactccaatttaattgctagagaaaacaagttgaaatgtagaatttatgttttaactgagtacagagaactgttgagtggacattaaggtaatccaaggaacaaattatagtggactcctctatgacatgaatttacacctgtatattaaagaaaagagggacccaaatgatctgattgagaaataaaaatatttcaatactgagaattttatatgttaagactcaaagtgaaatacacaatttcataaagttggtaaaaggaaggtaaccccctaatttgacattacaggggagaatgggaaacagaaaatattgaattttaaaaataaagttgatggatttatgttcatacttacatatcataaatcttagtcatcttatacaaatacaggcataacttataagttatgcctgtatttgtatttgcatttacagtattccccttttatggtcaatcaagatctaaaagtattcaatggaaaattccagaaatraacaattcatgattttacattgtgcaacattgtaagtagagtgagga

SEQ ID NO: 351041 - DNA, 556 bp, Homo sapiens
tgcagtcctgctctatcccatttgggatgtgaatcattccttcatccaggtagtccacactgtataaaataccccttagacattgatgtatttactcctgacatgcagccatatgcatcttcatggcttgataatttagaagcmaacgatcccctatacttgcctaatgctaaatcacaacgcctaccatcattcacctcacttcatctcatcacattgtcaccttattctcacatcatcacaagaagtagaaagatgattacagtaaaatatgtcaagagaggagagaaatatcatattacataactttttatggtatatatttataattgttctatgtcctattttattattagttgttaatctcatgttgtctaatttataaattaaactttatcataggtatgtacgtataggaaaaaatatatatatagggttctgaactatctgaagtattagagagactgctggtttggaaacctattgctccccataccccctcagataaggatgaactactgtagacttacctggatttcagctttatgagcactag

SEQ ID NO: 351042 - DNA, 556 bp, Homo sapiens
tgcagtcctgctctatcccatttgggatgtgaatcattccttcatccaggtagtccacactgtataaaataccccttagacattgatgtatttactcctgacatgcagccatatgcatcttcatggcttgataatttagaagcaaacgatcccctatacttgcctaatgctaaatcacaacgcctaccatcattcacctcacttcatctcatcacattgtcaccttattctcacatcatcacaagaagtagaaagatgattacagtaaaatatgtcaagagaggagagaaatatcatattacataactttttatggtatatatttataattgttctatgtcctattttattattagttgttaatctcatgttgtctaatttataaattaaactttatcataggtatgtacgtataggaaaaaatatatatatagggttctgaactatctgaagtattagagagactgctggtttggaaacctrttgctccccataccccctcagataaggatgaactactgtagacttacctggatttcagctttatgagcactag

SEQ ID NO: 351043 - DNA, 613 bp, Homo sapiens
gttccgatattcagtgatgaatcaaacgaaaagttacaagaaaggacagggaagataggtttacagcatattacacaggtttaagtgagaggatagtggctcaaactagtatcatgtcactctatatgaaaaacagacaaatttgaaaaataattcatggatggaataaagaaataaaaggtgattgtgtggagaaagagagatagcagtcactcccaaatatttgttatgagtttccgacagaagactactctttgttgagatttcaactaagttttccaggtatgtgtatcaatgacagaagatcagcagattaaattaatgggtgtcccatgaattaatttaaatattttgtttttgtatttccattgaggcccaagagtctgayagtaagcaaataattgcatatataagaatagaatttattaatagaaaagagaaaggataggagatctaaaattaagtattgttgaagcaaataagtgaatgcaagttctagatgatagagaaatttaaagcagaattttttatttaataatttttggtcctaaatagtaagcctgttaaactgctcaaattttcaaattttctttgacaaattaatcaagaaata

SEQ ID NO: 351044 - DNA, 580 bp, Homo sapiens
ctgtggaattggttatttaaaaagtgttcacattgtttttacaaagccattttttttctgtatgctcttttgacaaaaaaggcaaagaaagtaatttaaaacctttaaaatgatgcatctattgcaatataattggtggcatcatactgttaagagcaacatcaaatctcatttcaggtcaccttttcatttagttcaaaatgaccttacagaatggctaccatactgtgcagagtcacatacagtaatatagcttttaaaatgctgtttatgtactatgttttatttttatttgatggaatgtcaattggatagcattgagtttacaaaaaaatgtgattgctaccaaaaatattcatcagaattcatctttacatattcatgagaaaaagagtatgttataacttgtgttttgggtaatttaccattcaatatatttcttgtgtctcatcatctactttaaaaaacaatgtatttataaatgtcatgccatttcttctttccaaacatgactcttttaagaaaatggyatacagttatttaaatccagcaaccttttagagtcgtacttagtttaatc

SEQ ID NO: 351045 - DNA, 600 bp, Homo sapiens
taacaccctaatgttattccttaagaaaactgactttggaagcagcaataagtttataaaatgtaacattcaagttgtacagacatgtttcctcttatttgttttagagtcctagtgaatagatctgtaattatgctaacaaaaaaagtataaaatgatgctttgagaacaaaaatactaattgagaatactaattgaggcatttattattatttggcttaaaatatgtttcctgtttggcacctgattgcacaaggaagagtaagatgaaagggaagcaataatatgttttctaaatggagggyctctgataatactttttcaaatttgacttgaggaatattctagaagtcacagacaatattctctaaggtcagatatgttacttttgctgggagattctaactgaggaaacacgttttcttctggctgaggtgatgatgtcaaattaaatacttcattttatgagagaagcaaatggagtagagactatagaagtggcacttagccagccacatcagtgaagcagtataatagatgagagggccaacttgttctcagatcacatatgtcaaggggtattttcataatgtccactgt

SEQ ID NO: 351046 - DNA, 600 bp, Homo sapiens
taacaccctaatgttattccttaagaaaactgactttggaagcagcaataagtttataaaatgtaacattcaagttgtacagacatgtttcctcttatttgttttagagtcctagtgaatagatctgtaattatgctaacaaaaaaagtataaaatgatgctttgagaacaaaaatactaattgagaatactaattgaggcatttattattatttggcttaaaatatgtttcctgtttggcacctgattgcacaaggaagagtaagatgaaagggaagcaataatatgttttctaaatggagggtctctgataatactttttcaaatttgacttgaggaatattstagaagtcacagacaatattctctaaggtcagatatgttacttttgctgggagattctaactgaggaaacacgttttcttctggctgaggtgatgatgtcaaattaaatacttcattttatgagagaagcaaatggagtagagactatagaagtggcacttagccagccacatcagtgaagcagtataatagatgagagggccaacttgttctcagatcacatatgtcaaggggtattttcataatgtccactgt

SEQ ID NO: 351047 - DNA, 572 bp, Homo sapiens
ctcaccaaaacttggtttactaatactctactactctgttcttctgtttttctttacctggaaacatggtgatacattggtaattttcacagattctagaaggttaaggtaccttcacctccactctggccttatttcctgttgtagtaattttgaccattcatctgtgtttgagggccgccgtctaatatctgccattctagaatyttgttatacttccttataccaggaaaacagttccatgacagcacttcctggagtacatcattgtctaccgaggacagcaacctttaactgttcaggaaagtaaacgtaaccttcaccagaacaattctcatctacttgataaaacgatggtcttttgtgctctccagggaacatatacaagtatagtgggatctctggtcttacaatcaatctggtctaacattcccatcacagttttatatgtgtcctccctccttctatgattgtaggtgatggtggtgatgggagtggtggtagttgtttatactcctaaagccaatgcctaattagatgtccagctagggaatgagacggtattgctctct

SEQ ID NO: 351048 - DNA, 572 bp, Homo sapiens
ctcaccaaaacttggtttactaatactctactactctgttcttctgtttttctttacctggaaacatggtgatacattggtaattttcacagattctagaaggttaaggtaccttcacctccactctggccttatttcctgttgtagtaattttgaccattcatctgtgtttgagggccgccgtctaatatctgccattctagaatcttgttatacttccttataccaggaaaacagttccatgacagcacttcctggagtacatcatygtctaccgaggacagcaacctttaactgttcaggaaagtaaacgtaaccttcaccagaacaattctcatctacttgataaaacgatggtcttttgtgctctccagggaacatatacaagtatagtgggatctctggtcttacaatcaatctggtctaacattcccatcacagttttatatgtgtcctccctccttctatgattgtaggtgatggtggtgatgggagtggtggtagttgtttatactcctaaagccaatgcctaattagatgtccagctagggaatgagacggtattgctctct

SEQ ID NO: 351049 - DNA, 543 bp, Homo sapiens
atcattaaaactgtttttcacttttttttcgaatttggatcaaactatatgttttacatatattcttttgttttggacaaaagacagttgaaaaatatggtccaatgttatatatgcacagtactcatttctttttgcttaaatgacaatgatctcaatgaagaaacaacacaaacaaaaagcaaactgtttatcgtgctataagagacagtgtagaataatacaatggttgtaggttcttgaaacagatgtctaagtacaaatctcagctgcatcacttactaggggtgactttgagtcatgcagctaacttttctatgcctcaatgacctccaaagtaaagcaaagataatagtatccacctcaaaagaatgaagttaagagtaaacatgttcatttctgcgaagttagttgcaaaagttttatataaactgaacacacaataaatgttaacttttattaccttattaatattaagcaracttcttattcactcatttctacagtccacaaatataaattaaacttcaataatattaagca

SEQ ID NO: 351050 - DNA, 509 bp, Homo sapiens
tgtttacttgtttaatatttgtgtactgttttcatagttcactgctgtttcaccaacacttgcaacagtgtttgggatatattagctactctttaaataattaataacctgagtgtacaaaaactatcacagacgctttagtggcacatgggtagaagctaatccagtgatattatctgaaaattaaacatacatagacatayctttatttaagtatttgtgtgacatattttaaatatgaattagaaagtaactgtagcagaacatgtgcttgctctgatcttactctcttgtaggactgatcacataattagttttgggcttgctaaacattttgccattctttctgcttacattgtgaattccttaagctatggactagggaagatatacttatacactcacatacacacatatgtatttatatctgtggggcatatatgttataatcaaatacattaatattgtaatcaaatattaactgtagaacactggggttctgagacata

SEQ ID NO: 351051 - DNA, 509 bp, Homo sapiens
tgtttacttgtttaatatttgtgtactgttttcatagttcactgctgtttcaccaacacttgcaacagtgtttgggatatattagctactctttaaataattaataacctgagtgtacaaaaactatcacagacgctttagtggcacatgggtagaagctaatccagtgatattatctgaaaattaaacatacatagacatatctttatttaagtatttgtgtgacatattttaaatatgaattagaaagtaactgtagcagaayatgtgcttgctctgatcttactctcttgtaggactgatcacataattagttttgggcttgctaaacattttgccattctttctgcttacattgtgaattccttaagctatggactagggaagatatacttatacactcacatacacacatatgtatttatatctgtggggcatatatgttataatcaaatacattaatattgtaatcaaatattaactgtagaacactggggttctgagacata

SEQ ID NO: 351052 - DNA, 613 bp, Homo sapiens
tgaaacagttttttcctggcttctcctcactaaccaccatgatcatccctggaaatggtacaagagataatcaaaagaggactctgaaatgtggtaagaaaaaggcaagctgatttgggatctcaggactggacaaaaagcacagagacagggcatcttgggtcttacttctcaaagaaggcaatttcgatcctacattgcaacaaaatttgtttagaaacacatgtrtttagtctctactcccagtccctgacacagagcttctaaatcccttggaattcaaggtgataggagtgtcttgtttaatggggtttctcttggtgagcttctggacagtttttcaatggaggctggtcagtagaatgaccaagccatgattagaagcttggcactttcagttacccccagtccctatccagtgaggctgaagattgaattgattatcaatagtgcatatatgatgaagcctgcatgaagagcctaaactctggtgttctgacaccttccagattggtgaacacattcatgtgaagggagggtggtgaaacccaacaccaagagacagaatctcctccacttgggatccttctggaccttgccctacgtacctcct

SEQ ID NO: 351053 - DNA, 613 bp, Homo sapiens
tgaaacagttttttcctggcttctcctcactaaccaccatgatcatccctggaaatggtacaagagataatcaaaagaggactctgaaatgtggtaagaaaaaggcaagctgatttgggatctcaggactggacaaaaagcacagagacagggcatcttgggtcttacttctcaaagaaggcaatttcgatcctacattgcaacaaaatttgtttagaaacacatgtgtttagtctctactcccagtmcctgacacagagcttctaaatcccttggaattcaaggtgataggagtgtcttgtttaatggggtttctcttggtgagcttctggacagtttttcaatggaggctggtcagtagaatgaccaagccatgattagaagcttggcactttcagttacccccagtccctatccagtgaggctgaagattgaattgattatcaatagtgcatatatgatgaagcctgcatgaagagcctaaactctggtgttctgacaccttccagattggtgaacacattcatgtgaagggagggtggtgaaacccaacaccaagagacagaatctcctccacttgggatccttctggaccttgccctacgtacctcct

SEQ ID NO: 351054 - DNA, 613 bp, Homo sapiens
tgaaacagttttttcctggcttctcctcactaaccaccatgatcatccctggaaatggtacaagagataatcaaaagaggactctgaaatgtggtaagaaaaaggcaagctgatttgggatctcaggactggacaaaaagcacagagacagggcatcttgggtcttacttctcaaagaaggcaatttcgatcctacattgcaacaaaatttgtttagaaacacatgtgtttagtctctactcccagtccctgacacagagcttctaaatcccttggaattcaaggtgataggagtgtcttgtttaatggggtttctcttggtgagcttctggacagtttttcaatggaggctggtcagtagaatgaccaagccatgattagaagcttggcactttcagttacccccagtccctatccagtgaggctgaagattgaattgattatcaatagtgcatatatgatgaagcctgcatgaagagcctaaactctggtgttctgacaccttccagattggtgaacacattcatgtgaagggagggtggtgaaacccaacaccaagagacagaatctcctscacttgggatccttctggaccttgccctacgtacctcct

SEQ ID NO: 351055 - DNA, 562 bp, Homo sapiens
tacaaatgtctcaatcacttttatgtttccttgttttgatataaatttttgagaaaaatttaaaatcaatgggtgaataaatgttagtttacattttcattcatgcttcaaacatggtgaggcagaaatgcaaggttttttcttcttcttacatccgttaaaacttaaaagtactcaggattttgtattttttaaaacccttcacgtaactctttaggtgaccagtatttgagagctactagtataaagaattctacagtagaagtcaaaaggtctggtttctagttctggtcccatagtgatttattaagtggccctgtgtaattcatttccctctagaatttatttcytaagcatgcagtagatgccagacccacctagcatgtgttatggggttaatagaatgagatatttgaaaggaaaatactctgtaaaggatctagtattacatatttacaagtatgtgtgtacatgtataagtatgtatatatatatatatatatatatatatatatatcagtcttcattgtcttaatcttgtgaccaatgtaaactatttaag

SEQ ID NO: 351056 - DNA, 611 bp, Homo sapiens
ttagttattcttttctaacaccaatatgctagagaagtccctcatagttgagcttcttctatattctttgacaacgctcctctccttttactaaacatggacattgctcatctcttggagttttacaaattttcattttaaatttcagggtcattaaaccttctccatcagatctaatgttaasggaaaggctgcagtcatactcttgacttttagttctcaagggtcagtgttggggcaaaatatagatttatcattttcctctgtgttccagaaactgatgtacattttgacctgcaaacttggtccgggtatttccagcagacaccaccctcacaatgtcactctcagatcagtatcagatacatggctgtaactctgaatttagagtctaaaaatgatccagttaaaaatttccatgcatgtctcattttgttaatagtacaagaatagtaatattatttagtgaaggagaattagaataacagttacttgaactttaggattctgctaaacttgatttgaatctcttctgggtcatttgctactatgtaaccttggagaataactgaaacttgagtttcaattatttcttacattaaaaataaaat

SEQ ID NO: 351057 - DNA, 580 bp, Homo sapiens
accctcttgtcttagtcagtgtaattgtccattgatcagaattccacaagggaagatataccacgcattggtaggaggaaagcagttttctttctaaaaataaatgtttcctattaatttttttccttcttattacatttcctcaatcaatattcaattaccttataataaattgaaataattctgtgataatttgttccattgaagtgatgagacatgtatgtagggaaatcacaaatcattttatctgtgtgcagcaaccaattatttaatgatttggggtstactggcgtacaacaataaacataacaagatatgagctgaagtcagtaaatgtcaggtgcaggtagaggaaacaacatgtcaacttaattctgcttgctctactatttcccaggagaatgctcaagcagatttataccacaactttactacactgggttgctttacaaaagaccatttctataccaaaacaaaaaagttacactcaccttgggaaaacataaagctccatctccagaaacaacttccagctggtctttcctaaccatgtctcagtgattagaccaaagtcatgagc

SEQ ID NO: 351058 - DNA, 545 bp, Homo sapiens
caggagttatgaggaatataaaggaaacagaagtcatggtctcattttagggtacttacaatatctacaaaagatactatctttttcaacagtcgcaaaatacaaataggaaagaaaaaaccgtctaaatcttatttgaggaaatgacaaaatgcaaggtacagaaaataagtgtaaaaggagaattggtgctccttagttctaaaacttcagtggttgaagtccatttttatgtcctgaaacatcaataaaaacatctgttatataatctactagctatcttcactcaaaattacttgcttatgtaaatatttagtttataacttttttagtaaaaacatttaaatgttgaataatttaagaaaaacattttagtctatatttaaaaaygaaaaatttttttttctctacttcatagatgtatgcaatttacaagagtgaaaggagaaacataggcagagttaaatgaattcctcttgaatgtgcgaaatttatagttttaagactttctgctggattttcacttttcactataaggagcaagt

SEQ ID NO: 351059 - DNA, 599 bp, Homo sapiens
gctcttatcatgggagtggctgacctgcaatgaaaggtgcatgcatagcctctccaggtgtttgctgttaaggtgagggtattgattggaaaagaatgggaccctgcaacttgaaatggggacatgtgggaagaccctgatgaagttggggacactgagcttgtaaactccaatgaaccttttttgccagaaggagcagcttccccatccctggtagtggcaacatcccctcccccacccatgctgccatcagactttccacctttrtctgaggagaaaaaccctgggctgcctgaggcaacagtgatggcctcccctgaggcagttgccaggtaagataatgttgattctcctcagaagccacccccaatatccctgtttgcttctagatttataactagattgaagtcccagcaggccctagaggtgaggttgagagtatgacccatgaggaggtgcactacacttgaaaagaactgctaaagttttctaatttatataaacaaaaatctgaagaacaggcatggaaatggatattaagggtgtaggataatggtggaaggaacatagagttgggtcaggctgaatttattgatttg

SEQ ID NO: 351060 - DNA, 569 bp, Homo sapiens
gaatataagcacaaggaaggaatttaaaaaagccaaacactctactggtttatctcaattacagtctttagaaaaaataaagtgattcctaaagaaaaatttgacatagtggccagttgatagttctatggctcttaataatttatatacyaaatttcagctttcaaattaaatgaaataaattgattttaaaattcagtatagtttgaatcaagatgaactgataaaaaaaaagcaaaataactctcaatgttctcaaaattgctttccactaatatgaaaataaaagtgaaattggacattggataaacaaatatgaatgtataacatttcactaccaaacaagcattctccttttataggtgaaagcaaacagctgcctatttacattgtgatatgcactgatgtgattgcaagggcttctcacctggatacatagcagacatacctggcccatgggaatttccaagaaccaggtttcctctgtcatgtttgtcatgttttttttttcctagtccaaagttaacaacatcatatttttatacaaaggcagtggttcaatgagttag

SEQ ID NO: 351061 - DNA, 675 bp, Homo sapiens
tctagttaaatgacattaaacaatgcaggaactatctggagctatgttccttttgggtgctgccatcaataaaactaattggcagttctaaagcttttcagtaatgtttttctttataatgatacccttagagtgatataagagtctcaattgttttcatttcttctcaagtaaatatgcgtggactgcctgttatgcaaaggcatgatattgatgttatcacaaaaagactaaattactttaaaaattaatagttaaataaatcttataacaatttgcaaaaaaggtagccaaaaataggcaggtatcttcaatcttaatattaaataaataaaawttttttaaaataagttaacatttttcaaacatccccagcgattaaacaaaatgccatgttgaggatgtgattgctataattggtccaactttcttgaagaaccatttggttttatgttttaaagtactaaaatgtgtgctgtccttaatctacaaatcttatctctaaaaatatttcctaaggaaatattaacaagtatgtaaacatttatttataagtattccattaaagttttatttatagtacaaaaaataaacatggctatctatatataaataatgtttcattcaaatagtaaagtaatgttgacattaaaataacaatctacaatatatata

SEQ ID NO: 351062 - DNA, 465 bp, Homo sapiens
caatcatcggtactgcagcractctctgtcattgttactaagggacatgataagaaaacacaaatgcagtctggtaatcccagaaatgagttcttggctgatcagtagtaaaccatcttgtttactagtaaaatgaatgcatacattctgtgtgtgatctgtgtgacctgtgaagcagagcttatcatttcttcctgaagcatcattccatccccgtccactgagtggagactcatgatcaacattttctcactaggagtcatattttcccaaacaggatccatggaaaattgacacataaatgccaaacacacattgcaatatcatggcattctatgtccaaggtcatgtccctgtgaactgtaatctatatagattattaacccctaaatatgtaaattttatgaggagagaatccacatcttattcaccacttacacctagcattacatagaaggaacataa

SEQ ID NO: 351063 - DNA, 660 bp, Homo sapiens
ttcgcttttccaagtttgaattgcttttctttttcttcctcaagaacatagtgtgtttcataaacgttgtgatatggtttggctctgtccccacccaaatctcatcttgaattcctatatgttgtgggagggacccaatgggaggtaactggatgtgggggccagtctttcccatggtgttctcttggtggtgggtgggtctcattagatatgatggtatcataagggggagtttccctgcacaaactcttttttctttgcctgctgccatccatgtaagatgtgacttgcccctccttgccttctgccattattgtgaggcttctccagccatgtgaaacagtaaatccatattaaacctctttcttttgcaaactgcccagtcttaggtatgtctttataagcagcatgaatattgactaatatatgtcacatgtgtacttgaaaaaatgtatgaatyatattgttattggatgcaatattcttcataagtccattaggtcaagtttcaaatatttttgtttatatattgtatattctttctgatattttttcctacttgggcagttaactaatgagtgagatatattaaagtctaggtgtctgctgatttgtctattcctcttttagttctgtcaaattttgctatatatggtttta

SEQ ID NO: 351064 - DNA, 617 bp, Homo sapiens
atcatctggatgctcaagattagaaaacactaaatcttactagaaaaatattcctaggaggtggatagaaagaaatgttcccaatagaagcagcactcatattaataaaggaaatggcaatatcacattgcatctatgtaaaaaaaaagacaycgcacatgagtattcagacattggcttcagctgtggctgccatctggtaggtcacagtgtgggaaaaaatgagagctgtgacacgggggaataagtcatgggcttgggaagtgtaaaatcagaattcagttattgactatggttgctgatttgctatatgaacttgaacatgttgaattctttagttcctcatctaagaatgggggctaataaaatcttcagtaagacaagcaatgatggatgaatgtctgtgaatactgaaagctttttggacatattactatttcaaggcaaattcagacactgtttttctccagtctcagtttttccctgcattcaaatatggttaaacttcctgttattttgcagttttatgaagtctgtgtattatataaaattgcatttcccaagctgctgagtatagtgattattcttgccttccatgagaaattctgcagataaca

SEQ ID NO: 351065 - DNA, 459 bp, Homo sapiens
agctctacttgtgaagaggtgttaattaacagwtttctgagtagagaactggcatgcagagctttgatcacaacagatcctgagtaggactgtgaattaaagtttcaggttgtaagcacttaaacaaaaaagcctaccttttttgcaactgacattttgccacctagggccatgcttcagtggccacttacaaataactattgactaatgtattatggggcttccagttgactctaaaactatatcctataaaatcaatatctgtgatgcatagacaatgccctgagtatattttttgcaacctcagagcagatgatactgcccatatttatgtaaaaatttatttacaatattaacattgataaaattcattgataagatagtgattcatgctgctgccagcatcccagggactaaagatattgtttgtttttcatagaaaagaaaatcaggaaaatt

SEQ ID NO: 351066 - DNA, 536 bp, Homo sapiens
  misc_feature (1)...(536): n = A,T,C or G
tcggctgctggacagccaaactccaggnggaagatcccactccatcccccttctagctcccatgcatcccactgagagccacctccaccactcaataaagccccgacattcaccacccttcaagtctgtgtgcgactcgatactcctggggacactggacaagagctcatgacacagagaatgtcacactggcccattacagaaaagcagagggggcactgagctggttaacacttaagcagtctgtggacagcagagctaaaagagcactgtaacgctggggtcacaggcacccaccattagacactaccatggggccagaccccaaagcgcttgccctggctcccgcacctgctcatctgcatgytcccgctcctgaaaggggtttgagctcacagtggtggtgtagagagccacacccctgtcacaggccctgcaaggggagccagggaactctccagtttcagtaacaacacccattaatgctatatattaggtgttatatatcagtttttaccccagaagcagatctctaa

SEQ ID NO: 351067 - DNA, 522 bp, Homo sapiens
attcattcattcattcaataagtgctatatagagtgtatgatgatgatgacagataaacacaaagattaagacaaactgtctgatattagagaaayagggcaggcacacatgaattagttatattacatgaggcaatatctaatcactgccagaatgaagaactcagagaattccatgagatttttggatacaagaaaagattaagttgttacagtaagacctcatggagaatacaagactctagcatgatgttgggaaaatgagaatataaaaaggtgatggtggtgatggggtgtggatggggttattccaggtggataaaagcctggaaaagtatatttgagaatgtccagagcaacaacctgttttcttagatgagaaaatcaccacagtggtttaataatttgcaggaggtacctgaagtataaagagtctcagaataggaatgaggagacctggattctattctgtcatagccaagtgacatttttcaagctctccatttttttttttaaggcagg

SEQ ID NO: 351068 - DNA, 583 bp, Homo sapiens
ccctcttgggagaaaaggagtgatggaagcatgctctggcttctatttttacatggaaaaagttaagcatggatttggtctcagttggagtccagcttcagcctttagctttgggcctgacccagggacagtcctggaatctgaaagtccttccttatcagtcaaccattgtctgggggctgctgtgacattccaagtaagatggctttcattggctgaamgcaattctccactatagagggcagctgtgagctattagcagccaatacttataggagctaggcaggatgctgactgtctaagtaaagggcccccgggtgggggcactgacagcttttaatgtataatgtaaatgtagactactagatgcatttttctctagtcactctaattagtattaaaagcatttactaattaccttcataatggtgacttttaaaatcatgtattaatgcttctcaaatattttcattaatgtatttctcatgtcataaggaaaggagtgaatattgtgaaacagggagactgctctctgaatgtctagcatttctttggcatttttttaatttgtaaaattcaaata

SEQ ID NO: 351069 - DNA, 554 bp, Homo sapiens
tgcacataccttttagaaacctcttcattgtgtaagctgcaatttgacttcttaaaagttcaaacattgtacttgttttgtcttaagtggatagggaaaactgaaaaacttacagcctcagaatactgagaaacttcatactaggtttcacagaaagatttcagtttagatatttttgttgaggtaataattcataatattggaaaagtaatatagatactgcttttgccctccattgagatatttgacagtttctcactattatgaatatgatgcgaaaatgtaggctaggtggtaaaattaatccatactagctggttaaaggccatccaaaggacgcctattaatggatttctgttaacttggagtttggaggcaaaggttcttttcttggccctgtcccatttgacatttttgtcaatagtttgcattagaattaagaaaggatatatttgccaatatgcagatggcatgakgtagaaaagaggcgcttttatgtataacgactaataaaatcagattcaaaaatatcatagcatgttagatgtacaggc

SEQ ID NO: 351070 - DNA, 568 bp, Homo sapiens
acaaccacgttcattcatttctgtattgtctgtggcagagattgaccatcacgatagagaccatatgagttgaaaagcctaaaacatttattacctggctctgaacagaaaatacttgctgacttctggtctggaacagcactgtgtatatacctcaggtttaatactggaagtctccattagtccttcttcagaggtgactagagtgcacagtcataatgacagggccccaaggacttctctaactcacactccctgtccagtcaccttcactgcaacaaccatcttaccaaggggtgctgtcactgctcctgtccactttctggccgtcagatgcctygagagttcttcttgcccttgataaggaataaacttgtcagttgcatgtggcagtttttcaactgatttgggagatgatgcagattttgctatttcttaactttcaattgttgtgttttctggttctcagtagggagacatgaagaaaattgctgattcccttcagttaaataacagtttagattaaaccagcaagaacttttgctctttaataaaatgcaaagttacc

SEQ ID NO: 351071 - DNA, 568 bp, Homo sapiens
acaaccacgttcattcatttctgtattgtctgtggcagagattgaccatcacgatagagaccatatgagttgaaaagcctaaaacatttattacctggctctgaacagaaaatacttgctgacttctggtctggaacagcactgtgtatatacctcaggtttaatactggaagtctccattagtccttcttcagaggtgactagagtgcacagtcataatgacagggccccaaggacttctctaactcacactccctgtccagtcaccttcactgcaacaaccatcttaccaaggggtgctgtcactgctcctgtccactttctggccgtcagatgcctcgagagttcttcttgcccttgataaggaataaacttgtcagttgcatgtggcagtttttcaactgatttgggagatgatgcagattttgctatttcttaactttcaattgttgtgttttctggttctcagtagggagacatgaagaaaattgctgaktcccttcagttaaataacagtttagattaaaccagcaagaacttttgctctttaataaaatgcaaagttacc

SEQ ID NO: 351072 - DNA, 607 bp, Homo sapiens
tcagcagcctgctctgactgcccttccattcaaacaaccctcagaactgacatccatccacgatcagcattaggaatcttccagtataaagatggccagaacaccacaaatcaccaaatgtttgaggaaaagtaataccacaaaagtattaaactgaacaaactgaacaacataaaagaaatgtagtcgataggaataaacagatttccaaatgatatcattagagagactgagaatctactgcatccacaaaaatacatcagctatagacattgtaaattcgtttgatttccataataaatgcttattagcagacaagagcagcatgaatgtagctgagaagagaattcatatgttataagaatcagtcaaggaagtctcagaatacagagttaaagctaacaaataatcaacaagaagggaygcaaaatatgaggaaggcttaattgactttgtggctagattagaaaatttcagtattcacttaagggtgatccagaaggcttgaactaggctggatatgaaaggaggaaataattcttaagacttaaataagacctaagtatttgatttaaaatgacgtgctaagagccacacaacataaata

SEQ ID NO: 351073 - DNA, 429 bp, Homo sapiens
tgaactgtgaatagtgacagaggtcaccaagctattgcaatgtttcatgcaatgatagcatgaaataattctgtggtgcagaacataatgaagacgagggcctgtatctaagatatattttgaggtaaaaarctacaatgacttgaggaccagtccgattccagaagttttcatttcctttggacatttttatttctttctttattctatgaaagacattcacgaatccctcagcccactgcaaatgacagcagagagaacataggtggacaaccgaacagaatgtaataagtgtcagcaaagactcagagatccaaaaccactggaaccactcaattttatttaagtaatagaaaaagattgaagttctgagactgaagttctttctttatcctatgtcatatcatattttcattagcagacatatct

SEQ ID NO: 351074 - DNA, 591 bp, Homo sapiens
cttgtaacaatttatgataaaagaagttgacaaatttcaaaactaaaaaatatttagaaatagctaaatatggctgggtgtggtggctcacgcctgtaatcccaacactttgggaggccaaggcaggtggatcacctgaggtcaggctttcaagaccagcctggccaacatggtaaaattcccatctctactaaaaatacaaaagttagctgggcgtggtggtgcatgcctgtaatcccagctactcaggaggctgaggcaggagaatcacttgaacctgggaggtggatgtttcagtgagccgagatcacagctttgcactccagcctaaacgacagagcaagattctgtcaaacaaaagaaaaaaagaaaagaaagaaggaactaaatataaccacattgtacatcamaactcatgggaaaatacaaaaacaatgctttgaaagaaacatatagccttaaatatttatactagaaaagaaaaatagctgaaaaaataataaaccaaattataaaaggaacacaaaataaacccaaaattagaaggaataaaaggagcggatcaatgaactagaaagacttgcataccaa

SEQ ID NO: 351075 - DNA, 584 bp, Homo sapiens
atgtgcaaatcagtgaaataaaatgtagtttttgacaatataggtagaattattttttggggttttggggaacagtyggtgtttggttacatggataagttcttagtggtgatttctgagattttgaaatctctagttttgagcattttaaaggaagctgctacacatttttatcattcttatatattttattcaatttgactcaatcaatacttatcaagcatctaccacgttccaggacttatagtaaaaatgaagaggtcaattatgaacaagacagataaagtcctggaagacctaggcattaggattaagcaggacattgaactgaaatggaagtttcaaatattttggaaaagatgaaattcaatacaccaaggcattgagttaaaatggaatttaaagctgcctaaagatgaggaagacccatttaatttattcttaaactgacacaaaagaatgaataggaataggatgaggatgaagtaatagcatcccatgcaaatatcccctaaacacaaaaagtcccagaactatataataaatttcttatatagtgcttgaaaactgaaagaagtttagaa

SEQ ID NO: 351076 - DNA, 584 bp, Homo sapiens
atgtgcaaatcagtgaaataaaatgtagtttttgacaatataggtagaattattttttggggttttggggaacagtcggtgtttggttacatggataagttcttagtggtgatttctgagattttgaaatctctagttttgagcattttaaaggaagctgctacacatttttatcattcttatatattttattcaatttgactcaatcaatacttatcaagcatctaccacgttccaggacttatagtaaaaatgaagaggtcaattatgaacaagacagataaagtcctggaagacctaggcattaggattaagcaggacattgaactgaaatggaagtttcaaatattttrgaaaagatgaaattcaatacaccaaggcattgagttaaaatggaatttaaagctgcctaaagatgaggaagacccatttaatttattcttaaactgacacaaaagaatgaataggaataggatgaggatgaagtaatagcatcccatgcaaatatcccctaaacacaaaaagtcccagaactatataataaatttcttatatagtgcttgaaaactgaaagaagtttagaa

SEQ ID NO: 351077 - DNA, 584 bp, Homo sapiens
atgtgcaaatcagtgaaataaaatgtagtttttgacaatataggtagaattattttttggggttttggggaacagtcggtgtttggttacatggataagttcttagtggtgatttctgagattttgaaatctctagttttgagcattttaaaggaagctgctacacatttttatcattcttatatattttattcaatttgactcaatcaatacttatcaagcatctaccacgttccaggacttatagtaaaaatgaagaggtcaattatgaacaagacagataaagtcctggaagacctaggcattaggattaagcaggacattgaactgaaatggaagtttcaaatattttggaaaagatgaaattcaatayaccaaggcattgagttaaaatggaatttaaagctgcctaaagatgaggaagacccatttaatttattcttaaactgacacaaaagaatgaataggaataggatgaggatgaagtaatagcatcccatgcaaatatcccctaaacacaaaaagtcccagaactatataataaatttcttatatagtgcttgaaaactgaaagaagtttagaa

SEQ ID NO: 351078 - DNA, 568 bp, Homo sapiens
aacatattccaaatattttgtctacaatgtacttacaatgttaagattatttacaacttcatgttcttatgtaagattttgatattttataggtaaaaaatgaaatatatgtgttcatgtatgaattaaggtattatttctacatacaaaaaaatttgcagaactaagaaaattactctgggaaaccaagaggagaaacacacttctatttgcattargtggatgtctcagacacagccaaacctgtatctaatcagaataggcagttcctgaaattataactttgaggttctaaaaagcttgaacattttaaaagaatttctgttttacatgactgttgtacattttagcatgagtgattcctgtttagcttttaagcatgccaattccatgagtgcagttaactcatagttctggactgcctatttcagaaccatttacaattgctttctcatcttctactgtgaaaactccacagatagggcttaaatactcaggttccacacacacttctggctagcagtgacctgaccatgtgatccagctctacactcaaagattgagtagc

SEQ ID NO: 351079 - DNA, 612 bp, Homo sapiens
tttagaaaagatgttcagtgagccaatctactcagtcatatatacagcatctgcagcagagggtaagaaatgatacaataaggatcttatggctgtagaaataaatagaaagctggagtgtccaaggtaatatctctctgataaatatatgtatctaaatgactttgtacctatacctgagagttataaccagaccactaccctattgcttccatttgaacctcattttgtttttattctgatcaatatccaagaatttcacatgtgagaatttttgttttaactctatattggaccaataccattctcatttaaaatgagatcagctcaagaggatgacttcaagagccaaacaaccttgcagctccatcatcacttttggtttatgggaatgactggctccatccctgcctttcaaagagatgttctatctgtagattatagttattaaatattcatgaacccatcttataagagaaatatcaattaatgaattatggcttattgttcttttggcttaraatactcttaccttcttctctgactagaaaaaaatatccttcaaaactcaactcaaatgcttctcttcaacttctcctagcctgactaaaa

SEQ ID NO: 351080 - DNA, 414 bp, Homo sapiens
tacaatgtggcagggtcaaccaaagaagaatttctggatggaaagtttggggaagggaatgcaatggaaaacagaagggatgggtgtggtctctctccagccttggtaagtgccatgaagcagagtggagtatacccgtgctgggatcgtccaaattatcccagagtctacagcttcttgcccacgtaggcagggagcaaaagactaccatggaagcactkcagcaattcacatccttcctatgatgcatgtcctgagcttacaggttctggatgagagttgaggatttcctgtagtcattgggattgtctctactgctgcaaggactgtgcttagaatgactctggttacaaccttggaaatgtctccttcatctgtgagtaacagccaaacccaaaaggatcattcaagcaa

SEQ ID NO: 351081 - DNA, 589 bp, Homo sapiens
tctgcatggacaggacttgctttgccacacttacctgtggctgtgcatrcatagtagagtgtaccttctcagcaggcaggtggagcccaagagagaagagcctgttcccaaactcaccactcacatagggcagagaggagctagggctgctatttgaggaaaacagtatccttgagtcagtgttgtttccacttccatgaagcagtaccccagtaaccacccatcactgctcctttggggaccctcctgggtctacaggtgaaagtgcagatttacccaccgcaaggttcacaagtagatctaaccagcacatgaatcaaaatctcaaatagggcattaatctaaggttgaaaattcactctctcttgtgttttccataccaaaatacatcatccaatacggctcatcagaggttctgaaattagatttactgacaacatgaacatattccaataataaaaatgattctttattattaaattcttggggagaaatttaaatccaaggactaaatcctcttgtaaatgaaagtcgaaagaaaacaaatttttaaaacaaatgatgttgcccttatgagtcccaagcccaa

SEQ ID NO: 351082 - DNA, 589 bp, Homo sapiens
tctgcatggacaggacttgctttgccacacttacctgtggctgtgcatacatagtagagtgtaccttctcagcaggcaggtggagcccaagagagaagagcctgttcccaaactcaccactcacatagggcagagaggagctagggctgctatttsaggaaaacagtatccttgagtcagtgttgtttccacttccatgaagcagtaccccagtaaccacccatcactgctcctttggggaccctcctgggtctacaggtgaaagtgcagatttacccaccgcaaggttcacaagtagatctaaccagcacatgaatcaaaatctcaaatagggcattaatctaaggttgaaaattcactctctcttgtgttttccataccaaaatacatcatccaatacggctcatcagaggttctgaaattagatttactgacaacatgaacatattccaataataaaaatgattctttattattaaattcttggggagaaatttaaatccaaggactaaatcctcttgtaaatgaaagtcgaaagaaaacaaatttttaaaacaaatgatgttgcccttatgagtcccaagcccaa

SEQ ID NO: 351083 - DNA, 563 bp, Homo sapiens
aatgtaagtcaaattttgattcaagtcaaccttatatccttatctgaaaaatacttgtgttcttaaaaatatatatcaaatctgattcttgaatgtatttttgtgtgcacacaaacacatgtactgtgttttgcgaattctgtcaaaccaactgatcgttcattttgagacattaaaaaaatcattgcttctatctttatttaatgaatacttttcattcaatatttacttgtgccaaatgcaaaccccasaacagctcaaagtataagcaccctaagacatagactacaaccaagctatcaaggaatcacataaattttaaggggaggaaaaaactccattgggcttttgaaatgaagtcatcatagagccaaaacactgacctcttctctggtgtcacagagacaaacacatcaaccaattgcagactaggtcctcttagtttaggattgagtcttatttgttggtgtctctccagcacccaaaatactgaccaatacatagcaggtgtccccccagatgtcctttctttcgggatcataaacgtgacattgaaatatacc

SEQ ID NO: 351084 - DNA, 563 bp, Homo sapiens
aatgtaagtcaaattttgattcaagtcaaccttatatccttatctgaaaaatacttgtgttcttaaaaatatatatcaaatctgattcttgaatgtatttttgtgtgcacacaaacacatgtactgtgttttgcgaattctgtcaaaccaactgatcgttcattttgagacattaaaaaaatcattgcttctatctttatttaatgaatacttttcattcaatatttacttgtgccaaatgcaaaccccacaacagctcaaagtataagcaccctaagacatagactacaaccaagctatcaaggaatcasataaattttaaggggaggaaaaaactccattgggcttttgaaatgaagtcatcatagagccaaaacactgacctcttctctggtgtcacagagacaaacacatcaaccaattgcagactaggtcctcttagtttaggattgagtcttatttgttggtgtctctccagcacccaaaatactgaccaatacatagcaggtgtccccccagatgtcctttctttcgggatcataaacgtgacattgaaatatacc

SEQ ID NO: 351085 - DNA, 669 bp, Homo sapiens
aatgcaacttctttgaaacgaaaggataagcttttgacttcctctctctcccctcagactaaagtgtggatatagtggtgttgctctcctttagatagtgtggacaaaagtgtcaccctagggaatagtggagcaacaagagaggaggaacctgggcctctggatatccttctagatcagagccacaaattcagcccagccacttattcccagattatcatgtaagaagacataagctcctatcactgagctactgtgtttgggagtatttttgttacagcagctgagcctttgactaacacacctgtgcattggtaaagatatgggctgaattatagtgtgactccaatacaagaaaaatattaattgatgagctcttatggatattagatctgtgaccaggatattgaacataaaagaacataataaatgagaatgaactcagagatcatagactttattttcatagtcctcacaatttccaggcaagtattaatcttgtagaccactaagtacmtgaaaactacctttcataatggcagatgtggaggagggctgaggaagaagaaaaatgttgaacgttcattgagcatttactatgtactaaagactctactccacatgttatatcctgtcagtggtgaaggtagatattatcccctcattccc

SEQ ID NO: 351086 - DNA, 615 bp, Homo sapiens
cagaaggagaggccacatggcaaggagctgagggcatcctctagcattcgagagccatccttgtacaaaagctagcaagacatcagtcccacaactgccaggaaaggaattccggaattctgctaacagctggaacatacttgaaagtgaacctttctctagttggtccaccagatagaaacacagcctctttttttttattatttattttttattgatcattcttgggtgtttctcacagagggggatttggcagggtcataggacaatagtggagggaaggtcagcagataaacaagtgaacaaaggtctctggttttcctaggcagaggaccctgcggccttccgcagtgtttgtgtccctgggtacttgagattagggagtggcgacgactcttaacgagcatgctgccttcaaacatctgtttaacaaagcacatcttgcaccgcccttaatccatttaaccctgagtggacacagcacawgtttcagagagcacagggctgggggcaaggtcacagatcaacaggatcccaaggcagaagaatttttcttagtatagaacaaaatgaaaagtctcccatgtctacctctttctacacagacacggcaac

SEQ ID NO: 351087 - DNA, 559 bp, Homo sapiens
tcatcagctgagccgcatctgccccaggcggaactttgaatcccagataggggtyatatagaaatgaaggtcccaaggcagaaattcagttatgaatgctcttaaagtcatgtgggactttgttttattttgttttgttttttgagacagagttttgctctgtggcccaggctggagtgcaatggcacaatattggctcactgcaacctctacctaggacgttgttttagattcagatccaaaactgcatttttgcagaggcccctcaacattttgcttgtctaataatatagctacagtctctactttgaatgtctgtgtatgtggatggagtgtggggaaggatcttctgtctcattgctccttaaaagatagatgaagccaaaagcaatataagcaaaatgcaacttacaaaataagctttataataaagcatatgaagtagaggtgtctgcccatatagtagctgtcaattgcatttatcctattcaaattctgtccacaaggttactgttggagcaactttggagaaaatactgagttctcctgattgaatttt

SEQ ID NO: 351088 - DNA, 559 bp, Homo sapiens
tcatcagctgagccgcatctgccccaggcggaactttgaatcccagataggggttatatagaaatgaaggtcccaaggcagaaattcagttaygaatgctcttaaagtcatgtgggactttgttttattttgttttgttttttgagacagagttttgctctgtggcccaggctggagtgcaatggcacaatattggctcactgcaacctctacctaggacgttgttttagattcagatccaaaactgcatttttgcagaggcccctcaacattttgcttgtctaataatatagctacagtctctactttgaatgtctgtgtatgtggatggagtgtggggaaggatcttctgtctcattgctccttaaaagatagatgaagccaaaagcaatataagcaaaatgcaacttacaaaataagctttataataaagcatatgaagtagaggtgtctgcccatatagtagctgtcaattgcatttatcctattcaaattctgtccacaaggttactgttggagcaactttggagaaaatactgagttctcctgattgaatttt

SEQ ID NO: 351089 - DNA, 559 bp, Homo sapiens
tcatcagctgagccgcatctgccccaggcggaactttgaatcccagataggggttatatagaaatgaaggtcccaaggcagaaattcagttatgaatgctcttaaagkcatgtgggactttgttttattttgttttgttttttgagacagagttttgctctgtggcccaggctggagtgcaatggcacaatattggctcactgcaacctctacctaggacgttgttttagattcagatccaaaactgcatttttgcagaggcccctcaacattttgcttgtctaataatatagctacagtctctactttgaatgtctgtgtatgtggatggagtgtggggaaggatcttctgtctcattgctccttaaaagatagatgaagccaaaagcaatataagcaaaatgcaacttacaaaataagctttataataaagcatatgaagtagaggtgtctgcccatatagtagctgtcaattgcatttatcctattcaaattctgtccacaaggttactgttggagcaactttggagaaaatactgagttctcctgattgaatttt

SEQ ID NO: 351090 - DNA, 438 bp, Homo sapiens
tctgttagtaattgttttataaatttgggatctccagtgttaggtgcatatatgtttaggattgtgacattttcctattggacaaggccttttatcattatataatgtccctctttgtctctttttaccattgttgctttaaagtttgttatgtgtgtacttttgtttttttgtttttggyttttgctttataacttgtatttttgtttcataggtcctgtgtgatttatgctttaaagaggttctgttttcatgtgtttccaggatttgtttcaagatttagggctcctttttgcagttcttgtagtggcggtaatggcaaattctctcatcatttgtttgtctgaaaagacctgtatctttccttcatatatgatgcttagtttcactggatacaagattcttggctgataattgttttgtttgaggaggctgaag

SEQ ID NO: 351091 - DNA, 585 bp, Homo sapiens
gcctgagcgacaagagcgaaacttcatctccaaaaacaaaacaaaacaaaacaaaacaacaacaaaagcctaagcgaggataagagcaaagtcagaaattcttctgtatttggaagacaagtgcatagctctccacccatttccccctgtaaagggtgagcacaatgacagtcacagggagagtggtggtgatagtgaagtgaagtcgtggacagacaggcttagctcaggacctggtagagtgcaaaattcaccattaatcacaacaaacagagcaaacatcagtctagtgcttactacatgccagacactgttctaatgacttcctgtattttaactcatttaatcctcccaacaattctgctagaagcaggtactagaattcccattttacacctgagaaaatgaggcacagagccattaagtaacttgctcaagattggagcctggattaaaattcacagtctgtttatggtgttgtttctcttaaacaccatgtgctcattttattattttytttatcgtaattgttcatctcactccctcatggactccaataggcactctggccattttgaaggagcc

SEQ ID NO: 351092 - DNA, 426 bp, Homo sapiens
tgggcacaatctcttaaattctaaactcagaactaatcctccatcacttctaatgcattccattggccaccccagattccaaatggggaatagtcgtaaagtcatgctgcaaagggtatggatacaagaaggggggaraattggggccatgtttgcgatcaatctaccacaaactggaaacataacggtacaggaaataagcaacaattatgaaatatgcttcattgttgtaattatcctgagacagggtagatcataggattttcaccaagatgaaaaccaaaaagtactcaaaattttaattaaggaccatctgagaagacatgggagacactcatcagatcttgtccctgacccaccccctaagaggcatttcccgctctggaagaagagtcctttgattcctgatgattctatggaagatga

SEQ ID NO: 351093 - DNA, 558 bp, Homo sapiens
ttcccatgatgtcccttttctccatcaaccaaaaacttacccatcttttagggctaaagagtttacctcttcctttttcactcctggacttctcttaccaggggagcttgcttttcctctgtagctgctgtaggacgtgtccaaatcactcacttaggcactcatcattactatgttttgatcgtgatattttccctgcatctctgtcttatctctcttaatatcttataagcacctcgagggtgggccagccctttgttttgctgtatttcccatgttgacttcactgttttcttgcactgaatgagtgcccaataagcatctgtggttgaaaggcckgatcatgctgaaaacgaatcctctcaagtgtgagtgtgtcccaggcatgtcttatcccctccctgctgtgcatgtacctccctggttcccaggctctcccagggaagaattccatctgctcctcactgggcccctcacacagacagatagatgtttaaataaattatggggccagtgatgacagccttcactagaactttaaaaatgatgagctattac

SEQ ID NO: 351094 - DNA, 604 bp, Homo sapiens
ttttttaaattcctaaagtcacttgcttcagtatgcttcagaacacaaaacccacattctctcacacttaccacattgtatttcttccaatcctattttgaagaccatgattcctgggcaatgtggagcagagactagaaaactgcatgtaatgtgcaaagccagtgattcacgtgcagatgctcaagaacttatgtatcaatcctatctgaagacttcagctcaacatcaatttatttctgcacaccctttggcctagcaatttcatttgtagaaatccattctacaaaacacatttttgtatgcaaatatgtatgttgcaaaaatgttcatgaaatcattttaatagcaaagaactggaaactrtaaatccattttacaagaccatgattgcataaattatggtacatttacataatgggatccaatggagctaatacctctgtatacttttcacagagatcgctaaaacagcattaaaaaaaaaacagaactgtggactgtgttatgggtaatgatttggcaatgtaggttcatcagctgtagcaaaggtggagaatgttagtgatggagatgctatgttggtgtgggggcagggcacaca

SEQ ID NO: 351095 - DNA, 577 bp, Homo sapiens
gccctacagctctgatctcacctgggccagtgggtatcttccccaggagtttctgggtttgggatgagaaagatgggagagtctttctagtgacagaaaccataagatgaaaaagtttgggctgttggcagccatgtctgcaagacttcagacagatggattgaatggagaagaaggggttagagatggaggttcagaatggcctgaattatgcctcgcccctgcctcccaccccacctaaaaaatttatgkttaagtcctaacacccaggacttcagaatgtgactatatttggagacagggtctccaaagggttaatcaaagtgaaatgaggtcatcagcgtggaccttcatccaacctgactggtgtcatataagaagaggagattaggacacaaatgcggagaccacatgaagaaacagagaagacggccacttacaaacaaaggagagaggcctcagaagaaaccagtgctgccaacacctttatcttggactttgagcctcgcctctagaacagtgagaaaataagtttgtgttgtttaagtcaccccggtctgtggtatttgcgatggca

SEQ ID NO: 351096 - DNA, 460 bp, Homo sapiens
aaatcacatggctgtcttcttcctgtgtgtcttgatatcatactcccttttacatgtgtgtctctgtgtccagtttcctatttacataaggacacccatcatattgcataacggcccaccctaatgacttaattttgacttgattagctctgtaaagacttcctggctcttccttcctttcttttctttttcttttctttttttttttttgagacaggatatcactctgtagcccaagctggagtgcagtggcgtgatctcggctctctgctacctccacctctggggttcaagtgattctcatgcctcagcctcccaagtagctgggactacaggtgtgygccaccacacccagctaagtttttgtattttaatagagatgtggtttcaccatgttgcccagggtggtcttgaactcctgagctcaggcaatccacccgctcgacctcccaaagtgctg

SEQ ID NO: 351097 - DNA, 552 bp, Homo sapiens
aattttcagtcgttggagctgagctgcaggatgtttgagtgtggagacctagcacaaaatgtaccaatggggggctggtccgagtcttcagtcccctaccatgctccctacctctatactgtgtgctcctgtcactctagcttccttctgcatggaatgcctcctttctattttctgtggtcacacctctgcagtgagccccatgagacccaccaacttcagaagctgcccctgacacctctagcagtagacaggtgtgtcctgtgctgtccatgcccttcctttgtacctrtaagctggtgactctgttctataaatagttaggtccctgtctcatcttcccagccggactgtgaggtattcatggtgggatctatgtctgatccatctcagggagtcccgtggagcttgacctaatgcccggcatgtgggaatcccagagaggaaacagcatgtgcaaaggctggagacctgatggcacctgtggcaatacggaagagtccatgtgtgtaaagggcaacaaaatagagcagtattagataaaataaatat

SEQ ID NO: 351098 - DNA, 489 bp, Homo sapiens
tgtgtcacggtggtgtgaggtagccatatgacttttcattgttsatgttaaccttgattacttggctatgttggtgacttgatggttccctccactacaaaattacagtttttacttttccatattccatttcttaaaagtcagtcattaagaccaacctgcaagactgggcacagtggctcatgtctgtaattccaggactttgagagaacaaggtgggcagattgcttgagcccagaagttcaaaaccagcctggacaacatggtgaaaccccatctctacaaaggtacaaaaattagccaggtgtggtggagtgcacctgtagtctcagcaatgtgggaggctgaggtgggaggatcacttgagtctgggatgttggggttgcagtgagctgtgattgtgccaatgcacttcggcctggatgacagaggaagaccttatctcaaaaacaaaaacccaaaccacaaaaacaagactaacttgcaagc

SEQ ID NO: 351099 - DNA, 489 bp, Homo sapiens
tgtgtcacggtggtgtgaggtagccatatgacttttcattgttgatgttaaccttgattacttggctatgttggtgacttgatggttycctccactacaaaattacagtttttacttttccatattccatttcttaaaagtcagtcattaagaccaacctgcaagactgggcacagtggctcatgtctgtaattccaggactttgagagaacaaggtgggcagattgcttgagcccagaagttcaaaaccagcctggacaacatggtgaaaccccatctctacaaaggtacaaaaattagccaggtgtggtggagtgcacctgtagtctcagcaatgtgggaggctgaggtgggaggatcacttgagtctgggatgttggggttgcagtgagctgtgattgtgccaatgcacttcggcctggatgacagaggaagaccttatctcaaaaacaaaaacccaaaccacaaaaacaagactaacttgcaagc

SEQ ID NO: 351100 - DNA, 489 bp, Homo sapiens
tgtgtcacggtggtgtgaggtagccatatgacttttcattgttgatgttaaccttgattacttggctatgttggtgacttgatggttccctccactacaaaattacagtttttacttttccatattccatttcttaaaagtcagtcattaagaccaacctgcaagactgggcacagtggctcatgtctgtaattccaggactttgagagamcaaggtgggcagattgcttgagcccagaagttcaaaaccagcctggacaacatggtgaaaccccatctctacaaaggtacaaaaattagccaggtgtggtggagtgcacctgtagtctcagcaatgtgggaggctgaggtgggaggatcacttgagtctgggatgttggggttgcagtgagctgtgattgtgccaatgcacttcggcctggatgacagaggaagaccttatctcaaaaacaaaaacccaaaccacaaaaacaagactaacttgcaagc

SEQ ID NO: 351101 - DNA, 553 bp, Homo sapiens
aaatcggtaccagagaagtagggcattgttacaaagatacccgaaactgtggaagcgactttggacttaggtaataggcagaggttggaacagtttggaaggcttataagaagacatgaagatgacggctgggcatggtagctcatgcctgcaatcccagcactttgggagggtgaagcaggtggatcatttgatgtcagrgtttcaaagccagccagaccaacatggtgaaactctgtctctactaaaaatacaaaaaaaaattaggcgggcatcatggcgcatgcctgtaatcccagctactcaggaagctgaggtaggaggatcatttgaacccaggaggcagaggttgcagtgagccaagattgtgccaccgcattccagcctggataacagagtgagactccatctaaaaaaaacaaaaacaaaaacaaaaatgaaaacaaaacaaaaaaacagaagacaggaagaaaagtttggaacttcctagagacttgctgaatggttgtgactgaaatgctcatatagtgatacggacagtgaaatccaggct

SEQ ID NO: 351102 - DNA, 553 bp, Homo sapiens
aaatcggtaccagagaagtagggcattgttacaaagatacccgaaactgtggaagcgactttggacttaggtaataggcagaggttggaacagtttggaaggcttataagaagacatgaagatgacggctgggcatggtagctcatgcctgcaatcccagcactttgggagggtgaagcaggtggatcatttgatgtcagagtttcaaagccagccagaccaacatggtgaaactctgtctctactaaaaatacaaaaaaaaattaggcgggcatcatggcgcatgcctgtaatcccagctactcaggaasctgaggtaggaggatcatttgaacccaggaggcagaggttgcagtgagccaagattgtgccaccgcattccagcctggataacagagtgagactccatctaaaaaaaacaaaaacaaaaacaaaaatgaaaacaaaacaaaaaaacagaagacaggaagaaaagtttggaacttcctagagacttgctgaatggttgtgactgaaatgctcatatagtgatacggacagtgaaatccaggct

SEQ ID NO: 351103 - DNA, 500 bp, Homo sapiens
gaacacatttatggcccacagtgtcctataatggacataccatgttgcatattgtcttcatctcctagggctgccataacaaagtgccacaaaccatrtggctgacttacaaaacaaaatgcactgtctcacagttctggagactagaagtctgagatcaagttcttggcagggctggatccttctgagggctgtgaggaagaatctaatccacacttctctcctagcttctggtggtttgctggcaatctttggcatccctgggcttgtagaattctgccttcatcttcatatggcatatcccctgtgttatctctgtgcacaaatttcccttttttataaagacacaaatcatattggattgggggcccaccctattacagcatgacctcatcttaactaattacattaacaacaatcccattttcaaaaaaggtcatgttcttaggtactgggggttctgagttcagcatatgaaatttttatttagggtaacatat

SEQ ID NO: 351104 - DNA, 500 bp, Homo sapiens
gaacacatttatggcccacagtgtcctataatggacataccatgttgcatattgtcttcatctcctagggctgccataacaaagtgccacaaaccatatggctgacttacaaaacaaaatgcactgtctcacagttctggagactagaagtctgagatcaagttcttggcagggctggwtccttctgagggctgtgaggaagaatctaatccacacttctctcctagcttctggtggtttgctggcaatctttggcatccctgggcttgtagaattctgccttcatcttcatatggcatatcccctgtgttatctctgtgcacaaatttcccttttttataaagacacaaatcatattggattgggggcccaccctattacagcatgacctcatcttaactaattacattaacaacaatcccattttcaaaaaaggtcatgttcttaggtactgggggttctgagttcagcatatgaaatttttatttagggtaacatat

SEQ ID NO: 351105 - DNA, 439 bp, Homo sapiens
tgttggttgctttgggggtgcttttcgtagcgtcattcctttgttggctcctccctgtcctcttggtgctgtgggccctgaaagttgtagagtgcgcccctcactgtggcaggagcagtggcgctgagcgtgcccacgggccgcggcttgggtctctctcrttttccaggtggtatggccgtggacaatggcagtggcgcctggctggcccaagagcccagtccagctacgcctgcctgattccaggcgtcaccaccaacccgggggccgcgaggctgggatcaggcaccccggagccgcttgcctgtggccgggctgctctccccctctacgcccaagcaccaccatcgccgcgctgcgctttccgccgacctcccagagcgtcccgatgtcgccggcggccagaccatgcgcgagacagcccaggcgccagagacct

SEQ ID NO: 351106 - DNA, 439 bp, Homo sapiens
tgttggttgctttgggggtgcttttcgtagcgtcattcctttgttggctcctccctgtcctcttggtgctgtgggccctgaaagttgtagagtgcgcccctcactgtggcaggagcagtggcgctgagcgtgcccacgggccgcggcttgggtctctctcattttccaggtggtatggccgtggacaatggcagtggcgcctggctggcccaagagcccagtccagctacgcctgcctgattccaggcgtcaccaccaacccgggggccgcgaggctgggatcaggcaccccggagccgcttgccygtggccgggctgctctccccctctacgcccaagcaccaccatcgccgcgctgcgctttccgccgacctcccagagcgtcccgatgtcgccggcggccagaccatgcgcgagacagcccaggcgccagagacct

SEQ ID NO: 351107 - DNA, 439 bp, Homo sapiens
tgttggttgctttgggggtgcttttcgtagcgtcattcctttgttggctcctccctgtcctcttggtgctgtgggccctgaaagttgtagagtgcgcccctcactgtggcaggagcagtggcgctgagcgtgcccacgggccgcggcttgggtctctctcattttccaggtggtatggccgtggacaatggcagtggcgcctggctggcccaagagcccagtccagctacgcctgcctgattccaggcgtcaccaccaacccgggggccgcgaggctgggatcaggcaccccggagccgcttgcctgtggccgggctgctctccccctctacgcccaagcaccaccatcgccgcgctgygctttccgccgacctcccagagcgtcccgatgtcgccggcggccagaccatgcgcgagacagcccaggcgccagagacct

SEQ ID NO: 351108 - DNA, 581 bp, Homo sapiens
tcaccgcccctcctgcaaggccccctcttgccccacacacccagagccgccagggctgcccaggggcgaacagccggcccagccccacaggccctttttctcacaatgctcacaccatcgtcgcttgttctgaggaggacccgccatggccaaaggggcaagaaggctctgctttgccccgccctggcactagagccccggcagcctcatcccgggaaagaggggctgacggacacccagacacaccccaccactaccacgagcaaacccaccctgacacacmcacggatacacacgggtgcatgcgcgcagacacacacacacaccacacccgggcacacacacacggacacacaaagacacagacacagatagctcaaagggagacctcccctcatattgtcttatgcccaatttctgcctccaaagaaagaagaagtaaaatctaaaaggcagaaatgaaatccacaggcagacagccccgcgccacaccctgggcctggtagttaaagatcgatccctgacctactcggttatgttatctatagattacagacattgtatagaaaagcactgtgaaa

SEQ ID NO: 351109 - DNA, 628 bp, Homo sapiens
cggatacacacgggtgcatgcgcgcagacacacacacacaccacacccgggcacacacacacggacacacaaagacacagacacagatagctyaaagggagacctcccctcatattgtcttatgcccaatttctgcctccaaagaaagaagaagtaaaatctaaaaggcagaaatgaaatccacaggcagacagccccgcgccacaccctgggcctggtagttaaagatcgatccctgacctactcggttatgttatctatagattacagacattgtatagaaaagcactgtgaaaatccctgtcctgttttgttctgatctaattacctgtgcatgcagcccccagtcacgtaccctctgcttcctcaatccatcaagaccctctcacgcggacccccttagagttgtaagcccttaagagggacaggaattgctcactcggagagcttggtttttggagacgtgagtctgcggatgctcccagctgaataaagcccttccttctacaactcggtgtctgaggggttctgtctgcagctcctcctgctgcagaaggagagcaagggagagagggatggagaaatagaaccagagggagagagagagacagcgatagagagagagaga

SEQ ID NO: 351110 - DNA, 628 bp, Homo sapiens
cggatacacacgggtgcatgcgcgcagacacacacacacaccacacccgggcacacacacacggacacacaaagacacagacacagatagctcraagggagacctcccctcatattgtcttatgcccaatttctgcctccaaagaaagaagaagtaaaatctaaaaggcagaaatgaaatccacaggcagacagccccgcgccacaccctgggcctggtagttaaagatcgatccctgacctactcggttatgttatctatagattacagacattgtatagaaaagcactgtgaaaatccctgtcctgttttgttctgatctaattacctgtgcatgcagcccccagtcacgtaccctctgcttcctcaatccatcaagaccctctcacgcggacccccttagagttgtaagcccttaagagggacaggaattgctcactcggagagcttggtttttggagacgtgagtctgcggatgctcccagctgaataaagcccttccttctacaactcggtgtctgaggggttctgtctgcagctcctcctgctgcagaaggagagcaagggagagagggatggagaaatagaaccagagggagagagagagacagcgatagagagagagaga

SEQ ID NO: 351111 - DNA, 628 bp, Homo sapiens
cggatacacacgggtgcatgcgcgcagacacacacacacaccacacccgggcacacacacacggacacacaaagacacagacacagatagctcaaagggagayctcccctcatattgtcttatgcccaatttctgcctccaaagaaagaagaagtaaaatctaaaaggcagaaatgaaatccacaggcagacagccccgcgccacaccctgggcctggtagttaaagatcgatccctgacctactcggttatgttatctatagattacagacattgtatagaaaagcactgtgaaaatccctgtcctgttttgttctgatctaattacctgtgcatgcagcccccagtcacgtaccctctgcttcctcaatccatcaagaccctctcacgcggacccccttagagttgtaagcccttaagagggacaggaattgctcactcggagagcttggtttttggagacgtgagtctgcggatgctcccagctgaataaagcccttccttctacaactcggtgtctgaggggttctgtctgcagctcctcctgctgcagaaggagagcaagggagagagggatggagaaatagaaccagagggagagagagagacagcgatagagagagagaga

SEQ ID NO: 351112 - DNA, 414 bp, Homo sapiens
tgctttgccccgccctggcactagagccccggcagcctcatcccgggaaagaggggctgacggacacccagacacaccccaccactaccacgagcaaacccaccctgacacacccacggatacacacgggtgcatgcgcgcagacacacacacacaccacacccgggcacacacacacggacacacaaagacacagacacagatagctcaaagggagacctcccctcatattgtcttatgcccaatttctgcctccaaagaaagaagaagtaaaatctaaaaggcagaaatgaaatccacaggcagacagccccgcgccacaccctgggcctggtagttaaagatcgayccctgacctactcggttatgttatctatagattacagacattgtatagaaaagcactgtgaaaat

SEQ ID NO: 351113 - DNA, 469 bp, Homo sapiens
tgcatgcgcgcagacacacacacacaccacacccgggcacacacacacggacacacaaagacacagacacagatagctcaaagggagacctcccctcatattgtcttatgcccaatttctgcctccaaagaaagaagaagtaaaatctaaaaggcagaaatgaaatccacaggcagacagccccgcgccacaccctgggcctggtagttaaagatcgatccctgacctactcggttatgttatctatagattacagacatwgtatagaaaagcactgtgaaaatccctgtcctgttttgttctgatctaattacctgtgcatgcagcccccagtcacgtaccctctgcttcctcaatccatcaagaccctctcacgcggacccccttagagttgtaagcccttaagagggacaggaattgctcactcggagagcttggtttttggagacgtgagtctgcggatgctccc

SEQ ID NO: 351114 - DNA, 469 bp, Homo sapiens
tgcatgcgcgcagacacacacacacaccacacccgggcacacacacacggacacacaaagacacagacacagatagctcaaagggagacctcccctcatattgtcttatgcccaatttctgcctccaaagaaagaagaagtaaaatctaaaaggcagaaatgaaatccacaggcagacagccccgcgccacaccctgggcctggtagttaaagatcgatccctgacctactcggttatgttatctatagattacagacattgtatagaaaagcactstgaaaatccctgtcctgttttgttctgatctaattacctgtgcatgcagcccccagtcacgtaccctctgcttcctcaatccatcaagaccctctcacgcggacccccttagagttgtaagcccttaagagggacaggaattgctcactcggagagcttggtttttggagacgtgagtctgcggatgctccc

SEQ ID NO: 351115 - DNA, 436 bp, Homo sapiens
gggccgggctagaacagggggtcagggccccccccacccagaaaaccaatggagccctgagacttgtttttttccttggattggttggttgctttgggggtgcgtttcataaggtccttcctttgtttgcttctttctgtctccttgatgcggtgggccccgagatttgtagagtgtgctcgtgtgtctggcaggagccgtggcgccgagcctgtccacggggcgaggcctgggtctctctcctgtcctccggactggagtttacacgaagtcggtggcattgggaaacagggtgcacagggacggatttcctcgtggctggcgaagaaaatgtccttcctctggggaaagcagccctcgggttctggagcggaggtcttggctggggtctgkggcacccgctgcccctgctcgcccctcccaccggcttggacgg

SEQ ID NO: 351116 - DNA, 582 bp, Homo sapiens
ctggggcacgggggcggtcaacggggagcagaggcggggcgcagttgggaagcacggagacaaaagggggaaagaaggagggagcgggaagccaaaagcctacggtaccgctattaccaggcggaatcccatccaagtactaaccagtcccgaccctgcttagcttcaacagatcagaggcgagccgggcgcgttcagggtggtgtggcctagacgccagcagcggcgcctggctgccccaagagccggcccagccaagcccgcatgactccaggcgtcatcgccaccccgggccgcgggtctcggatccaggacccccagaggcgctcgcccgtgcccccgggcagctgtctccctctacacccgaggaccgccggcctcccagagagtcccgccgtcwccggcggccaggcctggctcaggaccaatgtggcaccgccctgctgttgttggggggcgccgccggaggcctctgtcccctgcgcaggcttccggctctaggggcggcctcctttccgcccacgctccagtccttccgggagctccggagctccggggcttccaccacatctgccggctcag

SEQ ID NO: 351117 - DNA, 582 bp, Homo sapiens
ctggggcacgggggcggtcaacggggagcagaggcggggcgcagttgggaagcacggagacaaaagggggaaagaaggagggagcgggaagccaaaagcctacggtaccgctattaccaggcggaatcccatccaagtactaaccagtcccgaccctgcttagcttcaacagatcagaggcgagccgggcgcgttcagggtggtgtggcctagacgccagcagcggcgcctggctgccccaagagccggcccagccaagcccgcatgactccaggcgtcatcgccaccccgggccgcgggtctcggatccaggacccccagaggcgctcgcccgtgcccccgggcagctgtctccctctacacccgaggaccgccggcctcccagagagtcccgccgtctccggcggccaggcctggctcaggaccaatgtggcaccgccctgctgttgttggggggcgccgccggaggcctctgtmccctgcgcaggcttccggctctaggggcggcctcctttccgcccacgctccagtccttccgggagctccggagctccggggcttccaccacatctgccggctcag

SEQ ID NO: 351118 - DNA, 508 bp, Homo sapiens
aatctctttgttgagtttagctgataaaatttggaatttccttactttgttatcttaaatttctttcagttttttttttttaaatacagctattttgaattctctgtctgaaacatcacatatctctttttctccaggatttgtccccagtgccttatttagttcacttggtgaggtcatgttttcctggatggtgttgatgctagtagatgttcttcagtgtctggacattaaaatcttgggcatgcarcaccatatgagaagtttaaaaaataaaatttaaagagagaaaaggtgagtatttattgtagtcttcactgtctgggattatttgtagctatctttcttgggaaggcttttcacatatttgaaaagagttgggtgttgtgatctaagccatatctgctttatggagcaccttatacccaataatgctgtaattcttccagactcagagaagtaccaccttgacagccttcaacaagatccaggagaattttctggatta

SEQ ID NO: 351119 - DNA, 518 bp, Homo sapiens
atcagacctgaagctagcacagcacaggtcttgctcaagtcctgctgcatgcaatttctgaygactccctatgttcactcaaggcctttggtctctacaattagcaggtggcaaagccagacaggcctgtgttctttcctttagggcagtgagatccctcagtccctggctgggtccagaagtgctattcagaagtcagggctttggccactttttaataggggttttttgtttttctcttgtaaatttaagttcctcatattgaatattagatctttgtcagatacatagtttgtaaatattttttcctcattctataggttgttcactctattgataatttcttttgctgagcagaagcttttaagtttaattagatcccacttgtcaatagttgtatttgttgtttttggtgtctttatcatgaaatctttgcctctttctatgtccaggatggtattgtctaggttgtcttccagagcttttatagttttgggttttacatttaagtatttaat

SEQ ID NO: 351120 - DNA, 575 bp, Homo sapiens
ctgggtccagaagtgctattcagaagtcagggctttggccactttttaataggggttttttgtttttctcttgtaaatttaagttcctcatattgaatattagatctttgtcagatacatagtttgtaaatattttttcctcattctataggttgttcactctattgataatttcttttgctgagcagaagcttttaagtttaattagatcccacttgtcaatagttgtatttgttgtttttggtgtctttatcatgaaatctttgcctctttctatgtccaggatggtattgtctaggttgtcttccagagcttttatagttttgggttttacatttaagtatttaatccaccttgagttgatttttgtatatggtataaggaagaagtcyaacttcaatcttctgcatatggctagccagttatcccagcaccatttattgaatagggaatcttttccccattgattgtttttgccagctttgtgaaagattacctagttgtaggtatgtggtcttacttctaacctctctattctgttccactggtgtatgtgtctgtttttgtactagtac

SEQ ID NO: 351121 - DNA, 611 bp, Homo sapiens
ttcctgcattttaaactttccttgtttttcctgacacctctccttgtctgactcacccctgttctaaggcaggtgttccatctgtgtgygcttttggcaccctgggatgctcccagcatgttccctgccacactccatcaggttttctccgcagactctgtgagggcagcagccttgtctccaccattccttcaatgctcagcacataacacagaagctgactccataacatttagttggccaactgagactaaatatatgttcctctagatcttaaaaagttacagaaacatagcacaatagacaaaatattctctttagtcaggagttctctatatatgtacaacagtttgaagtcattattaaagcaaagtgaaagagaaactgtcacagaattccccaagataaattattttgctttagtcttcatcatgtgagataatcaagaccatgtgttattgtaaatatttctagcttacaacacaacgacctgatttttattgtgtgaaataaccgcaatataaatcagttaattaaaaattgcataaataatcctttcaaataaaattctgcctaaattttacattactcatatgttcaaatgataatga

SEQ ID NO: 351122 - DNA, 611 bp, Homo sapiens
ttcctgcattttaaactttccttgtttttcctgacacctctccttgtctgactcacccctgttctaaggcaggtgttccatctgtgtgcgcttttggcaccctgggatgctcccagcatgttccctgccacactccatcaggttttctccgcagactctgtgagggcagcagccttgtctccaccattccttcaatgctcagcacataacacagaagctgactccataacatttagttggccaactgagactaaatatatgttcctctagatcttaaaaagttacagaaacatagcacaatagacaaaatattctctttagtcaggagttctctatatatgtacaacagtttgaagtcattattaaagcaaagtgaaagagaaactgtcacagaattccccaagataaattattttgctttagtcttcatcatgtgagataatcaagaccaygtgttattgtaaatatttctagcttacaacacaacgacctgatttttattgtgtgaaataaccgcaatataaatcagttaattaaaaattgcataaataatcctttcaaataaaattctgcctaaattttacattactcatatgttcaaatgataatga

SEQ ID NO: 351123 - DNA, 536 bp, Homo sapiens
acagagccaatagatgatcagtaatggtggccaatcatcagctagaaagaaagtgcttagcagggcttgaaawcaccaaaactctgagaccactgaccttcaaaaacttcaacagccctgagtgaaaagtccaaacacatttatctaccattcgaagacgctttattgtctgtcctctgcacatctcagtagtctctttttaccacactgtctatatactgcatgagccatttatatgaaactatctgacactccaaggcatcttgtactatatattcaactatgtatccctagtacctagcacagtcctggcatatagtttgctactaaacttttacagaatgaaggaattatcttgtatccaggttccaagttttaaggtgattcttcagtaaaaaaaagtattacagttcacaaataatctacttccctttttacaaatgggatcaattttaatcttatctcctaataacattactttcatttactctgatctaaatatactgtcctaagagagcaataagaaagagagttga

SEQ ID NO: 351124 - DNA, 536 bp, Homo sapiens
acagagccaatagatgatcagtaatggtggccaatcatcagctagaaagaaagtgcttagcagggcttgaaaacaccaaaactctgagaccactgaccttcaaaaacttcaacagccctgagtgaaaagtccaaacacatttatctacyattcgaagacgctttattgtctgtcctctgcacatctcagtagtctctttttaccacactgtctatatactgcatgagccatttatatgaaactatctgacactccaaggcatcttgtactatatattcaactatgtatccctagtacctagcacagtcctggcatatagtttgctactaaacttttacagaatgaaggaattatcttgtatccaggttccaagttttaaggtgattcttcagtaaaaaaaagtattacagttcacaaataatctacttccctttttacaaatgggatcaattttaatcttatctcctaataacattactttcatttactctgatctaaatatactgtcctaagagagcaataagaaagagagttga

SEQ ID NO: 351125 - DNA, 536 bp, Homo sapiens
acagagccaatagatgatcagtaatggtggccaatcatcagctagaaagaaagtgcttagcagggcttgaaaacaccaaaactctgagaccactgaccttcaaaaacttcaacagccctgagtgaaaagtccaaacacatttatctaccattcgaagacgctttattgtctgtcctctgcacatctcagtagtctctttttaccacactgtctatatactgcatgagccatttatatgaaactatctgacactccaaggcatcttrtactatatattcaactatgtatccctagtacctagcacagtcctggcatatagtttgctactaaacttttacagaatgaaggaattatcttgtatccaggttccaagttttaaggtgattcttcagtaaaaaaaagtattacagttcacaaataatctacttccctttttacaaatgggatcaattttaatcttatctcctaataacattactttcatttactctgatctaaatatactgtcctaagagagcaataagaaagagagttga

SEQ ID NO: 351126 - DNA, 536 bp, Homo sapiens
acagagccaatagatgatcagtaatggtggccaatcatcagctagaaagaaagtgcttagcagggcttgaaaacaccaaaactctgagaccactgaccttcaaaaacttcaacagccctgagtgaaaagtccaaacacatttatctaccattcgaagacgctttattgtctgtcctctgcacatctcagtagtctctttttaccacactgtctatatactgcatgagccatttatatgaaactatctgacactccaaggcatcttgtactatatattcaacyatgtatccctagtacctagcacagtcctggcatatagtttgctactaaacttttacagaatgaaggaattatcttgtatccaggttccaagttttaaggtgattcttcagtaaaaaaaagtattacagttcacaaataatctacttccctttttacaaatgggatcaattttaatcttatctcctaataacattactttcatttactctgatctaaatatactgtcctaagagagcaataagaaagagagttga

SEQ ID NO: 351127 - DNA, 613 bp, Homo sapiens
aattgcataactagtgtaaactgactcaaagcaggtccaggaatgcacttagtgataagatattgaggcaagctgcaccagctgctcctgggtacgcactcggtgaatgtcacgcaaaacccctgcatttctctctttgtgatagtttaagcccctgcacctggaactgtttatttgttttgtaactgctattgtaaccaattaatattttaactatttgccagctctgcttctgtaaaacttgtttcagctaaactcccccctcccctatttagaccacggtataaaaacaaaaccagccccttcctcggggccaagagaattttgagcattacatgcctctcggttrccggctaataaaggactccttaatttgtctcaaagtgtggcattcctctataactcgcttggttacaacagtccacactgtggcctgaggtgcattgcccacctgagcttcatctgttatgtatgtcagggaatataagcagggtgagagtggcctcatcagaggaccccagatctctggcttacccatctggcaagtgcacctctgtgagcaaagacttcagagccaggtgacaagaatggcccaagcagtccaccaggaaaa

SEQ ID NO: 351128 - DNA, 573 bp, Homo sapiens
aaccccaacagcaagaattccagtcctgctgctgcaaagtaagtgtcactctgattttattgctgctgtgtaacccagttttagactctctggttctcacttaatgttctaaaaaaktattaaagagaaaattttattctggtgatgagcccatccactgcagccatctcaacatcataccaattataagcctatcatttaaaaagaaagctgttagtttaacttatttatccaaatatcagtattacataaacatatttgtcatcagactttggacttatgggttaaatagcatataaatatgattagagccttaaagtttacacttctctggttcgctcaaatttttttcaaaatagcatatgcctttctaaacaatggttagtatatttttcaaaatgaacattaaaatgtatattttccaaaaacaaaatacagctcccattggtaaatgatgctattgagacacaacagacaacttctcttgggaaccatttaatcagtgctcacttttgcactctttccagaaatgtcaatggttttgaaatatagaagtatattatacaaataaac

SEQ ID NO: 351129 - DNA, 573 bp, Homo sapiens
aaccccaacagcaagaattccagtcctgctgctgcaaagtaagtgtcactctgattttattgctgctgtgtaacccagttttagactctctggttctcacttaatgttctaaaaaagtattaaagagaaaattttattctggtgatgagcccatccactgcagccatctcaacatcataccaattataagcctatcatttaaaaagaaagctgttagtttaacttatttatccaaatatcagtattacataaacatatttgtcatcagactttggacttatgggttaaatagcawataaatatgattagagccttaaagtttacacttctctggttcgctcaaatttttttcaaaatagcatatgcctttctaaacaatggttagtatatttttcaaaatgaacattaaaatgtatattttccaaaaacaaaatacagctcccattggtaaatgatgctattgagacacaacagacaacttctcttgggaaccatttaatcagtgctcacttttgcactctttccagaaatgtcaatggttttgaaatatagaagtatattatacaaataaac

SEQ ID NO: 351130 - DNA, 573 bp, Homo sapiens
aaccccaacagcaagaattccagtcctgctgctgcaaagtaagtgtcactctgattttattgctgctgtgtaacccagttttagactctctggttctcacttaatgttctaaaaaagtattaaagagaaaattttattctggtgatgagcccatccactgcagccatctcaacatcataccaattataagcctatcatttaaaaagaaagctgttagtttaacttatttatccaaatatcagtattacataaacatatttgtcatcagactttggacttatgggttaaatagcatataaatatgattagagccttaaagtttacacttctctggttygctcaaatttttttcaaaatagcatatgcctttctaaacaatggttagtatatttttcaaaatgaacattaaaatgtatattttccaaaaacaaaatacagctcccattggtaaatgatgctattgagacacaacagacaacttctcttgggaaccatttaatcagtgctcacttttgcactctttccagaaatgtcaatggttttgaaatatagaagtatattatacaaataaac

SEQ ID NO: 351131 - DNA, 573 bp, Homo sapiens
aaccccaacagcaagaattccagtcctgctgctgcaaagtaagtgtcactctgattttattgctgctgtgtaacccagttttagactctctggttctcacttaatgttctaaaaaagtattaaagagaaaattttattctggtgatgagcccatccactgcagccatctcaacatcataccaattataagcctatcatttaaaaagaaagctgttagtttaacttatttatccaaatatcagtattacataaacatatttgtcatcagactttggacttatgggttaaatagcatataaatatgattagagccttaaagtttacacttctctggttcgctcaaatttttttcaaaatagcatatgcctttctaaacaatggttagtatatttttyaaaatgaacattaaaatgtatattttccaaaaacaaaatacagctcccattggtaaatgatgctattgagacacaacagacaacttctcttgggaaccatttaatcagtgctcacttttgcactctttccagaaatgtcaatggttttgaaatatagaagtatattatacaaataaac

SEQ ID NO: 351132 - DNA, 191 bp, Homo sapiens
caatatatccatgtaataaacctgcaaatatactccctgaatctaaaaaatttaaggcagagacagagtaagagggcagaatagaagcctacattctcatccaccacacraaaacaccaaattttcacaactaactacattcaagaagcactgtcaaagggaccaaaaattgggtgagcaatcacagtacc

SEQ ID NO: 351133 - DNA, 599 bp, Homo sapiens
ccagacctgtcctacaagaaatgcttaagggatatcttaatctaaaagaaaacaagttagtgagcaataagaaatcatctgaaggtacacaactcactagcaatagcacatggaaaaacactgaatattataatatggtaattatggggtgcaaaaatctcaaatagaaagagtaaacaataaaccaataaaaataataactacaaygtatttatttccaatacatagactgtaaaatagggaatgaagagaaacaacaaaaagttgaaaagaatggcagtatagagtttttattagttgttttgcttgtttcttttttttattatacttttaagttatagagtacatgtgcacaacgtgcaggtttgttacatatgtatacacgtgacatgttggtgtgctgcacccattaactagtcatttagcatcaggtatatctcctaatgctatccctcccccatccccccacccctcaaccgtccctggtgtgtgatgttccccttcctgtgtccacgtgttctcattgttcaattcccacctataagtgagaacatgcgggtgtttggttttttgtctttgtgatagtttgctgagaatga

SEQ ID NO: 351134 - DNA, 599 bp, Homo sapiens
ccagacctgtcctacaagaaatgcttaagggatatcttaatctaaaagaaaacaagttagtgagcaataagaaatcatctgaaggtacacaactcactagcaatagcacatggaaaaacactgaatattataatatggtaattatggggtgcaaaaatctcaaatagaaagagtaaacaataaaccaataaaaataataactacaatgtatttatttccaatacatagactgtaaaatagggaatgaagagaaacaacaaaaagttgaaaagaatggcagtatagagtttttattagttgttttgcttgtttctttttttwattatacttttaagttatagagtacatgtgcacaacgtgcaggtttgttacatatgtatacacgtgacatgttggtgtgctgcacccattaactagtcatttagcatcaggtatatctcctaatgctatccctcccccatccccccacccctcaaccgtccctggtgtgtgatgttccccttcctgtgtccacgtgttctcattgttcaattcccacctataagtgagaacatgcgggtgtttggttttttgtctttgtgatagtttgctgagaatga

SEQ ID NO: 351135 - DNA, 599 bp, Homo sapiens
ccagacctgtcctacaagaaatgcttaagggatatcttaatctaaaagaaaacaagttagtgagcaataagaaatcatctgaaggtacacaactcactagcaatagcacatggaaaaacactgaatattataatatggtaattatggggtgcaaaaatctcaaatagaaagagtaaacaataaaccaataaaaataataactacaatgtatttatttccaatacatagactgtaaaatagggaatgaagagaaacaacaaaaagttgaaaagaatggcagtatagagtttttattagttgttttgcttgtttcttttttttattatacttttaagttatagagtacatgtgcacaacgtgcaggtttgttacatatgtatacacgtgacatgttggtgtgctgcacccattaactmgtcatttagcatcaggtatatctcctaatgctatccctcccccatccccccacccctcaaccgtccctggtgtgtgatgttccccttcctgtgtccacgtgttctcattgttcaattcccacctataagtgagaacatgcgggtgtttggttttttgtctttgtgatagtttgctgagaatga

SEQ ID NO: 351136 - DNA, 599 bp, Homo sapiens
ccagacctgtcctacaagaaatgcttaagggatatcttaatctaaaagaaaacaagttagtgagcaataagaaatcatctgaaggtacacaactcactagcaatagcacatggaaaaacactgaatattataatatggtaattatggggtgcaaaaatctcaaatagaaagagtaaacaataaaccaataaaaataataactacaatgtatttatttccaatacatagactgtaaaatagggaatgaagagaaacaacaaaaagttgaaaagaatggcagtatagagtttttattagttgttttgcttgtttcttttttttattatacttttaagttatagagtacatgtgcacaacgtgcaggtttgttacatatgtatacacgtgacatgttggtgtgctgcacccattaactagtcatttagcatcaggtatatctcctaatgctatccctcccccatcccccyacccctcaaccgtccctggtgtgtgatgttccccttcctgtgtccacgtgttctcattgttcaattcccacctataagtgagaacatgcgggtgtttggttttttgtctttgtgatagtttgctgagaatga

SEQ ID NO: 351137 - DNA, 588 bp, Homo sapiens
accgctaggtttgttcttcaagaaatgctagaaagtcctttgagattaaaaaatgagagtaccaaaaaagccatagaatactataaagctctgttgtaaagcaaatatatagagaaatatagcatcctgtattattgtgatgttggtaagtaatttcaatccccttatagtatttgacaccaatatacaaaaatattttatatgtatgttaaagaatacatcatgtaaaaaggcctaatttgtgacatcaagaacaacatgagtgttgggaaagacagtcatgtaaaagactggagtttttatatgctactgagataacatcagattaaactagattgttataactttgagacgtttcatgtcacctgtatagtaatcacaaagataatacatgtagaatgtatacaaaagaaaaagaaataaaaacatattagtacaaaaattagacaaaaaggaatacagcaagaaataaaataaataaacaaaagaactacaaaagaaacacaawactattaacaaaatggcagtagtaactccttaactgcaaataataaccttatatgtaacaatgttaaattctccaataac

SEQ ID NO: 351138 - DNA, 588 bp, Homo sapiens
accgctaggtttgttcttcaagaaatgctagaaagtcctttgagattaaaaaatgagagtaccaaaaaagccatagaatactataaagctctgttgtaaagcaaatatatagagaaatatagcatcctgtattattgtgatgttggtaagtaatttcaatccccttatagtatttgacaccaatatacaaaaatattttatatgtatgttaaagaatacatcatgtaaaaaggcctaatttgtgacatcaagaacaacatgagtgttgggaaagacagtcatgtaaaagactggagtttttatatgctactgagataacatcagattaaactagattgttataactttgagacgtttcatgtcacctgtatagtaatcacaaagataatacatgtagaatgtatacaaaagaaaaagaaataaaaacatattagtacaaaaattagacaaaaaggaatacagcaagaaataaaataaataaacaaaagaactacaaaagaaacacaatacwattaacaaaatggcagtagtaactccttaactgcaaataataaccttatatgtaacaatgttaaattctccaataac

SEQ ID NO: 351139 - DNA, 444 bp, Homo sapiens
atgtaaaatccttagaaatatgaatagggtctgaacctaagttaatggtatggaaacaatgtcaatttcctgattttggcaacatactaggttaagttagatataattattggggaaagttggctgaaaataacacggtcattctttttactattttttaacttcttgtgagtcaaattatttaaaaataattggtrttaaacaaagacaaaaaatctaaaatttctaaaatcaaagcctttatgaatttgaacatattatttgatttcttttgtagaccttgatttcttcacctgtaaaaatggaatgatagtagaatttctatctcattattgtcatgcttaaaccataccatttatgtaagtgcccagtaccgtgtctggtgaacaataatgcttaaacactgagttccccacttttttgtggctgttggtttacaggtgg

SEQ ID NO: 351140 - DNA, 580 bp, Homo sapiens
tctttttactattttttaacttcttgtgagtcaaattatttaaaaataattggtattaaacamagacaaaaaatctaaaatttctaaaatcaaagcctttatgaatttgaacatattatttgatttcttttgtagaccttgatttcttcacctgtaaaaatggaatgatagtagaatttctatctcattattgtcatgcttaaaccataccatttatgtaagtgcccagtaccgtgtctggtgaacaataatgcttaaacactgagttccccacttttttgtggctgttggtttacaggtggtttttaagttcctaagtggaagtttgtttaaaaagaggcagtcaaaataaacagcaatgtctcagagcatcatctgaacaagaaaggaaggtgttctccatcccttgaagtggtctcagtcctcttttattgtttagctctcatgtgagtcttcacaaataacctcaagaattgctacaacaccaacagagaattaactctcattgagtttttagctcagtagattctgggtcctaaaatttatggactcacctgctttttaaatctttcccatttag

SEQ ID NO: 351141 - DNA, 580 bp, Homo sapiens
tctttttactattttttaacttcttgtgagtcaaattatttaaaaataattggtattaaacaaagacaaaaaatctaaaatttctaaaatcaaagcctttatgaatttgarcatattatttgatttcttttgtagaccttgatttcttcacctgtaaaaatggaatgatagtagaatttctatctcattattgtcatgcttaaaccataccatttatgtaagtgcccagtaccgtgtctggtgaacaataatgcttaaacactgagttccccacttttttgtggctgttggtttacaggtggtttttaagttcctaagtggaagtttgtttaaaaagaggcagtcaaaataaacagcaatgtctcagagcatcatctgaacaagaaaggaaggtgttctccatcccttgaagtggtctcagtcctcttttattgtttagctctcatgtgagtcttcacaaataacctcaagaattgctacaacaccaacagagaattaactctcattgagtttttagctcagtagattctgggtcctaaaatttatggactcacctgctttttaaatctttcccatttag

SEQ ID NO: 351142 - DNA, 580 bp, Homo sapiens
tctttttactattttttaacttcttgtgagtcaaattatttaaaaataattggtattaaacaaagacaaaaaatctaaaatttctaaaatcaaagcctttatgaatttgaacatattatttgatttcttttgtagaccttgatttcttcacctgtaaaaatggaatgatagtagaatttctatctcattattgtcatgcttaaaccataccatttatgtaagtgcccagtaccrtgtctggtgaacaataatgcttaaacactgagttccccacttttttgtggctgttggtttacaggtggtttttaagttcctaagtggaagtttgtttaaaaagaggcagtcaaaataaacagcaatgtctcagagcatcatctgaacaagaaaggaaggtgttctccatcccttgaagtggtctcagtcctcttttattgtttagctctcatgtgagtcttcacaaataacctcaagaattgctacaacaccaacagagaattaactctcattgagtttttagctcagtagattctgggtcctaaaatttatggactcacctgctttttaaatctttcccatttag

SEQ ID NO: 351143 - DNA, 580 bp, Homo sapiens
tctttttactattttttaacttcttgtgagtcaaattatttaaaaataattggtattaaacaaagacaaaaaatctaaaatttctaaaatcaaagcctttatgaatttgaacatattatttgatttcttttgtagaccttgatttcttcacctgtaaaaatggaatgatagtagaatttctatctcattattgtcatgcttaaaccataccatttatgtaagtgcccagtaccgtgtctggtgaacaataatgcttaaacactgagttccccacttttttgtggctgttggtttacaggtggtttttaagttcctaagtggaagtttgtttaaaaagaggcagtcaaaataaacagcaatgtctcagagcatcatctgaacaagaaaggaaggtgttctccatcccttgaagtggtctcagtcctcttttattgtttagctctcatgtragtcttcacaaataacctcaagaattgctacaacaccaacagagaattaactctcattgagtttttagctcagtagattctgggtcctaaaatttatggactcacctgctttttaaatctttcccatttag

SEQ ID NO: 351144 - DNA, 585 bp, Homo sapiens
actaatcacatcttccagccaaccctaacccttggcagctactgttctgttctccagcactgggattatgctatgtaattcaggtatttttgaaaccaagcttatgaggttgctaaataaataataatgtttataaactattattttcagyctttataaatggcatactgtagcacatattccaatgtgctatacatgtataggtgagccaaagtttgaacatggatctaagtgcacaaacataaaaaatattgtatgcttttatcataatatctctatttgtaatctttttccccaaatactagtagtagtgatgtttgctttctcttatttaaactatcagaatctttaaactttctcttatttaaactatagtcattactaattgaaagtatgtttgaatactgcctgattccacttacacaagatagatatacatatcagtcatatctatgtgtgtgtatatatttatatatatgtcagtcatatatatgtgtgtgtatatatttatatatatgtcagtcatatatatgtgtgtatatatttatatatatcacatacacacatatatagatggagttaggt

SEQ ID NO: 351145 - DNA, 585 bp, Homo sapiens
actaatcacatcttccagccaaccctaacccttggcagctactgttctgttctccagcactgggattatgctatgtaattcaggtatttttgaaaccaagcttatgaggttgctaaataaataataatgtttataaactattattttcagcctttataaatggcatactgtagcacatattccaatgtgctatacatgtataggtgagccaaagtttgaacatggatctaagygcacaaacataaaaaatattgtatgcttttatcataatatctctatttgtaatctttttccccaaatactagtagtagtgatgtttgctttctcttatttaaactatcagaatctttaaactttctcttatttaaactatagtcattactaattgaaagtatgtttgaatactgcctgattccacttacacaagatagatatacatatcagtcatatctatgtgtgtgtatatatttatatatatgtcagtcatatatatgtgtgtgtatatatttatatatatgtcagtcatatatatgtgtgtatatatttatatatatcacatacacacatatatagatggagttaggt

SEQ ID NO: 351146 - DNA, 585 bp, Homo sapiens
actaatcacatcttccagccaaccctaacccttggcagctactgttctgttctccagcactgggattatgctatgtaattcaggtatttttgaaaccaagcttatgaggttgctaaataaataataatgtttataaactattattttcagcctttataaatggcatactgtagcacatattccaatgtgctatacatgtataggtgagccaaagtttgaacatggatctaagtgcacaaacataaaaaatattgtatgcttttatcataatatctctatttgtaatctttttccccaaatactagtagtagtgatgtttgctttctcttatttaaactatcagaatctttaaactttctcttatttaaactatagtcattactaattgaaagtatgtttgaatactgcctgattccacttacacaagakagatatacatatcagtcatatctatgtgtgtgtatatatttatatatatgtcagtcatatatatgtgtgtgtatatatttatatatatgtcagtcatatatatgtgtgtatatatttatatatatcacatacacacatatatagatggagttaggt

SEQ ID NO: 351147 - DNA, 585 bp, Homo sapiens
actaatcacatcttccagccaaccctaacccttggcagctactgttctgttctccagcactgggattatgctatgtaattcaggtatttttgaaaccaagcttatgaggttgctaaataaataataatgtttataaactattattttcagcctttataaatggcatactgtagcacatattccaatgtgctatacatgtataggtgagccaaagtttgaacatggatctaagtgcacaaacataaaaaatattgtatgcttttatcataatatctctatttgtaatctttttccccaaatactagtagtagtgatgtttgctttctcttatttaaactatcagaatctttaaactttctcttatttaaactatagtcattactaattgaaagtatgtttgaatactgcctgattccacttacacaagatagatatacatatcagtcatatmtatgtgtgtgtatatatttatatatatgtcagtcatatatatgtgtgtgtatatatttatatatatgtcagtcatatatatgtgtgtatatatttatatatatcacatacacacatatatagatggagttaggt

SEQ ID NO: 351148 - DNA, 422 bp, Homo sapiens
ggggatgagacttctgagaaatgtccccaaaatattctttaatggctgattatacaaagacagcagtgtaactgacctccaaaccagacattttgagtactggtttctgaagcaaaattagaagtcccagtcctcagtgtcctcaaacgcttttrtgtaatcttggtttaatggaagagatgattaaaatgctgctatctgaaattccaagtgagaaagatggaaaaataatttgtgtctgatgctagtccatacactttccaagtcccacaaaactctcacaaaaatgtatataagctaaatattacaaaatgataacaacttgttttatttatagatgtaaaaaacaatgtgaaagcttttaatctcttaataccattaagcctccagtaagagcctcatataatgctctactattccaa

SEQ ID NO: 351149 - DNA, 489 bp, Homo sapiens
ccgttgtggtcatactattgagggggccccacctgaacaccagtcctcacccctgattcagccattccacagatatttattcagatgttccaggaactattctaagggcatcaagtgctgttcttgtcacaggcaaagaaagccccaaagggaaggtgtctcttccggcggtgcctgccccacctccaagcctggcacctttcraaatttatcttaggacatttccgacaggtgttgctcttcttcagctttgtcctggcataattttgtctcccaggaggcttcattttcttccttcattgatcctacatgtgctgtagctaacaggaattcctcagagctcgtagcctttggatagcgtggtttcacggttgtcaacactgatatgtttatctatactttgagcttcgtgtagttttcattaggattttgtgaaatgcacaggatgatgtaggctagaatgataggttcaattagctatgttccttg

SEQ ID NO: 351150 - DNA, 435 bp, Homo sapiens
actccctaaagctgtctctggcctccagtttaaaaacatctagaatctagccaggcccttgcctttccttgaagcacacttatctgcctagaattaggtgtaaataattttgttctatttcccaccccacgattctgaagaactggctcaaatgtacccaaactctggtacacatttgtcaatgctgcctcttacaggacaaaaaaaactgagtattttctttcagaccctcatacactttccacattgaaaatgtgggatattctgyatttccacaagcagttctttctctcttccctgtctctctcctattgttcttgaaacccctactctctcactctgtgatttgtctaaatataataaagatataggtacaaaaaatattttactttcctcttaattctactatgagaagaaagcattaagttcaatgat

SEQ ID NO: 351151 - DNA, 435 bp, Homo sapiens
actccctaaagctgtctctggcctccagtttaaaaacatctagaatctagccaggcccttgcctttccttgaagcacacttatctgcctagaattaggtgtaaataattttgttctatttcccaccccacgattctgaagaactggctcaaatgtacccaaactctggtacacatttgtcaatgctgcctcttacaggacaaaaaaaactgagtattttctttcagaccctcatacactttccacattgaaaatgtgggatattctgtatttccacaagcagttctttctctcttcyctgtctctctcctattgttcttgaaacccctactctctcactctgtgatttgtctaaatataataaagatataggtacaaaaaatattttactttcctcttaattctactatgagaagaaagcattaagttcaatgat

SEQ ID NO: 351152 - DNA, 601 bp, Homo sapiens
gtggaacatctgtttattaatgcagctttatgatatgttgtaaattgccttaacagaaaatatgaaattgcacattcgagcccagattttcttttcatccccttgtgttcagcttggcaaaaggctgatactgccaaaaaaaagaaagaaaactttgttcaaaattgaaggtaatactttcttagagaaataactactaactaaaggcaaatacttgatgagactattttaatgtatctattgtccttattatgtaggatataatttcttactttaacatatgatgattttatttcaaagccattttgactgaatgactttcaaggttattttgcaaatcataataatttaaatacttaaggaagctagtcaaaaatttgaaattaattgayggtaagtttgattaattctgagacttttagctgtattatttatcacacagaagagaagatcatttctatatagcaaacaaaaatgcgttctgagccatatgtaatagtccatcacacaaaatgttgagttaatgccagtcagaatgtctctcttcttcaagtacagggataacaaaataatggcaagacccaagatcgtgtgcgcggtg

SEQ ID NO: 351153 - DNA, 568 bp, Homo sapiens
ttagtgacctcaagcaccaacacatggacatttcacccattccctaccactaataatagcattaaaatgtcattttgtctttaaaagcaaatatatgctgaaattaaagccacttctttgtagatcttctgactataaaattctggctaagttgattcatttattctctgcctctttctttccctccctcccttagttcaagctgtattgctgagccctacgaaggtgctgtcttgggctgctgagttctcctgagctgcagcarggacgggccagactcagggcaggtactgccgaatgacagtgagccctgctttctgggggctccctgtttaattaggtgaggctgactttagtcacattatcacaccagggaactgaggctctcagattgatggaaaatagcaggagtctacaggatggttatataaagcggcaggactgaagggtgagggaaggctgccctgagacttaactgttgagccttgcaagacaggacaaggacaggatcagcataaagaggtgggtggagggtgggtagagaattctaagccaaggtcaacagagt

SEQ ID NO: 351154 - DNA, 568 bp, Homo sapiens
ttagtgacctcaagcaccaacacatggacatttcacccattccctaccactaataatagcattaaaatgtcattttgtctttaaaagcaaatatatgctgaaattaaagccacttctttgtagatcttctgactataaaattctggctaagttgattcatttattctctgcctctttctttccctccctcccttagttcaagctgtattgctgagccctacgaaggtgctgtcttgggctgctgagttctcctgagctgcagcagggacgggccagactcagggcakgtactgccgaatgacagtgagccctgctttctgggggctccctgtttaattaggtgaggctgactttagtcacattatcacaccagggaactgaggctctcagattgatggaaaatagcaggagtctacaggatggttatataaagcggcaggactgaagggtgagggaaggctgccctgagacttaactgttgagccttgcaagacaggacaaggacaggatcagcataaagaggtgggtggagggtgggtagagaattctaagccaaggtcaacagagt

SEQ ID NO: 351155 - DNA, 568 bp, Homo sapiens
ttagtgacctcaagcaccaacacatggacatttcacccattccctaccactaataatagcattaaaatgtcattttgtctttaaaagcaaatatatgctgaaattaaagccacttctttgtagatcttctgactataaaattctggctaagttgattcatttattctctgcctctttctttccctccctcccttagttcaagctgtattgctgagccctacgaaggtgctgtcttgggctgctgagttctcctgagctgcagcagggacgggccagactcagggcaggtactgccgaatgacagtgagccctgctttctgggggctccctgtttaattaggtgaggctgactttagtcacattatcacaccagrgaactgaggctctcagattgatggaaaatagcaggagtctacaggatggttatataaagcggcaggactgaagggtgagggaaggctgccctgagacttaactgttgagccttgcaagacaggacaaggacaggatcagcataaagaggtgggtggagggtgggtagagaattctaagccaaggtcaacagagt

SEQ ID NO: 351156 - DNA, 568 bp, Homo sapiens
ttagtgacctcaagcaccaacacatggacatttcacccattccctaccactaataatagcattaaaatgtcattttgtctttaaaagcaaatatatgctgaaattaaagccacttctttgtagatcttctgactataaaattctggctaagttgattcatttattctctgcctctttctttccctccctcccttagttcaagctgtattgctgagccctacgaaggtgctgtcttgggctgctgagttctcctgagctgcagcagggacgggccagactcagggcaggtactgccgaatgacagtgagccctgctttctgggggctccctgtttaattaggtgaggctgactttagtcacattatcacaccagggaactgaggctctcagrttgatggaaaatagcaggagtctacaggatggttatataaagcggcaggactgaagggtgagggaaggctgccctgagacttaactgttgagccttgcaagacaggacaaggacaggatcagcataaagaggtgggtggagggtgggtagagaattctaagccaaggtcaacagagt

SEQ ID NO: 351157 - DNA, 287 bp, Homo sapiens
cgttgatgcggccccgagttgtcccaaagcgaggcagtgcccccaaggtctgtgctgaggagaacgctgctctgccttcgcggtgtcccctgggtgtgtgctgagcagaacgcagctccgccctcgcggtacccayggcccgcccgcccgggtctgtgctgaggcgaacactgctccgccttcgctgtatctccgaagtctgtgcagaggagaactcagctccgccctcgcgatgctctccgggtctgtgccgaggagaaggcagctccgccctagcaaaggcagag

SEQ ID NO: 351158 - DNA, 389 bp, Homo sapiens
agaggggcttttggtttcccgttttccacactgaacccttctaactggtctctgaccctgattattcagggctgcaaacaggaaggattttattcaccgttgatgcggccccgagttgtcccaaagcgaggcagtgcccccaaggtctgtgctgaggagaacgctgctctgccttcgcggtgtcccctgggtgtgtgctgagcagaacgcagctccgccctcgcggtacccacggcccgcccgcccgggtctgtgctgaggcgaacactgctccgccttcgctgtatctccgaagtctgtgcagaggagaactcagctccgccctcgcgatgctctccggstctgtgccgaggagaaggcagctccgccctagcaaaggcagagcgccc

SEQ ID NO: 351159 - DNA, 540 bp, Homo sapiens
aatttttggtagatatttttagttcattcctttccactgttatgtactcttccattatatgaatggaattcatacaatggatttgtttatccattcttttattgatgaatttttgggtaatttccaattgttggctatgaatctcctgtattagctttgcagctgtaatgaaacttttagtcatttccctcaagatcacaatatgttctcttaagttattagtactttggccacttcccaaagaatgcaagatccttacaagtttacttccatgtatttgtgtatctctcacccttgtgccattgttgtaatacacttttttattgcattttatatttctacaagatattattattattgtagttttaaaaagctttcattactatttactcatgtttgccctttctctgcacttcatttattcttgcattcccccctgctgcttttgttttctagtttttgattgccaataagagctacrgaaaatcatgaaatatttcttttgtttctatatttaatgtttaattgtttttgtgctta

SEQ ID NO: 351160 - DNA, 365 bp, Homo sapiens
agaaatttaatgtagctgccgattctgtgcggttctggggaaataatagtttaaaatcttctaatttgactctaatttcacttctaactccaacctgtgctcctgaagcaagacgtttttggaccgtcagcaggcagatgaaggcctgagagtggtaggagagctattgtgggctttcctacctcagggctagaggagggcttggagaccggcaaaggaaaagatggaccatttcaagtctcagagcaaaaatactaagagacaaagwtgggatggaaaataaaagtgacgtggtaatcgatagaggaaatttacacaaatctaaaaattctgaaaaagaaaaagaagcagagacaataaatatg

SEQ ID NO: 351161 - DNA, 365 bp, Homo sapiens
agaaatttaatgtagctgccgattctgtgcggttctggggaaataatagtttaaaatcttctaatttgactctaatttcacttctaactccaacctgtgctcctgaagcaagacgtttttggaccgtcagcaggcagatgaaggcctgagagtggtaggagagctattgtgggctttcctacctcagggctagaggagggcttggagaccggcaaaggaaaagatggaccatttcaagtctcagagcaaaaatactaagagacaaagatgggatggaaaatraaagtgacgtggtaatcgatagaggaaatttacacaaatctaaaaattctgaaaaagaaaaagaagcagagacaataaatatg

SEQ ID NO: 351162 - DNA, 365 bp, Homo sapiens
agaaatttaatgtagctgccgattctgtgcggttctggggaaataatagtttaaaatcttctaatttgactctaatttcacttctaactccaacctgtgctcctgaagcaagacgtttttggaccgtcagcaggcagatgaaggcctgagagtggtaggagagctattgtgggctttcctacctcagggctagaggagggcttggagaccggcaaaggaaaagatggaccatttcaagtctcagagcaaaaatactaagagacaaagatgggatggaaaataaaagtgacgtggyaatcgatagaggaaatttacacaaatctaaaaattctgaaaaagaaaaagaagcagagacaataaatatg

SEQ ID NO: 351163 - DNA, 588 bp, Homo sapiens
gaaccaccaaattgttttccacggcaagtgcatcattttctattcctagcagccagttcatgagggctccaatttctccacctccttagcaacattgattttctgtgtcgttgttatgaaagccttactagtggatgcaaagtggtatctcatttgggttttgtcttgcattttattaatgaataacagtgtttagcatcttttcttatccgtcttacacatttgtgtatcttcttcggagaaatgtctattcaagtcctttgcctattttttaattgggatgttagaaattctsatgttgagttgtgggatattaagcttttatcagatacgcactttgattttatcagatacatattttctcacatactatgggttgtcttttcactcccttgatagtatcctttgatgcataaaggttttttattttgattaaatctaatttacgtgtattttcttttgttatctgtgcttttctgtcatatttcaaaatacacttaaaactcaaaggtcataaaggtttaccttgtgttttcttctaagagttacatactttagtccttacatgtaagtcttttattaatttag

SEQ ID NO: 351164 - DNA, 602 bp, Homo sapiens
cagatacgcactttgattttatcagatacatattttctcacatactatgggttgtcttttcactcccttgatagtatcctttgatgcataaaggttttttattttgattaaatctaatttacgtgtattttcttttgttatctgtgcttttctgtcatatttcaaaatacacttaaaactcaaaggtcataaaggtttaccttgtgttttcttctaagagttacatactttagtccttacatgtaagtcttttattaatttagaattaattttcrtgtatactgcaaggtaggggtctaacttctctcttgtgcactgacatccagctgttgaagagactgttctttcctcccttgactagacttggacagcttgttgaacagtcattgaccatatatgtgagcgctaatttgtaggatcttaaatctgttctattgtattggtctaaaagtctattagtcttatgccagtaccacactctcttgattactgtagatttgtagtaggctgtgaaactgaaaaatgtgagttttctaatattctttttcaagactgttttgtctgtcagatcctttgaatttttgtatgaattgtagaatgag

SEQ ID NO: 351165 - DNA, 602 bp, Homo sapiens
cagatacgcactttgattttatcagatacatattttctcacatactatgggttgtcttttcactcccttgatagtatcctttgatgcataaaggttttttattttgattaaatctaatttacgtgtattttcttttgttatctgtgcttttctgtcatatttcaaaatacacttaaaactcaaaggtcataaaggtttaccttgtgttttcttctaagagttacatactttagtccttacatgtaagtcttttattaatttagaattaattttcgtgtatactgcaaggtaggggtctaacttctctcttgtgcactgacatccagctgttgaagagactgttctttcctcccttgactagacttggacagcttgttgaacagtcattgaccatatatgtgagcrctaatttgtaggatcttaaatctgttctattgtattggtctaaaagtctattagtcttatgccagtaccacactctcttgattactgtagatttgtagtaggctgtgaaactgaaaaatgtgagttttctaatattctttttcaagactgttttgtctgtcagatcctttgaatttttgtatgaattgtagaatgag

SEQ ID NO: 351166 - DNA, 602 bp, Homo sapiens
cagatacgcactttgattttatcagatacatattttctcacatactatgggttgtcttttcactcccttgatagtatcctttgatgcataaaggttttttattttgattaaatctaatttacgtgtattttcttttgttatctgtgcttttctgtcatatttcaaaatacacttaaaactcaaaggtcataaaggtttaccttgtgttttcttctaagagttacatactttagtccttacatgtaagtcttttattaatttagaattaattttcgtgtatactgcaaggtaggggtctaacttctctcttgtgcactgacatccagctgttgaagagactgttctttcctcccttgactagacttggacagcttgttgaacagtcattgaccatatatgtgagcgctaatttgtaggatcttaaatctgttctatygtattggtctaaaagtctattagtcttatgccagtaccacactctcttgattactgtagatttgtagtaggctgtgaaactgaaaaatgtgagttttctaatattctttttcaagactgttttgtctgtcagatcctttgaatttttgtatgaattgtagaatgag

SEQ ID NO: 351167 - DNA, 292 bp, Homo sapiens
ctgttagagtatattacactgattgattttttatatgttgagccacccttgcattttggggataaatctcacagggtgatagtttacaatcctttgattatacagtattgctgctagtattttgctagtattgctagtattttgctgagatttttgcttatatattcataagggatattgtgctgtagttctctttttgtgctctctttgkctttggtataaggataatgctgttatcaaaaaatgaattagcaagtattccttcttcatatattatgtcagaagagtttga

SEQ ID NO: 351168 - DNA, 615 bp, Homo sapiens
cagttttaagtaaaataaataaaaggaaacaatcttaactcatcgcctaccggaagggacgtgcccccgctcccaggtgagtgggaccctgctctccgggcgggttgcgccgcggtctctggcacctcttgttggcagcgtcgccgttgcaggcacagggcaggtattggggggcgggcagcgggccaggcccaggcgactcccttgccaggggctgggcakgtgtggagaggggcggagcggtgctgccctgggcgatggagcctcccgctctggacggttcgccgcccctgccccaggaaggcgctgcaggatctgggtggggaaggggagggacgagggaacacaggccaggccaggtggccctttagacctgggtgatgcaggaggggctgtgggagaccagagaggacccgaagcagaaaccgggaactgataactctggctgaatatttgtcctcttgctgaagtttgaaagtcagttatttaattaaagtttaattttattataaaaataacaactattaaaaattccatgtagtcactggaatgataaattttggtgcagtttcagcataacactctaattattcaaattgcggccatgtttcaaaa

SEQ ID NO: 351169 - DNA, 615 bp, Homo sapiens
cagttttaagtaaaataaataaaaggaaacaatcttaactcatcgcctaccggaagggacgtgcccccgctcccaggtgagtgggaccctgctctccgggcgggttgcgccgcggtctctggcacctcttgttggcagcgtcgccgttgcaggcacagggcaggtattggggggcgggcagcgggccaggcccaggcgactcccttgccaggggctgggcaggtgtggagaggggcggagcggtgctgccctgggcgatggagcctcccgctctggacggttcgccgcccctgccccaggaaggcgctgcaggatctgggtggggaaggggagggacgagggaacacaggccaggccaggtggccctttagacctgggtgatgcaggaggggctgtgggagaccagagaggacccgaagcagaaaccgggaactgataactctggctgaatatttgtcctcttgctgaagtttgaaagtcagttatttmattaaagtttaattttattataaaaataacaactattaaaaattccatgtagtcactggaatgataaattttggtgcagtttcagcataacactctaattattcaaattgcggccatgtttcaaaa

SEQ ID NO: 351170 - DNA, 615 bp, Homo sapiens
cagttttaagtaaaataaataaaaggaaacaatcttaactcatcgcctaccggaagggacgtgcccccgctcccaggtgagtgggaccctgctctccgggcgggttgcgccgcggtctctggcacctcttgttggcagcgtcgccgttgcaggcacagggcaggtattggggggcgggcagcgggccaggcccaggcgactcccttgccaggggctgggcaggtgtggagaggggcggagcggtgctgccctgggcgatggagcctcccgctctggacggttcgccgcccctgccccaggaaggcgctgcaggatctgggtggggaaggggagggacgagggaacacaggccaggccaggtggccctttagacctgggtgatgcaggaggggctgtgggagaccagagaggacccgaagcagaaaccgggaactgataactctggctgaatatttgtcctcttgctgaagtttgaaagtcagttatttaattaaagtttaattttattataaaaataacaactattaaaaattccmtgtagtcactggaatgataaattttggtgcagtttcagcataacactctaattattcaaattgcggccatgtttcaaaa

SEQ ID NO: 351171 - DNA, 604 bp, Homo sapiens
aattttggatatttttcccttatatttttgtgtaagactttcagacttacacattttgagtttttaaaaaaatatagtataaactacaattctgacttctatattttacatgttgatagcaaatcttcataccttttttgtgttaaagggggctattattccctctccatagtttggcctttgcacccttgttgaagatcattttgaccatatatacaaggttttgtggagagaggggtctctattattttctatgtctacacgtcttgatttaatacatttctttttagattttctcctttttactttttgagacaggttctctgtcatccaggctggggtgcactggtgcgaccatggctcactgcagacttgctctcccaggcttaaaaaatcctctcacttcagcctctggaatagctgagactacaggttcatgtcacattgccaggttaattttaattttaattgtttttttagcgatggrtgttctcactaggatgtccagtgtggtttgaactcctgggttcaagcaatcctcctacctcagcctcacaaagtgctgaggttacacgtgtaagccatagaacctggcctcaaaata

SEQ ID NO: 351172 - DNA, 596 bp, Homo sapiens
ccctgcctgtgtccaagtattctcattgtttaatttccacctatgagtgagaatatgcagtgtttggttttctgaccttgcgatagtttaaacaaactaggaagttcagaagtcactttacaagagaaataaagaaaaataaagtattaatgacattggtaacagaataaaaattagagttagacaaagtattarcaagcaagcttatatatttataagagatgggaaaatattagaaaggaataaatcatgtcttgtcaacatgaagaaaaagtgtatttttttgttaacttattattgtgtttccttgtataattttcacttggttttgttggttttactacttgcttcattctttcaaaaactacatcttcatagaccatttcagcttttgctatgtaggcagaattataaaacccaatttcaaaatttcaactgaacgttgtcagcatttttctttgggctttttattgaaaaaaaaaaacctaagtaattgtgtgtgtgtgtattttagtattaccatgaatgtaataacaataaagtcaaacaaaaacaaatggatatgcaatatgttggactagcatctcaaatatgaa

SEQ ID NO: 351173 - DNA, 596 bp, Homo sapiens
ccctgcctgtgtccaagtattctcattgtttaatttccacctatgagtgagaatatgcagtgtttggttttctgaccttgcgatagtttaaacaaactaggaagttcagaagtcactttacaagagaaataaagaaaaataaagtattaatgacattggtaacagaataaaaattagagttagacaaagtattagcaagcaagcttatatatttataagagatgggaaaatattagaaaggaataaatcatgtcttgtcaacatgaagaaaaagtgtatttttttgttaacttattattgtgtttccttgtataattttcacttggttttgttggttttactacttgcttcattctttcaaaaactacatcttcatagaccatttcagcttttgctatgtrggcagaattataaaacccaatttcaaaatttcaactgaacgttgtcagcatttttctttgggctttttattgaaaaaaaaaaacctaagtaattgtgtgtgtgtgtattttagtattaccatgaatgtaataacaataaagtcaaacaaaaacaaatggatatgcaatatgttggactagcatctcaaatatgaa

SEQ ID NO: 351174 - DNA, 339 bp, Homo sapiens
aaaggaataaatcatgtcttgtcaacatgaagaaaaagtgtatttttttgttaacttattattgtgtttccttgtataattttcacttggttttgttggttttactacttgcttcattctttcaaaaactacatcttcatagaccatttcagcttttgctatgtaggcagaattataaaacccaatttcaaaatttcaactgaacrttgtcagcatttttctttgggctttttattgaaaaaaaaaaacctaagtaattgtgtgtgtgtgtattttagtattaccatgaatgtaataacaataaagtcaaacaaaaacaaatggatatgcaatatgttg

SEQ ID NO: 351175 - DNA, 596 bp, Homo sapiens
ccctgcctgtgtccaagtattctcattgtttaatttccacctatgagtgagaatatgcagtgtttggttttctgaccttgcgatagtttaaacaaactaggaagttcagaagtcactttacaagagaaataaagaaaaataaagtattaatgacattggtaacagaataaaaattagagttagacaaagtattagcaagcaagcttatatatttataagagatgggaaaatattagaaaggaataaatcatgtcttgtcaacatgaagaaaaagtgtatttttttgttaacttattattgtgtttccttgtataattttcacttggttttgttggttttactacttgcttcattctttcaaaaactacatcttcatagaccatttcagcttttgctatgtaggcagaattataaaacccaatttcaaaatttcaactgaacgttgtcagcatttttctttgggctttttattgaaaaaaaaaaacctaagtaattgtgtgtgtgtgtattttagtattaccatgaatgtaataacaataaagtmaaacaaaaacaaatggatatgcaatatgttggactagcatctcaaatatgaa

SEQ ID NO: 351176 - DNA, 584 bp, Homo sapiens
actttttgacataggtgtttagggctacaaactttcctcttagcactgcctttgctgtatcccagaggtcttgattggttgtgtcatccagttcaaagaaattttttccatttcyatcttgattttgtttttcacccagtgctcattcaggagcaggttatttaatttccatgtatttgcatggttttgaagattccttttggagttgattttcagttttattccactgtgatctgagacagtgcgtggtacaatttcaattttcttaaatttattgagactcattttatggcctatcatatggtctatcttggagaaaattccatgtgctgttgcatggaatgtgtattctgtggttgttggatgaaatgttcttatatatctgttaagtccatttgttccaaagtatagtttaaatccagtgtttctttgttgactttctgtcttgatgacctgtctagtgctgtcagtggagtaatgaagtcccccactattattgtgttgctgtctatcttatttcttatgtttactagtgattgttttataaatttgggagctccagtgttaggttcatgtatgtttag

SEQ ID NO: 351177 - DNA, 584 bp, Homo sapiens
actttttgacataggtgtttagggctacaaactttcctcttagcactgcctttgctgtatcccagaggtcttgattggttgtgtcatccagttcaaagaaattttttccatttccatcttgattttgtttttcacccagtgctcattcaggagcaggttatttaatttccaygtatttgcatggttttgaagattccttttggagttgattttcagttttattccactgtgatctgagacagtgcgtggtacaatttcaattttcttaaatttattgagactcattttatggcctatcatatggtctatcttggagaaaattccatgtgctgttgcatggaatgtgtattctgtggttgttggatgaaatgttcttatatatctgttaagtccatttgttccaaagtatagtttaaatccagtgtttctttgttgactttctgtcttgatgacctgtctagtgctgtcagtggagtaatgaagtcccccactattattgtgttgctgtctatcttatttcttatgtttactagtgattgttttataaatttgggagctccagtgttaggttcatgtatgtttag

SEQ ID NO: 351178 - DNA, 603 bp, Homo sapiens
acttggttggacccttttcttggttcagctgtcagaagctaaatgttcccttcctctctctctttgcagtctgttcatgacatttggtattcctaatatgcccacttggaggaaattgccagcttaggccaaccagggtgaaatgcatgcacttataaactcataagcccaataataattttcagaaggaggcactcattcacttcggcttataaacttgcaaatctgtagattcattagtctatcacttacatggaaagacaaaatttatatttaattgttgagacttgacttcaaaattttcaagaatatcaacatttgtttttgttgtgcacctctctgtcaaaagataaatacgtagtacataatcattattatttattaataatatactctgcatggtcttacatttcayagttcatgcattgtttattcattaatataacctgttaacgttaatatgcaccacattaccgagagcccttgtcaactcctcagaagcaactaactcccaaggtaactatgacaacgaatctcttaatgcttaaagtgtaacaaaaagattgtgtgatttggatgttaattcaaatatttcctatacag

SEQ ID NO: 351179 - DNA, 603 bp, Homo sapiens
acttggttggacccttttcttggttcagctgtcagaagctaaatgttcccttcctctctctctttgcagtctgttcatgacatttggtattcctaatatgcccacttggaggaaattgccagcttaggccaaccagggtgaaatgcatgcacttataaactcataagcccaataataattttcagaaggaggcactcattcacttcggcttataaacttgcaaatctgtagattcattagtctatcacttacatggaaagacaaaatttatatttaattgttgagacttgacttcaaaattttcaagaatatcaacatttgtttttgttgtgcacctctctgtcaaaagataaatacgtagtacataatcattattatttattaataatatactctgcatggtcttacatttcacagttcatgcattgtttattcattaatataacctgttaacgttaatatgcaccacattaccragagcccttgtcaactcctcagaagcaactaactcccaaggtaactatgacaacgaatctcttaatgcttaaagtgtaacaaaaagattgtgtgatttggatgttaattcaaatatttcctatacag

SEQ ID NO: 351180 - DNA, 603 bp, Homo sapiens
acttggttggacccttttcttggttcagctgtcagaagctaaatgttcccttcctctctctctttgcagtctgttcatgacatttggtattcctaatatgcccacttggaggaaattgccagcttaggccaaccagggtgaaatgcatgcacttataaactcataagcccaataataattttcagaaggaggcactcattcacttcggcttataaacttgcaaatctgtagattcattagtctatcacttacatggaaagacaaaatttatatttaattgttgagacttgacttcaaaattttcaagaatatcaacatttgtttttgttgtgcacctctctgtcaaaagataaatacgtagtacataatcattattatttattaataatatactctgcatggtcttacatttcacagttcatgcattgtttattcattaatataacctgttaacgttaatatgcaccacattaccgagagcccttgtcaactcctcagaagcmactaactcccaaggtaactatgacaacgaatctcttaatgcttaaagtgtaacaaaaagattgtgtgatttggatgttaattcaaatatttcctatacag

SEQ ID NO: 351181 - DNA, 603 bp, Homo sapiens
acttggttggacccttttcttggttcagctgtcagaagctaaatgttcccttcctctctctctttgcagtctgttcatgacatttggtattcctaatatgcccacttggaggaaattgccagcttaggccaaccagggtgaaatgcatgcacttataaactcataagcccaataataattttcagaaggaggcactcattcacttcggcttataaacttgcaaatctgtagattcattagtctatcacttacatggaaagacaaaatttatatttaattgttgagacttgacttcaaaattttcaagaatatcaacatttgtttttgttgtgcacctctctgtcaaaagataaatacgtagtacataatcattattatttattaataatatactctgcatggtcttacatttcacagttcatgcattgtttattcattaatataacctgttaacgttaatatgcaccacattaccgagagcccttgtcaactcctcagaagcaactaactcccaaggtaactatgacaacraatctcttaatgcttaaagtgtaacaaaaagattgtgtgatttggatgttaattcaaatatttcctatacag

SEQ ID NO: 351182 - DNA, 569 bp, Homo sapiens
tgctttcattgttactttatctgtttgatttcttgtctaaagtttgataatggcaactaacccatttttaagagaaattaaaatggataacatgcatgtgatattctgtgaaaattgcatgacttcttttaattaatttaaggaaactatagatgtgtagttagggctttaaaccaaactggtgcaatttattttctgctaaattacaaagttatttgattgaactgacaagtaatattgctttgttttatttttaattcgttactgtgcaaattcacatttggggaatgkaagattatataggaaaccttgaaccacctttaaataactatatttttatttattaagccacaaacagtttagttatgttgttatgagcaaatatatttactattttttctctgcaataggaatagagatttcttttgctcttctatctcaactgaaaagcatatgttttctggatcactgccattggctccttccatagtatttaataaatatatgcatttcatagtgttaggcttgtataaatacactactaacttctcttcactataaatgaactt

SEQ ID NO: 351183 - DNA, 410 bp, Homo sapiens
catagtgttaggcttgtataaatacactactaacttctcttcactataaatgaacttgagcaactctcatatctacaatttctagcaccagraaagtgacattttcctttaagatggggaataggccttttgaggtcatggtggagtcatatactcccttttatgacaattattagcaccacgtgagggcagagaggaatgtaaaaaaagtatcatttcaagttactaagctacaacctgccaccactgatggcatgtccacttacagctcacgagccagctcttcatcaataagtgctgctttgcagtggtttgtaattgaattgtatgatgtaaatgtggagacagccaatcatgatgttacaggatctttggggtgtcgattttcttgcccagaaacctctgtggac

SEQ ID NO: 351184 - DNA, 492 bp, Homo sapiens
gagcaaatatatttactattttttctctgcaataggaatagagatttcttttgctcttctatctcaactgaaaagcatatgttttctggatcactgccattggctccttccatagtatttaataaatatatgcatttcatagtgttaggcttgtataaatacactactaacttctcttcactataaatgaacttgagcaactctcatatctacaatttctagcaccagaaaagtgacattttcctttaagatgggkaataggccttttgaggtcatggtggagtcatatactcccttttatgacaattattagcaccacgtgagggcagagaggaatgtaaaaaaagtatcatttcaagttactaagctacaacctgccaccactgatggcatgtccacttacagctcacgagccagctcttcatcaataagtgctgctttgcagtggtttgtaattgaattgtatgatgtaaatgtggagacagccaatca

SEQ ID NO: 351185 - DNA, 410 bp, Homo sapiens
catagtgttaggcttgtataaatacactactaacttctcttcactataaatgaacttgagcaactctcatatctacaatttctagcaccagaaaagtgacattttcctttaagatggggaataggccttttgaggtcatggtggagtcatatactcccttttatgacaattattagcaccacgtgagggcagagaggaatgtaaaaaaagtatcatttcaagttamtaagctacaacctgccaccactgatggcatgtccacttacagctcacgagccagctcttcatcaataagtgctgctttgcagtggtttgtaattgaattgtatgatgtaaatgtggagacagccaatcatgatgttacaggatctttggggtgtcgattttcttgcccagaaacctctgtggac

SEQ ID NO: 351186 - DNA, 492 bp, Homo sapiens
gagcaaatatatttactattttttctctgcaataggaatagagatttcttttgctcttctatctcaactgaaaagcatatgttttctggatcactgccattggctccttccatagtatttaataaatatatgcatttcatagtgttaggcttgtataaatacactactaacttctcttcactataaatgaacttgagcaactctcatatctacaatttctagcaccagaaaagtgacattttcctttaagatggggaataggccttttgaggtcatggtggagtcatatactcccttttatgacaattattagcaccacgtgagggcagagaggaatgtaaaaaaagtatcatttcaagttactaagctacaacctgccaccactgatggcatgtccacttacagctcacgagccagctcttcatcaataagtgctgctttgcagtggtttgtaattgaattgtatgaygtaaatgtggagacagccaatca

SEQ ID NO: 351187 - DNA, 572 bp, Homo sapiens
acaaaaattaccgaactgctaaatatgtgtatcactctaggaaatgaaagacacctcttcaactgcttttgtgtcttgacttttttcccaaaggaagacctatattttgcttcatttctttctactctacatttctttttactctgcttgcatttagtttaaaagaaaaagctctctgttggtgatttctaatctattttaaagtaaataattgtactgtccaattagagactgagataactcatgaattatcacacaggttgttctcctgtacaatatatatgattttgagtactaatattacacagtgaattcagaattgtgtgtatgtacatacataccatagtcttataaataacttcaacttgcaataattaacttgcagttaattcttacagtagtatgagtttgggcctcttaaaaaaagaactaaaaccaactccctgcctgagaatagaaacacacacacacacacacacacacacacacasaccaaattgaataatcttgttttctcgcttacaattgtgggcattcatttatggaattcttggcagctatgttagcataaa

SEQ ID NO: 351188 - DNA, 572 bp, Homo sapiens
acaaaaattaccgaactgctaaatatgtgtatcactctaggaaatgaaagacacctcttcaactgcttttgtgtcttgacttttttcccaaaggaagacctatattttgcttcatttctttctactctacatttctttttactctgcttgcatttagtttaaaagaaaaagctctctgttggtgatttctaatctattttaaagtaaataattgtactgtccaattagagactgagataactcatgaattatcacacaggttgttctcctgtacaatatatatgattttgagtactaatattacacagtgaattcagaattgtgtgtatgtacatacataccatagtcttataaataacttcaacttgcaataattaacttgcagttaattcttacagtagtatgagtttgggcctcttaaaaaaagaactaaaaccaactccctgcctgagaatagaaacacacacacacacacacacacacacacacacaccaaattgaataatcttgttttctcrcttacaattgtgggcattcatttatggaattcttggcagctatgttagcataaa

SEQ ID NO: 351189 - DNA, 526 bp, Homo sapiens
aatatgaatatatatagtaaataaataaatgaagtaatttgccattacttaacatttcattaaatgtatgtttccaaaattatatttgttcttgagaccttttgagtgatcacagtttctgctattctccataaggcctcagtttgacagggtgatgaaatcttgaataaaacwcaaaggaatgtgtttgtatttgcagtgcttcccttgcaggtgaaatggccaccagacccaggctttctggaatgcattcattttctgcagttgaaagggacaatcccggatctgaaagaaagagccacagtgactccaagagtggagccagggcatgctggacactgcatagctatggccaagtgtgtcacctctgagggagatgtgagagaaacgcagagggatcgcttgtgactgtgccttctcgatgtatgatggactgttctgctcaaatagtaagtgtgaccaaggagccggtgaacataggaaacaaagaatatttcatttgacattataaggaatgcgacaattc

SEQ ID NO: 351190 - DNA, 526 bp, Homo sapiens
aatatgaatatatatagtaaataaataaatgaagtaatttgccattacttaacatttcattaaatgtatgtttccaaaattatatttgttcttgagaccttttgagtgatcacagtttctgctattctccataaggcctcagtttgacagggtgatgaaatcttgaataaaacacaaaggaatgtgtttgtatttgcagtgcttcccttgcaggtgaaatggccaccagacccaggctttctggaatgcattcattttctgcagttgaaagggacaatcccggatctgaaagaaagagccacagtgactccaagagtggagccagggcatgctggacactgcatagctatggccamgtgtgtcacctctgagggagatgtgagagaaacgcagagggatcgcttgtgactgtgccttctcgatgtatgatggactgttctgctcaaatagtaagtgtgaccaaggagccggtgaacataggaaacaaagaatatttcatttgacattataaggaatgcgacaattc

SEQ ID NO: 351191 - DNA, 539 bp, Homo sapiens
tttgaataaacttttggggattagttactttgatgttgtcaagatagcaccatagtaagtcctctgtctttcctcttgatttatttataatttagaatcagtttatgattttaaaaaatgtgacagacacagtggcatgcaccagtagtaccagccacatgggaaactgaggcagaaggatcacttgatcccagaagatagagaccaccctgggcaacatagtgagagccccatctcaaaaaaaaaaaatcarttcccaataccattccagaacacttttaatataaccagatgaaattgtgatcactactttactgtaatgtttaaaatggtcctcagtccatatttaagtacaatcttagtgtttctgtgcaacctaatatattagaaacaaaaattgtattgcatttgaataggaaatactctgaattgagggttatttcttttaacagttgcaattagattggttagtgacaattatctgtaattttcaggcaatgcctaggcaagtgcccaaggcacagtagcctcctccttgc

SEQ ID NO: 351192 - DNA, 636 bp, Homo sapiens
ccagccatcacctcttgtaaagtgcagtatagaaacagtgggcaatagacaggcaggggatagaggaaaatgttttgggagtgggacaatatgaacttattgtcatgacaggaccaaaaagggaagatgtctgcctatcataattaataataactctatcagtcaacatttatgttttacawttgttctgtaaaagaaaagccagcaaacattacagattctagtccctaataactgatcaagaaagacactctaagcttgtgcatcagcattctctttttatctaaaagaaaatatattaaataaagggaggaatggcaggagtaaagagacttgaaggaaaagaaaatattgactttttaatgatattttacaatgctaagatctttagaaaccaactattccatatgtcttttaaatattagtttggtgcaaaggtaattacagtttttgtcatataagtaatggcaaaagccacaattactcttgcaccgacctaactgatacattcattccattttggaggtattgcaaatatgctgaatcaatgaacttcttcagtatttttcattgtattcgtacaaatttaacctaatagtattcttctgcatgttatttccctttgtgcttccttta

SEQ ID NO: 351193 - DNA, 636 bp, Homo sapiens
ccagccatcacctcttgtaaagtgcagtatagaaacagtgggcaatagacaggcaggggatagaggaaaatgttttgggagtgggacaatatgaacttattgtcatgacaggaccaaaaagggaagatgtctgcctatcataattaataataactctatcagtcaacatttatgttttacatttgttctgtaaaagaaaagccagcaaacattacagattctagtccctaataactgatcaagaaagacactctaagcttgtgcatcagcattctctttttatctaaaagaaaatatattaaataaagggaggaatggcaggagtaaagagacttgaaggaaaagaaaatattgactttttaatgatattttacaatgctaagatctttagaaaccaactattccatatgtcttttaaatattagtttggtgcaaaggtaattacagtttttgtcatataagtaatggcaaaagccacaattactcttgcaccgacctaactgatacattcattccattttggaggtattgcaaatatgctgaatcaatgaacttcttcagtatttttcattgtattmgtacaaatttaacctaatagtattcttctgcatgttatttccctttgtgcttccttta

SEQ ID NO: 351194 - DNA, 560 bp, Homo sapiens
acaaacggccattcgtggatcatttgcaaagctgaacgaatacttgacatgtctttctgtgattccttgcagatatcatggaaatcaggacagtagcagttgggattgtggcaatcaaaggggtggaaagtgaattctatcttgcaaygaacgaggaaggaaaactctatgcaaaggtattgataattgatagcttaggcttaatttttaaaactcttttgttgaaatatctcaccattctgaaaagtaaaaatggacttaatttatctccaactgtataatttaatgattttattaaaacactttatactcaaacattaagaaaaaatgttttctgtgtgactttggacaaatggcttgttctttggattttggtttcttcatctgtaaaatgagttgaattagctgacctctaaggatcctgccagctctaaaattccatgtgcattttagatatttaaaatccaaaatttccatttgccagtattaaagctctttttgttaaagttcactcaatttgcacattgctgacatgaaaattcttgggaaaaaatcttgaa

SEQ ID NO: 351195 - DNA, 193 bp, Homo sapiens
taaaatccaaaatttccatttgccagtattaaagctctttttgttaaagttcacycaatttgcacattgctgacatgaaaattcttgggaaaaaatcttgaaatgtttagttcattcatcaatatcaatctgacaatcatgggctttgaactgtaattattcacattgttcccacttcactacaatgcaaaat

SEQ ID NO: 351196 - DNA, 560 bp, Homo sapiens
acaaacggccattcgtggatcatttgcaaagctgaacgaatacttgacatgtctttctgtgattccttgcagatatcatggaaatcaggacagtagcagttgggattgtggcaatcaaaggggtggaaagtgaattctatcttgcaatgaacgaggaaggaaaactctatgcaaaggtattgataattgatagcttaggcttaatttttaaaactcttttgttgaaatatctcaccattctgaaaagtaaaaatggacttaatttatctccaactgtataatttaatgattttattaaaacactttatactcaaacattaagaaaaaatgttttctgtgtgactttggacaaatggcttgttctttggattttggtttcttcatctgtaaaatgagttgaattagctgacctctaaggatcctgccagctctaaaattccatgtgcattttagatatttaaaatccaaaatttccatttgccagtattaaagctctttttgttaaagttcactcaatttgcacattgctgacatgaraattcttgggaaaaaatcttgaa

SEQ ID NO: 351197 - DNA, 193 bp, Homo sapiens
taaaatccaaaatttccatttgccagtattaaagctctttttgttaaagttcactcaatttgcacattgctgacatgaaaattcttgggaaaaaatcttgaaatgtttagttcattcatcaayatcaatctgacaatcatgggctttgaactgtaattattcacattgttcccacttcactacaatgcaaaat

SEQ ID NO: 351198 - DNA, 511 bp, Homo sapiens
gatgaacaaacaaattaaccttttatcttccattaccattgaagacaatgtagaagtaaataaagaaaagttgtgaaacaagtctctcacctgagggaggcagaggttctgctaattatagcaaatttccagtggttaaagaatgagtgatgtgggaatagtaatatgaggcctgttacttagggggaaataggtcctaattttaaagaatagttgacatgaacttccaaaaagctacacatatttcataactagctgtgtattatgtggtgtttctatttcaaatttaagatacctyttaatgcaaatatactacataagtctagctaataaaccacattaggcctgctcaatctgagggttaaaaaaagttgtgtatgtttcaattctaccaaatattacctgcttactcttcgtttaattgagcctctctaaaaatcatttggatcatgtttgtttgtttgtttgtttgtttgtttgttttaacagaaggaatgcaatgaagattgta

SEQ ID NO: 351199 - DNA, 623 bp, Homo sapiens
gtttctatttcaaatttaagataccttttaatgcaaatatactacataagtctagctaataaaccacattaggcctgctcaatctgagggttaaaaaaagttgtgtatgtttcaattctaccaaatattacctgcttactcttcgtttaattgagcctctctaaaaatcatttggatcatgtttgtttgtttgtttgtttgtttgtttgttttaacagaaggaatrcaatgaagattgtaacttcaaagatctaattctggaaaaccattacaacacatatgcagcagctaaatggacaaacaacggaggggaaatgtttgtggccttaaatcaaaaggggattcctgtaagaggaaaaaaaaacaaagaaagaacaaaaaacagcccactttcttcctatggcaataacttaattgcatatggtatataaagaaccagttccagcagggagatttctttaagtggactgttttctttcttctcaaaattttctttccttttattttctagtaatcaagaaaggctggaaaactactgaaaaactgatcaagctggacttgtgcatttatgtttgttttaaggcactgcattaaagagacatttgaaaagtatacacaaaaat

SEQ ID NO: 351200 - DNA, 607 bp, Homo sapiens
atttccacttccaaagtctgtcattggcagatcttggtagcactttatatgtttaccaatgggaggtcaacatctatctaatttaaaagctatgctaaccattgtggttttaatttcaaaatatttgtcatamaagtccctttacataaatagtatttggtaatacatttatagatgagagttatatgaaaaggctaggtcaccaaaacaatagattcatttaattttcctgtggttgacctatacgaccaggatgtagaaaactagaaagaactgcccttcctcagatatactcttgggagagagcacaaatggtattctgaactatcacctgattcaaggactttgctagctaggttttgaggtcaggcttcagtaactgtagtcttgtgagcatattgagggcagaggaggacttagttttttgtatgtgtttccttagtgcctagcagactatctgttcataatcagttttcagtgtgaattcattgaatgtttatagacaaaagaaaatacataataaaactaatcttcattttaaaagggtaaaacatgactacacagaaatttaaatagaaatagtgtatatacatataaaatacaagct

SEQ ID NO: 351201 - DNA, 607 bp, Homo sapiens
atttccacttccaaagtctgtcattggcagatcttggtagcactttatatgtttaccaatgggaggtcaacatctatctaatttaaaagctatgctaaccattgtggttttaatttcaaaatatttgtcatacaagtccctttacataaatagtatttggtaatacatttatagatgagagttatatgaaaaggctaggtcaccaaaacaatagattcatttaattttcctgtggttgacctatacgaccaggatgtagaaaactagaaagaactgcccttcctcagatatactcttgggagagagcacraatggtattctgaactatcacctgattcaaggactttgctagctaggttttgaggtcaggcttcagtaactgtagtcttgtgagcatattgagggcagaggaggacttagttttttgtatgtgtttccttagtgcctagcagactatctgttcataatcagttttcagtgtgaattcattgaatgtttatagacaaaagaaaatacataataaaactaatcttcattttaaaagggtaaaacatgactacacagaaatttaaatagaaatagtgtatatacatataaaatacaagct

SEQ ID NO: 351202 - DNA, 607 bp, Homo sapiens
atttccacttccaaagtctgtcattggcagatcttggtagcactttatatgtttaccaatgggaggtcaacatctatctaatttaaaagctatgctaaccattgtggttttaatttcaaaatatttgtcatacaagtccctttacataaatagtatttggtaatacatttatagatgagagttatatgaaaaggctaggtcaccaaaacaatagattcatttaattttcctgtggttgacctatacgaccaggatgtagaaaactagaaagaactgcccttcctcagatatactcttgggagagagcacaaatggtattctgaactatcacctgattcaaggactttgctagctaggttttgaggtcaggcttcagtaactgtagtcttgtgagcatattgagggcagaggaggacttagtttttygtatgtgtttccttagtgcctagcagactatctgttcataatcagttttcagtgtgaattcattgaatgtttatagacaaaagaaaatacataataaaactaatcttcattttaaaagggtaaaacatgactacacagaaatttaaatagaaatagtgtatatacatataaaatacaagct

SEQ ID NO: 351203 - DNA, 607 bp, Homo sapiens
ctaaataaagaaaaaagatcccaaataaacctcaaaaaatagaaaaaaataatcaagcccaaaattagaagaaggaaataacaaagatcatagcagaaataaatgaaatagactagaaaaacaatagaaaagatsaatgaaacgaagagttgattttttgaaaagataataaatattgaccaacctctcactaggccaagaaaaaagaaatctcaagtaaataaaattagaacaaaaaaggagatattaaaattggtaccatagaaatacaaaggataataatagtctactctaaacaactatgtgtcaacaaattgtttaacttagaatagagaaatttctagaaacatacatccactagactgaaacatgaagaaatagaaaataaaaacagataaataatgattaaaaatattgagtcagtagtcaaaaagctcctgaaaaaggaaaatccaagaccagatagcttagtggagaattctaccaaatgtttgaagaagaattaatacgatttcttcacaaactcttccaaaagttgaagaggagggaacacttccaaacattttttatgaggccagcattaccctgataacaaagacagaaaagg

SEQ ID NO: 351204 - DNA, 607 bp, Homo sapiens
ctaaataaagaaaaaagatcccaaataaacctcaaaaaatagaaaaaaataatcaagcccaaaattagaagaaggaaataacaaagatcatagcagaaataaatgaaatagactagaaaaacaatagaaaagatcaatgaaacgaagagttgattttttgaaaagataataaawattgaccaacctctcactaggccaagaaaaaagaaatctcaagtaaataaaattagaacaaaaaaggagatattaaaattggtaccatagaaatacaaaggataataatagtctactctaaacaactatgtgtcaacaaattgtttaacttagaatagagaaatttctagaaacatacatccactagactgaaacatgaagaaatagaaaataaaaacagataaataatgattaaaaatattgagtcagtagtcaaaaagctcctgaaaaaggaaaatccaagaccagatagcttagtggagaattctaccaaatgtttgaagaagaattaatacgatttcttcacaaactcttccaaaagttgaagaggagggaacacttccaaacattttttatgaggccagcattaccctgataacaaagacagaaaagg

SEQ ID NO: 351205 - DNA, 526 bp, Homo sapiens
tatgttaaaagctgagacaggccaaaaggcccaggctggtctcgaackcctgacctcaagcaatccacctgccgcagcctcccaggtagctgagattaaaggcatgagccaccatgtccagcttctatgcattattttaaatggagtattgaagactctgttactgtagaactatttctaacttcaattctgtcaatatttgggtcacaggccttaatgtgattacacgctggtctgatgctcatggccaggacattttgttttcctgttggacataaacaatctcacagaatatcaacttcagaaggttaatctgagaccgtgataagtgcaaacaaaaacaagggcactttataatgttgtctaagtgcagataaaaaacaaggtcttgatgccacccacaaaatacttaataatcatattgctcctgctttctgacagcatccaatctaaagtcttcactttctgagatcctgtccgaaatcaaccaattaaagtccaaatcgtataatagtttctctctaac

SEQ ID NO: 351206 - DNA, 526 bp, Homo sapiens
tatgttaaaagctgagacaggccaaaaggcccaggctggtctcgaactcctgacctcaagcaatccacctgccgcagcctyccaggtagctgagattaaaggcatgagccaccatgtccagcttctatgcattattttaaatggagtattgaagactctgttactgtagaactatttctaacttcaattctgtcaatatttgggtcacaggccttaatgtgattacacgctggtctgatgctcatggccaggacattttgttttcctgttggacataaacaatctcacagaatatcaacttcagaaggttaatctgagaccgtgataagtgcaaacaaaaacaagggcactttataatgttgtctaagtgcagataaaaaacaaggtcttgatgccacccacaaaatacttaataatcatattgctcctgctttctgacagcatccaatctaaagtcttcactttctgagatcctgtccgaaatcaaccaattaaagtccaaatcgtataatagtttctctctaac

SEQ ID NO: 351207 - DNA, 526 bp, Homo sapiens
tatgttaaaagctgagacaggccaaaaggcccaggctggtctcgaactcctgacctcaagcaatccacctgccgcagcctcccaggtagctgagattaaaggcatgagccaccatgtccagcttctatgcattattttaaatggagtattgaagactctgttactgtagaactatttctaacttcaattctgtcaatatttkggtcacaggccttaatgtgattacacgctggtctgatgctcatggccaggacattttgttttcctgttggacataaacaatctcacagaatatcaacttcagaaggttaatctgagaccgtgataagtgcaaacaaaaacaagggcactttataatgttgtctaagtgcagataaaaaacaaggtcttgatgccacccacaaaatacttaataatcatattgctcctgctttctgacagcatccaatctaaagtcttcactttctgagatcctgtccgaaatcaaccaattaaagtccaaatcgtataatagtttctctctaac

SEQ ID NO: 351208 - DNA, 526 bp, Homo sapiens
tatgttaaaagctgagacaggccaaaaggcccaggctggtctcgaactcctgacctcaagcaatccacctgccgcagcctcccaggtagctgagattaaaggcatgagccaccatgtccagcttctatgcattattttaaatggagtattgaagactctgttactgtagaactatttctaacttcaattctgtcaatatttgggtcacaggccttaatgtgattacacgctggtctgatgytcatggccaggacattttgttttcctgttggacataaacaatctcacagaatatcaacttcagaaggttaatctgagaccgtgataagtgcaaacaaaaacaagggcactttataatgttgtctaagtgcagataaaaaacaaggtcttgatgccacccacaaaatacttaataatcatattgctcctgctttctgacagcatccaatctaaagtcttcactttctgagatcctgtccgaaatcaaccaattaaagtccaaatcgtataatagtttctctctaac

SEQ ID NO: 351209 - DNA, 580 bp, Homo sapiens
taattatcgatttgtgtcagttgcccattttctcacttcctgtttgtgtgtcaaggggtattaataaatctttgcctatttaaagatattagccttggattttcaaatattgcatattttgacatgtaaaaatttgttagttttattttttcaaccgatctgacctgtatagttgggcttgaggaagcttcctcattctacatgttactatggattttctaatattaacacagggttgtattttttccatataactttctattgaatttctttttccatatgataggtggtgaaggtttagcccagtaaagcagagaggttaagaggttagattgggggctctggagccagacctrtgtagatctgagtcctggctctggcacttgaaagccgtgtgaccttggttaagatacttagtccctctctgccaaatggagaaataagggcacctaccccatagggtagttgtgtgattacacaagttaatacacttcaatcagtagcaagaaagtgaatgtcaagctgtatttgttcaggcagccatatggtagccccacgtccttagtaaactgaggtattg

SEQ ID NO: 351210 - DNA, 648 bp, Homo sapiens
ataatggtctgtaatgaccttttgtatttctgttttatcagttgtaatatctcctttttatctctgattctattccattgagtttttcttttcattagtctacctaaagatttgttgattttgtctaccttttcaaaacaatattttcatttggttgatctttcatatttttagtctcaattttatttatttttgttgtgatctttagtatttcttcttcytgtaattttgggtttgatttattcttgcttttctagtttcatgaggtgcatcattatatttgaaatctttctacctttttatataggcatttatttctataaactacccctcttagtactgctgctgcttttgatatataacataaattttggtatgttgtgtttctatttttatttgttttaagaaattcttaaatattctttttaatttcgttatttacccattggttgttcaggagcatgttgtattggtgcattttccaaagttcctcttgttattgatttctagttttattccattgtggtcaaaaaagatacttgatgtgattttaatttttaaaaatgtgttgagacttgttttgtggcctaacatatggtctatgctgaagaatgctccatgtgctcatgagaagaatatatacacgtt

SEQ ID NO: 351211 - DNA, 597 bp, Homo sapiens
taattgggaaagagaaacgttttagggagtgctgtatgcaactgtgccccacgcaaaactgtagccatgtcagagacccttcctggaggctccctgtccagctttgactgatctctgtaggaaatacagacattcccataggggaagtaagaaactcttggagacattagttgtatttttgttttcatgtagttcaaagaatwattttaatttctgttgagatttcttcttgacccttatgttatttagacgtgtatttctgaatatccaagtattttgagattgcccagctatcattctattactggtttgtataatagtttccagtgttttcggagagcaggtatggcatggtttttatactttgaaatgtgttaaggtgggctttatggcccagaatgtggcctatcttggtgaatgctccatgtgagagtgaaaagaatatgtattctgctgtcattacactaagtaggctatagatgttaattacttccagttgtttgatgatgctgtttagttctaccatattttattgattttctatctattggatctctccatttctgatagagggtgttgatgtttacaactatgatt

SEQ ID NO: 351212 - DNA, 627 bp, Homo sapiens
ctgccaggcacagtagctcacacctgtaatcccagcactttgggaggccaaggcaggtggatcacttgaggtcaggagatcaagacyggcctggccaacatggtgaaaacccacctctactaaaaatacaaaaattagctgggcctggtggtgtgtgcctgtaatcccagctactcaggaggctgaggcagaagaatcacttgaacctgggaggcggaggttgcagtgagccaagatcacgccattgcactctgcaccccagcctgggtgacagagtgagactccatctcagaaagaaaaaaaaaagtgtttaattctccttcacttttgaagactattttgtctaaggcattcatggtatcgcagtatgattctaatttgcattctcatgaatttgctattttcatttactgtttcatcatggacatttttccatgttactacatgtaagtctcccgccctgaagaaataaaccaaaacataaattaacggtactgtatagatgtaccagaattttttaaacctggctcctctgaatggctatgttttctttattttttgttattagaagtaatggtgaaatcagtattcttatcacacatgtatttgcaccgatgttccccacac

SEQ ID NO: 351213 - DNA, 627 bp, Homo sapiens
ctgccaggcacagtagctcacacctgtaatcccagcactttgggaggccaaggcaggtggatcacttgaggtcaggagatcaagaccggcctggccaacatggtgaaaacccacctctactaaaaatacaaaaattagctgggcctggtggtgtgtgcctgtaatcccagctactcrggaggctgaggcagaagaatcacttgaacctgggaggcggaggttgcagtgagccaagatcacgccattgcactctgcaccccagcctgggtgacagagtgagactccatctcagaaagaaaaaaaaaagtgtttaattctccttcacttttgaagactattttgtctaaggcattcatggtatcgcagtatgattctaatttgcattctcatgaatttgctattttcatttactgtttcatcatggacatttttccatgttactacatgtaagtctcccgccctgaagaaataaaccaaaacataaattaacggtactgtatagatgtaccagaattttttaaacctggctcctctgaatggctatgttttctttattttttgttattagaagtaatggtgaaatcagtattcttatcacacatgtatttgcaccgatgttccccacac

SEQ ID NO: 351214 - DNA, 567 bp, Homo sapiens
cgaagtataattactctcaaactgatctcccctgatgcattgggatctagcaacactagccmccttgctttttctcacacactccaggcatcctcccctttaagatttgtgtactagctattctctctatttcaagtgctctcccccaagaatctccacagctaactctcacctctttcaaggctttaatcaaatgccacattctatttatagatatagttatttttccctatttatagttataactcctactctcaccccttactctcaattttcattgtcctcttctcattttattttcccaaagtccttttcactttttatattatatgaaatgtaggatgtaaattggttacatttattctttattttctgattcacacaaaaagaatataagctaagccctatgaggcacatattttttgtttgttttggtcattaatatgtcatgtcttgcatagtaggcacttaatatgtgtgtgttaaatgaaataatgtaaatgaatgaagttattatacatgattttatggtcagttgatattttcaatatgtattatctatcatgt

SEQ ID NO: 351215 - DNA, 564 bp, Homo sapiens
gagttattagttctgtgtctccctatataagagaatataaactctatgagagcttcagtattttgttcactctatcccccagtgtctaaaatactgcatgagtgaatggatagttgaaactagcagggtttattatgttagtaaatttgataattaatgacttctattgtcatattgtggtgcttagcagaaactcaaataactttttttaagattatcatactttttaagtaacytcatttagagaaaaaaggttattaatttattcattaacatccccttgacatttataaaatgcctaccctattttgaacacagttacttactagaattacaaaaatgaatgtcacaatctttacactgataaagttcgcaggctttcataaagatctagtcctgtaaaagaataagtaacataatatgtgtaacgtgctgtattaataaaacccccggttgatcaggtatctcagtaaaactgaaagtttaacttaatttcaaaatctctaattatttcatcaatcgcaaacacaaaatattgtcatctctattctttaaaaatggaaa

SEQ ID NO: 351216 - DNA, 279 bp, Homo sapiens
ttgagtattttatatgattcccttttctttcctcttttagcgcatcaattatgcttctttaaaaaatttttagtgattgctctagagtttgcaatatacatttacaactaaacacatttcaataatastgcattacttaacaggtagtacattcacaatttcttcctcccattctgtatacaattgataccattcatttcacttatttataagttgtattcacctaatacattattattgttttgaaaaattatctattaaaataattataaacaagaa

SEQ ID NO: 351217 - DNA, 279 bp, Homo sapiens
ttgagtattttatatgattcccttttctttcctcttttagcgcatcaattatgcttctttaaaaaatttttagtgattgctctagagtttgcaatatacatttacaactaaacacatttcaataatagtgcattacttaacaggtagtacattcacaatttcttcctcccattctgtrtacaattgataccattcatttcacttatttataagttgtattcacctaatacattattattgttttgaaaaattatctattaaaataattataaacaagaa

SEQ ID NO: 351218 - DNA, 418 bp, Homo sapiens
atgattttgacttgttacagaaatttacatcatatttcccagaaatgttcttatcactcataccctatgaatattaaaaatgtctaaagccttgacatttttatttgcattgtttctactttgacacaaatattaatgtttctttggttattatrtagaaaataataactgtatgtgatgctcaaacataactagagacttgaacccaatttgtacagatgattgcctgaaaggaatagaggtgttaacgaatacaagctaaagtcatacagcttccaaaatgttttaccaattactacaaatccttaaaagcttacaagtcaaaatttcatggttcaaatgtcaaatgtaaattgtgtttttcattctcacttttccattgttgttgtttttataatttaatgaaggttattcagca

SEQ ID NO: 351219 - DNA, 513 bp, Homo sapiens
taaaaactcttaaactgaattactaatattattttacaataatattttacaagactccaaaggtccaaatttatttttccttgcccattatatttgaacatctttgttctacattttctgcttattagtaccattttgcttattaataacaaagcctcacttttcatttttgaaaccctgtgttttagcaaaataaaaagataactgttcatatttgcacttactgtgtatccaatactattctacaaaggacactttattattcagttatatacacacatatgtaaatacgaactaaatgtaataccagcaccttgggaggcctaggcggtggatcacctgaggtcaactgttaaagaccagcctggtcaacatggkgaaaccccatttctactaaaaatacaaaaattagccggatgtggtggtgcgtaactgcaatcccaactacttgggaggctaaggcaggagaatggcttgaaccctgaaagtggaggttgcagtgagccaagattg

SEQ ID NO: 351220 - DNA, 513 bp, Homo sapiens
taaaaactcttaaactgaattactaatattattttacaataatattttacaagactccaaaggtccaaatttatttttccttgcccattatatttgaacatctttgttctacattttctgcttattagtaccattttgcttattaataacaaagcctcacttttcatttttgaaaccctgtgttttagcaaaataaaaagataactgttcatatttgcacttactgtgtatccaatactattctacaaaggacactttattattcagttatatacacacatatgtaaatacgaactaaatgtaataccagcaccttgggaggcctaggcggtggatcacctgaggtcaactgttaaagaccagcctggtcaacatggtgaaaccccatttctactaaaaatacaaaaattagccggatgtggtggtgcrtaactgcaatcccaactacttgggaggctaaggcaggagaatggcttgaaccctgaaagtggaggttgcagtgagccaagattg

SEQ ID NO: 351221 - DNA, 585 bp, Homo sapiens
atctttcttaatgacaggatatttgaataaagagaatatttatgcggtgaatatcctgtcttctctataaaattaaagctgtagtttccactgtcatgttctcatcaaaatctaaggccattctacctgaatcagtgatatatggacataagacagggaaatacctgtagaaagggtagttccctggcaaaggccccactctcaagcctgaacaaccctggccctaaatgaggacagtcatttctgttttcatgccccaaaagttgccttttggtctgccacacccttcatcctgtgcctatataaacccgagacattagcaggcacagacacaagcagctgaatgttaagaggagaagagaaacacaccagaagacaccagcagaccagtgatgggggaacracatcgggagaaagagagaagaggaaggacatcaggagagtgagtggagttcagaaggggcagttggagaagagtcccggcagctggacagcccagccccaggagaaaaccaccttcccattccatcccccgcttccggctccccaggcatctcgctgacagccacctccaccactcaataa

SEQ ID NO: 351222 - DNA, 596 bp, Homo sapiens
tttttatacattgtttcatcgatataggatttcctgtttcaataaatctctttacaatactgatgaggaaaaaagcaaatagcattcaactgaaaaataaaagtaaaaattaaacatatcctagactatgggaacaatgaataataattacaataacaatgaaaactttaaaaaagccaaaacaactatattgaaagagaaacacaatgatatttaataaaattatgaaattattgatatctmttatcaaagcaaacaaacagaaaatttaactgctcagaccatacttcttaaagtacaaaaaggacacaaaatccacacccagtaaaatgattgcattgcctggtttcactggttgcttcacatgcgtatttgagtaagttctagctagagagataaaatttaaaaaaagctatgataggaaatctagaaaacctattgcgaaggaatggaatcagctgaaatatcactctttatatccttcttatcctttatatccttctgggcctagatgagataatgaatgttgaagcatcaaaagctaccatatatcatgatacgtagttaaggatagaagacaaatgttagtatagcag

SEQ ID NO: 351223 - DNA, 596 bp, Homo sapiens
tttttatacattgtttcatcgatataggatttcctgtttcaataaatctctttacaatactgatgaggaaaaaagcaaatagcattcaactgaaaaataaaagtaaaaattaaacatatcctagactatgggaacaatgaataataattacaataacaatgaaaactttaaaaaagccaaaacaactatattgaaagagaaacacaatgatatttaataaaattatgaaattattgatatctcttatcaaagcaaacaaacagaaaatttaactgctcagaccatacttcttaaartacaaaaaggacacaaaatccacacccagtaaaatgattgcattgcctggtttcactggttgcttcacatgcgtatttgagtaagttctagctagagagataaaatttaaaaaaagctatgataggaaatctagaaaacctattgcgaaggaatggaatcagctgaaatatcactctttatatccttcttatcctttatatccttctgggcctagatgagataatgaatgttgaagcatcaaaagctaccatatatcatgatacgtagttaaggatagaagacaaatgttagtatagcag

SEQ ID NO: 351224 - DNA, 491 bp, Homo sapiens
cattttcatctatgacttcaagacaaaattgaatgtttccagaaatagagaatttcctcatctcagacaaattttgtacccccagaaaaaaatatagcttccagaaacacaaatccaaatttaaggatagaaagagaaatacagaaacacaaagcaatagccaatatttttaaggttcttggagggattaaattcctttttagaaartaaataatttgagaaacattggtttgtaacttatgtgccttagggtggtacctacaactaatactttaccataaaggacttgactaagtagttgaattatacctataacaagtctgctctcatgatttatgggtcataacatttcaggaaccataattttaagttctttagtgaggaggaactggagaccattttactgctttaaagttaattttatgtaagcacatgcatagtaaaacaaatgtttttatttcagaatttgcattcagaatagtctggactca

SEQ ID NO: 351225 - DNA, 491 bp, Homo sapiens
cattttcatctatgacttcaagacaaaattgaatgtttccagaaatagagaatttcctcatctcagacaaattttgtacccccagaaaaaaatatagcttccagaaacacaaatccaaatttaaggatagaaagagaaatacagaaacacaaagcaatagccaatatttttaaggttcttggagggattaaattcctttttagaaagtaaataatttgagaaacattggtttgtaacttatgtgccttaggrtggtacctacaactaatactttaccataaaggacttgactaagtagttgaattatacctataacaagtctgctctcatgatttatgggtcataacatttcaggaaccataattttaagttctttagtgaggaggaactggagaccattttactgctttaaagttaattttatgtaagcacatgcatagtaaaacaaatgtttttatttcagaatttgcattcagaatagtctggactca

SEQ ID NO: 351226 - DNA, 542 bp, Homo sapiens
aaaatttgcagcctgatgatgtgatagaaaagaaaaacccattttctggggagaaattcaagctgactgcagaaatttgcataaataaagaggagccaaatgttaatcaccaagaaaatgggaaaaatgtctccagggcatgacagagatctttatggcagcccctcctatcacaggcctggaggcctaggagggaaaaattgctttgtgggccaggttcaggcacctccttgtctgtgcaccctcaggacatggtrccctgcatcccagccacttcagctccagtggtggctaaaaggggccaaggtacagcttaggccattgctttggagggtgcaagtccctatccttgatggcttccacttcgtgttgggcctacaggtatacagaagtcaaaaattgaggtttgggaacctccacctagatttcagaggatctatggaaatgcctggatgtacaagcagaagttggctgcaagggtggagccctcatggagaacctctgttagggcaatgtggaaggaaaatgtggggttggagccc

SEQ ID NO: 351227 - DNA, 496 bp, Homo sapiens
ggtaaaattgagtatccttgtcttgttctagttctcaggggaaatgctttcatcttttcctcaatctgtgtaatgttggctgtgggtttgttgtagatggcttttattaccttatggcatgtcccttctttgcgaattttgctgagggttttaataataaagggatgctggattttgccagrggctttttctgcctctattgagatgatcatgtgatttttgttttttgttctctgtgtgtactgtatcacatttattgacctctgtatgttaaaccatttctacatctctgttgtgatactcacttgatcatggtggattacctttttatatgcctttagatttggttagctagtattttgctgaggatttttggatctattttcatcagggatgttgatctgtagttttcgttttctgttatgtcctttccaggttttggtattacagtgatactggcttcatagggtgatttaggcaggattgtctctttctt

SEQ ID NO: 351228 - DNA, 525 bp, Homo sapiens
gatgtggtccctcttcaggtttctcagccatggacatcagcacctgctccagtggaggtggcaggggagtgaggtagasactctgtatgagtccttagttgcagttttgtttagtgcactggttttcttgaatgctgcttgtgctagcagtgaagttgtcatgtggacagattcaggacctctggttagccaggatgtcacaggccatggacttagttgttgtttggagcaggattattcttttatgagttgctgtaatggcttgggctaattggcctctagccaggaggtggtacattcaaaggagcatcagctgtggtagtgtgggggtatacaagcttgtcctgaggtcacctgcatagggattcaggtttctaggcaataggtggggtcatagagctcctaagagattgtgtcttttgtgtttggctaccagggtggggagagagagagaccatcaggtgggggcagggttaggcatgtctgagctcatgctttccttgggcagtgatggctggggccacg

SEQ ID NO: 351229 - DNA, 525 bp, Homo sapiens
gatgtggtccctcttcaggtttctcagccatggacatcagcacctgctccagtggaggtggcaggggagtgaggtagacactctgtatgagtccttagttgcagttttgtttagtgcactggttttcttgaatgctgcttgtgctagcagtgaagttgtcatgtggacagattcaggacctctggttagccaggatgtcacaggccatggacttagttgttgtttggagmaggattattcttttatgagttgctgtaatggcttgggctaattggcctctagccaggaggtggtacattcaaaggagcatcagctgtggtagtgtgggggtatacaagcttgtcctgaggtcacctgcatagggattcaggtttctaggcaataggtggggtcatagagctcctaagagattgtgtcttttgtgtttggctaccagggtggggagagagagagaccatcaggtgggggcagggttaggcatgtctgagctcatgctttccttgggcagtgatggctggggccacg

SEQ ID NO: 351230 - DNA, 525 bp, Homo sapiens
gatgtggtccctcttcaggtttctcagccatggacatcagcacctgctccagtggaggtggcaggggagtgaggtagacactctgtatgagtccttagttgcagttttgtttagtgcactggttttcttgaatgctgcttgtgctagcagtgaagttgtcatgtggacagattcaggacctctggttagccaggatgtcacaggccatggacttagttgttgtttggagcaggattattcttttatgagttgctgtaatggcttgggctaattggcctctagccaggaggtggtacattcaaaggagcatcagctgtggtagtgtgggggtatacaagcttgtcctgaggtcacctgcatagggattcaggtttctaggcaataggtggggtcatagagctcctaagagattgtgtcttttgtgtttggctacsagggtggggagagagagagaccatcaggtgggggcagggttaggcatgtctgagctcatgctttccttgggcagtgatggctggggccacg

SEQ ID NO: 351231 - DNA, 550 bp, Homo sapiens
gggctggataaaacaagggtgaaacttactggtttcctagagatttagtatctagaggtttcgtgtctagaggttaaatttcaaaatatttaaacatactatgactttgtgatttaggagatacactttaatatgtgtctcgtaagaacaagaacaatatataaagaatccatatayatattcttcactaagattcctcaatagttaatattttgccagtgggctttgtaattttctccatatataatcatattattattttttctgaatcatttgagagcaagttacaaaaatgatatgacttcactccccaatcttcagtgtatttcactagaacaaaaagagtctcttatataatctaagtataaaactctaatgtcttactatttattatctaatttatagaccttaatcaaagcttactgattgtcccaattctggccttcattaaaaaatctaccaagtttccaattaaggatgacatatgttatgttatttgtcatgtttctttagcctactttaatctggaacagttagtccttctttatct

SEQ ID NO: 351232 - DNA, 488 bp, Homo sapiens
aaacaagggtgaaacttactggtttcctagagatttagtatctagaggtttcgtgtctagaggttaaatttcaaaatatttaaacatactatgactttgtgatttaggagatacactttaatatgtgtctcgtaagaacaagaacaatatataaagaatccatatacatattcttcactaagattcctcartagttaatattttgccagtgggctttgtaattttctccatatataatcatattattattttttctgaatcatttgagagcaagttacaaaaatgatatgacttcactccccaatcttcagtgtatttcactagaacaaaaagagtctcttatataatctaagtataaaactctaatgtcttactatttattatctaatttatagaccttaatcaaagcttactgattgtcccaattctggccttcattaaaaaatctaccaagtttccaattaaggatgacatatgttatgttattt

SEQ ID NO: 351233 - DNA, 560 bp, Homo sapiens
agccaacttttttttttactgtatttctgaaacaaaacgtgctaaacagtgtggcttaaagtgggagtttcaacataattactttaaaataccatgtagtttcrccttgtactaagattaggcatctactattgcatgaggcaaatatttcacatcaaaagttgcccttgaatatatcagattatattgtattggattataaccccaaacataaagaagatgtcgcgattgaatccattatgttataaataaatgattgaacaaataattaaatgacagagaatggacaaatctctcctgcagaagaatttcaaatagtttatacagatacttgtccctcaagtaggtggaacaacccaggaggcgtgacaaccaaatatattattttgggtaggatactgggccaataaaagaacattgggtaggaactaaggaaatctgaatgcagtataaattttgattaatataatctaccaatattggttcattaattgtgacaaaaataccacacttctgtaagatgttattttattaaattcttataagtttatacttccttg

SEQ ID NO: 351234 - DNA, 560 bp, Homo sapiens
agccaacttttttttttactgtatttctgaaacaaaacgtgctaaacagtgtggcttaaagtgggagtttcaacataattactttaaaataccatgtagtttcaccttgtactaagattaggcatctactattgcatgaggcaaatatttcacatcaaaagttgcccttgaatatatcagattatattgtattggattataaccccaaacataaagaagatgtcrcgattgaatccattatgttataaataaatgattgaacaaataattaaatgacagagaatggacaaatctctcctgcagaagaatttcaaatagtttatacagatacttgtccctcaagtaggtggaacaacccaggaggcgtgacaaccaaatatattattttgggtaggatactgggccaataaaagaacattgggtaggaactaaggaaatctgaatgcagtataaattttgattaatataatctaccaatattggttcattaattgtgacaaaaataccacacttctgtaagatgttattttattaaattcttataagtttatacttccttg

SEQ ID NO: 351235 - DNA, 599 bp, Homo sapiens
atctaccaatattggttcattaattgtgacaaaaataccacacttctgtaagatgttattttattaaattcttataagtttatacttccttggcatctattttaaatamaagcttaactttctcatacagaagcagagctcagtcacccttgacacagtttccagttctatatcatatccaaatggctcaagccagtggccagagtggccacagataagaacttagaggcatctgttccgcctggctgactgggctccctactttcctgcctcttcttttaagcagaccatttaggtatttgcttatgaacttaaagtgacccacaccctattccttatatatactgctatttgctcctctccctgacccccacctcgtttccctctctctccttgcctagaatctgtaccttaaaagatctttgaactcatttcctactgtggcgctgtattcaatatgtgcctttcatgtgaagaaccaggggctactccaggctagatttccccatgatgccaggagagaaaaaacagtcaggctcccagcaacagaacaatgggcaggcaagcaaaaaccgcacacaggtcagagaagagccaaa

SEQ ID NO: 351236 - DNA, 635 bp, Homo sapiens
ataaaatagtcaatataaaattataaagttaaaagtggtagtggaatcaaatcgaatatctttaatattactcaaaggtccttgcaatcatttagtgtcctagtttgacaattaatttgatgagtacagtaattctttccacctgccttacagggatgtgaaaattaatgcaataaaatttctaaagacattttgagctctccatgtgaaagtcactacctaatattgctgaagaagagactcactagagcatgaattacagttttgccacagaaaaagcaagagttttgcagaaaaggcaggaataaaagaatatgttttaaaaggtttacttctcctagaatacttcctgatgatacgacacataattaatttgaaggtatctaactcatacatatgcttgaaaatatttctctattgggactttawctttttgtcttttaataatgcatttagactttatttcattttaaaatcttttccacactagtatactctatcaatttcctcctttgaatcttctagtgatgattttctatcttgcaaagaattgtgatgctttcatctctcaaaaaactactaagacagaaatctcttaattatcatcattaaacttgtggggtcaaaactggagc

SEQ ID NO: 351237 - DNA, 635 bp, Homo sapiens
ataaaatagtcaatataaaattataaagttaaaagtggtagtggaatcaaatcgaatatctttaatattactcaaaggtccttgcaatcatttagtgtcctagtttgacaattaatttgatgagtacagtaattctttccacctgccttacagggatgtgaaaattaatgcaataaaatttctaaagacattttgagctctccatgtgaaagtcactacctaatattgctgaagaagagactcactagagcatgaattacagttttgccacagaaaaagcaagagttttgcagaaaaggcaggaataaaagaatatgttttaaaaggtttacttctcctagaatacttcctgatgatacgacacataattaatttgaaggtatctaactcatacatatgcttgaaaatatttctctattgggactttaactttttgtcttttaataatgcatttagactttatttcattttaaaatcttttccacactagtatactctatcaatttcctcctttgaatcttctagtratgattttctatcttgcaaagaattgtgatgctttcatctctcaaaaaactactaagacagaaatctcttaattatcatcattaaacttgtggggtcaaaactggagc

SEQ ID NO: 351238 - DNA, 583 bp, Homo sapiens
tcttccagccacctctgtcaaagctgtgacctctgcctaccattgggtattgcatttacccacctgctttagccacaactggtttctacctagggacactttgcttactggcctaaagcctgaactatttaacccagtaaataaaatattagggaaaaaaaataaataaatgcacaccacaggggaatgagataagcttcaagaaacctctgccattccaaccccataggagacagtgaacttattcacacaacatacatactgctcctagaaccagcgtctgaaaaagccatcatacaaagactctataactaaagaaccctcacagagtctgtacccttgaaatcaccaggagctgaattaggttacaataaacaataagcgttgaagccacatccttaagggggaaaaagaaatcaatcaaacaaacaacaacaamaaaaaaacacctcacagtcaaatgaaaaacaaattcaagaataattaggacaaatagtctacccaagtgagaagcaaccagaaaaataattatagtaatgacaaaacagcattctataacacctctcaaaaaatcatactaact

SEQ ID NO: 351239 - DNA, 579 bp, Homo sapiens
atctgctcctgaatgatttttgggtttgcaatgaaaccaatattgaaattttaaaattcttcacaatgaatgataataaagacaaaagttatcaaaatgtctgggatacggcaaaagcagtgctaaggggaatgtttatagtgctaaaagcctacatcagaaaatctgtaatataacatattggcaacataatggtacacttcaaggaactagagaaacaacaaaccaaacccaaggcagcagaatcaaagatataacaaagatcagagaagaattaaatgaaattaaaatttaaaaaaataaaaaagatggatgaaacaaaaatttggttctctgaaaagagtaagcaaaattgatagaycattagctagattaacccagaaaagaagagagaaaatttaaataagctcaattagaaatgaaattggagacattacgattgacaccccagaaatacaaaagatcatttgagacaattattgaaataatagggaaactctagagaaaatggataaattctggaaacatacaaccctcctatattaaatcagaaagaaatagtaacccagaaaagaccaa

SEQ ID NO: 351240 - DNA, 653 bp, Homo sapiens
ttagaaatgaaaattacttcatagaaatgcaaataggttttggggtacaatttattattgccctgtgtatattggccagttttctgtcaattagtaaatacttttgagcatttttaattttctttgcttgtgtgttaaattctcctttgaactagtttttaataccttattgagtacatacttagttaataaataccttaaataaaatctttgatgtattcgttttataattttatggcagtaatgaatttactttctttaaaagtttttaatagtttaagagtgcaaatgctgtaagacaagaatttgtaaaatatatatattatatatataaaagcagaagaaaaagaaataatgggaaagttagcatatttctctgattagaattcycatagacagttcatagcaattggagaaggaaaatatttaaatgggaaatgactagagcctaaacaatctctaccaacttataaaataataatgatgtgttgagttcaaaataaaatgctggatatagacctcatagtggggtttctggataccgcttatataaatgtgttcactttgcaatgtgcactgagctaaaaacgtgaagatttgtgcacttttctctatctatatcatcattcaataaaacatatgttacagcacat

SEQ ID NO: 351241 - DNA, 452 bp, Homo sapiens
gttgtaaaaataataaataaaagttcacccttgaacaacatgaggttagcagcaccgacccctgtgcaactgaaaatctacatataatttttgaattaccaaaaacctaacaatagcctatggtatagatgcctcactgataacataaactgtcaattwacacatacattataatatgtgtgtgtgtgtatatatatttgagatggagtcttactctgtcacccagactggagtgcagtggggccatcttggcttgctgcaacctctgcctcctgggttcaagagatttttctgcctcagcctcccaggtagctgggattacaggtgcctatcacaatggctggctaatttttgtatttttagtaaagactgggtgtcaccgtgttggctaggctggtcttgaacttgtgacctcaagtgatcttcctgcctcagcctcccaaggtgcaggt

SEQ ID NO: 351242 - DNA, 642 bp, Homo sapiens
cctatggtatagatgcctcactgataacataaactgtcaattaacacatacattataatatgtgtgtgtgtgtatatatatttgagatggagtcttactctgtcacccagactggagtgcagtggggccatcttggcttgctgcaacctctgcctcctgggttcaagagattyttctgcctcagcctcccaggtagctgggattacaggtgcctatcacaatggctggctaatttttgtatttttagtaaagactgggtgtcaccgtgttggctaggctggtcttgaacttgtgacctcaagtgatcttcctgcctcagcctcccaaggtgcaggtattacaggtgtgagccaccatgcccagcccacatatattatattttatttgtattatacactgtgttcttacaataaagtaagctatatgaaacataatgttattaagaatatcataaagttctttcacctccttggttagctatatttctaagcatttagtttattggtggagtcttcaggattttctaagtatacaatcatatcatcagtgaagagtaatagtttgacttcttttcctaatggaatgcctgttatttattaatcttacctcattgttctacctaatacttccagtaaaatgttg

SEQ ID NO: 351243 - DNA, 642 bp, Homo sapiens
cctatggtatagatgcctcactgataacataaactgtcaattaacacatacattataatatgtgtgtgtgtgtatatatatttgagatggagtcttactctgtcacccagactggagtgcagtggggccatcttggcttgctgcaacctctgcctcctgggttcaagagatttttctgcctcagcctcccaggtagctgggattacaggtgcctatcacaatggctggctaatttttgtatttttagtaaagactgggtgtcaccgtgttggctaggctggtcttgaacttgtgacctcaagtgatcttcctgcctcagcctcccaaggtgcrggtattacaggtgtgagccaccatgcccagcccacatatattatattttatttgtattatacactgtgttcttacaataaagtaagctatatgaaacataatgttattaagaatatcataaagttctttcacctccttggttagctatatttctaagcatttagtttattggtggagtcttcaggattttctaagtatacaatcatatcatcagtgaagagtaatagtttgacttcttttcctaatggaatgcctgttatttattaatcttacctcattgttctacctaatacttccagtaaaatgttg

SEQ ID NO: 351244 - DNA, 385 bp, Homo sapiens
ggtaccatttcttgtttttttgtctggtagaattcaactgtgaatccatttagtttgaggctacaaagcactgctaaaagaaatcagagatgacacaagtaaatttgaaaacatttcatgctcatggattggaagaatcaatattgttaaaatgaccagacttccataaataatttacagatgaaatgctgttcatgtaaaaataycaatgccatttttcacagaattagaaaaaaaacttttctaaaattcatatggaacaaaaaaaacaaagatatctaatacccaaagcaatcctaaccaaaaaggataaagccagagtcatcacactatccaacttcaaactttattataaggccatagtaataaaaacagcctggtactg

SEQ ID NO: 351245 - DNA, 385 bp, Homo sapiens
ggtaccatttcttgtttttttgtctggtagaattcaactgtgaatccatttagtttgaggctacaaagcactgctaaaagaaatcagagatgacacaagtaaatttgaaaacatttcatgctcatggattggaagaatcaatattgttaaaatgaccagacttccataaataatttacagatgaaatgctgttcatgtaaaaataccaatgccatttttcacagaattagaaaaaaaacttttytaaaattcatatggaacaaaaaaaacaaagatatctaatacccaaagcaatcctaaccaaaaaggataaagccagagtcatcacactatccaacttcaaactttattataaggccatagtaataaaaacagcctggtactg

SEQ ID NO: 351246 - DNA, 601 bp, Homo sapiens
tataaaagacttaatatactattaaaaatcatcttcatatatattacagattttaattatattgattatcagtttgtcttctctctgtccccactaaagagtaagctcataatactgatatgcaaccacctagaataatatctgaaatgtgtatgcaaatgatatacacttacataaattaatgaatggaataattatatatagaattactacttttgcaaatactaaagaagaattgcttatgaagttaaaggagagctaccattcaatgaaactgtctgctttttagattttctgaatgattagataatcataccattcataaaaaattatggcacaaaaaggaaaagtcactgttgggaaaggagagagctgattagaacactttttgayatattgactttaaggtatctaggagatgttttatagagtgattttcaacaggttttttagaaaggaacagttggagctcaaggcatgatttggattttgagaagaagatttgtgcatcaatgacatatggagaaggttggggagtgtatgtaaacaccgacacagaggagtgaaagctgtagtagatgaaaactgctgacagaattct

SEQ ID NO: 351247 - DNA, 604 bp, Homo sapiens
gtttctatttatatgcttaaagcatacttcatatttatgtagctttatttctattaactaaattggcaatatgtataaatagtttatgtgaacaataacaatgtggctctgatattattctctaatttattggggtattagtacagttattagttagaggaagctgagaatctctgctctccttctaggaaatgtctccactgtttaactttaacttcctttaatctatgcccaacccgagtgtgaccatacacagattattttactggtcatattattgcaaagattctagtggttatcaatgtgtctgtacattttaaagtttagttttcaagttttaagcattttgtttataatgtttaagtatttatttttccatttagcttttgtaaaattgtgaagccgtgaaaatgtgtctatgagattacggtctaactcaaatgctttattccacratcctctgtaaaattctggcgttgaaatctttataaattaactgaattaacaaacatgccattactccaatcaaaacctcagggatttttgtaatactatgcaaatatcatttttaaagttatctaatggacaattaagcaagaatttg

SEQ ID NO: 351248 - DNA, 644 bp, Homo sapiens
atggtgagggttatggagaaaaaggggagaatagtaaaagggtcagttatatcacaatatagagtagcaatggtagttaaacttcattaaaaggaaagtatttgagttaggaattggcacygtatatgaaaaataatgtgaacaaaatcaaaagacaaatgaacatctagaaaaaagtcacaaataagatatatatttcgttaatatcatcaaatgacaattcaagaaaacagctctcaaaatatttttataaatgtatattaaaataattattttaacctacgaatttggcaacaatttaaagcttgacaaaatgaacatttaatactgtgacatattttcttactcagttgaaggaaacgcacattatcacacattttctggaagaaaagaagtcagaatatgcccacatatattaaaaatatcaatatactttaccagtaatttaacttataggagttcatcctaagaaatttgtcaaagattggggtttgttaaaggtttatgtacatggagaaatgagaaatctgaaaacaacccaaatatctaacagaaaagaagtaatcaaatactttttggtgtattcttttattctaaccctctctgtaattagtcagtacttcagggactcactactaccacca

SEQ ID NO: 351249 - DNA, 644 bp, Homo sapiens
atggtgagggttatggagaaaaaggggagaatagtaaaagggtcagttatatcacaatatagagtagcaatggtagttaaacttcattaaaaggaaagtatttgagttaggaattggcactgtatatgaaaaataatgtgaacaaaatcaaaagacaaatgaacatctagaaaaaagtcacaaataagatatatatttcgttaatatcatcaaatgacaattcaagaaaacagctctcaaaatatttttataaatgtatattaaaataattattttaacctaygaatttggcaacaatttaaagcttgacaaaatgaacatttaatactgtgacatattttcttactcagttgaaggaaacgcacattatcacacattttctggaagaaaagaagtcagaatatgcccacatatattaaaaatatcaatatactttaccagtaatttaacttataggagttcatcctaagaaatttgtcaaagattggggtttgttaaaggtttatgtacatggagaaatgagaaatctgaaaacaacccaaatatctaacagaaaagaagtaatcaaatactttttggtgtattcttttattctaaccctctctgtaattagtcagtacttcagggactcactactaccacca

SEQ ID NO: 351250 - DNA, 644 bp, Homo sapiens
atggtgagggttatggagaaaaaggggagaatagtaaaagggtcagttatatcacaatatagagtagcaatggtagttaaacttcattaaaaggaaagtatttgagttaggaattggcactgtatatgaaaaataatgtgaacaaaatcaaaagacaaatgaacatctagaaaaaagtcacaaataagatatatatttcgttaatatcatcaaatgacaattcaagaaaacagctctcaaaatatttttataaatgtatattaaaataattattttaacctacgaatttggcaacratttaaagcttgacaaaatgaacatttaatactgtgacatattttcttactcagttgaaggaaacgcacattatcacacattttctggaagaaaagaagtcagaatatgcccacatatattaaaaatatcaatatactttaccagtaatttaacttataggagttcatcctaagaaatttgtcaaagattggggtttgttaaaggtttatgtacatggagaaatgagaaatctgaaaacaacccaaatatctaacagaaaagaagtaatcaaatactttttggtgtattcttttattctaaccctctctgtaattagtcagtacttcagggactcactactaccacca

SEQ ID NO: 351251 - DNA, 644 bp, Homo sapiens
atggtgagggttatggagaaaaaggggagaatagtaaaagggtcagttatatcacaatatagagtagcaatggtagttaaacttcattaaaaggaaagtatttgagttaggaattggcactgtatatgaaaaataatgtgaacaaaatcaaaagacaaatgaacatctagaaaaaagtcacaaataagatatatatttcgttaatatcatcaaatgacaattcaagaaaacagctctcaaaatatttttataaatgtatattaaaataattattttaacctacgaatttggcaacaatttaaagcttgacaaaatgaacatttaatactgtgacatattttcttactcagttgaaggaaacgcacattatcacacattttctggaagaaaagaagtcagaatatgcccacatatattaaaaatatcaatatactttaccagtaatttaacttataggagttcatcctaagaaatttrtcaaagattggggtttgttaaaggtttatgtacatggagaaatgagaaatctgaaaacaacccaaatatctaacagaaaagaagtaatcaaatactttttggtgtattcttttattctaaccctctctgtaattagtcagtacttcagggactcactactaccacca

SEQ ID NO: 351252 - DNA, 645 bp, Homo sapiens
tgatcctcccagtgattctgaagcagggcaagtgaaccctaaagtaggacttagcctaggagggttcttgcctctccccaggaaataattcaagggcaagccagaggtagcagaaaacaactttattgaagcagcagcgttacaactcccgtggtgttacagctccatgactgctcctgcagagcagggctaccccataggtaagagtggcagctcagggcacttttgcagttatatttatatctactttaattacatgcagattaaggggcagtttatgcagaaatttctaggagagttaacttttggatcctcaggtcattgtcacggaaaggggtggtaacgcccagttgttgccatggcaatggtcaactgacatggcacactggtgggygtatcttatggaaagctgcttctgcctcctctgctagtcctcaatttgggctggtgtccaaagccaaactccagagttaagtcctgcctcctcccttctacaaagaaggtgctgttattatctgagttccaaaaggagaaaactggatcttaaaaagattgaacaatttcgtcactattacagttaaaaactgctgaagcgcccttattaggattcagtatatctgactccattttcttaaccactaataa

SEQ ID NO: 351253 - DNA, 645 bp, Homo sapiens
tgatcctcccagtgattctgaagcagggcaagtgaaccctaaagtaggacttagcctaggagggttcttgcctctccccaggaaataattcaagggcaagccagaggtagcagaaaacaactttattgaagcagcagcgttacaactcccgtggtgttacagctccatgactgctcctgcagagcagggctaccccataggtaagagtggcagctcagggcacttttgcagttatatttatatctactttaattacatgcagattaaggggcagtttatgcagaaatttctaggagagttaacttttggatcctcaggtcattgtcacggaaaggggtggtaacgcccagttgttgccatggcaatggtcaactgacatggcacactggtgggcgtatcttatggaaagctgcttctgcctcctctgctagtcctcaatttgggctggtgtccaaagccaaactccagagttaagtcctgcctcctcccttctacaaagaaggtgctgttattatctgagttccaaaaggagaaaactggatcttaaaaagattgaacaatttcktcactattacagttaaaaactgctgaagcgcccttattaggattcagtatatctgactccattttcttaaccactaataa

SEQ ID NO: 351254 - DNA, 648 bp, Homo sapiens
tacagttaaaaactgctgaagcgcccttrttaggattcagtatatctgactccattttcttaaccactaataatattaattcgtagagaggttaactataaagtttctcaaaattacattaacaagttcaacattgtaatgtggaaaatatatttttccttttttttttctctgtattgctggtcactggtgttggaacttggttactccaaagttggcaggggtttctgtttgagacaggagaataaagaagttaaagactgacaatgagggccaggcacggtggctcatgcctgtaatcccagcactttgggagaccaaggtgggcgtatcatgaggtcaggagttcaagaccagcctgatgaacatggtgaaaccctgtctctactaaaaatacaaaaattagctgggcttggtggctcacacctgtagtcccagctactcaggaggctgaggcaggagaattgactgaacctgggaggcagaggttgcagtgagccaagatcatgccactgcactccagcctgggtgacagagcaagactccgtctcaaaaaaaacaaaaaaaaacaaaaaacaaacaaaaaaaaaacacacaaaaaaatactgacaatgtacagatacagagctttactgatttaaaccccca

SEQ ID NO: 351255 - DNA, 605 bp, Homo sapiens
ttcatgtcctttgcaggaacatggatgaagctggaaactatcattctcagcaaactaacacagggacagaaaaccaaacaccgcatgttctcactcataagtgggagttttataatgagaacacatggacacagggaggggaccatcacacactaaggcccgtcgggggtgatgggttagggcagggaaagcattaggagaaatacctaatgtagatgatgggttgatgggtgcagcaaaccactatggaacgtgtatacctatgcaagaaacctgcactttctgcacatgtacccccgaacttaaagtataataaaaaaagaaaatgaatatatgaaataattacatcatatttttatttataaagttacatcatatttctgttttctttgtgtaattctatattctaaatgctttatatcaagaagaatttcagacatacaaacaagtagttagaccagtataatgaatccatttctgcatcagttaaaggctgtattacctrtatccccacccaccatttttccatattattctgagtcattttatcctatgatctatcaaatttcaatatgtatttctaaagaagtactacctttaattag

SEQ ID NO: 351256 - DNA, 603 bp, Homo sapiens
tgtgaattcctttcataggtctctgctttcatgacctaattacctcctgacagtaccacttccaaataacatcacaacaggggttaggatttcacaatataagttttctggagatacagacattcagactatagcaccttgtaatttactatcatcagttcatctcattcacaaagcttacaatggttgcaatattaaatttaattttgctgttattttgtctccatctctctgcagtaggcactatcagagcaggcacactgttttctcactatttcactttgtcacatctcgacatgtattaattgttttataagttacaaatggataaatgacatatctttattagtgktatcaatttggtgctccagtaatgatattatattatgtgcatcatgaagaaggtggaaaaaaatgggaacaaaaattgtcaaaaaaatgatagaacatatcaataaaaggaatggaaaaacaaattattcactatataattatactttttaatatgttagataattaaagtaaccaggaaaagccaataaaaatattaataaaatatcccttgatatatcaactctccactttattaggaattccataatg

SEQ ID NO: 351257 - DNA, 515 bp, Homo sapiens
gggaggtaactgaatcatgggagcgagtctttcccatgctgttctagtgatagtgaagaagtctcatgagatccgatggttttaaaaatgggagtttccctgcacaagctctctctctttgcctgccgtcatctatgtaagatgtgacttgcttctccttgtcttccaccattgttgtgaggcctttccagcaatgtggaactgtaagtccattaatctgayttttcttcctggtctctggtgtgtctctatcagcagcatgagcaaattggtaccagtagagtagggcgctgttgaaaagatacctgaaaatgtggaagtgactttggaactgggtaacaggcagaggttggaatagtttggagagctcaaaagaagatagaaaaatgtgggaaagtttggaatttcctagagacttgttaaatggctttggccaaaatgccgataatgatatggacaatgaaatatagaccaaggtggtctcagatggagatgaggaactcattaggaattgg

SEQ ID NO: 351258 - DNA, 515 bp, Homo sapiens
gggaggtaactgaatcatgggagcgagtctttcccatgctgttctagtgatagtgaagaagtctcatgagatccgatggttttaaaaatgggagtttccctgcacaagctctctctctttgcctgccgtcatctatgtaagatgtgacttgcttctccttgtcttccaccattgttgtgaggcctttccagcaatgtggaactgtaagtccattaatctgatttttcttccyggtctctggtgtgtctctatcagcagcatgagcaaattggtaccagtagagtagggcgctgttgaaaagatacctgaaaatgtggaagtgactttggaactgggtaacaggcagaggttggaatagtttggagagctcaaaagaagatagaaaaatgtgggaaagtttggaatttcctagagacttgttaaatggctttggccaaaatgccgataatgatatggacaatgaaatatagaccaaggtggtctcagatggagatgaggaactcattaggaattgg

SEQ ID NO: 351259 - DNA, 509 bp, Homo sapiens
cctcaaacatatatattatattatactttattatatatctgtatatcttatatatacaactatatatcttacatatacatcttactatatagatagattttaaaattactatcaaaaatgataatataagtgagatagatagtgaaaagtctttggacgtagacagattttgattcaaacttttcttctaccaatttacatatttgaatctgagacttggtaatttccccccatgaccctttgtttctttagatcaagattacaagttcttttgtgagattttaagtttgaggaatagtaaatataaaayaccaagaacagtgtctgaccttcaatatctggaagttctaatgaaattagagtatatgggaattgcagtgtttattcacttaatctagtttgcgttcagtaatgatctgaaatgtatgcacttggctaatgttcaagcatttacagcaatatcaattgtatttatcctttaaggtaaatagtttctaattcatttgttt

SEQ ID NO: 351260 - DNA, 607 bp, Homo sapiens
gatcttgctctgtttcttctctatgtgagtaaagcttgttccatccagagattatctgtgttgtgtctttcttggtaattccattattaagatgataaataaatctccagaaaaccaccctaatgaaatggagacatatgatttacttgacagagaattaagaattaccattataaagtactcaacagtgtcaggagcacaatgtataaaataagcgaaaatttcagcaaagagaaaatatgaaattgtgccaaagagaaattaagaatcttaaaaatamaataattaaacagaacaattcactagaagggttcaacagaagattatataaagcagaaaaagaattagtgaactttaagacaggaaactggaaattattcagtcagaggagctaaaagaaaaataacaaaaaagagtaaaggaagattaagaggcttatgtgacagtataagatggattactatatgcattatgggtatcccagaagaagaagcgaaaaagaagcaagaaaaacttattcaaagaaatattggctgaacaatttctaatcttggaaaggaaatggacatctgatccatgaatcccaagagtacacaaatacgatgat

SEQ ID NO: 351261 - DNA, 587 bp, Homo sapiens
aaagactaaagtaaatacttatttaaggttcagacaccaacaaacatctataagcattaagaccatccaggaaaatatgacatccccaaacaaactaaataaggcaccagggacaaaccctggaaagacaaaaatatgcaatctttcagacagagaattcaaaacagctgyttggaagaagttcaataaaattcataataacacacgattctgaatgtattcagaatcatatcagataaatttaatgaagagataatttaaaataattgaaaacaattgagcaaaaactctggcattgaaaaatgcatgagacatactgaagaatacattagtgtttcttaatagcagaattaatcaagcagaaagaaaaaactgtgagcttgaagacaggctatttgaaaatacacagccagtctatggttataccactcttaacgcttatgatctcatttgaaaatacacagtcagaggaaatgtgttgggctattcttgcattgctataaagaaatacctgagactgagtaatttatttaaaaagaggattaagtagctgacagttctgcaggttttataggaagcatggtttt

SEQ ID NO: 351262 - DNA, 529 bp, Homo sapiens
gaaaccattatttccttctaggcctatgggtctgtgatgggaggggctgctgtgaaagcctctgaaaagccttggagaccatttccccattctctttgctattaacacttgcatcttttttagttatgcaaatttctytagcaagttgttgctctgcagcccgcttggattcctctgccaaaaaagctttttctttctctgacacatggcaaggctgcaaatgtttgaaattttatgctctgcttcctttttaaatataatataaattcgaatttttagtcattttttagtgcagctaagctctttgctaaggtatagaacacatgaactttgctccagttcccaatttcctcattttcatctgagactttgtcaacctggtgttcactgtctatatcactgtcagcatttcagtcacaattatttaactagtctctaagaagttccaaacgttccctcatcttctttctgtcttcttctgagccctacaaactcttccaaactcggtcgtttgcccagtttcaaagtt

SEQ ID NO: 351263 - DNA, 600 bp, Homo sapiens
acatatttaaagtgctgaaggaaaaaacttttaccccagaattgtatattcagcaaaaaacatccttcaaacatgaaggagaagtaaaaattttctcaaacaaagaaaaaagaaagctgmgatttcatcaacatcagacctatcctacaagaaatgccaaaggaagttttttttttttttcaatctaaatgaaaacattgttaatgagcaataagaaatcatctgaaggttaaaaacttctggtaatagtaaacacacagaatattataacactgtaattgtggtgtataaacttctcataccttaattagaaagactaaaagatgaactgattccaaataataactacaataacttttcaagacatagtataagataggaacacataaatagaaagaacaaaaagtaaaaatgagaggacaaagagttaaagtgtaaaatttttattagttttctatttgcccatttgctagtttgttcatgcaatcagtgttgtcatcaatttgaaataatggattatatgatattatttgcaaggctctcatggtaacctcaaatcaaaaacaatacaaaagacacacaaaaaataaaatgcaagaa

SEQ ID NO: 351264 - DNA, 600 bp, Homo sapiens
acatatttaaagtgctgaaggaaaaaacttttaccccagaattgtatattcagcaaaaaacatccttcaaacatgaaggagaagtaaaaattttctcaaacaaagaaaaaagaaagctgagatttcatcaacatcagacctatcctacaagaaatgccaaaggaagttttttttttttttcaatctaaatgaaaacattgttaatgagcaataagaaatcatctgaaggttaaaaacttctggtaatagtaaacacacagaatattataacactgtaattgtggtgtataaacttctcataccttaattagaaagactaaaagatgaactgattccaaataataactacaataacttttcaagacatagtataagataggaacacataaatagaaagaacaaaaagtaaaaatgagargacaaagagttaaagtgtaaaatttttattagttttctatttgcccatttgctagtttgttcatgcaatcagtgttgtcatcaatttgaaataatggattatatgatattatttgcaaggctctcatggtaacctcaaatcaaaaacaatacaaaagacacacaaaaaataaaatgcaagaa

SEQ ID NO: 351265 - DNA, 591 bp, Homo sapiens
tcaaattaacaacctaacatcaccatcagaggaactagagaaacaggaacaaatcaaccccaaagctagcagaagacaagaaataaccaaaatcaaagcagaactgaaggtcattgagaggcaaaaaaattacaaaagatcaaagaatctaaaggctttttttgaaaaaaataataagatggattaaccactagctagaataataaagaaaamataaagaagatccaaataaacacaattagaattgacaaagaggatgtcatcactgacctcacagaaatacaaaaaaaccttcggagaccaccttgaaaatctctatgcacacaagctagaaaacctaaaagaaattgatacatttctggacacacagaacctctcaagactgaaccaggaagaaattaaatccctgaactgaccagtttccagatttccaaaattaaatcagcgatatgaagcctgccaaccaaaaaaaagcccaggaccagatggattcacagccaaattctaccagatgtatacagaagagctgataccattccttcagaaaccatccaaaaaattgaagagaagggactcctccctaactcattc

SEQ ID NO: 351266 - DNA, 591 bp, Homo sapiens
tcaaattaacaacctaacatcaccatcagaggaactagagaaacaggaacaaatcaaccccaaagctagcagaagacaagaaataaccaaaatcaaagcagaactgaaggtcattgagaggcaaaaaaattacaaaagatcaaagaatctaaaggctttttttgaaaaaaataataagatggattaaccactagctagaataataaagaaaacataaagaagatccaaataaacacaattagaattgacaaagaggatgtcatcactgacctcacagaaatacaaaaaaaccttcggagaccaccttgaaaatctctatgcacacaagctagaaaacctaaaagaaattgatacatttctggacacacasaacctctcaagactgaaccaggaagaaattaaatccctgaactgaccagtttccagatttccaaaattaaatcagcgatatgaagcctgccaaccaaaaaaaagcccaggaccagatggattcacagccaaattctaccagatgtatacagaagagctgataccattccttcagaaaccatccaaaaaattgaagagaagggactcctccctaactcattc

SEQ ID NO: 351267 - DNA, 612 bp, Homo sapiens
tatttgttatagcagcaccttatcttgatgtagctgtacttctcacaagtaggctcaactcctgcagaatgtaccatgacactgagcattcctccatggaaagattcacaaagaatttrtggtatctttaatctaccactgtgtttataaaggaaaataattttgtgagaaagagcgattaggcctaagaaagccaactaatttcaactaatttaaataaaaatgtaacggttttatcgaatctaaattaaggttgacattttaaaatactcatttactaaagcacactgaatggtacctttatttgtaatttgttgtgaaatcatccattactaattgcagttaatatgaattaaaatgttttttaaaagaaaggctatgacttaagattggtgtaactaattcagattacattctcctcagttatttaaaattagtgaatgtcagattatactcatataggtttcctcttatttgccttgttgaaatttagtatataatcccacaataatttctaaaaatcttgtgatttatttaaactttatattttaaatgagaaaactagaaaacagaaataatctcttaaaagtctcacaaagatacacaaagaaa

SEQ ID NO: 351268 - DNA, 534 bp, Homo sapiens
aaacaaagaaataaccaaaatcagagctaaattaaatgaaattcaggtgtgaaaaaaacacacaaaagatcaataaatccagaagttgtttttttgaaaaaaaaatcaataaagtagatagactgttggctagactaataaagaaaaaaaagagacaaaatccaaaaataaaaaaaatcagaaaagacaaaagggacaataccactgacttcacagaaacactaaaattcaacagagactttcatgaaaaactctatgaatacaaactggaaaacctcaaagaagtrgataaattcttggaaacatacaacctctcaagactgaaccaggaagaaattccaaccctgaacagacgaatgatgagttccaatattaaatcagtaataaaaagcctaccaaccagagaaggcccagggccagatggattcacagcctgattctatcaggtatataaggaagggctgttaccattccttttgaaactattgcaaaaagttgaaggggagggactctgccctaattcatgctatgagg

SEQ ID NO: 351269 - DNA, 488 bp, Homo sapiens
gaagggctgttaccattccttttgaaactattgcaaaaagttgaaggggagggactctgccctaattcatgctatgaggtcagtatcattgaacatgacaaagacgcaacaaaaaagaaaacttcaggccaatatccttgatgaacatagatgcaaaagtattcaacaaagtactagcaaactgaatccagcagcaaatcaaaaagttaatccatcactatcaagtaggctttattgatgggatgcaagattggttcaacatatgcaaatcaataaatgtgattcatctcttaaacagaactaaaaaacagaacctaaaaaccctatagtttctgcccaaaacctcttggatctgataagcaatttcagaagtttctggatgcaaaycaacctacaaaaatctgtagcattactatacaccaataacatccaacccgagtgttaaatcaggaaagtaatcccattcacaatagccacaaaaaataaaa

SEQ ID NO: 351270 - DNA, 544 bp, Homo sapiens
caatattaaatcagtaataaaaagcctaccaaccagagaaggcccagggccagatggattcacagcctgattctatcaggtatataaggaagggctgttaccattccttttgaaactattgcaaaaagttgaaggggagggactctgccctaattcatgctatgaggtcagtatcattgaacatgacaaagacgcaacaaaaaagaaaacttcaggccaatatccttgatgaacatagatgcaaaagtattcaacaaagtactagcaaactgaatccagcagcaaatcaaaaagttaatccatcactatcaagtaggctttattgatgggatgcaagattggttcaacatatgcaaatcaataaatgtgattcatctcttaaacagaactaaaaaacagaacctaaaaaccctatagtttctgcccaaaacctcttggatctgataagcaatttcagaagtttctggatgcaaaccaacctacaaaaatctgtagcattactayacaccaataacatccaacccgagtgttaaatcaggaaagt

SEQ ID NO: 351271 - DNA, 517 bp, Homo sapiens
aatagccacaaaaaataaaatacctgggtagacagttaatcagggaggtgaaagaactctgcaatgagaattgcaaaaacactgctgaaagaaatcaaagatgatagaaacaaatggaaaaacattccatgttcatgaataggaaaaatcagtattgtcaaaatggccatagcgctcaaaacaattcataaattcaatgctatttctaatgaactaccaatgacattcttcaaaaactagaaaaatatattttaaattcaaatgtaacaataaaagatcctgaatagccaaggtaggcctaagcaaaatgaacaaagctggagatatcacattactctgacatctaactatgctgtaaggctacagtaagcaaaacagtatggtactgggcaaaaaatagacgcagagaccaaagaaacagaacagagcccagaaataaatttatgyacctacaaccatctgaccttcaacaaatttgacaaaaacaatcaatgggaaaaggctccctgatcaataa

SEQ ID NO: 351272 - DNA, 471 bp, Homo sapiens
tctttcatatataagcattaatgggcttggcttttttttttttttttttgagaccgagtttccctcttgttagccaggctggagtgcagtggcacratctcgactcacagcaacctctgcctcccgggttcaagcgattcttctgcctcagccttccagagtagctgggattacaggcatgcgccaccacgcctggctaattttggtcaagcgggtctcgaactcccgacctcagatgatccacatgcctttgcctcccaaagtgctgggattacaggcgtgagccactgagcccggcaacttttttaataggtaattttaactgtaatttgaatagctacatttatcagggtgaaattaaatttgatgggaatatctgggtcaagaaatccaatataaacatagagacattattataaattgaatacataattaatgtatcaaatcgtgcacattttatttcatgcaatt

SEQ ID NO: 351273 - DNA, 471 bp, Homo sapiens
tctttcatatataagcattaatgggcttggcttttttttttttttttttgagaccgagtttccctcttgttagccaggctggagtgcagtggcacgatctcgactcacagcaacctctgcctcccgggttcaagcgattcttctgcctcagccttccagagtagctgggattacaggcatgcgccaccacgcctggctaattttggtcaagckggtctcgaactcccgacctcagatgatccacatgcctttgcctcccaaagtgctgggattacaggcgtgagccactgagcccggcaacttttttaataggtaattttaactgtaatttgaatagctacatttatcagggtgaaattaaatttgatgggaatatctgggtcaagaaatccaatataaacatagagacattattataaattgaatacataattaatgtatcaaatcgtgcacattttatttcatgcaatt

SEQ ID NO: 351274 - DNA, 471 bp, Homo sapiens
tctttcatatataagcattaatgggcttggcttttttttttttttttttgagaccgagtttccctcttgttagccaggctggagtgcagtggcacgatctcgactcacagcaacctctgcctcccgggttcaagcgattcttctgcctcagccttccagagtagctgggattacaggcatgcgccaccacgcctggctaattttggtcaagcgggtctcgaactcccgacctcagatgatccacatgcctytgcctcccaaagtgctgggattacaggcgtgagccactgagcccggcaacttttttaataggtaattttaactgtaatttgaatagctacatttatcagggtgaaattaaatttgatgggaatatctgggtcaagaaatccaatataaacatagagacattattataaattgaatacataattaatgtatcaaatcgtgcacattttatttcatgcaatt

SEQ ID NO: 351275 - DNA, 615 bp, Homo sapiens
gttgagcatttttcatatgcctgttggccatttgtatgccttcttttgagaaatgtstattcagaacttttatggattttttaactggattatttatttgttattgagttgcttgaaatctttacatattctggttattaatctattgtcagatgaatggtttgcaaatatttcttcctgttctgtgggttttctccttattttgttgattattttctttcatgtatagaagcttttcagttttatataatcccatttgtctatttttgctttggttgcctatgttattgagctctaactctccaaatctttgcacaaaccagtgccctggagcatttcaccaataatttttttctagtagattcatagtttcaggtcttaggtttaagtcttttatccattttaatttgatttttttatgtggtgagagataggggtctagtttcattcttctgcatatggatacccagttttcccagcatcacttattgaaaaaaaaaaaactgttctttcctcattatatatttctagtgcctttgttaaaaatgagttggctgcaagtgcatggatgtagtctgtgtttctatctcttccagtggtctatgggtctgtttt

SEQ ID NO: 351276 - DNA, 562 bp, Homo sapiens
atcactttctccatctaaaagacaactagctacatgctgtcaagcttcagtaaatggctttcaatcaggaatgcaggcttatttttacctgatcttctgattcatcaaaaagtaaaagaaacttatactttatatatgcatttaattttgagtaagttggttttgtcatgcactgtgctggaaaatctcctctcaggtgtcacttttaatgtrttattttttctaaagtttactgttgatatgcaagtatttctgttatgtatcaatcctcccaatttacttctttttatgaacaaaacaagatttagatattcgataatagcaaaccacccggccaagaagtgtttctgcaaagttatcctgggtttctaatatttatatttgcttttaattatgttttatttcaagaacagctatatcatttccatgtttaatattattaggaatgaatggcatgaacaacatggtgaagtaggagatacgagccttcatctccccacaaaaaacaattagatagctatcttttaatgacattaaccctgggaaagatcaaaagttcagt

SEQ ID NO: 351277 - DNA, 576 bp, Homo sapiens
tggcctgttaggaatggggctgcacagcaggtggtgaakggtaagcatgcaagcattactacctgggctctgcctcctgatagatcagtggtggcattagattctcataggagcgcaaaccctattgtgaactgcgcatatgagggatctaggttgtgcacttgtttttttttgttttgttttgttttttgagatggagtcttgctgtcaaccaggttggagtgcagtggcacgatcttggctcactgcaacctccgcctcccaggttcaaaagattctcatgcctcagcctcctgagtagctgggattacaggcacgtgccaccatgcccagttaatttttgtatttttagtaaagacagggtttcaccatgttggtcaggctagtctcgaactcctgaccttgtgatccacacgcctcggcctcccaaagtgctgggattacaggcatgagccaccgcgcccagcctagattgtgcacttcttatgagaatctaatgcctgataatctgaggtggaacaattttgtcctgaaaccatctttgcctccccagcctatcccccaaccatgcaaaaa

SEQ ID NO: 351278 - DNA, 591 bp, Homo sapiens
tagagaaagcaatcaggggatttgtggcatactcagtcttttacttctaggtcaccagttcagatttgagtcaggttagtaatgacaaaaagtcattaacctcagtgactgtttttgrcccatgtgaaatgagcttgtaccttcagcctagattgcaaaatctgctctaataattggaatcaaataagaaccccctgagaaggctaacatttgtgtcttttatttcatcttaacctatactactacatacatctaggggatgtctgccacatacaaatgagacagaatcttcctacatgatccctacatatgtaaaaactttagtgccctagtttccttatctaaggtatacaaagtaaaagtcttccaatatgccatgagttaaaatttactaaagacaggaagtatgtacaattttagttctcagatacataattttaagaagaaagcataactcaaaatgtaatatggaaattattaccatatttatttctcgctaccactgtgatttgaacaatcctcctatatataaaaataaacacagatcaacagagaattatataaaaagtgagcatgatgtcttaactgaaa

SEQ ID NO: 351279 - DNA, 523 bp, Homo sapiens
ttctatgggtttggacaaacgtgtaatgacatgtatctatgtatctaccattatagtatcatacggagtagtttgattgccttaaaaactatgggctctgcccattcatctctccctttccctcatcccctggcaaccactaatccctttattttcttcatagttttgccttttccataacattatgtaattggaatcatatgcagccttttcatattggcttcttgcacttagtaatatgcatttaagtttcctctgtgtcttcatgggtggatagctcatttctttttggtgctgtataatattcccgtactgagataggagatcaacargagttgatttctgagaggcatcacggccctgctgatcaaacagggtatagcaaagatattggccaaaaccagctaggactaggaagtttatggttcatttgcataagaactccagcagtgctatgacagtttacaaatgctatggcaacaaacatgaaattaccttatatggtttgggtaaatccctcatt

SEQ ID NO: 351280 - DNA, 537 bp, Homo sapiens
tgcaaatatttttttggggccttgattttgattcttcttatctcattttgcttattataatctttgataatcttagttcatatgtctctccagaaacatgaaatcttcactgtaactataaactttatcataactatcagccctgtgaagactgttttaaacattgcagtagattcctagactgccacaaaccttacataatgattaatacccatgtcattcaccagcacacattacattaacttctgtaggcaaagttgcatagacatyagatggacagatatgaaccaacatgtagaactattgtcaatgtgaatacactaaactatccttgaatatcatatttagtaattaatccaggcatccattaatgaaactgtggtttagcaggttcacgttccatggaataccagtggaagataaactgaaaggttccagtagataaattgcctatcatccttcctcttcgtgatcaaatgttcttattcacagtgattccagaagtctctctataaatgtctccaatttccactcaat

SEQ ID NO: 351281 - DNA, 523 bp, Homo sapiens
tgaataaatcattttgggtagcatggacattttaagactattaattcatccagtccatgaacatgtggtatctttccatttatttgtatcttcttcaattacttctaccaatgtttcatagtttttagtgtacagatctcttacctccttggttaaattaatttttaggtatttaattttcttgatgtgagtgtcttaattcttttcttaatttctttttcagatagttcactgctagtttctagaaacagaacagatttttgtattttgcttttgtatcctgtaattttacttaattcgtttactaagttttaccatttttaggtggagtctttagagttttcatatagtattatatcattttatcattcttrtatcatttgtaaacagagatcattttacttcttttttggtttggaaataaatctttctcttgcctaattgtgctggctaggactcccagtactatgttgagtagaagtggcaagagtgaacatctgccttattcctgaccttaaagaaa

SEQ ID NO: 351282 - DNA, 485 bp, Homo sapiens
gttactaattcattttgtttgatttaaaaaatttgttacttaaatgacttatttttgtcaaccgtgacaaatgaatgatatatgaacatcaaaatttggaaattcatcaggctagtcatcttcaaagagaatttgaactracattcctgtgctcttttataggaaagaaacttgttttaaatttcttttctcctttaaagcatttagtgaatcttaaatttctacctttgtatgatatgaaattaaaacactggtagatctattgctttataagtggggaaatggagctaagaatttattttttgatgatttctaaaacaaaaatactgcattctttaagtcttttgaattatgttgtaataccagtgttatttatttattctgtgggtgtgtgcgcgtgcgtgtgtgtgtgtgtgtgtgtttgagacagagttttgttcttgatgcccaggatggagtgcaatggcacgatctcggctcactgc

SEQ ID NO: 351283 - DNA, 632 bp, Homo sapiens
tattgctttataagtggggaaatggagctaagaatttattttttgatgatttctaaaacaaaaatactgcattctttaagtcttttgaattatgttgtaataccagtgttatttatttattctgtgggtgtgtgcgcgtgygtgtgtgtgtgtgtgtgtgtttgagacagagttttgttcttgatgcccaggatggagtgcaatggcacgatctcggctcactgcaacctctgcctcccgggttcaagcgattctcctgcctcagcctcccaagtagctgggattacaggtgcacactaccaaacccggctaattttttgtattttttgtagagacgggggtttcaccatgttggccaggctggtctcgaactcctggcctcaggtgatctgcctggctcggcctcccaaagtgctgggattacagacatgagccaccgtgtccaggctatttactctatttgttaatattagttgtcattcccctgggctatttttatcacaataaaaatagataaaatcagaaaaaaattctctggttatattaagttactaaagcaatacttgtgtttaacatttttatcaattatggtttatgaattaagtatttaaattaaaaacttgattttggac

SEQ ID NO: 351284 - DNA, 553 bp, Homo sapiens
ttattttgttttttgaagagagtagaaaagagaattattgtgacttacaggtagatgatttccgtgtggaatctcttttattcttccatttgcacttttctaatttgtctgcatctgctaccttcaaaagataaaatgcttgaaaatcctaaacatagatttgacacggaccaatcgctacataccagagattatataccccatgagacacttcctaaaattctgaattgctggttatcttctagcagctctccaatgttatctgaagcaggacagatttctttgtcaggtgtgatggagtgtgatgaagatgagcttgtgtcccaacagcatytgaaaattgtatatgcagttatgcactgcataaagacatttgagtcaacaacggaccacatatacaatggtggtcccataagattataacaccatatttttacagtaccttttctatgtttacatgcacagatgctgaccattgtattaagttgcctacaatagtcagtaaagtaacatgctacacagctttgcagcctaggagcaacgggccatacca

SEQ ID NO: 351285 - DNA, 603 bp, Homo sapiens
ggactgcagcagcactttcccgtgggggtgcagtagccgtttcgacagagcctggagcactctgaagtcagtgtctgtgcaggttgtaccgtggctctgcattcctcaggcattaaaggtctacattaaaacacaatagttgaaagtgtattccatttgaaaatcaacagtggaatgaaatctagtgattctgtggcttacaaagcatgcctcttactttctagagagactttttttttttttaagtgactcagtcagatttacaactttctaaggataggaaatacataccagtgaggaaacaaactaaccagtttgtaacccaactaaacacattaaacattctaagaaactttatcctgatcaaagcccattgatgaaaatatctttaattaaattgatatttcacatttggtaagtaagaatttctaacaattgcaatatttaaagtaaagtagtataaatatcttaaaacttttcmccctatatctacaaaaatgtttaggaatagtgtctgagatagtttcacttgttattgacacagttggcagtagtacagggctgaaggcattcatcaaaatgacttgtagcctgaaaagcttt

SEQ ID NO: 351286 - DNA, 609 bp, Homo sapiens
ataggaataagtgctagtatagtacttgctgtgtcatctttttattaatcattttagtgcctttctcaaaggcagtacacaaactgatatttttcttcttcgtaattgtctttaatctggctgctcactgaatttttcctggtcatatcggtgtttctttcttcagtgtcagtttacttataaggagtagaatgctgtattctgaaggatttaccgcatgttttgagactacacatagccattttgtaggcagctttaaaaacaacaatgcattatayaaactaaatttcgccgaggaatcatatatttataatacaaccatattccaggtagaagaacggagccaatggaatctcttcctgtgtaaccatgtaatattgatctcattgggacttcatggcaggattgacagcaacacacatttcctaatgtatttttcaagtactatctgaagtacagcaagaaattaaatgttttaagagttacagctttcattttatttttaaggaataccttccttgacattatagcatatgtaggctgcagaaatatctgtattatgtattcttaaataactctgatactagaataaagaggaaaaaaaacctt

SEQ ID NO: 351287 - DNA, 372 bp, Homo sapiens
aaagttcagtacatttgcaacaacatcaatgtgaagaaaattccattttctgagcaaggtggctggaaaaatttgcataagcaatgaggarttgaatgttaatccctaagacaatgggaaaaatgtctccagggagtgtcagaggtctttacagcaactcctcccatcacaggcccagaggcccaggagaaaaatggttttctgggccaggcccagggtctgcttgctgtaagcagcctagggacttggtagagtgcctcccagccactccagccatggctgaaaggggccaatgtacagctcgggccgtggtgcagcttgcacctccacagggtgcaagccacaagccttggcagcttgcatgtggtgtta

SEQ ID NO: 351288 - DNA, 578 bp, Homo sapiens
tatcccaacaccatttattgaatacagagttctttccctgatccattgcatatttttgttgattttgctgaatatcatagggttgtagatgagcagatttatttctggtttctctcttctgttgcactgagctatgtgtctgtttttatacaagtaccatgctgttttgattactgtagccttagagtatagtttaaagtcagrcagtgtgaagcctctgattttgtactttttgcttagaatacttttgctgcgtgggctcagttttggttccaaataaattttaaaatatatgtttgtaattctgtaaaacatgacattgatattttgataggaataatgttgaatctataattgcttttggaagtataaccattttatccatattgattctttcaatccatgagcatagaatatttttccatttgttttgtcatctctaatttttttcagcagtgctttgtagatttccttgtagaaatattcccttccttgtgtagattgatttccaggtatttcattttctttgtggctattataaataatattgtgttcttaatttggtgctcagctagaac

SEQ ID NO: 351289 - DNA, 572 bp, Homo sapiens
gcatgattgtatccatagaaaatcctaaaggctaaggacttgtagaatggaggagtaaggagcttagcaaaatgtctccccagaggaatatctactcaattggtaaaaataataaatataaactctccagaattttttaaaggaaatatggcaaatgaagaaacttgtattcatgaaaataaactaaatctcagaagaatgtgagtcaggggtacttgagctacaacacattcctatrtactaacccccacatattcctttgcagcccagtgtgatggaagctttatcttaggtgggtgcagccaagaagacagagtttcctcttttttgagctcacaataaagagctatggtgtaccctgtaaagaatgacagctagtacttctcagtcctctctcagctctgagatgtggaatctctattacagacatgagcaggcaaaagactggggttcccttcatctacccaacttccattcatagggcaggaactatataccaagaagaatgacagtatgggctctaaccatctccacttcaagttgcttgtaagacagagtttcctcactaaaga

SEQ ID NO: 351290 - DNA, 570 bp, Homo sapiens
tagttggaccagtggtgctgagttataaagactaaatttattctgaaaatccaagcatttcattactttatagttagtaaaaatgatttgacttatgtattttaattcagaatattttgctaaatctcaagcaaatctgagtccatgtgttactcaccagtctgaagaaatgtattttgcagcttcttgagagtaactgcttgcataaattcaaggtgctagtgacaagatcagcttgttccaatagcaccwctgtgaaagaagtctgtgaacagtagataagaaaatagatttattatataacagttcttcaaggcataagatttaaatacattgctttaattcattatcgcaaaaatgacatgatatttattgtttccgccttaaaattggataattgaattacagtccttaggaactgagaatatgtattcaatgttactaatacttaggctctccagaatttctcttcttcctgaacacatggaatattaaaattttaagctttcttgcagcatggtttgaatgtgtgactatttcaagccagtagactgtggaaaaaattagtag

SEQ ID NO: 351291 - DNA, 583 bp, Homo sapiens
tagttggaccagtggtgctgagttataaagactaaatttattctgaaaatccaagcatttcattactttatagttagtaaaaatgatttgacttatgtattttaattcagaatattttgctaaatctcaagcaaatctgagtccatgtgttactcaccagtctgaagaaatgtattttgcagcttcttgagagtaactgcttgcataaattcaaggtgctagtgacaagatcagcttgttccaatagcaccactgtgaaagaagtctgtgaacagtagataagaaaatagatttattatataacagttcttcaaggcataagatttaaatacattgctttaattcattatcgcaaaaatgacatgatatttattgtttccgccttaaaattggataattgaattacagtccttaggaactgagaatatgtattcaatgttactaatacttaggctctccagaatttctcttcttcctgaacacatggaatattaaaattytaagctttcttgcagcatggtttgaatgtgtgactatttcaagccagtagactgtggaaaaaattagtaggtgtcatttgtag

SEQ ID NO: 351292 - DNA, 633 bp, Homo sapiens
tgtgcaacatggtgaaacctcatctctacaaaaaataggaaaattatctgggcatggtggtgtgcacctgtagttccagctatctggggggctaagacaggaggatcacttgagtctgggaggttgaggctgcagtgagccatgtacayaccactgcactcctgcttggggacagagtgagaccctctctcaaaaaaaaaagaaaaaaagacttctaaatcatctatatttaaatggtactatattttaatacattcccttgatttttttagaaattcatatatatagtcaccttaggcagatacatagatattctacacaaacagtaagctctggattaactggcagagaaattatataaaagggaatggaaaaccctgaggcaatatttatttaatccacagttctttatgtgtccaactcaattctttattataaacttttcacattattaaatattttatcagaaaagtgtgatttatttcaaaaataaagattacccaaaagttcattactgatttaggaaatacacttttatttacatatacaaaaaagcatacacagtaaataagaacttaagaaatcagcataaatgacctaagatggaagcttatccatgttgttgtgtgtagt

SEQ ID NO: 351293 - DNA, 607 bp, Homo sapiens
gcaatacgttatctttctgatcaataattcaaaatagtagttttaaggaaactcagtgatctccataataacacaaaagcaacacagaaatttggcaaagagattgaaataatgataataaaaaaccagaaatcttgaaactgagaaacacatttggtgaactgaagaatgcattagaggctctaacagcagaatgaatcaagtagaagaaataatcagtgtacttgatgattggctatttgaaaatgaccagaggagaaaaaattaagaaaaaatgggyataaacacccaaaagatacagaaaattacctcgagagaccaaaactaagaattactattgttcaagagggagttgagaaaaatcaaagggtagaatgcttattcaaagaaataatcacagagaactttccaaaatttgagaaagaaataaatatccaggtacagaaaggttagagaacaacaaatagattcaactcaaataagactaccccaaggcatgtaataattacattttcaaaagtcaagaacaaaaagagaaacctaaaagcatcaagaaaaatgaagcaaataatatataaaagagttccaattcattgggcaacagact

SEQ ID NO: 351294 - DNA, 637 bp, Homo sapiens
cagctgagcagattgagagttcagagggacctgctcctagcaggaaagagaaggtggaaccatggactggcrtagcgaggaagttaattttggtttgcaagatgttacatttcatattttgggtttgttggtggtagaatactggaccatgatggtacctccaaacaatctaagagaaacacattttgagtgtttatcttattaattgtgattttattttaatttgcttaaaatttttgattttaatacgcaaagagaccaaagttagctcaagaaagtcaagagtagggtctgtcacatgtccaaatctcagagactagacctggagtatggttaccacctcaggccttcctattgggaggtaatggatctttagagataattgggagtcatgccattgttttctctctaccaactcctttattatttccttctgctctctttaattcttctcctggtttcaccctgctttcttataattttttgtcacctttctcagagtctctgctttctcataatccaggattaccatggagtcttatgccctcatggttaattaattataacctcgtgatttagttcccactactaactgtccgttctttcattacttacagttcaaatccccgaggcaaat

SEQ ID NO: 351295 - DNA, 594 bp, Homo sapiens
tcactcagtagggctctaactaaccctattaggtttcattcttcttgctctatccatccctcttgtctatcaccctatattataaaacattgaatttcagagtctgacatgttcaaccagcacgtgttattatagaaacagtgtatgtgcctggtggaaagttagaaaacacaaataagagaatgtaaatatcatatcccctaccttgggttacctatgttaatagaaaaacttatattccttactgtatctctttctatacatatacattatatgcatataattaaaatacataatataatatacataatatatatacatatataatttatttgcctgtgataataccaaagacatcaaaaagcacattgcttgtaacctgctttttcttttccatcaacaattgccaactaccaattaataaattttggccgggcgtggcgactcacacctgtaatcctagagctttgagtggctgaggtgggaggatcacttgaggccaggaattcaagaccagcctggacaataragcaaaaccctgtctctacaaaaaattttctttaatcaaccaggtgtagtggcatgttcctgtag

SEQ ID NO: 351296 - DNA, 443 bp, Homo sapiens
tacactgaaattaggtgagcttcccaacatgtttttcttctttgtcaaattaaagggaaattatatattctaggtcccctgcattttatttcattttagaaccaacatctcaatttctaccaaagcctactgggattttgattgggattatgttgaatctatagagccatttggggagaatagtattttaataatcttgaatcttccattccatgaatgtrgtatatctctctatttaggttttctttaatttctcttacatgtatttcataatttttaatgtagagatcttatacaatttttgttaaatttatttctgagtattttctttattttgacgctattatgaatgttttatgaatttaattttccaattatttgctgctggtgcttttttgtaaattgaccttgtattcttcactagaggggagaagaatcaccta

SEQ ID NO: 351297 - DNA, 302 bp, Homo sapiens
attcaaattacttcatgttgggtgagtgttgataatttgtatttttcaaggaattggcccatttcatctaagttgttgaatttattcatgaagagttgtctgtagtgtcctcttagtattattttaaagtctaaagggtctayagtagtattcttactcctgatgtttataatttgtgtcttctctcttttcatctttgttggtcttgctaaaggtttatcaattttatttacttttccaaagaaccagcttttgtttctattggtgttttaaattgttttcctgttttcattatcattgat

SEQ ID NO: 351298 - DNA, 457 bp, Homo sapiens
aagtacaaggatttacaaaaataccattctaattttacttgaaattatttaccttttatgtgaatggtataattacaaccaatgatacatccrtaagttgagtttactttaacagaataaacattgtggaaagcgaaagcatgaaatgcactcatttcgctctccatgagacccagagctgtttaggccccaaggccatagctcacgcacatccactgcaggcataaaaatttagaaataaaataaaaacagaaacaatcactctacgctggactgaaaaactcaacctgcagaatgatgacaaatatcccattgttaaatttcaaaaccatagaggagacaaaggaaaccatgtatttttaaaattattaatagttgaaagctatttcaattatgtttattttttcagagtatttctacatttcaaatgatatatccaacagcagaatttttaaaa

SEQ ID NO: 351299 - DNA, 528 bp, Homo sapiens
ggctattagcttgcagctgaaacacaagatgtgatcttggctcaggggaaacaggcattaggatgcctacctcagagccagttaacagaggcaaagaaaaaacagacacaggcgcttttgaaataggaactgaaatgaaaaagtttgaatttgctcatcaatacaaatttgggataatgaaaccatctacaggtagccaaaaaataaacacctcgcaaacctctaactatatgtgcacatatgaaattgcctccaatatcccatgcaacacaacagtgctagagccgtctccctggggacatttgaaactcrcaaatcattaatgtttctatctgacacccagaaacagtgctcagtcccagcgatgaccattgactaagtgacaggcttgggcacataatacttttctggtcaaattaaaacaaattataaatattaccaaactgagtttcatctgtttataagttcaagtgtgtttatttgttctaaactgaacatatggttgtaccacaatggatagccataaag

SEQ ID NO: 351300 - DNA, 505 bp, Homo sapiens
aaaagagaaagaggtgacttatactagaaagagcatacagaaaagccctcaaaaaagatgatctcccattataattatctaactgtttatttcaaataagaaacttttaaaacaatgaatarcaaatgaagagctagaggattataccaaatttgtcttagtagaaatttgtttaatcatataattatatgaatttcagagaaaggaagaaggaggtcaattttggacctcagaagacaggtctaactaataagggcaacttgaagtcatggtgtctggttttgcaagcgttctttaaaatcaaacagtgcaacctcccactagtcccctaagagacattaataggtacacctgggatggtagttcattggtcaaatatgtttgggaaatgctacattctgtagtccttactggagaatcacaacaatctgtcaaaagctatgaaaagtgaagaagttaagaaacttgctttatatttatttcatccttttccaaatttattttg

SEQ ID NO: 351301 - DNA, 546 bp, Homo sapiens
tacctatgtatttatgtatgctatagctaaaataccattagtgtgtgtagatgatagatagataagatagatagatagatagatagayagatagatagatagatagatagatagatattccctgccttaacaaatttataatcaagagttgaagtagaaatgtataaaaatactataaaacaaggcatattacaattactcaaagcataaataaacaaggtgctatgcaccattaaggagagagcaataaattccaaccaggtgaaaatgaaggaaatttcatttccttcagaaatgaaatgaatttgagttatgtctaagtaaagttggctcctgtccctaactgcaagctccctacctgtggtcaaggtcatggcttcagctgtccacatttctgtgtccatgttccaggggattcctccaggttccaggctgtgctttgaatccccttgactgtagtcaggtgtccccattgtcagccctgaggctcttccctgaattcccctgctggcctctgccctgctggatcctgccagcctttggctt

SEQ ID NO: 351302 - DNA, 560 bp, Homo sapiens
agaattggctccttatgacatgaagaatgaatgaggtcccagcacataacatggtgccttcttttccccagtcccctggctactcttccagcagcattaccaytggtatacttatgtgtacctcagtgacccttcaactaatgcttcataatgatcatgactgtcagtctcttcatgtacctcaataacttgtgcctcacacccttctactgatggccgtccactgcctttcaatttttctttctgtacactaggcaaattctgattctctaaaccttctattcaaccttcaatgcactctccaaatacctcctcttctctgaagccttttttgcccagcatcctccaatcttaggcaaaactgattcgtcccttcttcgtaccaccagtgtaccttaaccattatttctgtaactgctttacttgtctatatgtcttcttgggcaatgagattctccaaagcagagatgtgccttatcatttcctcgtgcacctcctctctgtactgggcacagtatctggcccagagcagtgtggtcaccagcctgcccagggcagag

SEQ ID NO: 351303 - DNA, 560 bp, Homo sapiens
agaattggctccttatgacatgaagaatgaatgaggtcccagcacataacatggtgccttcttttccccagtcccctggctactcttccagcagcattaccattggtatacttatgygtacctcagtgacccttcaactaatgcttcataatgatcatgactgtcagtctcttcatgtacctcaataacttgtgcctcacacccttctactgatggccgtccactgcctttcaatttttctttctgtacactaggcaaattctgattctctaaaccttctattcaaccttcaatgcactctccaaatacctcctcttctctgaagccttttttgcccagcatcctccaatcttaggcaaaactgattcgtcccttcttcgtaccaccagtgtaccttaaccattatttctgtaactgctttacttgtctatatgtcttcttgggcaatgagattctccaaagcagagatgtgccttatcatttcctcgtgcacctcctctctgtactgggcacagtatctggcccagagcagtgtggtcaccagcctgcccagggcagag

SEQ ID NO: 351304 - DNA, 560 bp, Homo sapiens
agaattggctccttatgacatgaagaatgaatgaggtcccagcacataacatggtgccttcttttccccagtcccctggctactcttccagcagcattaccattggtatacttatgtgtacctcwgtgacccttcaactaatgcttcataatgatcatgactgtcagtctcttcatgtacctcaataacttgtgcctcacacccttctactgatggccgtccactgcctttcaatttttctttctgtacactaggcaaattctgattctctaaaccttctattcaaccttcaatgcactctccaaatacctcctcttctctgaagccttttttgcccagcatcctccaatcttaggcaaaactgattcgtcccttcttcgtaccaccagtgtaccttaaccattatttctgtaactgctttacttgtctatatgtcttcttgggcaatgagattctccaaagcagagatgtgccttatcatttcctcgtgcacctcctctctgtactgggcacagtatctggcccagagcagtgtggtcaccagcctgcccagggcagag

SEQ ID NO: 351305 - DNA, 570 bp, Homo sapiens
gtgccttcttttccccagtcccctggctactcttccagcagcattaccattggtatacttatgtgtacctcagtgacccttcaactaatgcttcatratgatcatgactgtcagtctcttcatgtacctcaataacttgtgcctcacacccttctactgatggccgtccactgcctttcaatttttctttctgtacactaggcaaattctgattctctaaaccttctattcaaccttcaatgcactctccaaatacctcctcttctctgaagccttttttgcccagcatcctccaatcttaggcaaaactgattcgtcccttcttcgtaccaccagtgtaccttaaccattatttctgtaactgctttacttgtctatatgtcttcttgggcaatgagattctccaaagcagagatgtgccttatcatttcctcgtgcacctcctctctgtactgggcacagtatctggcccagagcagtgtggtcaccagcctgcccagggcagaggaggttcgtaaagagaaaggagggttgttcacagtggggagactgacagcgggagcacatgtg

SEQ ID NO: 351306 - DNA, 575 bp, Homo sapiens
gcctgcccagggcagaggaggttcgtaaagagaaaggagggttgttcacagtggggagactgacagcgggagcacatgtgcattcaggtcattaggtaggaagcaggaagatgaaatgacaaagtagccaatagcatatcctttcattgtcttttatttgaacccattgccaraatcaagaacaaagaacctggaagctcctggatttatctcacctggtagtctgagtggactccagtgatagggtgtcttagtccattttgtgtggctataaaggaatacctgaggctgggtaatttattaagaaaagaggtctatttagctcatggttctgcgggctatacgggaagcctggtgccagcatctgctcagcttctggtgaggccctcaggctgtgtccactcatggtagaaggtgaaggagagctggcatgtgcagagatcacatggagagagaggaagcaagaaggtggggagataccagctctttgtgacaaccagctctcatgggaactgagtaagaactcacctccaagagacacaattaatttattcatgagggatctgtcctcatct

SEQ ID NO: 351307 - DNA, 609 bp, Homo sapiens
gatctcatccattaaatatcacacctggatttactaaaaattattgaaagtgggttggtaatatcttcagtgcaagtttaaaagtatttcagggtttcaaagtagtatgtatttgaaaaatctgaaaacaatatacgtaagtttcaaaatttagctatgaatttaaaaaagcagggctcctggacaaattttagcacctaaagaattgatttactacttcttggaaaagtactttctgagcattaattatacactgattgacaagtatgaaaaatgtattctgagctttttggtatgtcacataaatgaataaaactttttggattattggttactgggtggtgctagatactggaaagcatttgtgtttaatgagaacttctagatatttgccattcatttggaaattgggtgctagattgggcatgaatgagatttcacgcaaacccaggaatatattcatcaccaattctgcactcgaatctggtaggcacaatggcwtttggaaaataggggtcactactgaggtcacttgctgatttgtttcataccagctgagtcagtctttggccagcccccacaagaaaggcaactggatatgccaaaatg

SEQ ID NO: 351308 - DNA, 548 bp, Homo sapiens
ccccttttggttcctaaataagatggctacaagatgaaaagctacatgcctcccccatattttgcccacaagggaattcccagtgagctgctagatctttacactaaaggtgtttctattaaaatttcaccatggcaatataaattgatagtttatagatgcagtcacccctggcccaccagacacaaatgcatatctgattgttcccctggcccagttttgtctgttatcttatataaaatgcagattccctgcaattttcctctgcctcatttgtctgtgtcatcttatgttaaaaaaaaatgcagattcactgagccagacaaaggcatgaatgactrtttttccctacccacctcttacatgaaaattgtgtacttctcaatatcctgccctttcccctttaaatttggagccttcaaaatcatctttggagaaaggcatagacctgtctcctaggtgtgcatccttaactttggcaaataaacctcctaaaataattgagacttgtcatttttctcgattgacagaagaaaagacagagccaa

SEQ ID NO: 351309 - DNA, 616 bp, Homo sapiens
aattgtatataaaactgcttgttaaaatttacattagatcttgagccttttccttcattattaatattctttggaaatagaccttttgtgactgaatggaattctgttattaccagtcaactattatttatttgactgttgcgagacattagttgttttgagtgtcctgtttttgagactttttacttaaatgtgtcctttttacatcattttattattttgggttcctggaagtgggatgattgttcaaaattcgttatttttagaatgttggtatttattgctaaattgcatccaggaaagattctaccttcagcagtggatgagtaagcccatgattttgtatatcattgaatatcatagttcttttttttgttttgcctttgctagtttagataatgaaaacgttgtatttctttgctcgatagtagaatagctycaataatatcatattttgtttgtgaatttcctgagccctttgttcaattttttggtagagtttttttttcaaatctcctgtaataaaatctcctcctgtacatttctcttagttttttatgggatgtttataaataatcttccggtttcttgtgggttaattactttttaacttatt

SEQ ID NO: 351310 - DNA, 559 bp, Homo sapiens
ataaaagttacttttcccatggcatatcatagctggtgttgttaagattgagagtcctgctgaagatgcatggggagtttatgagtcttcctagaaccggcagctcagtaagtgaaaagacagatacctcaggaatctcaaacaaaaataaacgagtttacaagctggtctacaagaacttgctatttcagtaaggcagccaatgagtgaaagagactaaaatactccctctttaaactataatgcagttgatcacaacagtcraaccagttttcctttcagaaatgaactgaatgtcttaagatttttacagacaatgtggatactcatttcagttgacacttatttcctttggatatacacctagtagtgggactgctgaatcacaaggtaattctattttgaatttttggaggaacctccatactgttttccataatggctttattaattgaaatttacactcttacattcccaccaacagtatgtaaaggttcccttttctccacatccttgccaacacttttgtctttttgccattctatctagagtaacatcg

SEQ ID NO: 351311 - DNA, 567 bp, Homo sapiens
aatctcttaattataaacaacattcatcaagtctagaaatgttcaagatttttgagattttaattccaaatagcaatgtttcctatcagattggcccccaattctttttattcatctgaaaatttgaatttcattgaattcaagatctgcactcttattacccaagtagagattatgcttctagactagcagttccaacatgtattaaaaccattagcatatgtgttattgtttgttaattttttatcttccttactaggacttcacccccagaagagctttctttattatctctgcatccctagcatttggcatatagtagacagtgtgtgtstgtgtgtgtgtgtgtgtgtgtgtgtgtgtgtgtgtagtgaatagatatatagtgtgatatatatgcatgcatatatattgtgatatacatatgttgaatggataaaaataccataaaacagcatatctcatatggacactttctgaaagtctcttaaaaaatactcaaactggctgggcgcagtggctcatgcccgtaatcccagcactttgggaggctgaggcaggcgggtc

SEQ ID NO: 351312 - DNA, 559 bp, Homo sapiens
ataaaagttacttttcccatggcatatcatagctggtgttgttaagattgagagtcctgctgaagatgcatggggagtttatgagtcttcctagaaccggcagctcagtaagtgaaaagacagatacctcaggaatctcaaacaaaaataaacgagtttacaagctggtctacaagaacttgctatttcagtaaggcagccaatgagtgaaagagactaaaatactccctctttaaactataatgcagttgatcacaacagtcaaaccagttttcctttcagaaatgaactgaatgtcttaagatttttacagacaatgtggatactcatttcagttgacacttatttcctttggatatacacctagtrgtgggactgctgaatcacaaggtaattctattttgaatttttggaggaacctccatactgttttccataatggctttattaattgaaatttacactcttacattcccaccaacagtatgtaaaggttcccttttctccacatccttgccaacacttttgtctttttgccattctatctagagtaacatcg

SEQ ID NO: 351313 - DNA, 612 bp, Homo sapiens
ttttgtctgttacacaacttgaagtactcatataccctatccacaatcccactgtcactcaaagcacatgaactcattatgtttatgagtgggtgggagctttggggccctcttagaattctgcctaccactttaactgtctccctctacgacatgtcatcagacatcaatcctttggcccttgtactaacaaacattaatgacagggtagaataaacagagtgagagcacattggtctcttcctttcaccattttggatatttgtttctgtttagtctctcrgtcttaggttcctcatctagcttcacagtaattcatagagcctgtgaggataagtcactacatataaaggtgttatgtacctatacatataaaggtgttttgtaagccataaagcaattattgtacacaggaatgtcaagtgaagacacaaatatgtatagtcattatatatgtatgaatattgtgtatgtgtgtataatacaactgcatacattataaatacaacaaaaaagcacatatgcaaatttgtgtgtgttttgcatatatattatacatttacttagtcacttactaccagagccaatgccatagagtaacttcattgattt

SEQ ID NO: 351314 - DNA, 612 bp, Homo sapiens
ttttgtctgttacacaacttgaagtactcatataccctatccacaatcccactgtcactcaaagcacatgaactcattatgtttatgagtgggtgggagctttggggccctcttagaattctgcctaccactttaactgtctccctctacgacatgtcatcagacatcaatcctttggcccttgtactaacaaacattaatgacagggtagaataaacagagtgagagcacattggtctcttcctttcaccattttggatatttgtttctgtttagtctctcagtcttaggttcctcatctagcttcacagtaattcatagagcctgtgaggataagtcactacatataaaggygttatgtacctatacatataaaggtgttttgtaagccataaagcaattattgtacacaggaatgtcaagtgaagacacaaatatgtatagtcattatatatgtatgaatattgtgtatgtgtgtataatacaactgcatacattataaatacaacaaaaaagcacatatgcaaatttgtgtgtgttttgcatatatattatacatttacttagtcacttactaccagagccaatgccatagagtaacttcattgattt

SEQ ID NO: 351315 - DNA, 612 bp, Homo sapiens
ttttgtctgttacacaacttgaagtactcatataccctatccacaatcccactgtcactcaaagcacatgaactcattatgtttatgagtgggtgggagctttggggccctcttagaattctgcctaccactttaactgtctccctctacgacatgtcatcagacatcaatcctttggcccttgtactaacaaacattaatgacagggtagaataaacagagtgagagcacattggtctcttcctttcaccattttggatatttgtttctgtttagtctctcagtcttaggttcctcatctagcttcacagtaattcatagagcctgtgaggataagtcactacatataaaggtgttatgtacctatacatataaaggtgttttgtaagccataaagcaattattgtacacaggaatgtcaagtgaagacacaaatatgtatagtcattatatatgtatgaatattgtgtatgtgtgtataatacaactgcatacattataaatacaacaaaaaagyacatatgcaaatttgtgtgtgttttgcatatatattatacatttacttagtcacttactaccagagccaatgccatagagtaacttcattgattt

SEQ ID NO: 351316 - DNA, 547 bp, Homo sapiens
atacatttacttagtcacttactaccagagccaatgccatagagtaacttcattgatttaatcagtaacctttaaaagattataattttaccaacatagctttagtttcataagtccaaccaccacagtgttttttggtttgccttatttgaccattatatcccgtctaatccacatagctttgactactttaatttccctatgggtggaataacagatgcactaaagattcttccctcttcggaaatgcttgattccagtgttgaaccatgctgtatackaggctttattgtatcttataatgcaatcttttttcaagttttatctgatccttccagataactctaatattacctgtaactctaatattacctgttgttctaaactgaaaataagagttttaggacttgtgaatgctgtttattagaaaagttattactctcacatattatgtaccttgggaagtactgcgagtttggaagtcgaatgcgaatgagaaaagcattatggtaagactaaccttgaattactttcatagtgcattgaa

SEQ ID NO: 351317 - DNA, 526 bp, Homo sapiens
tagctggaattctagtaaccatcttgaaccatgaaatattcttgatgacagaatacatttactgaggatagcagtaaaaaacagaagcttagatttctcattttatctagagccaccatgccagcccatcagtattgattccagactttttgcatataagacaaataaatatatgaagcattaatattaatagtataattaagtcatttttataatgtgttttcttatgcaaatacatccaattttaatacactaacaatttttatccaaaaaatatagagaatamttgcaaatcaaaaattaaaagattaataatgcaatagaaaaatttggcaaagttatcaaggcaatgaatgtatagaaaataaaaatcaaatggcaattccatataaaaaacatatttcacctcactatatttcagagaaacaaaccaagcaacaatggaatatcatttcatattagaatggtgcatgtttttagatttgataatgccaagtattggtgagtctatagagcaagcaaaaat

SEQ ID NO: 351318 - DNA, 615 bp, Homo sapiens
aatatgcaaaaaaaaatcaccatatagacattatttagagatagatacacacacaaagtaataggagacaacatgaaggtgaaatataaacattaacttcagaacaggttttacatctcagatgggaatgaggaatggggtaataaaatggcatggaaggcttcaacttatcttaaatgtatgtatttttaaattgaaaaaaaaaactaaaacaaatattgcaaaatattaggatctgctgccgaccttggcagaggccatacagagactattcctcttattatttctacatttttctatttttgagaatatcataagaataaaataagtataacaaagtacagaataagataaacaaaaacttcaaaaagaaacaagagtaatctgaaagataacaattattaattcctaagttaagcttatggcataggaagtacaaaggtaggacatatgatcaatatgattcggtaagttatcttatatatgaagcattaatagaaaattkttctaatatttcaagtttaagagtgtgtaagtttgctgacagagaatattgagtggccaagaaggcatatgtggttttagatgattgaacacaataagagataaaatagt

SEQ ID NO: 351319 - DNA, 615 bp, Homo sapiens
aatatgcaaaaaaaaatcaccatatagacattatttagagatagatacacacacaaagtaataggagacaacatgaaggtgaaatataaacattaacttcagaacaggttttacatctcagatgggaatgaggaatggggtaataaaatggcatggaaggcttcaacttatcttaaatgtatgtatttttaaattgaaaaaaaaaactaaaacaaatattgcaaaatattaggatctgctgccgaccttggcagaggccatacagagactattcctcttattatttctacatttttctatttttgagaatatcataagaataaaataagtataacaaagtacagaataagataaacaaaaacttcaaaaagaaacaagagtaatctgaaagataacaattattaattcctaagttaagcttatggcataggaagtacaaaggtaggacatatgatcaatatgattcggtaagttatcttatatatgaagcattaatagaaaatttttctaatatttcaagtttaagagtgtgtaagtttgctgacagagaatattgartggccaagaaggcatatgtggttttagatgattgaacacaataagagataaaatagt

SEQ ID NO: 351320 - DNA, 662 bp, Homo sapiens
tttcttgtggtttgatccatgcttcgcttagtatcttctgcctgatctcacttgcaccattcatcctctttgaccagtgaaaataaaaatattatgctctgtttccttttgggatttcatattttaaaccaggcatttgaaaactttttccataaagggtcagwtaataaatatttcattttgcaaaccatataacagccactctatcacaactactcaacccttctgtgtagcatgcaagttgccactgcaaaaattagtaaataaataaaagtttaaaaggtggatttacttattttattaaatggtttaatacttcgaaacattagtccttactgtaataacaagaagaaaattcatattaggtatccagttagctgtgagtgccacaaagtttttgaagaaaataacttttttcttcaagccaaacagctaagtttcagtcttagtcattcaagatgttataacagaatacctatactgggtaatttatagataactaaaatctattgttcatagttatgaaggctggaaaattgaagattaatataccagcaagttttagtgtctgatgagggctcacgctccacttcaaagatggcaccttctaaaagtcctcatatgaacaaaaggagaaacaagttctctcatgcttctttaat

SEQ ID NO: 351321 - DNA, 564 bp, Homo sapiens
atgctcttgataaaggaaagtatgtgcacatgctttggtcgtaggtggtgtcatagacttgcccatttaacatttattgtccattctgcttaaatgagggtgtccctcagttgtgttttggaaaatcacagacatctaagagtcaatttgaaaagttctgataacctcaccactgaagagttttccttcagtgttgttcctaaaattctaagaatataagatattattatactgctcttgaaaagatccagtcagtgctcaaaatagctatttaagaagatatcagggtccatgacaggctgctaaatttaaggaacgaaggatgggaactgagggaataatcagtaaagyagaccaaggatgtttcatgtggtgtcctaaaattgatgagggttatcacagaagtatttataattacagagagaatggatgttttaaacagacatttatcaaattctggaaagtattaaaatctcctagctactccagtcactcataagatagatgactgtctatacagttgtacacactatttatagtttataagaatcagtaatatgcatg

SEQ ID NO: 351322 - DNA, 398 bp, Homo sapiens
agttccacgtcgctaggaggcctcacgatcatggcagaaggcaaaagtcatgtctcacatggcagcagacaagagaagagcttatgcagggaaactttccatttaaaaaccatcagatctcatgagactcattcactatcatgagaacagcacaggagagaccctaccccataattcaatcacctcccatcaggttcctcccatgacacctgggaattgttggagttacaattcaaggtgagatttgggtggggayacagccaaaccatatgacttccactatttagtgttgatttcataacagatttagaggtgtgtcacccattgaacatgattgtcatgaaagaagtaaccatatccttactcatattatagcttgctgtgcttctaagcacaaa

SEQ ID NO: 351323 - DNA, 557 bp, Homo sapiens
tttaggattccaaatttgctgtgagaaatgacaaaaactctctgtattcatttcttctgagaaaatggttacatacaatttggaagagtccacattaaaaaaaaaaaaagaattgctctgaaactatctgggraaaaaacattgctctggaactacctgggacaaaaatgcattcttaaacattttatttagttatatttcttgataactcaaaaattataaggtgagagatagtcattgatcataatcttttgcttttaaaaaagaaaggatcctcttgtacttcaactgagtcagttgggtgtaaatattcacaagagctgatattcagcaggtatacccaagtatatcacctaatgttaaaatgttaaaacatttccatatatgttgttttttacttagccactaactcaagactctcaaggatggctctttgaccatatgggcttttttaatccttctcttgggattgaaagatataaagttatgtctatggatatatcaccttgaatatgcccaatcacacctaaaaaatctaaagttaaaaaagtaatgcc

SEQ ID NO: 351324 - DNA, 586 bp, Homo sapiens
gtcaacaataatatgtaaaaactcagaatttatcaggcatttctaaagaagtgttcacatgaagagtcattgtttcaaacacctagatcaacacaaattaataaagatatctatatgctaatgacttccaaatttatttctccagtctaaatgctttgcctgaccttcaaatgtaatcacaaatcgcctatttgacatatttttattgatggctaataaatttctcattcttagcattgcaagctgctgctataggctccacatctcaggtaaatacactgagatagacactactttttcctgcttttcaggccttgaatcctttctatcacacctgatccctgtcagcaaattctatgggctctactttcaaaagatggctacaatttgaccccatttcagtaccascattgtcttcctcctggtctacgttgacactagttcttgtcttgactctcacataatctcctaactggggttcatgcttttgcctttggctaaatccttgtggtctattcttagcacatgaacagagtgatcctgttacaatttagaattgatcatgtctctccgctactcaaaagtc

SEQ ID NO: 351325 - DNA, 602 bp, Homo sapiens
tatggatattatattcatatagaatacagtggtgaatttaaaggatttcaaataccccataaacagaatgtaaagtactatactgcgtcaatacataacaactcaaactctgattttagaggtacaaaatgtaatgcgtttcccctgtatagggaaagtgaaacatcaggcatattttactgaaactctgacacttatgattctcaaaccagagagttactttaccatccttggactatatttctacctctataatataaatgacattgattactttgtgtgtaatgttcttacaattctgacagtctatgattttatgatttatgactctcaagttgattggtgaagatttgaccacatgaaacttctatagataatgtagtatatccccttagcctctaaagtaaatgagattatgatagttatatgctgctaaggtggagaggcagagtaagatatgcattctgtytatacttaggtgtttactagtactttattggtagtgactagggagttaagggttaatgaaaaaagacaacatgcactagtgtttaggctccattttggaaaatgttgacatatacaatttgagccaaatatta

SEQ ID NO: 351326 - DNA, 587 bp, Homo sapiens
atgactggctaatttttgtattttttgtagagacggggttttgctatgttgcccaggctggtctcaaactcctgacctcaggtgatctgccagcctcggcttcccaaagtgctggagttataggcatgagccactgcacctgaccaataatacttaaatagtattatttgatgaattgctagaggatatgtgcgcattatcttcagaaactactgtgggctgtagtttcctcagttttacctttacttttacctgtaggaactctaccaggttctgtacagtggagattcagtagagatcctctcataatattggcaaggggagaaaaagagtaaccactgtgaaatatatctagatcattctctataacagggcccacttccagggaaaatgactttactagactcttatccaagctgaggaaggtaattcctcattttatagaccctctagacttattgtctaactttaggaggataaaaaatatactactagaaaatatttgtggttrcagcccagacacaaagacccactaaaacactgagttttaatcataagatcatagatcacttcctctacgtcacaac

SEQ ID NO: 351327 - DNA, 529 bp, Homo sapiens
aggtaaagggatgaaaaaagacctttcatgcaaacagacacgaaaagcaagcaggagtagctattcttatatgagaaaaaaacaaactttaaggcaacagctgttaaaagagacaaagagggacattatataatgataaaaggccttgtccaacaggaaaatatcacaatcctaaacatatatgtacctaacactggagctcccaaatttataaaacagttactaattgacctaagaaatgaggtagatagcagcaraataatagtgggggacttcaatactccactgacagcactaaataggtcatcaagacagaaagtcaacaaagaaacaatgaattcaagctatattctgaaacaaatggaactaacagatatatacagaacattccatccaacaatcacagaatatacattttattcagcagcacatgggaatttctccaagataaaccatcttataggtcacaaaatgagcctcaataattgagaaaattgaaattatatcaagcactctctcaggccacagt

SEQ ID NO: 351328 - DNA, 535 bp, Homo sapiens
ttgtggtatcactattcctttccctctgcctgtgtacaggttacaatgtaaactgcagggtgtggagagcagcaactgaagaaccttattctcatcagataggcagctagtttgaagccggcctcttagtaaccatgtaaccatgagtatgcttacaaattcctcacaggatccatcttatcacttgtaaaataaagattaagaaaaaacaccttacctgttggtaagttatgcaagtaaagcctggagcaggatgtttggcacatgattaaatgcaacaaaagataactgatgatgttgatccatgcatacasagagacgacctagataaatcaaagggttgtaaaatctcaacattaattcctatgttaaggattaaaatgagaaaaataaattactaaagtagattaagataaaatcattctaggctgattttataccagagggttttttttttctatttttaaaaagaaaagagattaaataaggttgcacaggttatcagagacaaagagctcagcaagcttttaattaa

SEQ ID NO: 351329 - DNA, 485 bp, Homo sapiens
agaaaagtgattattaactgctggagtagatatcyaatgaattgattcctatgctagtatatttaccttttaaagtataaatatttaagggctggcaaaacaaacaaacaaacaaacaacactagacagttttttcttgttttgctttgactggcttggtagattgtacatttcagaagtgaaagcttttaggaagagtcagagaggcatttatctggtagagtcacatcttcaaatacccctggatttttgtggatatttttccaatatgaaatatttcttctctgcatgtgtatttcctttccatgtgcttttattttcttcccttactactattagttagtatctactacatagtgaccttagtgtcaaaaaaatcaattgtgtggatctcagatatggcacatttcacagaactgacaagactggaaatgaacctgtgatgagtctgaaacggagaagttatgacatccattgccccccgc

SEQ ID NO: 351330 - DNA, 567 bp, Homo sapiens
gaatattgaatgagataagactaaacatcaaggacatggcctgggacaaaggcagttaggaaaattatctttgagaaagctgtaagtaaaagcaaatcatggtcagacatggtggctcacacctatagtcttagcattttcaaaggccgaggtgggaggatcgcttgagcccaggagtttaagaccagtctgggctacatactgagactctgtctctacaaaaagttttagaaagtattagctgggtgtggtggaggctgaggtgaaggatcacttgagcctgggaggtcaaagctacagtgagccataattgtgcctctgcaccccagcctgggtgacagagcaagactcagtctcaaaaagataaaaaagacaggggatcatggtggacaggaggcaggactagatttctgctctgactcggacagatagaacagcgtgtggatgctcgcatcatgagtttttgctccagaacaactgcaggaataagtcgggaaacttaagaagacccacagaccccctgaaggaagcaaattgctactgygggacccaggagacaccccagat

SEQ ID NO: 351331 - DNA, 573 bp, Homo sapiens
caccttttatcattatataatgtccctctttggcttttttaactgctgttgctttaaacagcagttaaagctgttgttttgtctgatgtaagaatagctactcctggtcacttttggtgtccatttgcatggaatgtctttttctacccctttaccttaagtttttgtgagtccttatgtgttaggtgagtctcttgaagacaacagattgttggttggtgaattcttatccattctgccattctgtatcttttaagtggagcattcaggttatttacattcaatgttggtattgagatgtgacatactattctattcatcatgctagtttttgcctgaataccttgggtttttttttcattgtgttatcgttttatargccctgtgagatttatgctttaaggaggttctattttggtgtattttgagggtttgtttcaagatttagaactccttttagcagttcttgtactactgacttggtagtggcaaatcctctcagcatttgtttgtctgaaaaagactgtatctttccttcatttatgaagtttagtttcactggatacaaattct

SEQ ID NO: 351332 - DNA, 573 bp, Homo sapiens
caccttttatcattatataatgtccctctttggcttttttaactgctgttgctttaaacagcagttaaagctgttgttttgtctgatgtaagaatagctactcctggtcacttttggtgtccatttgcatggaatgtctttttctacccctttaccttaagtttttgtgagtccttatgtgttaggtgagtctcttgaagacaacagattgttggttggtgaattcttatccattctgccattctgtatcttttaagtggagcattcaggttatttacattcaatgttggtattgagatgtgacatactattctattcatcatgctagtttttgcctgaataccttgggtttttttttcattgtgttatcgttttataggccctgtgagatttatgctttaaggaggttctattttggtgtattttgagggtttgtttcaagatttaraactccttttagcagttcttgtactactgacttggtagtggcaaatcctctcagcatttgtttgtctgaaaaagactgtatctttccttcatttatgaagtttagtttcactggatacaaattct

SEQ ID NO: 351333 - DNA, 447 bp, Homo sapiens
tatttcctctttaatattctggctcaaatgtgaacaaaaccaaaatccacttcatttgtccccagaccataaaagttaatttctaagttggattaaaagacataagaaacctaaaaagatgtaaacttatgaagtatagtttcctgatcccagctgacttacgtagttggttcagaagccctgttttatttaaaatcctatctcagatgtgctaaaagactaaggaaaggacttgatttactcacactgtgccaaaaataaatgccccatttwaaaaaaaaaaagactaaggaaagaaattcagggtgattttgcctataattggggcaagtttaaaataagagaacttgtgacataaggagatagttcaattgtaaaaagtaattattttataaattggcatatatttttattcaatctcaagcatatttaaataaatattctcat

SEQ ID NO: 351334 - DNA, 566 bp, Homo sapiens
caaacgataagatagcaagaaagtaaatcctactgaaaacaatttaattctgttgctttattctcaaaatatgatttrtcacacagaatgccctgagtgaccttgcagatgccactcacctggcatcacgagaactcttcttgctggcaagtgggaaataattctgttttcctttatctggccacaaacataaatgacgcattctttaatgtgttagtaaaagtgttgtaaagactgattagattaattgagagagcctgatgtgcacttgccttttaaaaccttataaaaatcctgcttaactttttctagatgaccatctcccaacaaaaagattctttgataatgtaggaaggaaaaattccttctcagcttttatgcatttgggaaagcccacataaaattaatttttccacagaagaaatatataatagaccttattatatagaaatatatattctacatattatgtagaaatatataatagaccttaggaaaatgatatttaatcccaaaattgcattttaaggaggatggagtctgtgaaagaaaagactaggtaggta

SEQ ID NO: 351335 - DNA, 606 bp, Homo sapiens
tgacatgaagtggctttgactggtgagccataccctgtgatgagttggccaaaacccctgtcaaggccaggaatgtttaatacatgattgtaagttgaattctatgctgcatgatacggcagcgtgactgactactttcctttgattcctcaatcctctataaagattttgtttatggctggaaagatcaagaagaaggggtctaccatactgggaaagagaagataaagggccatccctagatgcagagcagaaaaaaagggatctcccagaagtaaccctgagaaggtaagtctcccaggatttgcaggtatcttgcagtttcaycttccagctgaatattcattttgtgctttaattctcatagtaattctcagcgtagtcccctagcaccataccttagaactgaacatttaatgtcctgagccataatctattcaccagttgtttactatacactttagaaatgtgtctgtcatccagatcactgatttcacacacaggcaagacccaacacacccacacacaaaatcataaagatatactttgaagccagctggttagaaccaggagtacattttttctgtagaagaaatgttataaatc

SEQ ID NO: 351336 - DNA, 627 bp, Homo sapiens
caattttgttggctgacctttcaaaagagagaagatctaatcagacattgtgatgttcaggttctgaattatgatgagcaagcaggrgtctctaatccccccaccactgcagctaaacatttgggagtaatattgctaattagaatgcagcattctaacctgaaagcagagctccttgctcagtcctatattggccaagcctgctgtttctgctgcctcttcccaacacactacctattattttccaccacagagactcccccttattacaattttcaatgtatttttgtaacagatgcaatgtgtttacttgggtgcctggagactgaatctcttcaggtgggtaatcattagaatgaggaaagtcaagaaatcactgtaatccccacttcacctcctgtacaaaataaattccacatggattaaagatttaaggctaaaaaataaatccacagaagactacaagaacaaatgagcatgttttccacagagtttataatagtaaaaacctggcaaaaaaattataaatcctgactgttcatcaatagggaaacacacaaacgcaaatgatagtttattcatttagtggaagagtgtgtggctgaaaatagctctttaagaggagga

SEQ ID NO: 351337 - DNA, 601 bp, Homo sapiens
actgttcattcagcatttgacttaggtaagtttaggggtgagggctagagatatggttttgggagtcatgaaagccagcttacagatagcttttgagcccatgaattgtgatggacctatcttgagaaagcatacgtactactgaggctatttgagggctgacagcagaacccctgggagcactaccgtctaacaggtgaacaaaggaaacttgagggaaaaccaggaaaaaacaggacagactcagaactcctggtttagatcaagggaaatagagtccttggtctgatcaataaataaattagaccaatgcaggtacagtgcttacttctaagtgccagccttttacaagggcagtgatgacaactgtgtgtcagaaggaaggctactggatggtggggaatctggaacccatgtcaaaacagagtgttgaatactttcataccaagattatatttatcctatttgctatgcaggagagggatttaattttgtttttttagtttcagaaggaatmataagggattaaggaagcacatttcaatcaatataaataatagtttttaccagctgttaaaaaatggaataggttgacttgttt

SEQ ID NO: 351338 - DNA, 461 bp, Homo sapiens
atgcagtggcatgatcatgtctcactgcagcctcaacctcccaggtttaagtaatcctcccacctyagcctcctaagtagctggagccacaggcacatgccaccacgcctggctaatttttgtattttttgtagagatgaggttttgccatgttgtccaggctggtttcgaattcctgggctcacacaatctgcctgcctcagcctcccaaagttctgagtttacaagtgtgagcccctgtgctcggcctgttttattacattttaatggctttcaccaccatttgtgtctgatgctactgagaaacgtatcctttaatagatatataatactttgaaagtaagtggtaacaagaatttcctaagagaaaatctgattactagaattataataaaaagatctgttcagtttcctcagtgagacagaaaagactctagtctggagaaatacagattaaaagt

SEQ ID NO: 351339 - DNA, 461 bp, Homo sapiens
atgcagtggcatgatcatgtctcactgcagcctcaacctcccaggtttaagtaatcctcccacctcagcctcctaagtagctggagccacaggcacatgccaccacgcctggctaatttttgtattttttgtagagatgaggttttgccatgttgtccaggctggtttcgaattcctgggctcacacaatctgcctgcctcagcctcccaaagttstgagtttacaagtgtgagcccctgtgctcggcctgttttattacattttaatggctttcaccaccatttgtgtctgatgctactgagaaacgtatcctttaatagatatataatactttgaaagtaagtggtaacaagaatttcctaagagaaaatctgattactagaattataataaaaagatctgttcagtttcctcagtgagacagaaaagactctagtctggagaaatacagattaaaagt

SEQ ID NO: 351340 - DNA, 553 bp, Homo sapiens
tagtagctgtgtaaacttggtcaaaaaacttaacttctctgtgcctctgattcttcaactgtaaactgggatatgagacagagagagagagagagagagtgagaatgaatgaatgtgtatgtagtgggcattkgatgaaatgatcttaaaaacactctctttttaatggatattggcttctagcaactagtgatagaaaaggcctggtatacataggctttgccacccacattcttaggcagaatgggggcccagacagacaccacatgcttgcttactgtaccaagaaagaaatgaagcaaacattaaatttaaatcaatagcattacttgaacacagaagacaaaactgttttcccccaaattgttttgattgctgtcagtagctgctattaggtatgaaatccattcagatcatcaaaaaccagagcaacatacaatgcatgaaaagctgttgtaattggcaccattgtaactctatacggtgtgtgatcttagctgggaggagggagaattgtaggataacttgtaatctaattttctttgttgtaaaa

SEQ ID NO: 351341 - DNA, 460 bp, Homo sapiens
actcttgggtgaccaggcacattgtcaataaacagcgatattttgaaaggatttttttttttcctgagtaatagatctcaaaattgggcttaaaatattcagtaaaccatgctgtaaacagatgtgctgtcatctaggctttgttgttccatttatagagcacaagaagagtagatttagcatcattcttttaaaataaactttacatgaatttattaataaatttttattawtaaactttattttaaataaaactttatttttattaataaactttattaataaactttatgtgaataaaagaacttgagacaatttagctcaattttaataaaatgtttcccaagcattattttgaccaggtacccaggtttaagttacgaacattgacagtgtccattatataaccacactggaagttattaaggacttaaccattttctagtattagcctattttc

SEQ ID NO: 351342 - DNA, 511 bp, Homo sapiens
agagccaaaccatatcatacctttcatggaaataagaattggataggataacccatgtaaagcaactagcacagtgcctgatatgaataagagcgcaatttaagtggtagctsttacttgccctaggcactgaattttcccagtaactattctggtagtgaataatttccagtatggaattgaaaaccctatcacaggcctcttgatgtgatgtgtttgtaatgcatcatacactgttacgtatatttttaaaaaaatctatccatcttccacccatgttagtttcattgattcctggcaataccatgctattttgaggtttttcttttttcccatgagttggcatttttcagactttatattttgtctcacttttacaaaatgctggactaacctgaacgtagcggcagaagcttcactagtctgaacagtgatggatcatcttttcctggaagccatcaatcaacagtagctaacaagaatatggaggggggcaggagtggaagggggt

SEQ ID NO: 351343 - DNA, 576 bp, Homo sapiens
aaggcatcagcagaacaattctgcctccagaggctttcaggaagcacccgggcccagcctcttcaaggctttgcagccattcgctctctttggcttgaggctacatcactccaatctctgcctccattttcatatcagcttctcctctctgtgcaaaatctcctgtctctgttttaaggacacatgtgactggattcagggcccacctggataatccagcataatctccccatgtcaagctccttagccaaaccatatctgcaaaaacaygttttctttacaaggtaacatttataggctccagggattaaaatctgacatctttggttaactattaattggcctactacaagtaccctactgtgaagaatttcatttcttgatgttttcctcgtagaccctcttaaaggtcatacttaccacacagatttaagttttcaactcacaccctttaatttcctttaattgtcccacaactttccagcacagtaagtcagatacactcctatcgccctgtgagtggtgttaataatgcaatggagaataaaggaagacggcagaaatggaaaggatgcc

SEQ ID NO: 351344 - DNA, 557 bp, Homo sapiens
aggaggatcccaggcctttggcttacacacacacgtgcacacacacacacacatccaacaaacacttcttaattgggtttttaagttttataagaaatatttatgtttttatgttgtaaacaaacatgactgcacccctttttgttggtgtaaattgcaatgttggaattatcttctataccagaagaacattttatgttttacaaaccaagaggcaatgccgtcagttcttaaacargtgttctaatagaaagcccaacagtctttttaaattttacatttaacaatgtaaaaaccactcattgctcaaggcctagatttaccccaagggctcataatttgctaaccttgtactaaaaaggtgaagctaagaatttcaactgttgtattacttttcaaatttcaatgcaaatgagaatgcacttcctttctaatagacattctcaccaaacagaccaggagatatattgtactagcagtcacccacaaaatatggtctgtaatttctaatatggctctagccccaaaacatatcccatttccacctgaaatggccc

SEQ ID NO: 351345 - DNA, 557 bp, Homo sapiens
aggaggatcccaggcctttggcttacacacacacgtgcacacacacacacacatccaacaaacacttcttaattgggtttttaagttttataagaaatatttatgtttttatgttgtaaacaaacatgactgcacccctttttgttggtgtaaattgcaatgttggaattatcttctataccagaagaacattttatgttttacaaaccaagaggcaatgccgtcagttcttaaacaggtgttctaatagaaagcccaacagtctttttaaattttacatttaacaatgtaaaaaccaytcattgctcaaggcctagatttaccccaagggctcataatttgctaaccttgtactaaaaaggtgaagctaagaatttcaactgttgtattacttttcaaatttcaatgcaaatgagaatgcacttcctttctaatagacattctcaccaaacagaccaggagatatattgtactagcagtcacccacaaaatatggtctgtaatttctaatatggctctagccccaaaacatatcccatttccacctgaaatggccc

SEQ ID NO: 351346 - DNA, 557 bp, Homo sapiens
aggaggatcccaggcctttggcttacacacacacgtgcacacacacacacacatccaacaaacacttcttaattgggtttttaagttttataagaaatatttatgtttttatgttgtaaacaaacatgactgcacccctttttgttggtgtaaattgcaatgttggaattatcttctataccagaagaacattttatgttttacaaaccaagaggcaatgccgtcagttcttaaacaggtgttctaatagaaagcccaacagtctttttaaattttacatttaacaatgtaaaaaccactcatwgctcaaggcctagatttaccccaagggctcataatttgctaaccttgtactaaaaaggtgaagctaagaatttcaactgttgtattacttttcaaatttcaatgcaaatgagaatgcacttcctttctaatagacattctcaccaaacagaccaggagatatattgtactagcagtcacccacaaaatatggtctgtaatttctaatatggctctagccccaaaacatatcccatttccacctgaaatggccc

SEQ ID NO: 351347 - DNA, 639 bp, Homo sapiens
tagttttaacgtttctgcaaatttgcttcttgatgatctgcttggatactaccctttctttagggtcaacagatgttttgttctaggcctgtctgtttcaccagcttctagtcagtgtctctaattagtgcaaagtagtattggtagcataaattgaacacaataagaaagagggatctatttatgggaaacatattataatttgcttccaataatctggtttcacaaagagagcatgggtatctaactgggactggacatttaacaacatgtgaaagcaaccattcaccaagctcaactgtacaaggggtagtgtagggaagagattagaagaagggctgcctgtaccagaaactgcctgggtttgtacgctgataccactatattctagttgtgtgaccttgatcaagtttcttaatctctctgtgcctcagtttacttatctgtgaaataaagttgtaaagattaaattagttaacattatgtacattgtttggcacatgtaattactaggtaaatatttgtgattattwtcattttctatctggaaccttgaacaaagtccaaaggtggtgaacacattgggtctcagggagacttctggggtctcagtctattccgaaagaattacatgttagt

SEQ ID NO: 351348 - DNA, 545 bp, Homo sapiens
aaaacaaaaacaaaaagcaaacaaagcacccaacagattaagcacttagtcactgagaaagattggagttagcactacattacctgctcttacaaagccagaagggcaagaaaccacactccatgctcatgtcctgaaaaatccagaagtccagaagttccagttatgccccacctggtctgggaggtgtggttccagacagaaccacaaaaccggaaaacactcttaagggacttagagctctgagtcgaccaacaccccatagttagaagacaccatcaaggccacctgggaggcctcargatcgggaagaaaaattttgttggttaaactactaggccattagagcagcaggttttattacaaatggaattagaaagaaatgaggaaaagaaaaaaaaagcccataaatggtggcagctgctgtttgtttctaagctgtgcttcccagtagtttgtttgcttggtggtgtttctgcaacatatttggagagaagtcctacatttgcttgaaatagctcaattgtgttttcaacattcatttt

SEQ ID NO: 351349 - DNA, 545 bp, Homo sapiens
aaaacaaaaacaaaaagcaaacaaagcacccaacagattaagcacttagtcactgagaaagattggagttagcactacattacctgctcttacaaagccagaagggcaagaaaccacactccatgctcatgtcctgaaaaatccagaagtccagaagttccagttatgccccacctggtctgggaggtgtggttccagacagaaccacaaaaccggaaaacactcttaagggacttagagctctgagtcgaccaacaccccatagttagaagacaccatcaaggccacctgggaggcctcaggatcgggaagaaaaattttgttggttaaactactargccattagagcagcaggttttattacaaatggaattagaaagaaatgaggaaaagaaaaaaaaagcccataaatggtggcagctgctgtttgtttctaagctgtgcttcccagtagtttgtttgcttggtggtgtttctgcaacatatttggagagaagtcctacatttgcttgaaatagctcaattgtgttttcaacattcatttt

SEQ ID NO: 351350 - DNA, 623 bp, Homo sapiens
gtggttttttcccccagaataagtgagtatgtttgagaagtattagaatcctgatttttttgagtaaacgagttctctcttgagaatagtatagcactaagtaagcacaaagttaaaattttatttctggccgggcgcagtggctcacgcctgtaatcccagcactttgggaggccgaggtgggtggatcacgaggtcagaagatcgagacmatcctggctaacatggtgaaaccccgtctctactaaaaaatacaaaaaattagccgggcgtggtggcgggcgcctgtagtcccagctactcgggaggctgaggcaggagagtggtgtgaacccgggaggcggagcttgcagtgagccgagatcgcacgcctgcattcccaccccggcgggcgacagagcgagactctgtcttaaaaaaaaaaaaaaaaaactatttctgtctctaaaaaaaacaaaattgcagtcctcttcaattgttttctgcacttgagctttttctcgaaggaccttacaaagtaaattaaggaagaatactctggatctaacatcgatggttctttctcaatgagttaataacggtggatttcttttctcacgatttttctttaattattatgtttc

SEQ ID NO: 351351 - DNA, 559 bp, Homo sapiens
ccatcccatatcttgcccctgtttgcatttctctttatatgattgcagcacagctttagtattcattttacgttcacatttctgggagttacaaacatctgaccctcagtgggcaattctggttacctcttcccaaaggacaagatttgaccttgagattgcttgcaaactccaaagctgtctctttccataaayaaatattctttacattttttataggctattgaacaaccacaagaaagtcttgcttctttgtaggggttctgaggtgatagtaggggtgatggtagtagcagtggggtgtgtgtgttttcattttcctttttctcctaatgcagtgtttttatgggacagatatgttatggtcattcaaatttggaaagctgtattaatatcacacaagaaaggtactgatgaccttatttctgctaagtattaggtgaccggaccttcctattttgcacagctcagaattgtgaaagtgacaggctaagttctataaacattgctccaaaatataatcacaccaagatggaacagtgtttaacccactaagtgt

SEQ ID NO: 351352 - DNA, 590 bp, Homo sapiens
gcagtgtttttatgggacagatatgttatggtcattcaaatttggaaagctgtattaatatcacacaagaaaggtactgatgaccttatttcygctaagtattaggtgaccggaccttcctattttgcacagctcagaattgtgaaagtgacaggctaagttctataaacattgctccaaaatataatcacaccaagatggaacagtgtttaacccactaagtgtacttttcttaaattacctctttttacaacattacgaaattctcgtttttcttaactgactcctcctgcttgaaacgatccccatttaattacaacaaattcactaagatggctttgaatttttagccttgccaaaattatagatcctattttctggagtgagaatatttaactctctttatatttgcaacacagttctcataaggactaaatgatttaggagctgccgagattaataactcatttgtatatatatatcatctactttggcccaggctccaacactatcaacacttaccctaaattgatgttccctatcctttataagagataatgaattcgtctcatggcctagagcacacagtg

SEQ ID NO: 351353 - DNA, 590 bp, Homo sapiens
cttacaccaatgaggttataaagcctaatttttaactttttgttgttttatttttcttggagaaaggggcccacggaggcaaaaatggggagggcctacaacagtcatactacagcaccgggtagtgctttcatttgtgtttgagtccctctcctctgctatgctggtaagcctcaaacacaaatgaaagtgttatttcttaaagtatagtggtccaaataccaacatgatttagtgagacaagggcaaatattttaatttaaaaagtatgtactatatttttaaatatarctgaaaatattgagtttctcatttacggtagcaacgaattttctttttgaaaaatttaagtaaataaaatactttaatgaaaaatattaagcaaaaagactgcaagttctaggatgaacttggaaaaaaaaaaagaggttggtattgctgaatggctgaaaactagtgatatcctagaatcctagaaatactaggattcagactctcagctataacacccaaaaaagtttccatatagatcatcaactaccttcatctctcaagaaaaacagtaaaacatgaccagaacttccaccacc

SEQ ID NO: 351354 - DNA, 647 bp, Homo sapiens
aaaactccgggaatcctgattacaatgtccatacttctaaacacttcaaaaattatcttaaaaatcaataccagtaaaaacaaaatatttccatagtaactaaagtacatataaattcatgaaacaaaggtaaccaataaattattagaaagatgtttttctaatggcagacacattcttctaacagttgagtgtatctaaaagaagttgacattattttactagtatcttatatatctaataaaggtaaaaaaatgtaacttcaatgtttttcactttgtcaattgataacaaacacattccgtaatacaccttttagtcgagtgttattagattagtcctggaaaatattttatcagccactataagcacctacgtaaatttgaaaacatatttctgaattcttgttaaatatgtatccaattaytgctaacatcttcacagaataatgtattagtttgctgtttctattttcgatatcttgatttgagctaaatgtccataattagacatcaatattctgccaaatgccagatttttaaagtatattttaaactaaaataaagaaagcttctcatgattttccatgtcatcaaattataattcacaaaggatgtctacatatcctctattccacactgatctct

SEQ ID NO: 351355 - DNA, 647 bp, Homo sapiens
aaaactccgggaatcctgattacaatgtccatacttctaaacacttcaaaaattatcttaaaaatcaataccagtaaaaacaaaatatttccatagtaactaaagtacatataaattcatgaaacaaaggtaaccaataaattattagaaagatgtttttctaatggcagacacattcttctaacagttgagtgtatctaaaagaagttgacattattttactagtatcttatatatctaataaaggtaaaaaaatgtaacttcaatgtttttcactttgtcaattgataacaaacacattccgtaatacaccttttagtcgagtgttattagattagtcctggaaaatattttatcagccactataagcacctacgtaaatttgaaaacatatttctgaattcttgttaaatatgtatccaattattgctaacatcttcacagaataatgtattagtttgctgtttctattttcratatcttgatttgagctaaatgtccataattagacatcaatattctgccaaatgccagatttttaaagtatattttaaactaaaataaagaaagcttctcatgattttccatgtcatcaaattataattcacaaaggatgtctacatatcctctattccacactgatctct

SEQ ID NO: 351356 - DNA, 549 bp, Homo sapiens
atccaaataggctactggttcagtcatggagaaacacaaacataacctctaccycaagttattattttacctatttcccaactttttgttatcggatctctccaccaatccagttgttctgtttctgtctttgcggctggtttctgtagatgctgttcagcttctgatagcatctggcctttaggcaggctcaaaaaatttaaagttaataatgttagattcaattgcatatgcggtgttccatagtccctgttttcccccctctgcttttgcaaccgctctttcagggagagattcattctttccactatggtttgtccttgagaattatatgggataccagtaatgtgtttaatattccatatagagaaaaatgtagctagagcttggttagtatagactggggcattatctgttttaatagaagctggaatgcccatcaccacaaaacactgcaaaaggtgatgtttaacacaggcagaaggctctcctgattggcatgtagcctggacaaagtgagaaaaggtgtccacacatatatgtacataa

SEQ ID NO: 351357 - DNA, 478 bp, Homo sapiens
tggtttctgtttctgaattcctytgtggtaaaaattggcaaactttatctataaacgtctagatggcagatattttagagttgaggcacttcgtgcagtttcttttgcacattcttcattgtgtattttttgcccaactttttaaaaatgtaaaagataaaagatcttcccaacttatggatcatacaaaaacagactgcaacctcaccacaaaatgtagtttcctaactcctaacactggaattattattagatataatatcaatttctagaatagaggtcctggtttattctttcagaaaaccacctaccctgtttttggtttgaagacctgatcttaaacaattactataaaggcccttttgatatcttcttttgcttgtaaaatgcctgctttctgggatttaaatcacttctctgcttaccttcatcctacagcccactttcatattacaaccaaggtcctacagcgcatctt

SEQ ID NO: 351358 - DNA, 478 bp, Homo sapiens
tggtttctgtttctgaattcctctgtggtaraaattggcaaactttatctataaacgtctagatggcagatattttagagttgaggcacttcgtgcagtttcttttgcacattcttcattgtgtattttttgcccaactttttaaaaatgtaaaagataaaagatcttcccaacttatggatcatacaaaaacagactgcaacctcaccacaaaatgtagtttcctaactcctaacactggaattattattagatataatatcaatttctagaatagaggtcctggtttattctttcagaaaaccacctaccctgtttttggtttgaagacctgatcttaaacaattactataaaggcccttttgatatcttcttttgcttgtaaaatgcctgctttctgggatttaaatcacttctctgcttaccttcatcctacagcccactttcatattacaaccaaggtcctacagcgcatctt

SEQ ID NO: 351359 - DNA, 637 bp, Homo sapiens
gagaatattggcattaaatgcatcttaattgtcaaatttcttattagtctggtcttggcatcaattctttctatagcttcacatctcatctccatgtggtggaatctgagaaaatgaaatgtccaccttctctttatattttcagcaataaggagtttcttactatatttctattgtattttccatattgtgcttttttgactgggaatcttctcatgtccattcatccatctcaatcctgttttaaaatatcagagaaagagaaaactttgtagacagtttcttatggtagcctatcagatgccttgagagattgttaatgtcccctcttaaatattttcttaatcataaaaggtaattcttagtttttgttattccttatggcaatttctagtcaactcattatttccatcaaaattctggaataaatcctggcttgcccatcggaaagttctcatctacatcaaactrtgactctaagaatataagaatgaaacttgtaaaataaaaactgttttcaagtgttatcactactgtaccgtatacaactgaattttttgtgtgagtggttagatcatgttaagaatggatgattctagtctagacaagagaaatagtttaccccaaactgccaaaa

SEQ ID NO: 351360 - DNA, 485 bp, Homo sapiens
atggagaaatctgtaatcttcttaactagattggctcagaaatgaaacccatcacttctgcttccacataattggtgacaacaatrgcctcacatactttcaatggtcagtgattagggtggagaagggtggaaatatagttgactgcaatatgtttccagaaagaattgtagtccataaaaagaggcatacattttttgattacagctatgcatctatgccaaatctggctatcaaataccggtggaaagtcttcctcccctcagatcagaatcccagcaacagagggagggtaacccaaagtctcacctgcctaatgtattcagttcaatgttcatattctcaatgtgaggtttctccattgaatctggaagagattcctctattcctgtaatctatgaaaacagaaagaagtactcctcccttcatagacagttatgtacttgggattaaaaaaattttttctattatgttccctgggaaaa

SEQ ID NO: 351361 - DNA, 485 bp, Homo sapiens
atggagaaatctgtaatcttcttaactagattggctcagaaatgaaacccatcacttctgcttccacataattggtgacaacaatagcctcacatactttcaatggtcagtgattagggtggagaagggtggaaatatagttgactgcaatatgtttccagaaagaattgtagtccataaaaagaggcatacattttttgattacagctatgcatctatgccaaatctggctaycaaataccggtggaaagtcttcctcccctcagatcagaatcccagcaacagagggagggtaacccaaagtctcacctgcctaatgtattcagttcaatgttcatattctcaatgtgaggtttctccattgaatctggaagagattcctctattcctgtaatctatgaaaacagaaagaagtactcctcccttcatagacagttatgtacttgggattaaaaaaattttttctattatgttccctgggaaaa

SEQ ID NO: 351362 - DNA, 588 bp, Homo sapiens
tatataggtataatagtttactaatggaatcgtgcttatattaatgtctctgtgtcattagaaaaaggcaaattgtactctagttacaaaaaatagaaaaatatataatacttttaagagagcacaattttgtttttccatcaagaatggctaagcagagaatctaaataaacaaacacctttcacccactccaaatttgacctttaaatatacaagcctcagttagcaagaaatgtgcttggaaaatgagacatctttacaggcatgtacaatgtgcaaacacatatgaataagcatgaaaaagagraaaaagttaatgagagactgagacacagtaggtgattttgagtaataaatttggcttagtcacatttaatacttaactattaattttttacaagattagaacaatagaagcaaaaaagggaacacatttgcctatctaggggctttctctcatcatttaagtattttaaatgattttcatgtatagtaactcactagcctctccttccctcctcagtccttctatagatgttaacagagggtaaagaactccatgagacaaatagacaaatctatccttt

SEQ ID NO: 351363 - DNA, 540 bp, Homo sapiens
gactagtagaatagaaccattgtttgtcatcagaggaaattttgtaacttacaatgacaatgcaagcaaacatttttttttttccctcatctggagaagaggcaaaagtgggctcaaaagcctggaaaacaactgtacagaaataacagggatgaagtgatagaaaatctgaagttgaagagtaagagttcatggagtgcatgacatgttacctgaaactatttttgtaaaagaaatagtaatcacatctgctgagacaaagagaattgagattgggtttagatacttgagggaagagcagtttatccaggcatattgacaaaaggagaaacacatgagcaggttcagattgatcatgagtttacagttaaaactatggtttgaggcccaagactttagacaaaaaaattataaaatgcacctgtatgatatttggtatcataastaagtataagccactgatgcactatggtgtctatccttggacagtgtaattatggaaaaagatagaaatgctgaagaggtgtagaaggaatccac

SEQ ID NO: 351364 - DNA, 597 bp, Homo sapiens
gcaaacatttttttttttccctcatctggagaagaggcaaaagtgggctcaaaagcctggaaaacaactgtacagaaataacagggatgaagtgatagaaaatctgaagttgaagagtaagagttcatggagtgcatgacatgttacctgaaactatttttgtaaaagaaatagtaatcacatctgctgagacaaagagaattgagattgggtttagatacttgagggaagagcagtttatccaggcatattgacaaaaggagaaacacatgagcaggttcagattgatcatgagtttacagttaaaactatggtttgaggcccaagactttagacaaaaaaattataaaatgcacctgtatgatatttggtatcataactaagtataagccactgatgcactatggtgtctatccttggacagtgtaattatggaaaaagatagaaatgctgaagaggtgtagaaggaatccacccattcaaaagtatccaatatggttcaaaatttatgctaaagactttttgttaayatagtcaatgtaacaactttctaaaattgatataattttacataacaaataaggggtctagaacaag

SEQ ID NO: 351365 - DNA, 577 bp, Homo sapiens
ggagtcaatcacatggtagaatctgagtgttgcatgttttttccaacagaggaacagaagattagttctttttttcatcctgccaaagccattcagtggaagaggggtgtggagtaaaagcaccagttcttgcttccaccagraggtgggtggggtgaaagattaactccctgctcagtcccactgaagccatagggggaaggcatgttttttcctttgatgttaggctgggggtgggtgagtgttccccaaaaggtcttctgctgttagatcattcctttcccagtgtttgggctaggaggaaacaaggttccttgagattcccctcaccatccaccatgcctgttggcagatctaggtttgaggcttctgcaatgtcctgtttgggatacatggaaggcagtaagaaaccccagggagctcatgtctctatcatccttagagtctcagggtccctaggctcctggccttcattgcatgttggtctgttgtgttatatccaggtatttttctttttgtattttttttgaagttgtgagagggaggagttaggaaaagtaaggttactacattggta

SEQ ID NO: 351366 - DNA, 552 bp, Homo sapiens
aactcctccttcctgtataccaataattgatggagctgaatgaaaayagaacttttacataaggagatttctatttgtcaggagaaaacatcaggaattgagaaaaagcattcctcagtatcaccttgtattaatattttactataatgtaataatcattttaaattatttttgcagatagaattttattagtgaccacccagtaacatctctgtgaaaggtgattaaaaattcacttaacagtaagggagtaggagtgaatccatacctacctctttgggcgggtgaaagaacagatgctgccattaaccttatgattgactgaaacagtaccagtggaatcttgttgctattgagcatttgaatcctggctaatgtagttaagggactaaaatttaatttaatttaattttaattaatttaaatttaactgagagagtcacttgaagctagtggctaccgtattgcacaatgcaattctatatcttcaagaatagcagaaattcttagccagaaaatatcaagactaatgcaaagagtggtacgatcaag

SEQ ID NO: 351367 - DNA, 636 bp, Homo sapiens
cctagtaggcttactgatactgaaagatgctccagctcagtcactagaggcaatgggccattccaggccctccactctggagagacaccacataactgagatcacctgggagcacataccccatgtaggcagataacttcccagaaaacaaggaaagagaaaaaaccatgggaagtacgttcagttcctcatcccagttgaaccagtaagataggtaactcctccttcctgtataccaataattgatggagctgaatgaaaatagaacttttacataaggagatttctatttgtcaggagaaaacatcaggaattgagaaaaagcattcctcagtatcaccttgtattaatattttactataatgtaataatcattttaaattatttttgcagatagaattttattagtgmccacccagtaacatctctgtgaaaggtgattaaaaattcacttaacagtaagggagtaggagtgaatccatacctacctctttgggcgggtgaaagaacagatgctgccattaaccttatgattgactgaaacagtaccagtggaatcttgttgctattgagcatttgaatcctggctaatgtagttaagggactaaaatttaatttaatttaattttaattaat

SEQ ID NO: 351368 - DNA, 552 bp, Homo sapiens
aactcctccttcctgtataccaataattgatggagctgaatgaaaatagaacttttacataaggagatttctatttgtcaggagaaaacatcaggaattgagaaaaagcattcctcagtatcaccttgtattaatattttactataatgtaataatcattttaaattatttttgcagatagaattttattagtgaccacccagtaacatctctgtgaaaggtgattaaaaattcacttaacagtaagggagtaggagtgaatccatacctacctctttgggcgggtgaaagaacagatgctgcyattaaccttatgattgactgaaacagtaccagtggaatcttgttgctattgagcatttgaatcctggctaatgtagttaagggactaaaatttaatttaatttaattttaattaatttaaatttaactgagagagtcacttgaagctagtggctaccgtattgcacaatgcaattctatatcttcaagaatagcagaaattcttagccagaaaatatcaagactaatgcaaagagtggtacgatcaag

SEQ ID NO: 351369 - DNA, 577 bp, Homo sapiens
ggagtcaatcacatggtagaatctgagtgttgcatgttttttccaacagaggaacagaagattagttctttttttcatcctgccaaagccattcagtggaagaggggtgtggagtaaaagcaccagttcttgcttccaccagaaggtgggtggggtgaaagattaactccctgctcagtcccactgaagccatagggggaaggcatgttttttcctttgatgttaggctgggggtgggtgagtgttccccaaaaggtcttctgctgttagatcattcctttcccagtgtttgggctaggaggaaacaaggttccttgagattmccctcaccatccaccatgcctgttggcagatctaggtttgaggcttctgcaatgtcctgtttgggatacatggaaggcagtaagaaaccccagggagctcatgtctctatcatccttagagtctcagggtccctaggctcctggccttcattgcatgttggtctgttgtgttatatccaggtatttttctttttgtattttttttgaagttgtgagagggaggagttaggaaaagtaaggttactacattggta

SEQ ID NO: 351370 - DNA, 577 bp, Homo sapiens
ggagtcaatcacatggtagaatctgagtgttgcatgttttttccaacagaggaacagaagattagttctttttttcatcctgccaaagccattcagtggaagaggggtgtggagtaaaagcaccagttcttgcttccaccagaaggtgggtggggtgaaagattaactccctgctcagtcccactgaagccatagggggaaggcatgttttttcctttgatgttaggctgggggtgggtgagtgttccccaaaaggtcttctgctgttagatcattcctttcccagtgtttgggctaggaggaaacaaggttccttgagattcccctcaccatccaccatgcctgttggcagatcyaggtttgaggcttctgcaatgtcctgtttgggatacatggaaggcagtaagaaaccccagggagctcatgtctctatcatccttagagtctcagggtccctaggctcctggccttcattgcatgttggtctgttgtgttatatccaggtatttttctttttgtattttttttgaagttgtgagagggaggagttaggaaaagtaaggttactacattggta

SEQ ID NO: 351371 - DNA, 577 bp, Homo sapiens
ggagtcaatcacatggtagaatctgagtgttgcatgttttttccaacagaggaacagaagattagttctttttttcatcctgccaaagccattcagtggaagaggggtgtggagtaaaagcaccagttcttgcttccaccagaaggtgggtggggtgaaagattaactccctgctcagtcccactgaagccatagggggaaggcatgttttttcctttgatgttaggctgggggtgggtgagtgttccccaaaaggtcttctgctgttagatcattcctttcccagtgtttgggctaggaggaaacaaggttccttgagattcccctcaccatccaccatgcctgttggcagatctaggtttgaggcttctgcaatgtcctgtttgggatacatggaaggcagtaagaaacccmagggagctcatgtctctatcatccttagagtctcagggtccctaggctcctggccttcattgcatgttggtctgttgtgttatatccaggtatttttctttttgtattttttttgaagttgtgagagggaggagttaggaaaagtaaggttactacattggta

SEQ ID NO: 351372 - DNA, 570 bp, Homo sapiens
tggaccatggtgttgggagaaaaaaaacacacaatagatwcaatgggagcttccagctttgcaaggaatcaaagggttttctgtagcactagtaacagcatatatcacttgagacttctcttcaaaattgtctgtctagagttaaaaaaggagtttattatttccttgatttaaacattgatactttttccaaagtcaaacaaaatttcaagcatctgtgaagttagataagaaatacgtaagatgaattaatttatttagattggatggagagaatattaggcaccaggacaaagggtattaggaagcactgcaagataaataaaaggtattcaggacaagagacaattgttacgttcatcagtttcctctaaaagcttggataagggaacttaagctactgggaatgaataaagtgggatccagaggggcattaatatttcatgagtttttagcaattattttctagggaattgaaaaaacgtttggtggcaagagtaggaaaatgagaagttagtctattcagaaaaacataaaaaggatgatactgcagggaacctcaaatttgac

SEQ ID NO: 351373 - DNA, 642 bp, Homo sapiens
tgtgtcacattcttaaaattggctgagtctcagtaacagaggctctcctcctctcccaacaaagggcctggactttccatcttgcaaaagtccattttttccttagtgtccctctgacactgacttctagagtcaacttccttttcactaactcacctcagcagcttattaaaattgtctgagtctaatgactattctaattggcaatctctaattaaaatcaagattctttaagcatattgtaggaaaatacttgtttgataatttgaattaaactttaacctccatrgaatgaaagtgagttgagtgttaatggcagagatcttgtatgggatgtccagatagactatagactttgtcattatttttaaatcaagttcaggttgggactcaaacccattaacacaaagccatctttcacctacctagtgtgagaagggaataaccagcaccatatagatcaataaaataattaattaaatctgtaaaataataatcatgattatattatgtgcatattccagtgtgttgactattaagaggtatttgtttcatgtggtgcttatgtggacattagagaagaaacatttttttcacaagtccttcatcttgtcattgaagcagaaatgctcaataatgctg

SEQ ID NO: 351374 - DNA, 642 bp, Homo sapiens
tgtgtcacattcttaaaattggctgagtctcagtaacagaggctctcctcctctcccaacaaagggcctggactttccatcttgcaaaagtccattttttccttagtgtccctctgacactgacttctagagtcaacttccttttcactaactcacctcagcagcttattaaaattgtctgagtctaatgactattctaattggcaatctctaattaaaatcaagattctttaagcatattgtaggaaaatacttgtttgataatttgaattaaactttaacctccatggaatgaaagtgagttgagtgttaatggcagagatcttgtatgggatgtccagatagactatagactttgtcattatttttaaatcaarttcaggttgggactcaaacccattaacacaaagccatctttcacctacctagtgtgagaagggaataaccagcaccatatagatcaataaaataattaattaaatctgtaaaataataatcatgattatattatgtgcatattccagtgtgttgactattaagaggtatttgtttcatgtggtgcttatgtggacattagagaagaaacatttttttcacaagtccttcatcttgtcattgaagcagaaatgctcaataatgctg

SEQ ID NO: 351375 - DNA, 412 bp, Homo sapiens
tactgaactaaatttcattgcaatcaaaagtgtataagtagtcactttactctgcagcctcaccagcatctrttgttttagacgttataataacagccattctgactgttgtgagttggtatcccattgtggtttttatttacatttctctgataattaatgatgctgaccattttttcatatgcttgttggctgcatgtatgtcttctgttgagaagtatatgttcatgtaatttcaccacttttaatgtggttattagctttttgcttgttgatttgtttaagttgcctatattttggttattagacctttgttggatccacagtttgtgaatattttctcccatctagtaggttgtctgtttattcatagtttcttttgctgtgtgacattgagaagagtatttcctag

SEQ ID NO: 351376 - DNA, 412 bp, Homo sapiens
tactgaactaaatttcattgcaatcaaaagtgtataagtagtcactttactctgcagcctcaccagcatctattgttttagacgttrtaataacagccattctgactgttgtgagttggtatcccattgtggtttttatttacatttctctgataattaatgatgctgaccattttttcatatgcttgttggctgcatgtatgtcttctgttgagaagtatatgttcatgtaatttcaccacttttaatgtggttattagctttttgcttgttgatttgtttaagttgcctatattttggttattagacctttgttggatccacagtttgtgaatattttctcccatctagtaggttgtctgtttattcatagtttcttttgctgtgtgacattgagaagagtatttcctag

SEQ ID NO: 351377 - DNA, 632 bp, Homo sapiens
gaagaaaaccataataagcatgtgaattctttaccaacaactgaggtatccaggttctctcgtcaaaattgactaaaaggccggtgtggcccacggaaagaaagaagagcagtgtgatgcagtggcctacctgagagccacacagagaagaggaacctcctccccaagccaagggaggagtgagtgagtgcactacccagcctaggaaactgtgctttttccagggaactgtgcaacccacagataggaatatcccactcacaaacccatggcaccagggcctaccacgaagcatacacaagtatcaatagccagactaaccaagtggaagaaaggatatcagagtttgatatccttaattactaaattaagacaggtagacaagaatagagaaaaaagatgaaaaggaatgaacaaagcctccaagaaatacgggatttcataaaaagaccaaacgtatgggtgattggagtaccagaaggagacagggagaatggaaacaagktggaaaacacacttcaggatattatccaagagaacttccccaacctagcaagacaggccaacctgcaaattcaggagacacagagaactccattaagatacttcactagaagatcaaccccaagaca

SEQ ID NO: 351378 - DNA, 618 bp, Homo sapiens
atctactaaacagttctgtatttcttaactagtttattcagacaaggaggcaaaaatctaaaatttgcaagaaagaaattaaaaactattgctatggtctgaatgtttctatcccctcctacaaattcatatgttgacaccttaacttcaaagatgatgggattatgagttacagatttttgggagatgtttatgtcatgagggtggagccctcatgattaaggttattgcccttaaaaaagagactccagggagatagctagccttttccatcatgtgaggacacaaatagaagccttcatmtatgagaaagaggaccctcaccagacgttgagtttgaaagctctttgatttggaactttctagcctccagatctcagagcaatacatttctgttgtttataaattacctcatctaaagtattttgttatagcagtctgaatggactaagacaccatctttatccacagaagacatagttgagtaccctgaaaattgccaagaataaacaaataaataatttagcagggccacaagatataagttaataaataacaatgaattgtatttttagttttccacaataaaccattgaaaataatttttaaaatggcatt

SEQ ID NO: 351379 - DNA, 524 bp, Homo sapiens
ggtgcaaacataatttagcttgaaattatacagtgtctgcttatttttgcttttatttttgtttttatttttatctatgccagtcttgtagcaacaggtatatttcaacctttgtcaaccctgaaacagtatcttacacttttcttcttctttttaaatttactgtcccattttattgccatggctctgagcacaagtaaaggctcatatttttggactctgtatagctgcagaattagccaagtatttacraaaatagttaaaataatagtaataaaaataataatctataccacaacagaaaatgttcattgttatttagtaggaaactagtagcaaactatttgaattgttttgcttctgtgataaaatatgttccctatagaatgtacttcatctccatgatcatatccaatgtctaaataaatgtagatcaaaagagttcacattgatatcaatgcatcaaatatgaacaattctgaccagcttgtcagagtacaaccacatcctctcctaccaataaa

SEQ ID NO: 351380 - DNA, 590 bp, Homo sapiens
ataagcaagtccagttgtgtacaaagcatcaattttgtgtggaatgacatgccactgggtacttgcaagaaataaaagagctccctctgctgccagaaaatgaatttttcattaattgttattaaaatctcccacctaacttctctgatgtttacttcataagttatattttttgtaattactgtttctgttatctttaaaattgttttatattataccatttgatttttaagaaaagataagtaatttaaattcaatatttaattatttyaagtaactcaaaatggtctccacttaaatagtaattacaaacagttctttgttgcaaaaccaaaacatcagtccacacagacttgcattaatctcaagaatgttataattacctaaaattacatatgaattaatatttcagcacatgccatcaaagagtctaacacatgaacttttcaataaatgaagttggtatcctgaagatgattcaaaaaacctctgcacatccatagcatccataatttattagtttacctatgcttatagaattttcaaaatgtgtctttttctgaatttcttcagagtctgaaataggtcta

SEQ ID NO: 351381 - DNA, 534 bp, Homo sapiens
tttctgggcatggtacaaattgctgatggatctaccattctggggtctggaggactgtcaccctcttatagctccactaggtagcgccccagtgggaactgtgggcttcaaccccacatttcccttctgcactgccctaccagaggttcgctatgagggccttcccctgcagcaaacttttgcctggacatygaggcatttccatacatcctctgaaatctagatggaggttcccaaacctcaattcttgacttctgtgcacccacagactcaacatgacttaagaagctgccaaggcttgtgcctgcaccctccaaagcaacagcctgagttgcaccttggccccttttaaccgtggctagagtggcagggagacagagcaccaagtccttaggctgcacacagtagaggggccctggacctgggccatgaaatcattttttcctcctagccctcttggcctgtgatgggaggggtggctgcaaagatctctgacatgccctggagacattttcaccattgttttcatgatta

SEQ ID NO: 351382 - DNA, 534 bp, Homo sapiens
tttctgggcatggtacaaattgctgatggatctaccattctggggtctggaggactgtcaccctcttatagctccactaggtagcgccccagtgggaactgtgggcttcaaccccacatttcccttctgcactgccctaccagaggttcgctatgagggccttcccctgcagcaaacttttgcctggacatcgaggcatttccatacatcctctgaaatctagatggaggttcccaaacctcaattcttgacttctgtgcacccacagactcaacatgacttaagaagctgccaaggcttgtgcctgcaccctccaaagcaacagcctgagttgcaccttggccccttttaaccgtggctagagtggcagggagacagarcaccaagtccttaggctgcacacagtagaggggccctggacctgggccatgaaatcattttttcctcctagccctcttggcctgtgatgggaggggtggctgcaaagatctctgacatgccctggagacattttcaccattgttttcatgatta

SEQ ID NO: 351383 - DNA, 552 bp, Homo sapiens
atcctttttctattaccttcttgattcatttattagttcttgcttgtctgtagattcctaaggattttctatattaaataaataagctatatgtaaatagaaaagcagttgctttttcctttcagagcttcatgtttcctgtatattttggggcttgatggggggctttcggtataatatcaaatacatatgatttgagtaaaaattcttgtcttgttttcaaacataacaactaaaaaatcaatatttcaccattaaatacaatgttacctctaggtttttgttaaatgctttttatttgattgaaaaagttgcttttattattagtttgctgagaatttttattataaatgggtgttaatttttttaaatgctgtatctttccattaatatctttatctgcaatgattactttctaaaggttaaatctactttattttgttaacaacatgaatcacattagttgctttgcrtattttaaaccaattttgagttccagtccttaactctattctgctcataatgcatgattttttaaaaaattttacttta

SEQ ID NO: 351384 - DNA, 504 bp, Homo sapiens
ttcctgaattttagtcagatttatttcccatcctctggaatgcaaatttctcactgataagtccagtgtgttttctacttcttgttcactggatccgatcagcataatgtaatcaatgtaatggagcagtgtgatatcttgcagaagtgaaaagtgatcaagttctctccaaataagattatgacacaaagctggagagctcatacactcctgaagtagaaaaataagggtatattgctggccttgccagctgaaggccaattgcttctagtgggccttacagacaggaatggaaaaaaggacatttgtcaagtcaatggccacataccaggtaccaggagatgtrttaatttgctcaaggaatgaaaccacatctagtatagcaggtgcaattgtagtcaccacttggttatgctaacaataatccactgtcattctccaagatctctctgtcttctgcacaggccaaatgggacagttgaacatggatgcggtgagaatcac

SEQ ID NO: 351385 - DNA, 599 bp, Homo sapiens
ataagtgttttttgtttcatattgcatgactttagattagaaacaaaaaataaatttcaacaaatgttgaagctaaaaaaagttgtaggtaatgaatttgaacataaaaactagatctgtgggaaaatagagtttttaaagtggtcwgttatttttaattaagcaattcagatcaatggcacagcatactaaatttaaaacctagaggcatgaaggcataagttctagcaacaatttcatttatgtataatttctttgtatatttagtgcaggggttacatgttaactctgcttgtaatgctgtgaaaatgagtctcaatatgtacattttaactatagctcagaatctcagtgtactgcattttcttccagctgtgattaagatgctcttttccattttttgtagaacataaaccatctctcctgtgcttctgatgccacgtgtttcttattctctactgagttccttttcccctcatgtgttaccatttttttattatcataaagaaattataatgtgaaatccaccttcttaacaaattgtatgaatgtagtaaaatactattaactatatgcaaattgttgtacagcagatttct

SEQ ID NO: 351386 - DNA, 608 bp, Homo sapiens
ataaataggctatggcattttcatgcttctgtgttaatgcaatatgttgctttttttttctttttgctactaccatgaaatgtctggaacagagctatgagcattttaaacttggctgtagcatgcctgctctgaggctctctgtgcattttttttccctatcagactcatttcactttgcatgctttccaaattataaatgtcacagcattgtttaaatgtgactatgttactaagggaaggaaagttccaggttaacatggacataatagagatttaacttctagctaatatttttagaagaatataattacaacttttcttagtacaatatgtttacaagtttctgataaaagtaataaaaggtggagacaataaaatactgtactaattgcagattaaaagtacagaggatatcatgcctcaaatgggttgagggtaaagcttaaaatatttagcgagcttgcaaaatatagaccattgccccccctcctttccatactctaggtttgtgcattcctagacacaaaaggttgtgtttgrattttagtaccagaattcagagacagatgggggaaggatggaacaaaagtttcaaaagtagatga

SEQ ID NO: 351387 - DNA, 579 bp, Homo sapiens
agactgagatactggcatttaacaagatacttagtggacaagagatcacaaaataaaacacaaaatgagacacggatgagttcatacgtaatggcttttatattaccttggatataattctttatatcactactgcatatttattacagtatttctaaacacaatttgaaaaaaagaaacaaagaaacaatcttggtacctcataatttagaccaaaagatatcagaacaaatagagccaccaaatatccatcttaaatactgtgtacatttaacagaaataatcatacatgacaaatgattcaaatttgaatttaaaaggatcaaataattagccaggaaagcaaaatgtttttaacatattatatataacacttccatttgagaatcctagctgctaagatgacttgaaaatatggtctaggattcctaatattttaaacatattctccyatctacttaaataaaagtttgctgtatttgcataaaccaatattgaatttcagacacttgatggcttggctagacaactgtattctgaaaagcatacatgttataagctgtgtgacagtgataacaa

SEQ ID NO: 351388 - DNA, 604 bp, Homo sapiens
atgtgtgtgtgtgtgtttatagtttctcaggttcatttcctagttcttttattataattaccaaaataattaaaacaaatgagtattaaaatcatggttaaaaagaaccatgttcagtccaatgcttactgctgatattgcatattttagccaccctaaaaaagamgacatttactgttttatttaattacaatttaaaaacaaaaacaacttaggtatcaaatatatatcatctatctatctatctatctatctcatcaagttgcaaaggaaattctggttgttataaaatattttttgctaagggtcagaaaatagcaaaatgtctgctaattagcaaaattcaaaaattcagttttctaactgtaagtcctaataattatatcagcttcttacaattgaactttccaagacaaaacaagatagcagttatgaaaatatttgtgactcatgaggaaacaagtcttgtgtgtacccaaggtactgattttaggaaacaaaaccatgcttaaacatgcagatttcaatatattaaatgttaatgtgtataatgattattttcttcactaaaaaataattttcattatatccatatagtaatatt

SEQ ID NO: 351389 - DNA, 463 bp, Homo sapiens
tttggtttatgttatttttataagcaaatgttcccactgatttgtgtgcttaatgaagttctatattaaaattattggaataaagagaaacatttttccccaaagcccatgcatgtaatctataacaaattttcttccaatgtagttaaagctaacacttgttaaatgctacagattaattatggctcccaaaggatatcttaaacaggggaattggtggaaatacaagcatatctattgtctctatcagctttacaaagcaaggagkcaaatgagagggaaagtcttccagagattagaagaagtcaaaagatggtttctagaaaggtgagaagtggggcaaagagaatctagaagtgaattgttccaaaatccctgggcaatgcacataagctgtgctgtgtgtcttttcctgtagcatggtacatttacctggaccccatgagcacatgttcccctctgg

SEQ ID NO: 351390 - DNA, 512 bp, Homo sapiens
ccttttcatcattcgggtctgaggacaaatgttataccctcacaccgcccctcccggtgagtcactctatttcaagcatcctcccccatcacatgatcctgttttatttcttcattgcactaagaatacctgaaatgtatatgcctacatttatatagtctatttccccctgagaacggaagcttcatagaaggtgaaacaaatcttgttagttgytgccagtcgcacagtaagccctctgtagaaaatgtttattggccacatttttttaaaaagcgaataaacctcaagattaagacctcaaaccaaactattccagtttccaattgcttacagcgacatactgagaaatcgagtgactctcaagagaaaggccattttgaggctggggtcgaaccaaaatccagggggtccacaccaggtcagtaccccggaattggctgttttgcaagatttcgggagtaccaaattggcatgagacatttgacaacgaggccagccatgcaccgagc

SEQ ID NO: 351391 - DNA, 570 bp, Homo sapiens
agtttctaatgggaaaggaagagacattttcgtaagttatagaccatttttttatgatataactaaaatgtttttaatttaaatatgggccaatcaaaattcttgcttgtgaatattgcagaaagtttttcctaggctgcgttttgtttgtttgttgtttcaacaataaatttctttggggctatataaaggaaaaaagcaggagagccatttgyatatgcacatttgaaaagtagatttgtctgtcatgctatgagcggtagatactgcattttccccagagcctgaaatctatatctagtttctgtgaaatagaacagatatgcagtatttttaacacaaaagtggaacgtgcaacaaaaattaagaccctagcctcttacttaaagaagggacatagcattttgggggcgaaatttacatgagccaacctcattaaagatgtagataaccctggaaaatgttgcagctacatttggcacaattgtgttttgactccctcttgtttaacagttcttgtcagtcttagtttctctgttttctttcaagggagaatcgtagaagccagag

SEQ ID NO: 351392 - DNA, 570 bp, Homo sapiens
agtttctaatgggaaaggaagagacattttcgtaagttatagaccatttttttatgatataactaaaatgtttttaatttaaatatgggccaatcaaaattcttgcttgtgaatattgcagaaagtttttcctaggctgcgttttgtttgtttgttgtttcaacaataaatttctttggggctatataaaggaaaaaagcaggagagccatttgcatatgcacatttgaaaagtagatttgtctgtcatgctatgagcggtagatactgcattttccccagagcctgaaatctatatctagtttctgtgaaatagaacagatatgcagtatttttaacacaaaagtggaacrtgcaacaaaaattaagaccctagcctcttacttaaagaagggacatagcattttgggggcgaaatttacatgagccaacctcattaaagatgtagataaccctggaaaatgttgcagctacatttggcacaattgtgttttgactccctcttgtttaacagttcttgtcagtcttagtttctctgttttctttcaagggagaatcgtagaagccagag

SEQ ID NO: 351393 - DNA, 542 bp, Homo sapiens
gcagaaagtttttcctaggctgcgttttgtttgtttgttgtttcaacaataaatttctttggggctatataaaggaaaaaagcaggagagccatttgcatatgcacatttgaaaagtagatttgtctgtcatgctatgagcggtagatactgcattttccccagagcctgaaatctatatctagtttctgtgaaatagaacagatatgcagtatttttaacacaaaagtggaacgtgcaacaaaaattaagaccctagcctcttacttaaagaagggacatagcattttgggggcraaatttacatgagccaacctcattaaagatgtagataaccctggaaaatgttgcagctacatttggcacaattgtgttttgactccctcttgtttaacagttcttgtcagtcttagtttctctgttttctttcaagggagaatcgtagaagccagagtctctagtgttctcaggattcaaggtcaaatccaagggatcagggagagagaaatgtctacctgtagtgacttgtttctcactgatact

SEQ ID NO: 351394 - DNA, 533 bp, Homo sapiens
ggtaaacgtgcaaagaatttaggaagttgtaatgggatgaagcgggaggaaaagaacaagatcaggagttagaattagagatttttggaagtaaggtgatggtccagagaaacatcttcaaacaaaatctgggaccaatgatctgacaatagaatagacaaagtgagcacagatcatatatttgaaaatttaaagcatgggacacatcgtccacacacatatagaaaatagttgaggagactagaggtacttakgctgaggaagacggaaaaaagacagattggcagggaaggagaggggaagggcattgcagagagaatacatgagaagctacctcaaatatctggagtatgtgtcatctcatgaaataactgtttatttccagtccaaggagctgaaagactatttatcaggaagtgattataggaaattatcatatggaggaatatattatgaagaaaattccagcatcccagcttggattgctgtctttctatgatggtttcaagatctggccacttattcagctgaca

SEQ ID NO: 351395 - DNA, 624 bp, Homo sapiens
gttgaacttaaatgacctttcctactcctttctctgaaatgctaacattgtattaaaaaggagaataaaatgaaagggaagaagcaagtaayaaagatattggaaaacatgaaaagggagaattgaagaaacaggaatctaaagagaagagaagactgagaggtaagcaaagccttatttgatggacaaattccactgaaaataggaaaaaaagactttaattgtaacaggagaaatgaaagcaagagaagaattttctgacatgaaaattgaatacagaaagaagttatggaatcttctttcttaaggtatagaaaacatagaagattatggataacttttcaagggtgctctcaagtgataaaaatttagcccacaaactccaaaagatatataaagacaagtgggttcagggtgtagtgacaagagttgcctcgaattcttttaaaaacaaatcttaatgaaaaaatctcaaattttgttaaatagttcctgggtcataatagcaataagtatacagaaagaacaatagcagataaatattaaaatacaagcatatttgtctgggtacacctagaataatctactaatgtttcaccaaatttaaggtggcaataaccagca

SEQ ID NO: 351396 - DNA, 604 bp, Homo sapiens
cacagaaagaagaataccaaatgttctcacttatttgtgggagctaaaaaattaaaacagtataactcatggaaatacagagtagaatgatggctaccagaagctgggaagggtaggggggtggtggggggaattgcrgatggttaacgggtacaaaaattgttagaaagaatgaataatatctagtatttgatagcacaacaggatgactgtagtcaataattatttaactgtacattttaaagtaactaaaataatataactggattgtttataacacaaaggataaatgcttgaggtaacagataccccatttaccctgaggtgattattacacattgcatgtgcctgtatcaaaatatcccatatacctcatgaatatatatacctactatgtacccacaaaaatttaaaattaaagaactcacactctggtgaggctaacagataagtgggccatcaactaccatacagtgtgatagaagctgcagtagagagaagcatagggttcccagggaatgtgaaagagggttagctaactcaacaagagtgtctggagaggcagcccgcagaggtgtctgagctgacaatctgatgtgctata

SEQ ID NO: 351397 - DNA, 572 bp, Homo sapiens
cacagtaaaatacactttaaaaaaaaaaaaaaaaaagctagcctcaccccaggctcagggctgtgcatgctaagagtgagtccagctaaaggagcaacatgctggtgtgactgtctcctgctcagtcatcaagtagaatgtcatgtggatcagcagcattgattctttcctgctttggtttgttttrttttatactatttttgttttgtcacatatatgcattacaataatataagtcaattcacctatagaacatctccactgtaaaattctcctatttgtgtaaaataaataaataaaagaacacatatccacaaatatacccagctatacacagatttttctggaggtacattcaagaaactggaaatacaggttatttttgccaagaacaacaaggaatctggagaactggagtcagaagacattttgcactctaatatttttgtattacttgaattttatcatgtatatgaattacttttttaaaaaacctaccagtaaaaatgccgtgtttaaaaataaataaaatctaatgatttaagatataagtgtagactaaatacctactt

SEQ ID NO: 351398 - DNA, 587 bp, Homo sapiens
aatactcactgctaagatttatcacaggaaaggatacagagtaacaggaaaaatatatgcaactgtggagtctagagaggtccagcacaggctttaatacctttcttatccaagatcatacaggtgtgttctttttctagcagtgaactatgaggaaatgtgtggattttctctgctcagcgaagcccaaataagtctcagggatccatgtttttggaagggtaaggaggtggggtgctagttaacataggcatatccagctgtgcaaccatccttggccacccaaaatcaggaccccaacaatgaaaccaggtgtacatgattaaccttggtgtttgtgcaaagcaaactgacaaaccagttcagcatggtccattgctccaggtgaatataataaaatcatcagtcattaacataaagaaccttctgagggccacattcccaggagttagtcaagggtcactcrtggttcccttgaagacataggagggagccaccggacttgctgtgttaactctttcctcacaatatgtagagcagaaccaaatctggctagaatttgaaaaagggatttcactgccacaaaa

SEQ ID NO: 351399 - DNA, 564 bp, Homo sapiens
ctgcagattgtatagcttataccaactgatgatcccagagtaagtttgtagtaagtgtattgcctaactttggttattttgtttgaaataacacaaacttggagaaataatgcctgaaagaaccagatcccttggataaagatgaaaaacgtcaatgaataaaatcaacatcaatgatacatatgtttcatttaaaaatgttttattgtgaaatatagcatcattgaaaaaagtgtatgaggctgggtgcggtggctcatgcctgtaatcccaacactttgggaggccaggagttcaagaccagcctggctggcatagcaaaaccacgtctctactaaaaatacaaaaattagctgggcgtggtggtgcatacctgtaatcccagctacttgggaggctgaggcactagaatcacttgagcctgggaagtggagattgtacaactgcactgcagcctgggtgactgagtgagactctgtctcagaaaaaagtttattaaaatctaatgtacagtttaaataggcrtgcatcattgcttcattaaactagtccagttcaagtggt

SEQ ID NO: 351400 - DNA, 627 bp, Homo sapiens
acgattaattaaaaggcagactagggtcatcatgtgaagatcttggtgttaacacaaccgtaattactatctgtcaacatttataataggttacgaattacaatttatttarcacagaacatttctgatccttaccacaaccttgtgaggtacttaaggaaggcatcaatttcttgttatgcttattggtacaatttattaatagtaccaatgtaaaatacataatcttgctatttatactgcatggcgttatagatcaaaggagaggatacacaaagaaacttatctggccttaagtcaattagagcctatttaaccaagcaagaccaacccatctaaaatgacactgtacctcaaaacaattgcatgatatagactaaactacatggcagaacgaagaataagtctggttcagagacacacatacctacacagtgcatacatgcatgaaggagggaaggaagcaaggaaggaaagaagaaaggaaagtagaacggtggagaaatcaatgaggccaggagagatcaggtaagtcttaatttaataaagagataggacctgaactgtgtctaacaataggtaatattagactgggggagagagaagactttccttgtaccaaggaca

SEQ ID NO: 351401 - DNA, 580 bp, Homo sapiens
aagcatttgtttctgttcaattccacccatatctatcttgagcacctaatacgtacatggcacccacggagggtgcgaacacataatggtcaaggcacaattccttagggcgttcacagtctgggggccatgttcctagtgttgtctttacattccctcaacttcaccagttgtttccrtccttcatagttaaaatactaactcaatattcttttgggataggtgaggaagaaaaaggaaaggaaagaagcatttatttagcacctactatatgccaagcactgtgccaggaacattatagatattgtcttatttggctctcaagtcgtcttctaagataagtattattatcccccttttgccaatgatccagggacgttgaagaatccatggagtggttaagcttggatttgaattcaggcctttccaccagaccacactgtcccctcctctttgtggactctcgcatgcccttagaatgcctttgacaaataagattccccccaacaaatagtacagtaaaatccctacttgttgtcctaggaattccaagttgaagtttctcattctcactttcaaa

SEQ ID NO: 351402 - DNA, 580 bp, Homo sapiens
aagcatttgtttctgttcaattccacccatatctatcttgagcacctaatacgtacatggcacccacggagggtgcgaacacataatggtcaaggcacaattccttagggcgttcacagtctgggggccatgttcctagtgttgtctttacattccctcaacttcaccagttgtttccatccttcatagttaaaatactaactcaatattcttttgggataggtgaggaagaaaaaggaaaggaaagaagcatttatttagcacctactatatgccaagcactgtgccaggaacattatagatattgtcttatttggctctcaagtcgtcttctaagataagtattattatcccccttttgccaatgatccagggacgttgaagaatccatggagtggttaagcttggatttgaattcaggcctttccaccagaccacactgtcccctcctctttgyggactctcgcatgcccttagaatgcctttgacaaataagattccccccaacaaatagtacagtaaaatccctacttgttgtcctaggaattccaagttgaagtttctcattctcactttcaaa

SEQ ID NO: 351403 - DNA, 502 bp, Homo sapiens
gtaccataagttgagccttgtgtgggttttggttataatttttcttcccgagagaacagaataatttgtaaggagggctagtcattgagcacccattgaaaaactgatgggtaaaatatgccttggatcttccaacagatyaagggcagaacaaagttacatcactcagctctccttattcctgatcacgaattcactatgaaaactcattgcttcctctcaataccagtgagtcaggccaaaatcgacacttggtgggtgggcacattgggtgcttctctcagggtgaagtctcaaggcatctcattcttgatttgaaatgattcaaatgggttgccacttctcttttggaacctttattcctttgtttttcctgggaaatcttcaggaagcctctggaagttcccttggatgagtgaatctgggttgtgggggaatgagagtgaggatgggaaaggaaggaagagagtaggaagtgggtagcaattacattgatttaaaa

SEQ ID NO: 351404 - DNA, 517 bp, Homo sapiens
caggtaatggacatttggttgtttctactttggggctgtaataaataatgaggccataaatattcatttttatacaaaggtttgtgtaacatatgtttatatttctcatggcaatacacctaggagtggagttgctgggtcatatgataactctatgtttaatattttgaggaaatgctaaacaattttccaaaatggatgaaccattttataatcccaccagcaatgtataagagttccaatttctctaatctttaccaacacttgctggcttttgtctttttggctttagttatcctagtgggaataaaatggcattcattgtggtgtttgattgcaatctcttattgactaatgctgagcattccttcatgtgcttattggccatttttatatgtttcttggagaaatatgtatttatataactttgattgggttacttgtctttttattattgagttgtaaaagttctttatatattcaaggtasaagttccttatgagataacaacttgcaa

SEQ ID NO: 351405 - DNA, 561 bp, Homo sapiens
caaacaaaacccagcatgttgagtaggcgatacatggctcttaataatagcatgagaagttttctgattatgagaggtgaagctggctgggcttctgggtcgggtgggagccgagggtcgacagagaggaaagccattcagctccgggattccaacaacaagttggttgactctgcagccatgagcagaaccctcaaagtcatgttgcccaagtaagactcgcccatctatcttatctatcctgacccttgcctcctgggtcctaatgcctgtcagacaaacttactctcrcctctcttctcggaggctagtcccacttctgaaaaccactccctgtctctggggcttttctagtttctcctataagaatgatttctagtataaactccaggactctattcccttctttaggcacccgggctcaccaatcagaaagacataatttttgcccaaagcctcatggtggggggtactatcttatgtagaattttaggatccctcctcagactagcaggcataacaaaagctattcctgaagctagaatatgaggatcctcagaa

SEQ ID NO: 351406 - DNA, 561 bp, Homo sapiens
caaacaaaacccagcatgttgagtaggcgatacatggctcttaataatagcatgagaagttttctgattatgagaggtgaagctggctgggcttctgggtcgggtgggagccgagggtcgacagagaggaaagccattcagctccgggattccaacaacaagttggttgactctgcagccatgagcagaaccctcaaagtcatgttgcccaagtaagactcgcccatctatcttatctatcctgacccttgcctcctgggtcctaatgcctgtcagacaaacttactctcgcctctcttctcggaggctagtcccacttctgaaaaccactccctgtctctggkgcttttctagtttctcctataagaatgatttctagtataaactccaggactctattcccttctttaggcacccgggctcaccaatcagaaagacataatttttgcccaaagcctcatggtggggggtactatcttatgtagaattttaggatccctcctcagactagcaggcataacaaaagctattcctgaagctagaatatgaggatcctcagaa

SEQ ID NO: 351407 - DNA, 569 bp, Homo sapiens
acccaagccaatagcttaatttttacagatgagaagacagactgcgatagataaaagagactgttcaagaccatcttacttgttacaagctgccaagagttaattgtccaatgtagccatgcyttgttttttaattgtatgccttctgcaaaacagaaggcatactgttaataccaaaccaaccatatactatataacatataaccagacccctctttactttcaccctaataactataccttgtttttacccactccatatctagccattctatcttatatctgagaaacatgtgatttctaatcctctaattttacctccttgttttagtaattttggaagtgacttctggtccctcacctggctctgacttcatccctggtacggattcactctctgctcaatcctccaactcaacgcatgatggaccaaatagttatcattctccattttcaactccttatctccatccactccatagggcatccagaaactgatatagccctgctccccaaccccagtctgagcttgtaaaaagccccatgggatgacatacttgaagggcctc

SEQ ID NO: 351408 - DNA, 648 bp, Homo sapiens
ttgcggcaaggctgcctgagcacatagctaatagcagaaggaaagtatagtgaagagaattgcagagtaatgacacaagagaccttagggcrttgtgagcatctgaatcaaaccacacctgaagtcaggcccacttcaggacttcacaaacatagttcctttaagctggtttgggttaaactttctgttgctcacaaccaaaggcatcttaactgccacatgtaattgctagcattatcactgttttgtggataagaaaattgcccaaggtcatagcatttgtaagagtaagatttgacccagaatggtctggccccaaaaccttaaccattaaccacaaattactgccttcatatatcaatatccctaaaagaggaaactgtgtctttcccgctggcattagcaagggagctgctgcttagtcctttcccttaaccctcaggctttctatggaacctcttttaaataacttcaactaatcacacacatccacaggactaaaatgctgctagattaatgattgaggctcatgggtacaaatagaattgttccatgtgattcccaggtcaggaattgatcacgtgtctccacgtgatctctctgtgctcagaagcaatcattcctggagcttggtgacatcacagaaaa

SEQ ID NO: 351409 - DNA, 534 bp, Homo sapiens
taaaaaggaaaaaaatgaattttaaaggaggcttaggaagacaaatcccaatgctaaaagaaaaggcaatataattaagactatgctttcaaaagctgaggtaaattatttgggggttggttttatagctctttctctctagagaataatataaaggtacttcaatatatagatttctgcctgtgctagctatcatccaagaatgactggcagattcccatgggtaaaaatctcccctaaacaaattcacatactcaggatcagcaggagagcttgattctgtcccttcttttcttacaagctgaggaggaaaacaagaggcccatgcaaattaagtcagtgtgcaagctaccattttttcttgttaatcaytggctaaaatgaataaaacacttaacctattatttggccaaatttcaaaatccctgaattatagtgcagtgttgatatcagtgggtgaaaaagcagattttctttcctgcctaattcagaaggtggaaattagatacactttaccttagcaagagtcagcca

SEQ ID NO: 351410 - DNA, 629 bp, Homo sapiens
acttatgttttctgaatgctactatgataagaatgggttggaagaaatgagggtagaagtagagagagttggtagtttgaactagggactagtttagttccagaaaagaaagaataaataaaacagaatgaagaaatatggaaggtagggcttgctratagattctatgtgggggcaatgaaaaggaaggaaggtttgaggggagggcagagaggttgagaaatcaacagctttgttttagacatggtaagtttaaaatgactgcttgccattgcagaagaggtgtcaatgagaagatggatacattaatttgaaactctaaggagagatcagaactggagataaaaatttgggaatcagcctgtagatagtattaagccacaagcctaattgagaaacattttgtgtactccataaatatatatacttactatgtactcacaaaaattaaaattaaaaaaagactagatgagatcatctagggataccataatgacagtgaaaagaagaggctatttttctttacctatttcttctttaatgaattaccaatatatatcctgtgaccattttttatttgaggatttcataattttgtatcattttgaggatgattttaatattaagaa

SEQ ID NO: 351411 - DNA, 537 bp, Homo sapiens
tctgtgctctggggagagggagatcacagcaattgtgaggcattgaactcagtgctgccctattataacagaaaacaaaaccagaccaaactcagctgatgcctgcccatggggggagcatttaaaccagccctggagctcttgaaaggcagtctaggccacaaggactgcaattctttggcaagtcctagtgctgaactggtcccagaaacaatggactgggggaccacaggacctactgagaaaccaactggggcagctaagggagtrcaggcatctctccttcccttaccacaggctgcatagctcttggctccaaaaaaagaccccttccctccagttgaggagaggaaagggaagaatagagaggactttgtcctacatcttggataccagctcaaccacagcaggatagggcactggtcagagtcatgaggccctctttccagacaacatttctagatacacccagggccagaagggaactgactgccttgaaggaaagaactcagtcctgtcagtattcatcacttgcta

SEQ ID NO: 351412 - DNA, 615 bp, Homo sapiens
ctacacagggtaattaacttctccctttgttttcccctctctcaccaggttactcatcaaaaacaccaattaaggtgatttttctcagcaaaacactctttacttaagacagatttatactatgcctgtggaaggtagaaatggakgtagttggtttttgttttaaataacattctttttcttttcactacgaacacacacacacacacacacacacacacaagcactaaaatattctggaagaatatgtactcaattattaaagagattatccctgatggctgtaatttagcaaagttgggagatttgcctgtgtgtgtgtatgtgtgtgtgttataagacactttttagttcccaagtcctacttttcaataaaaaattaaaaagtaaaaacattgttagtggagacagaaatttggggataatccttgatggctctccttcctcacatcctctccatttgcaagttctaccttcaggatgtcatatgcctacccacttctctctttctttactatcactgaccccattcatgagccactacttttaacttgagtaccacaatagcctcctaacatgcctccatgctttcattttgacaattcatcctttata

SEQ ID NO: 351413 - DNA, 619 bp, Homo sapiens
  misc_feature (1)...(619): n = A,T,C or G
gattttctgctctagtttcaccccgaacccatctaatgtcccccacatttattttcccaatgccttatttttcctattcatttactttctttttagctttgtgagccttcataaatcctctttgtaacaaggtagaattttttaaagtattgacttaataattacatggttaaagtcctgcatatcacagttcccmctagatacatgctcatgacccaaaaaaaaaaaaaaaaaaaaaaaaanaaaggaaagtaaattacagaaagaaagtgggaggggaggaaaggagaagttctcctgttccagcctcctcccaactctactcacacactgaatcatcctctctctttgttgttcctcattatcaaccccatcctcatctccctgaactcctttagctaagaggtgttacccatgtgatattccagtgaaaaccatgaagccatcggctcacattctgaccgcaccttacctttggacacatgctgtctaatgttgaagtctattttgtgtgcatatatcttgtcttcctgagtagatcatcaatttgaagggaaaattcatatcttttgattctctgaaaacccacaggtgtgtcacaatgctaggaacatagtgg

SEQ ID NO: 351414 - DNA, 619 bp, Homo sapiens
  misc_feature (1)...(619): n = A,T,C or G
gattttctgctctagtttcaccccgaacccatctaatgtcccccacatttattttcccaatgccttatttttcctattcatttactttctttttagctttgtgagccttcataaatcctctttgtaacaaggtagaattttttaaagtattgacttaataattacatggttaaagtcctgcatatcacagttccccctagatacatgctcatgacccaaaaaaaaaaaaaaaaaaaaaaaaanaaaggaaagtaaattacagaaagaaagtgggaggggaggaaaggagaagttctcctgttccagcctcctcccaactctactcacacactgaatcatcctctctctttgttgttmctcattatcaaccccatcctcatctccctgaactcctttagctaagaggtgttacccatgtgatattccagtgaaaaccatgaagccatcggctcacattctgaccgcaccttacctttggacacatgctgtctaatgttgaagtctattttgtgtgcatatatcttgtcttcctgagtagatcatcaatttgaagggaaaattcatatcttttgattctctgaaaacccacaggtgtgtcacaatgctaggaacatagtgg

SEQ ID NO: 351415 - DNA, 595 bp, Homo sapiens
actgaaaatctaaattctccttcagatctaactattaaaaaatatgaagcaattaataaagtatgtatgtagacatgtaaatagaataataatattttaaatgtaacctaaatgtttgaaggaacttttaaatagatttaaaaagaaaattaatttttaaaatcaaaataatttctgaatcttttctgcacacgaatgaacctttagggtcatgaaaaagctcaaactgatgtatttgagatgtaagaaggacaccagaaatggagtgcttgcaacccagccacctgccctgactggccagcctggtggctccttcctagaggagagatcaggtagggctcactggcatggagaaaagctggtaagtgttgctctcttagggaatctctgaacataaggaatggrgaacaaggagagggggaaaaaaggaggaactccttcaaaggacactttggtctgagtggcatccatggcagagaccatgaaaggaactcacagatgactctctggaatagagatcacgaagtgatgatggttcaagagccaactccattcccatagatgtgttttgattgactcactcagtgctttgtaa

SEQ ID NO: 351416 - DNA, 562 bp, Homo sapiens
atgaaaccaaaaggtttttttgagaagatttttaaaattcagctacactaagaaaaaaagaaagaaaactcaaataaaatcagtaatgaaagaagagacgttatgacaaataccacagaaatacaaaggattgtaagagactacaagaaacaattatacaccaaaaaactgaacagtctataagaaatgtttaaatcctaaatatgtatgtgtatatatatatatatatatatacataaaacttatcaagtctgaamcaaaaagaaatagaaaatctgaacataccaataatgagtaataagattaaatcaggaatcaaaaatctcccatcaaattaaagcccaataatagatggcctcactggtgaattctattaagcattgaaagaggaatgaataccaatcattctcactctcccaaaaaaatcgaagaggagggaaaacttacaaagggatttttatgaggctagtactatcctgatgctaaagtcagacaaagacactacaagaaaagattacaggtcaatattcctgatgaacgtaaatgcaaaaatcctctgaca

SEQ ID NO: 351417 - DNA, 316 bp, Homo sapiens
caccctgcagcagaaatcgctatcaggccacacccttcccaccagcgttgtgaagagaggggtgccmagctcctgcaccaccacatgaacctgacacactcttctctgtgttttaacagaggagatcctccactggagatcaggccatagatcttatctccatacttctgggtggtgtgcttgaggcctagaaaattggaaccaggccaacttaattaccctctgtctccttggggtctagcaccaactatgatgggggagtgaagtgctcccaggctgccaccaacaaaccactcaggcggagcagtaaaggcta

SEQ ID NO: 351418 - DNA, 477 bp, Homo sapiens
ctatctaatatgaatttcaccactgcaattatactataaaatatttgtttgtttcttttggttttcagaagcaaaattgtgtaggtagaccatggcttggctacttacagtatgacattagcgtatgtgcacacatctgtgttttctcatctgtagaaatggaaatatctaccatgcaagattgttgttagaaagtgcctagaatggccactgagtttctcctctctaccttcctcaccaacctccttcttctcctyctccttgccaccaactgcagaatctcagtcccgcaacagctgtcctgcctgaaattctcccggtagacctaatcacaccatatattccatagacttgttatgaaaattcatcttatttctttctgaattcaaaaaacccttgaaaaaatgtgtatcagtgagggtccaaccaggaaaaagaacgccactgcaagtgtttaaaatagcaaatgtttgcaca

SEQ ID NO: 351419 - DNA, 477 bp, Homo sapiens
ctatctaatatgaatttcaccactgcaattatactataaaatatttgtttgtttcttttggttttcagaagcaaaattgtgtaggtagaccatggcttggctacttacagtatgacattagcgtatgtgcacacatctgtgttttctcatctgtagaaatggaaatatctaccatgcaagattgttgttagaaagtgcctagaatggccactgagtttctcctctctaccttcctcaccaacctccttcttctcctcctccttgccaccaactgcagaatctcagtcccgcaacagctgtcctgcctgaaattctcccrgtagacctaatcacaccatatattccatagacttgttatgaaaattcatcttatttctttctgaattcaaaaaacccttgaaaaaatgtgtatcagtgagggtccaaccaggaaaaagaacgccactgcaagtgtttaaaatagcaaatgtttgcaca

SEQ ID NO: 351420 - DNA, 565 bp, Homo sapiens
gtatagagaaaagatactcctacatgacatgggtgggaatgtgaattggtacaattacagagagcaatttgacaataatcatccaaagttataacggcccgggcatggtggctcatgcctgtaatcccagaactttgggaggccgaggcaggaggatcacatgaggtgaggagttcgagaccagctggccaacatggcgacacccctactctactaaaaatacaaaatttgtcaggcatggtggcacatgcctgtaatcccagatacttgggaagctgaggcaggagaattgcttgaacctaggaggtggaggttgtggtgagctgagatggcatcactgcactccagcctgggcaacagagtgagactccatttcaaaaaaaaaggtatagtgtatagtttatgccttgcccttccaattctacctttttatcttagggaaatgcacaaagaygtgtgtgtgaatgctgcagcacttttttttttcaaagagcaaaatttgggaataacctaaatgatccttagcagaaaactaactgaaaatgtgatggtgtatgcagaaagc

SEQ ID NO: 351421 - DNA, 564 bp, Homo sapiens
ttgcagcaccatttattcgctatgtcacctttcagttgttttcatgtataaaatgaggataacaatttaccttacgggattgtagtgaaatttgaacaagataaggtagaggagagagatttgtaagctattaaatgctgtatgaggcagcaaaaaactatggccagtgtttgcaacttaccatatggaggatttcaattaaatctaagaaagaatatcctatagtgtaataatatagtccagtgcagaatgggctccctcatgtttcactgagccccttctccaggaagttttcaagcagaggttgtgtggccatctgttggaaatgtggcaaagaggacttccatcttagaagggagggcacctaatattatttctaatgattacttctgaatccaagatctgcratgagtgatatttggcaactggggtggcagtttcaggtttggtacaaactcagtaatgtgtagcaggaaacagagttctctgcctctatcacagactgtgcctccaacatgacagcagcaaaaccccaacacaatagagtggcaccaatatccaccc

SEQ ID NO: 351422 - DNA, 644 bp, Homo sapiens
aagatttgattcatagttcttctcactccagtaaattattcttaaaagtggtctgatatcataatgaatgaagaaatcaaggaggaaagaaataataagcaaaaaattcaaatattagtaaattctaaaaattatttgtatcctaacatatactttttattacatgttttcatttcacaaaaatgcacatctacataaatatttattatattataggaaaacatcattagtagctgacaatcaatgatttttaagcactattagagttgattgtcaggaagcattcaaaatcttgaccaaatgcaacccatattttcytaatatgtacttcacaatatctacattctctctttagtcatacacacacacacacacacacacacacacacacacacacccctacaattgcactggaaatacacatgctgtgttaggaatgaaatgagtccccaaaacatctctcttgcttatctgttagtttcaccgatggctcaggatatgcatttagaagtgaagatgctgccagtggggcattggcctctttcagcctctttagcttattatgcaagcctctagtcttccttttccatcccttaaatcctcaggtcacaaccatgtatctgaaagacagtcccccttgaggt

SEQ ID NO: 351423 - DNA, 587 bp, Homo sapiens
ctgactgtatattgtacacctgggattctgtcttgctgctactaataaaactctctcaacctttttgttctagaagagggtttgaggaaagtatcatagttaaatctgacttgactaacccgaaagattaagagctatgattaccgtgatgctttttgaaagtgcagtctagatactgtgtattaacaggaagtgtttcactgaaatccttggctttgccttgcttttgttatgcttcctagtctctatgttcccagagcatgcaactaacraagcacagttattaggcaagtttgaggcaaaggaggcctgtggtttgcatctctcagccaaatcaaacaactttttagaccagttactgttgctttggactcttcctacaattcttcaccttctctaatcttgattgtacctgacctcccctttgaaatcccaggtttgctattaaatacaaaatgactataggaatactgttaatccaattatgaattacaatactttcgataaatattaaccccattaatagtgtattttatagaaactacttaccacttgcttgacagtttgaatttttaccattttatacc

SEQ ID NO: 351424 - DNA, 587 bp, Homo sapiens
ctgactgtatattgtacacctgggattctgtcttgctgctactaataaaactctctcaacctttttgttctagaagagggtttgaggaaagtatcatagttaaatctgacttgactaacccgaaagattaagagctatgattaccgtgatgctttttgaaagtgcagtctagatactgtgtattaacaggaagtgtttcactgaaatccttggctttgccttgcttttgttatgcttcctagtctctatgttcccagagcatgcaactaacaaagcacagttattaggcaagtttgaggcaaaggaggcctgtggtttgcatctctcagccaaatcaaacaactttttagaccagttactgttgctttggactcttcctacaattcttcaccttctctaatcttgattgtacctgacctcccctttgaaatcccaggtttgctattaaatacaaaatgactataggaatactgttaatccaattatgaattacaatactttygataaatattaaccccattaatagtgtattttatagaaactacttaccacttgcttgacagtttgaatttttaccattttatacc

SEQ ID NO: 351425 - DNA, 605 bp, Homo sapiens
aagtttcttaacgagagagccaaatctaaaagcacacatgtttagatttaactgattaccatacaaacatccagtagaacttaaaagaaacccccctcaaaagtgattaagggaaaaagaacacaacaagtgttcagtkattaataaaagttcctagagagataaaatcaaagtgttttaataagtagtctatccaaatttataagctgtctgcacttagtcaagctttaaagtatctgcaagatcaggagagaaccatctatactaattctaaatacgcctttacagtggctcataaatttagaaaaattcagactgaatgaatagtaaaagtcaaagccttgttcatgaggagttaatcacccaagtgttgaatagccttcagttaccagaaaagaaaaaatagctattgtccatgtccccaggcaccaaaaagcctgtctttcaagagtcaagaaaataacctagcaaatcagataagctggaccagctgccatttctcctgtaggtgctaaagggaactcagagaaatgttattcaaaccttttataaaggcagtcctatcccacctacatcagaggatccattaaagaccccaagccatg

SEQ ID NO: 351426 - DNA, 605 bp, Homo sapiens
aagtttcttaacgagagagccaaatctaaaagcacacatgtttagatttaactgattaccatacaaacatccagtagaacttaaaagaaacccccctcaaaagtgattaagggaaaaagaacacaacaagtgttcagttattaataaaagttcctagagagataaaatcaaagtgttttaataagtagtctatccaaatttataagctgtctgcacttagtcaagctttaaagtatctgcaagatcaggagagaaccatctatactaattctaaatacrcctttacagtggctcataaatttagaaaaattcagactgaatgaatagtaaaagtcaaagccttgttcatgaggagttaatcacccaagtgttgaatagccttcagttaccagaaaagaaaaaatagctattgtccatgtccccaggcaccaaaaagcctgtctttcaagagtcaagaaaataacctagcaaatcagataagctggaccagctgccatttctcctgtaggtgctaaagggaactcagagaaatgttattcaaaccttttataaaggcagtcctatcccacctacatcagaggatccattaaagaccccaagccatg

SEQ ID NO: 351427 - DNA, 605 bp, Homo sapiens
aagtttcttaacgagagagccaaatctaaaagcacacatgtttagatttaactgattaccatacaaacatccagtagaacttaaaagaaacccccctcaaaagtgattaagggaaaaagaacacaacaagtgttcagttattaataaaagttcctagagagataaaatcaaagtgttttaataagtagtctatccaaatttataagctgtctgcacttagtcaagctttaaagtatctgcaagatcaggagagaaccatctatactaattctaaatacgcctttacagtggctcataaatttagaaaaattcagactgaatgaatagtaaaagtcaaagccttgttcatgagragttaatcacccaagtgttgaatagccttcagttaccagaaaagaaaaaatagctattgtccatgtccccaggcaccaaaaagcctgtctttcaagagtcaagaaaataacctagcaaatcagataagctggaccagctgccatttctcctgtaggtgctaaagggaactcagagaaatgttattcaaaccttttataaaggcagtcctatcccacctacatcagaggatccattaaagaccccaagccatg

SEQ ID NO: 351428 - DNA, 538 bp, Homo sapiens
gctattgtccatgtccccaggcaccaaaaagcctgtctttcaagagtcaagaaaataacctagcaaatcagataagctggaccagctgccatttctcctgtaggtgctaaagggaactcagagaaatgttattcaaaccttttataaaggcagtcctatcccacctacatyagaggatccattaaagaccccaagccatgtatagcacggtcaaagtttatacctgtataggaatttacacccttagccaaacaagtctagagactttgttgccaaaaatcaaatgtcttctgacttcctattaccctagtaagaatccaaactgcctctcaaagcaatccaacattcctgaatacttgctttatcttccactttctcttccttcagaactcacaattttccagtacaggcatcacccctagagtttccagtacattgacaccagcctgaggagccggcctagtgcttctaaccactgaaaccatagtccaaatagcaagaaaagatggacccatcatacccaagtcgagaaagcacc

SEQ ID NO: 351429 - DNA, 560 bp, Homo sapiens
tgttggttcatgaggtttaaggaaagaagccatttctaacgtaaaagtgaaaggtgaagcagcaagtgctgatgtggaagctgcagcaatgatcagtggtctcctaagatcgttgatgatgttggctacacagaacaacagattttcttttttctttttttttgaaatggagtttcactctgtcgtccaggctggagtgcagtggcacgatctcggctcactacagtgagcctctgcttcctgggttcaagcagttttcctgcctcagcctcccaggtagctgggattacaggcatctgccaccatgcccgactaagttttgtatttttagtagaaacagagtttcacatgtcggtcaagctggtctcaaactcctgacctcgtgatccacctgcctcggcctcccaaagtgctgggattacaggcatgagccaccatgcctggccaaacaacagagattttcagtgtagatgaaacatccttcttttggaagaagatgccatctgtgactttcatagctggagaraagtcagtgcctggcttcaaatcttcaaaagaca

SEQ ID NO: 351430 - DNA, 627 bp, Homo sapiens
  misc_feature (1)...(627): n = A,T,C or G
ggcttcctatattattgttaggaaatcatttttcatccagtaaaacaatggaactagatttttaaaatagatgatagatctttgtctgctaagtttttttaraaaaaatattaaatacattnttcactcagccgtcggaaaatgaaaatcttttatcccttttaaaactacatctgaaaatatcttatttttttctttggggttcgctgaacagtgtgaaagataactatagatctttgccttattcacttagcatgttgtgtaaaagattcttgttgaatttgttatggaacagataatgaggatggatcccttactctgaatgcccttcaaagtgtaatggcacagttcacaaaagaagtaatggctacttggtttcccttttgagtttgcaggaaattttatgcttattgttggtgttatgttcatttggagtatcattaattaagatccatctggtgcagtgcacttttagatcagcatacagcattaggaagtagatcctcctttgaggaattaatggtttgtgttttcttaatcatataagaagtgaaacatagaaggaaatttttatacagattccatttgtcctagctgtatactacccattaatggcttcaaaattaa

SEQ ID NO: 351431 - DNA, 627 bp, Homo sapiens
  misc_feature (1)...(627): n = A,T,C or G
ggcttcctatattattgttaggaaatcatttttcatccagtaaaacaatggaactagatttttaaaatagatgatagatctttgtctgctaagtttttttagaaaaaatattaaatacattnttcactcagccgtcggaaaatgaaaatcttttatcccttttaaaactacatctgaaaatatcttatttttttctttggggttcgctgaacagtgtgaaagataactatagatctttgccttattcacttagcatgttgtrtaaaagattcttgttgaatttgttatggaacagataatgaggatggatcccttactctgaatgcccttcaaagtgtaatggcacagttcacaaaagaagtaatggctacttggtttcccttttgagtttgcaggaaattttatgcttattgttggtgttatgttcatttggagtatcattaattaagatccatctggtgcagtgcacttttagatcagcatacagcattaggaagtagatcctcctttgaggaattaatggtttgtgttttcttaatcatataagaagtgaaacatagaaggaaatttttatacagattccatttgtcctagctgtatactacccattaatggcttcaaaattaa

SEQ ID NO: 351432 - DNA, 508 bp, Homo sapiens
tggtgggcacctgtagtcccagctactcgggaggctgaggcaggagaatggtgtgaacccaggaagcagagcttgcagtgagctgagattgcgccactgcactccagcctgggcaacagaatgagactccatctcaaaaaaaaaaatctgtatacaagtggttaacattttcwaaaatattcaagcttctgctaagtactagaaatgatccaagggatacagtgatgagaagagtaaacatagtagtctagtgagggagacagacaatagacaagcagcaaatacataaatacaaattctggtcagttacagaggaaagcatcaggatgccatgctggagaatgaaaggtccagcttcagtagggtagtcagggcagggactgcatttctgaagatgggacagttaagctgaaatttggaggtcaagaaggatgcagtcatgctaggatggcagagaaagccattgcaggcagagcagaagcaatgttttttgtttgtttgttggttt

SEQ ID NO: 351433 - DNA, 582 bp, Homo sapiens
tggttagttcaattcgggagctttctagcaagcctatttggttgtacacttaagccaaatcctttatggttacatcatcagtatcgaagctgacattttgaccttaatctgcctgaaacctgtgtggcttaactggttccacattcgggtgagaaagagaagtcttattttggaggttgcttaaacaccatcaaaatccacagacattattttcttttttttcctttggcccacatagtctttaaatttttttcaaatcagtttacaacttttaatattagggagcttttagctagagttctggatttccagcatatcatgataatttcaatgagttcactggggttgcatgccttgtggcaatgattcctgagaggggttggggaggggaggtagtagctgctccctttagataaagcatgyactttctagctctccccagttcccagctagttagggttgctgcatttagcaaatatgaatgcaagaagcctgtttaaatgtgcagaaaagataaacaactattttatttttactttttagtgtaagtaggtccaatgcaactcatgcaattcagttaaa

SEQ ID NO: 351434 - DNA, 618 bp, Homo sapiens
gtagcacctacactcttacttgtgataaccataagtgtctctagacattgccaaatgtcccatgtgggaaaacttgtccctggttgagaatcattcatttaaattactctgttgaattgggtaattcactacaatccagcaaggcaaagtctttgtggtcctcactgtgttcacaccatgctctggtctatgcagtcctggaagaaggatgactcctctgccaatctgtttcctactttgcctccaggttacacaagcatagcagcctgtgcccaactgtctcaccagactcaatttaaaaacctgctacttctgctgcttcctgagtcctttctctccatgagattcagactaggtctgtgaggctggagaagcaaagacaccacgacaccgccctctgacctgtgttccttctccctcttttgataagagtgtttacctaaaccttaggaaggtcaggagatggagggatatagctctaacttgtaataaacactatctgtcagggaggagatggtaataatatctacattacctctgcggtgctaacttctaaaatgaatgtcacttattttatggaaattmatggaaatttccagtctcctctcttttcccaat

SEQ ID NO: 351435 - DNA, 501 bp, Homo sapiens
ggtgtgtggcctcaactgagaatcaaagctctgagtgcattaaccttcacgtgtgttggggaatacaaatgcttgaaaaactgacaaacatttcttgattttcatgtagaaaaggtcttgatattgaactgcattcaatattcaatccaaattcctccaagtgttagactgtataactttccacaactttcttcatggggragaattatatgtctctaccagatatgtgactttccttggtcaaggaaatcttagaaagccatcgtgggcatcatctgctcttttccagctgccagtcaccaataatgtttctgacagtggcttcgctgacagcctatgtcctgaagtgaggataacaaggacctgagagttgagcccttagttgacttctgatggcaacataatgcgagcagaaaatagaagacttccttattttaagccactgagatttgggggttgtttcagcagcaaaacttagaccttcgtgactgatacaaaggg

SEQ ID NO: 351436 - DNA, 617 bp, Homo sapiens
tttatgaaatctagatgtttagtgggcagattttaagacaattgcaaaagaggagaataagagttaaaacaattataaagtagatatcttacatggttccataaatacatatttgttaagcattttctgtgtgccaggcattatattggaacagcataaacagtagtgaacaaaaattagcttgtttcttttcttcatagaagttatagcacaggaaatgtgtacaattagacgtgtagttcatcccaaactcccgctcctagatctttttttctctttcccacatgatgtgatttggctgtgtgcscacccaaatctcatcttgaattcccacgtgttgtggaagggaccaagtgaggggtgactgaatcatgggggctagtctttcccatgctgttctggtgatggttaagtttcatgagatctaatggttttaaaaaggggaatttccctgcacaagctctcttctcttgtctgccaccatgtgaaacgtaccttccaccttctgccatgattgcgaggcctccccagccacgtggaactgtaagtgcagtaaacctatttcttttgtaaattgcccagtctctgatatgtctttatcagtgccatgaacgtgg

SEQ ID NO: 351437 - DNA, 652 bp, Homo sapiens
gaacttcccagatttgagagtttagtgacacatacaaagattatggaataaaaataacataatcagagatgccatttattcagtgcttaatgtgtatcccaggtactttacatataatatttaaaaatctcataaaaccctataagatccatgtgtatatctcaatttttaaaaagtcttttgcctggtgttcagagaagctaaataatyggactgagctcgaagctaacaagtagaagggctggcattcaaatacaggtttgtcctaatggaaaaggccattttttccgtttgcattaaacattgataatatatctgttaacagtgataaatatacacaggaataataatgatagtatatgaaattattaagaataaaaactgtagagattctgtggcagaaaaatgaagttctcttcttcccaaagtgcagcagagtactcaaattgcaagtgtttatttattttatttggctttacttgttttgttccacttcttgctttcctcctttgtagaatcagtatacttaaaaatctacacacatgctcaagaaattatgaagaagccttaaaatccataaaagccataataatgataatgttactttatccccatgaagatttatacctagcgccaagatttatacctagca

SEQ ID NO: 351438 - DNA, 652 bp, Homo sapiens
gaacttcccagatttgagagtttagtgacacatacaaagattatggaataaaaataacataatcagagatgccatttattcagtgcttaatgtgtatcccaggtactttacatataatatttaaaaatctcataaaaccctataagatccatgtgtatatctcaatttttaaaaagtcttttgcctggtgttcagagaagctaaataatcggactgagctcgaagctaacaagtagaagggctggcattcaaatacaggtttgtcctaatggaaaaggccattttttccgtttgcattaaacattgataatatatctgttaacagtgataaatatacacaggaataatmatgatagtatatgaaattattaagaataaaaactgtagagattctgtggcagaaaaatgaagttctcttcttcccaaagtgcagcagagtactcaaattgcaagtgtttatttattttatttggctttacttgttttgttccacttcttgctttcctcctttgtagaatcagtatacttaaaaatctacacacatgctcaagaaattatgaagaagccttaaaatccataaaagccataataatgataatgttactttatccccatgaagatttatacctagcgccaagatttatacctagca

SEQ ID NO: 351439 - DNA, 613 bp, Homo sapiens
attatgatgttaaattagttgagtcagtttttcagaggtcccaggccacacaatgcaaatgtaatatttataacctcaaatgattcatagacaatactagkcagcagatggcatctctaaagattttaatgactgttttgcagagcctgctttacggcagatggaatggaggaggggagagacaggtgtctgggaactgttggaatgaggtagagtcaggtggttggcaggaattaggggtcctctggaaggaacagaggttaaaaagaaatagagtgagttggcaatatcaattaaaagtgctgtatatcaaagtctacaacacggagatgtggggactgtttatattttattttgggcccaatctatatgacttcaacattttttattgtagtctcttaggattggaactgaagtttaatatccactattctaaatgaccagccatatcaatggcaaggtcaataaggagtaagattaatacttccaaatatctgcttacagaaccactttgaaagaaagtgcttaaccaaactgagccttctaccctatcccgaaccccctgcagctgccatcatttcagaatagagagccacccaacataacagaaaaa

SEQ ID NO: 351440 - DNA, 582 bp, Homo sapiens
gattcaaatctcaaactctcttattttatacyggttttttttattatataattttaagaattaaaatattttttctattttgtaaaattatgtgaagacaagtaacctgtgtattttaatattttcccctttgataatataatttttaattttatgcatttatttgtaaaatgttttactaagatcaaaaagggctacatttcctggtaacagccacaagattgtctaaatcctacccttcctgcccacagtgtgaaaaatacgagaaccctaaattatgcacatatacacatacatcatgcacacatgcagtcatatatatgtatatatgtatatatgtgtatatatatacacttgtacatatatccagtcattttctaaaaagcagaacaaggaatttcaaaatagattttaaatgtcacgtttagatgtttgcttattccactatttaaacatatgcaggccagtacataaaaattagctacaaattagaccaatttttaaactgagctgaaaacaactgggaacattatgggtacataggttaaataagtaatttatgcttattttgtttttttatca

SEQ ID NO: 351441 - DNA, 582 bp, Homo sapiens
gattcaaatctcaaactctcttattttataccggttttttttattatataattttaagaattaaaatattttttctattttgtaaaattatgtgaagacaagtaacctgtgtattttaatattttcccctttgataatataatttttaattttatgcatttatttgtaaaatgttttactaagatcaaaaagggctacatttcctggtaacagccacaagattgtctaaatcctacccttcctgcccacagtgtgaaaaatacgagaaccctaaattatgcacatatacacatacatcatgcacacatgcagtcatatatatgtatatatgtatatatgtgtatatatatacacttgtacatatatccagtcattttctaaaaagcagaacaaggaatttcaaaatagattttaaatgtcacgtttagatgtttgcttattccactatttaaacatatgcaggccagtacataaaaattagctacaaattagrccaatttttaaactgagctgaaaacaactgggaacattatgggtacataggttaaataagtaatttatgcttattttgtttttttatca

SEQ ID NO: 351442 - DNA, 562 bp, Homo sapiens
tgcaatttaaattcacaagagcaaccccaaatggagtgggcgagtggccaaattacaaagttctatgcatccataggaatacacyagataattagggattctaattagaaaagtaatatattattatggaatgagctccaggcttctggaagctcatttaaaatgttaagtttctttggaaggtctttatgttttcttttcatttgaagacccaaattccttttgcaaaaatcagttttaacttaaaacctttaacatgtctgcctttaattaattttcagggttcaaggactgtacattgtaggtttatcctatcaatttgattctcaaatcctggtagatgtccccaaaagaagaaaagaaaaagcataaaactccatactcaaaagtgcccattagtcagctttcaccatgccaagttgtcaagcgatatcacagttatgatctttaaagcattcaaaaaaagctggagaactttgtgtgaagagctggattttatggcttttgtgtgtgccaaagggattgtccaacagaaagtaccctggaaagcctaattattact
